United States Patent Application Publication US 2004/0031072 A1 - sequence listing, part 5

SEQ ID NO: 19022 - DNA, 4062 bp, Glycine max
  unsure (1)..(4062): unsure at all n locations
  Clone ID: PAT_MRT3847_117180C.1
gaggccgaagatgggagaattgaacggtgggggtggtgagagtagattcaatggaggtgtgaataagtaaaagaatggagtctctttccgtcattgtcaaattgtagcaaacgtgggcgcggctgttcccaactccctccctcatattcattcatttctcccacccaaattcatcgccctcccaatttgggaatttttcgaaaccctaaaaagatgaacccctacgacagcagatattctgacgcctcttcttttcgcggccgtcgtagtgatttcgttggacctattccgccgccgtctttcgtcggccgcggcggcgcggtttcctacggcgtccctggacccaacgggttccgatccgcacccgttgctccggtcccaccctttgtgcctccttccggaggctttaatgtaggtcgaggcggtggcagagcgggctatggtcacgtgagtgatagaatgggtcgtagcggtggtggaagaggtcgtggtggtggcggcggcgggggcggtagagccggagctcacggttttaggggctccgggagaggaggacagacacggtggtggttcttctagggatgatttgaacaacattgcacttccaaagcaggattttaagaatttggtcccttttgagaagaacttctatgttgagtgccctgcagtgagggccatgtctgagcaagaagttttgcattaccgtgccagtgtccggatcaccgtgcaagggaacgatgtgccgaagcctgtaaggatgtttcatgaggcgaattttcctgattactgccttgaggttattgccaatctgcgttttgctgatcccactcctattcaagctcagggttggcccatggctctgaagggtagagatttaattggcattgccgagactggctcgggtaaaactttggcgtatttgcttcctgctttagtgcacgtcaatgcacaacctcgattggcacatggggatggtcccattgtcttagttttagcaccaacaagagagttggctgttcaaattcaagaagaggctctgaaatttgggtcccgggcaaataaaagaagtacgtgcatctatggcggcgcaccaaagggcccccaaattcgggagcttaaaagaggcgttgaaatagttattgctacacctggtcgtctaatagatatgttggaagctcagcacacaaacctgaagagagtgacttaccttgtcttggatgaagctgatcgaatgctagacatgggttttgaacctcagatacggaaaattgtagcccagattcgaccagataggcaaacactattatggagtgctacatggccaagggaggttgaaactctggcaaggcagtttctgcgcaacccatacaaggtaattattggctcaccatacctgaaggcaaatcaatccataaatcaagttgttgaagttttaacagacatggagaaatacaatagattaatcaggctgctgaaagaagtgatggacgggagccgaattctaatatttatggagacaaaaaagggatgtgatcaagttaccagacaaatgagagtggatggatggccagcactatccatccatggtgataaaaaccaggctgaaagggattgggtcttggctgaatttaagagtggcagaagtccaataatgactgccactgatgttgctgcacggggtcttggtaggatcattgtgtgtgtagaagcttaggatttttggtctaggtctaaaactttaacaatagggcgagtcggccggctgctgtccagtttcccttgatataatttgtggtttgggtgtgtacagggccatattgtcagtgtgttggaactgcctgtaacttgaccaagggtttaatgacttgcatactgagtgaaactgttttgctgcagtcggtagactgcctgctgctgttaatttgggaactatcttttttagaggtgtcaagttatatggatgcctgggtcagagttcctttgatatgtggcttggatgttgatctataacttgaggtagcatatcatgtgtgatcctgtaaattcataggatgggttaatgcatggagatttgcatgattggcataacaaggttagttatcaataatttgttagtgttgcctgaacagatataagtcaatttatttaaaaaacataaaatgtgtgatcaattatgattttccatcaagcctggaagattatgtccacagaattggtcgaactggtcgtgcaggcgctaatgagaactgcatacaccttttttacacatgccaatgccaagtttgctagggatctgattcagattttacaagatgctggttaggttgtgagtcctgctttgtctcccaatttgggaatttttcgaaaccctaaaaagatgaacccctacgacagcagatattctgacgcctcttcttttcgcggccgtcgtagtgatttcgttggacctattccgccgccgtctttcgtcggccgcggcggcgcggtttcctacggcgtccctggacccaacgggttccgatccgcacccgttgctccggtcccaccctttgtgcctccttccggaggctttaatgtaggtcgacgcggtggcagagcgggctatggtcatgtgagtgatagaatgggtcgtagcggtggtggtcgagatgatgatgatgctagggaaatcgtggtttaacgtcaggttcaaatgcttatcctctaggtgcgaagcggccctggcaatgtctatagttttgctgctgctttgggcaaattcttagttttacaaatgttggggtgttgattttgaacatgcatctatttgaccacaattacacttgaaacagcacattgttagattttaggacaaaaattgatcttattttttcaacgactgaagtctggaaagcatgtgttatgtcatacatgtatcttattttttttcatagacttgataagaacagtagcttgataatagatgatcaaaagctttctcactctctctatcctttgacagggaagacatgtagaagaagggaagagggataataggcattgctgagactggctcgggtaaaactttggcgtatttgcttgctgctttagtgcacgtcaatgcacaacctcgattggcacatggggatggtcccattgtcttagttttagcaccaacaagagagttggctgttcaaattcaagaagaggctctgaaatttgggtcccgggcaaataaaagaagtacgtgcatctatggcggcgcaccaaagggcccccaaattcgggagcttaaaagaggcgttgaaatagttattgctacacctggtcgtctaatagatatgttggaagctcagcacacgaacctgcggagagtgacttaccttgtcttagatgaagctgatcgaatgctagacatgggttttgaacctcagatacggaaaattgtagcccagattcgaccagataggcaaacattattatggagtgctacatggccaagggatgttgaaactctggcaaggcagtttctgcacaacccatacaagatgtgaaagacataaaatgtgtgatcaattatgattttccaacaagcctggaagattatgtccacagaattggtcgaactggtcgtgcaggggctaaaggaactgcatacaccttttttacacatgccaatgctaagtttgctagggatctgattaagattttacaagatgctggtcagactgtgagtcctgcgttgactgcattggttcggtcagctggttctggtcaatttggatcagggggaggttttcgctcaagaggacgaggaggctatggaaatcgtggtttaacgtcaggttccaatgccattcctctaggttcgaagcggccctggcattgtctatagttttggtgctgctttgggcaaattcttagttttacaaatgttggggtgttgattttgaacatgcatctatttgaccacaattacacttgaaacagcacattgttagattttaggacaaaaattgatcttattttttcaaagcctgggtaagaacagtagcttgncaatagaaaatattgatagttaaa

SEQ ID NO: 19023 - DNA, 378 bp, Glycine max
  Clone ID: PAT_MRT3847_117181C.1
actaatgaaagcggattttttatgacatcggccaagacaacggagacactagtgcgatatctgttaaaattcgggcggacagataattgtcggccgacgcgctaaaatagaacgagggccttaacggcgaaaaaaacacatagttgtattacgataataaattgaacgaacctacacggttacgaacagtcaaacgcatgcgcattaatctggtcaccagggacgacagaataattatgcgcactacatgccaaatgcagcaactaggacaggccattaactcttgccgcgaagatcacctatattaaggctcaaatgtgcgaagcaatcgaaagttccgtctacaacgatcatgtggcaaacacataatctaatgat

SEQ ID NO: 19024 - DNA, 420 bp, Glycine max
  unsure (1)..(420): unsure at all n locations
  Clone ID: PAT_MRT3847_117182C.1
gtcagttgtgtaaaccgaagccattaagaagctctgttgctcctaagtttgaacatgtgtttgttgttaatggttttctaaattagattcagtttaagattagatgagtgacaattttggtgtattgtattgtcgcaacctatcctatgactggacggtgaaggcaaattgataagccaaagcatttgtctccaagggagaaaattatcaaagtcgccaccaacattatttcaaggaaaatgttagaaaaaccgaaacgaggtttgcaaattttgaaaataagggtttggaagttgtttatgtgtggaaaggtattagnacccttcgcgcccgtnacaaggggcgacaacctttaatcgagaatgcggaacatgactgggaaattgtggattgtcgccatttatattttgtatttttttt

SEQ ID NO: 19025 - DNA, 412 bp, Glycine max
  Clone ID: PAT_MRT3847_117183C.1
ccagttaactgtacttattaacattcagaagtcagaacagacgctagttccatgctttcaatcaatttatgtttatttttcccaatcatgatgtcatgggactggctgctaaaaactattattattgttttgtcaacccgtccaagttctaatcttggagttgaataatcgacttatataatgagtgtgatgatggttatgaagtttttttattatgatttttctattttcaaatcgacttgcgatagcaaattgcaatgtcattaatttgaaaagtgtgtttttaagaaatttggtgtctgtttttctttctttatatatcaatttgtaaaatttgagatttatttttctgtgtgaataataccaatatattcatcgaatatcttttaaatgaatttttaatattaaaagt

SEQ ID NO: 19026 - DNA, 113 bp, Glycine max
  Clone ID: PAT_MRT3847_117184C.1
gtgcccttgagaactcactactttcgcctcttttacaacatatttaatggctcaaagccatcactccgcaccatttcctgtcatctgttctgtccatgtctgcgaccattgtc

SEQ ID NO: 19027 - DNA, 496 bp, Glycine max
  Clone ID: PAT_MRT3847_117185C.1
cgcccacccgtactaaccgcacgcacatcccacagtcgcccaacatggcctcccagagcgtgcaatgcttcggcaagaagaagaccgcgactgctgtcgcccactgcaaggccggaaagggtctcgtcaaggttaacggaaagcctctttcccaggtccagcccgagatcctgcgattcaaggtttacgagcccatcctgatcctcggtgttgacaagttcgctgatgtcgacatccgcgtccgcgtctccggtggtggtcacacctcgcaagtctacgccatccgccaagccattgccaaatccatcatcgcctactaccagaagtacgtcgacgagcactcaaagaaccagctcaagcaggctctgatccagtacgaccgcacacttctcgttgccgacaacaggcggtgcgagcccaagaagttcggtggtccaggtgcgcgcgccaggtaccagaagtcttaccgttaagcggtacattggcttgctggtgg

SEQ ID NO: 19028 - DNA, 327 bp, Glycine max
  Clone ID: PAT_MRT3847_117186C.1
gcaattttcttttggtaaaacctatgagctgaatttgctctataatatgttaaatagtccacttgaatacttgatcatgccttcatactttattaaattgatttcccccccccgcccccttccatttttgaaatttcagggcatattcatgttggtctcaggctattttaggctcccacatgatatcccaaagccagtctggcgctacccaatgtcatacatcagtttccacttctgggcactacaggtaaacatatagaactagcacagctcaattcatgaaagccatgcatgtgcttttattgcatctaactttgatgattcaaa

SEQ ID NO: 19029 - DNA, 859 bp, Glycine max
  unsure (1)..(859): unsure at all n locations
  Clone ID: PAT_MRT3847_117187C.1
cccacgcgtccgtacggcgagaagacgacagaaggggaaacacacttctataatggatcggaaaagcctcctctccctcgcaatcatcgccattgtcgtcgccgccgtcggaggacagtctccagcggcgtcgcccaccacttctcctccggctgccaccaccactccctttgcatccccagccacagccccttctaagccaaaatcaccggcgccagttgcttctcccacgtcatcatctccaccagcttcgtcccccaatgctgcaaccgcaaccccacccgcttcatctcccacagtagcatctcctccgtctaaagctgccgctccagctccggtggctacacctcccgcagccactcctcctgcggctacaccaccggcagccacacctcctgccgtgactccagtgagttcgccgccagcgccagttccggtgagttctccacctgctcctgttccggtgagctctccacctgcactcgcaccgacaactcccgcacccgtggtagcacccagcgctgaggttccggcacccgctcccaagtcaaagaagaagacaaagaagagtaagaagcacactgcaccagcaccgtcgccgtcattgcttggccctcccgctcctccggtaggagctccgggatcaagccaggattccatgtctcctggtccagctgtatctgaggacgagagtggagctgaaaccatcaggtgcttgaagaaggtcattggatgcttagccttgagctgggctacccttgttttgttcttctagagaagaggctgaggcttcattgctgctggtacatagnattattggatcatttattggcttttttggaccctgtcggggggctaa

SEQ ID NO: 19030 - DNA, 706 bp, Glycine max
  Clone ID: PAT_MRT3847_117188C.1
tggggacattaccagggtgtcgattcctaaagattatgagtctggtgctgtcaaggggtttgcttacgtagacttcagtgacgttgatagcatgggcaaagctctagaactccatgaaactgaacttggaggttataccttaacagtgggtgtcgccaaacctagagataatcagggttctggtggtagaggtgccggtggaaggagtggtggcggtcgatttggtggtaggagtggtggtggtggtggtggtcgatttggtggaagaggtggtggcggtcgatttggtggaagtggtggtggtggtcgatttggtggaagtggtggtggccgatttggtggaagaggtggcggtggaaggggtcgtggaaatagacccaaccttgctgcggaaggcacagggaaaaagaccaaatttgctgatgacgagtagggtggcaagtcttgcagatacttaaaaatttaatatttattttctaaactttcctgtagtgttggctccccagttttgttttggtaatccgtaattgttagtatgaattcgtagaaattctgttatatggttgatgatacattgttttatcgcatgaattattataatataatatttgtggctctcttcagaaaaaaaaaaaaaaaaaaaaaaaaaaaaaaaaaaaaaaaaaaaaaaaaaaaaaaaaaaaaaaaaaaaaaaaaaaaagggggg

SEQ ID NO: 19031 - DNA, 438 bp, Glycine max
  Clone ID: PAT_MRT3847_117189C.1
ctaatatttaacttcatattttgactaatattgtatatataataattaataatataaaagttggtgtatggacatgttgaaatatgattaataaataacttcataagtttattttggctcttgattttgcattaagtaaaggattataaaagctggacgttcatatgtttttatacccacttacttcttgatttattttctagaatgtgctacttttaatggtgaaaatgcactcctttaattacttttatttattttttaaaatgcacactcctgttaagaggtatgtacgaagctactgctgattggtatatagaaaatgtcttgcctgtaacgtataaatatatatatatatatatatatatatatatatatatatatatatatatatatatatatatttataaaaaatgaataaaagacgatgtgtgccaaaca

SEQ ID NO: 19032 - DNA, 390 bp, Glycine max
  unsure (1)..(390): unsure at all n locations
  Clone ID: PAT_MRT3847_11718C.1
ccctcgcgttcgacgggggccgcgcccgcccccgggcncactgtaaaataccccccgcgagccgaccccgacaancaacgcaccgaaaagagacncacggccaacgaaaagacacacaggaccaagcggccacacaaacccacaaccacnccgaaggaaaaaacagaaggncannngcnctacaaacagagccaaacagggccgcagaacaccgagaccaagcagccgaagggcacagacacggccccaacaacagcggcgnctgcgggagccccgccacaacgaaacgctgagccaaaagcaacagagacaaccgccagaaggaagaagaacaagccaaaaccaaagccacaaccgaaaccgctctgtctggatctgactccgccaccg

SEQ ID NO: 19033 - DNA, 259 bp, Glycine max
  Clone ID: PAT_MRT3847_117190C.1
gacccggtccggaattccggggcggaccacagccttcgcgccggtgtgaagacaacaacagaggtgtcatatggctgatgtaccttgatgaatcagaggcttattctttgtttgattaggccactactgtttgatagctggaggacacaaagaatctgcgttttgtttgctagatgacacgcaacactgagaatgtgtgcgagtttcaacgctgctcagaacaagctcttcgagcttaagaactcaggtcagcatctac

SEQ ID NO: 19034 - DNA, 1088 bp, Glycine max
  Clone ID: PAT_MRT3847_117191C.1
cccacgcgtccgtacggctgcgagaagaccgggccgcagtgtctgtgttacaacttacggctaaattctcaaagatttaaactttgtctcagagtttccaaattcacccaaccccagagagaaaatgtctctaatcccaaatttcttcggtggcagaaggagcaacgttttcgatcctttttccctcgacgtctgggaccccttcaaggattttcctttcccaaacactctttcttcagcttcctttcctgaattttctcgggaaaattctgcattcgtgagcactcgtgtggattggaaggagaccccagaagcacacgtattcaaggctgatattccagggctgaagaaggaggaagtgaaggttcagattgaagatgataaggttcttcagataagcggagagaggaacgttgagaaggaagataggaataacacgtggcatcgcgtggagcgtagcagcggcaagttcatgaggaggttcagattgccggagaatgcaaaagtggataaagtgaaggcttctatggaaaatggggttctcactgtcactgttcccaaggaagaggttaagaaggctgatgtgaagaacattcaaatctctggttaagcaaaagcaaattgttgttggtcttttgtgtttatctttgttgtttgagaaattgtgtgattttctatgttctattgtgagtgatatgcttgggagaatgtatcgtaggaggtgtgattgtataaagaaataaaatagttgcagttggtgagatatcatgtgaactctctcttatatatgtagcacatgagattttgcaatggagaagttatatttttttttatggtaaaatgagtagcagttttagtctgcacgtatcacgagcataggagttgtgtttgtcccacccaataaaatagttgtttaaacttggaagtcgggggcttttttttgttttaatgtagtgaattagatttgggccaaaaacgtgttttagtttatatggggttctggccctttccttttgttggtttttcaaggtttttttttgcttcctggggttaatgccatttaaagctttgctgaatgtttgttaccc

SEQ ID NO: 19035 - DNA, 708 bp, Glycine max
  Clone ID: PAT_MRT3847_117192C.1
ctcccatcacaacccactccgtctattctccaccggtcaccgtcaacaactctcaccatgtctgccccacgcgctacctctccctccaacacggcctcttcaggctcgacaaccgcgcgtcctgcgtcgccaaagcccccgggtggccctgcgactgttatgcgaaggaaggctgccgctgaccgcgccgagaagaccgcaaacctgcgtccaagcagcacaagggcggccggtgccggtggtagctcaagcactatgctgaggctatacactgatgagtctcccggtctgaaggtcgaccctgttgtggtcatgaccctgtccgttgtcttcatcttcagtgtcgtcgctctgcacgtcatcgccaaggtcatgcgccgattctccgcatagacgcatcgctagatgaaccttttcacaatatttgaccgattcccccacgttgaggttggccctctgttgcggcgaccacaacatttctctacacctcgatttgcgattacccgtgttcttttccttagcaactgttcccggccatgggcacaagtatagagagcatggaacgaaccggaaaagctatttaccaggatattcaccttgactgttgacccgggcgggacaatgggaagctcgtatggtcagggactgctagttttgcttgctgtattataggttcgcatcggaatgaggagttttgacaacccgaat

SEQ ID NO: 19036 - DNA, 115 bp, Glycine max
  Clone ID: PAT_MRT3847_117193C.1
tgaaccacccaggatttcctgataggaacctgcttacaaaccagcgttccctatagtgaaactaattacagcttgaaataattatggccatagatattccctcaacaaaatagcc

SEQ ID NO: 19037 - DNA, 349 bp, Glycine max
  Clone ID: PAT_MRT3847_117194C.1
gattcctaggatgatgcgtttatattacgcacgacacctttttccttttcaaattttgtgtcgccccaatcctttatccttctcttctcgccatatccattgtgcgactttgccttgccgccactataattgaatgtagaggacaaccgccatgacagtgcgtccttgttgttcaagacactgtttcagggacttcaactttgctagaagctgggatataggaaggtgtagtgtttttctaactccgtcacacctgtggagcttgtgaacaaggaagtttcagtgcaacaccaatatagcaatgtgctagtcttgataaggaagttattgtatgtgcactgtgatgcat

SEQ ID NO: 19038 - DNA, 218 bp, Glycine max
  Clone ID: PAT_MRT3847_117195C.1
cccacgcgttcgtccacgcgttcgaccactcgtccgaaaaactaaaaaattcaaaaacatacatgggtaattcacacaaatatgcattcatatatacataatatatagtactatatggcaataaacaaagatggggtcggtctcgttcaatatttgttgtgttgaatgcgagtgcctctgatgccacttgcttattgctgaacaaaactgcaacaggt

SEQ ID NO: 19039 - DNA, 582 bp, Glycine max
  Clone ID: PAT_MRT3847_117196C.1
ctgcgcatgaaaggattgctatcacaagtcctctgcactttaactgttctgttgcaagaagacaccaataatgcagcctgctaacgtccgtgctcccgtggcctgcctctgtgtctctcatgcaggattcaccctcttgatctctctcacgagatattgtatcacgaccgaccgatacgcaccatgaggaagaacctgttaagatcactcgccagagaggacgcagaggatgatgcggatggataaattcactttgaggaggtcgaaggagacaccgatttgtctgatctctcccacactcatcactctgggaggtgtcatcatgcatgtgcttaatatttacttgcttctccacaatagattactgtcgctagctcctaccgctgtgttatgcactttatttaatttcgctgcgatggactctttcgccattatatatatcatgataattacttactagctgtctgctcttgtgctgtactcaattcttattttctgtaaccacatatgtggaactttctcttgtgctcgtactcccatgatgaatatagtcttctgatgacgatgcatataacaaataga

SEQ ID NO: 19040 - DNA, 501 bp, Glycine max
  Clone ID: PAT_MRT3847_117197C.1
ggtctttagagaagaccgagaggtttctcaacaatggccactgccactgttttaatttcaactttatgcgctactttgggaacccattgtgtcattttgcgcagcccaaaacctgtattgtgtgaaccttgcagtctcaatcactgggcttctaactcttacaagctggctttgtggcctggctgccgtctttcacccctagcccaaggcctgtgaatccgcgagagccgaaaccgaacccggtttggtcgagcccgatccgacccaagttggcccggcccaacctccctcctgggaacccggtctcttcgttgtcgaaaggattgggggacgcctatatagtgtgacccgaggcgacctcgtactgtttagaggttaaacggtgctagcgttgatgatttcattgccttacacatggatgtactggttggcactgatacatcttgctacattgggaaactcgttgtgacaggagcgtgagtatacggcacgttggaagag

SEQ ID NO: 19041 - DNA, 241 bp, Glycine max
  Clone ID: PAT_MRT3847_117198C.1
aactcgcctgaggggcgtggttttcgacatggactgcaccctgaccgccccggtgatcgattttgcggcgatgtactgggcggtcttgggcgactaggaatacctgaggctctcagcgtagaacccttccggcatccacattttgggacacatccacggatggccacctcacaaacagcgcacgggatttgacgccattgctgaagtcgagcgacagggtctcaagcgcctacaaatcatg

SEQ ID NO: 19042 - DNA, 922 bp, Glycine max
  Clone ID: PAT_MRT3847_117199C.1
aggtgaagaactttatgctgaaagttattatctgtttaatttttccttgacattataaatactactaatctcttacaatttgtgtgagttgcggatggaaggtaggtttgctgaagaactttatgctgaaagtttacaactgtcaaaattagaactcacatccaccagtgctgatgatcaagaaaacaaggcaaacgtttgtgatggtgatgatttgagtttgtgggatgaatctgatgacaagttggagagctcgtcggatttggacagggagtggcagaggaggcacgaccaattccatacgattgggtatcgtgatggtcttatagcggggaaggaggctgctgcacaggaaggtttcaatttcggttttaaacaatcggtccttgatggtcacagttggggtgttgtaagaggtgttaccagtgctttttctcatcttatacatcaattaaaagagaggctgattgaaacacaaaagaaaaggaatgaattgctagggctgtatgaatctgtgcattccttgtcaacaacagattgccttagattgtttagtgaagaaatcaaagcacaagaagctttggaacagagtgaacactcagaagttagccatcatacagctggtttacaagagcagccttcccatggctctcaattgagaagttatcgtggacaacttgaatctctgctttgtgattttcctgccattgatattcatttacctgaaccaaaataaatggtgatctataattgtcaagtaatatactttagcatagaatgataatagctttttgcagcactcattttccatttttatgattgtgataacaggtcaattgacgttattgtttagttttattgcaaaatggcttttttgtaatggaaatttaattttctataaaaaaaattatagtttcttttg

SEQ ID NO: 19043 - DNA, 1081 bp, Glycine max
  Clone ID: PAT_MRT3847_11719C.1
cactggggttactgttcttaataatcttgctcaaataggtattgctcaaggggaggaagacaccactaccttgctgtcaattttcagtgatgctccctttgtggggcggcttggtggaggagttgtttctgaacattttgtcaggacaaaaacgatcccaaggaccgtctggatgacatgcacccagactcttatgctcgttgtttaccttctgtttgcctatgctatcaatggaaccctttatcctgcaattgcatttcttggtgtctgctatggtgtgcaagtttccgtgatgctcccaactgtttccgagctttttggtttgaagcactttggcgtgttgagcagcttcatgtcgttggggaatccgattggtgcattcctcttttcagcactgctagcagggaacatatatgacaatgaggcagcaaagcagcatggtataggccttcttctcgattctggcgtttcctgcattggtccaaattgctttaagcttacctttttcattctttctggagtgtgtgctgccggcatcgtcttgagcattattctgactttgagaattaagcccgtttaccaaatgctttatgctggaggctcttttaggctacctcaaacatcttcaaatcactgaaagtagtttgaacaatgaataaaactgagattcctagttctgttctgtaccagttgtgctggtattactttttggtctgccattactgcgatttatatgtagctgggcatcaattatgaagatcaaaattttggtatctcacatggaaaatgcctgtcttttttttttttttttttttgcgtgttaggctaaagatgatccgtctacctaagtatagaggccaattaatttaatataccacatgttttaatgtgatgatacagttactgagattaatatgtgtactattatgacttagtctaattttaaaatttgaaatttgctataaaaaatatggaatgggtttaagctcttagattttatgctccaaaacttttgacctcctagacatgcgattatgggctcatgattgtaatactcccctggtgtgtggtccagcttctt

SEQ ID NO: 19044 - DNA, 665 bp, Glycine max
  Clone ID: PAT_MRT3847_1171C.1
cgggttcgacctggtggaactcgactcgtttaaaaactactccgagggagagactatttccggtgatagctttccggcgctattgccgcgacttcgccgggcacaaagcatgttttctgagctacggcacgataggcaacgtggtgcagcagagcttccaatacttagccgccggagccaccggcggcaccggcgatgttaagcaattaagcccgaagaaaaccaaaggtccccgaaacttcggctttcaacctcccatttcccgaaaaacgccaacagggaagatcacccaatcttttctttttccctattcccgaaaaagggcaatggccgggcgaaccagaaaatttcaccttcgttccgggcaaaaaaagggcaaacgggccccgaccaaaacgttgtttcgcccttcgttagggaaccagagtcccaacgttgtccgggttcccgggtttctccaaataacgcttgagaaccgccaaacgcccgcccaacgaaaacttttcaaagggcttacggcattagaccttgaaccaaaccccaacaaacaacgtttttcaaaatatagttgccggcggcaaaggcgcccgtcgagaggtatctcaagctaccgcgaccagggccaaacgtcggcgccgaattctttaacttcgtaagccaaaacc

SEQ ID NO: 19045 - DNA, 230 bp, Glycine max
  Clone ID: PAT_MRT3847_117200C.1
ctcgaaggatgtcttggcattgatgacgactgcctcgatgttgatcttttaaaacaagggtgcatgacattaaagaaacttgatatctcaggttgccaaaacataagtcacgttgggttatcaaagcttacaagcatttctggaggtttagagaaactcatttcagcagatggttcccctgtcactctttctcttgctgatggtctgaataaactttcagtgttgcaatc

SEQ ID NO: 19046 - DNA, 1149 bp, Glycine max
  Clone ID: PAT_MRT3847_117201C.1
tacggctgcgagaagacgacagaaggggatgctgagacacaacgctatgataaggtgtgtcattgaggcatgggtttctatattatttgtttaatgttttgaacatgttactttatgttgttccattacttaacttgttttccttttgacaaaaacttgggcggccttgttttgggctgaagatattttcatacccctgtttgataattttttaatttgatgattaacatggatgtgaaccttttacccacataagccattttatacttagaaaataaaatctcttttatgtaattcgcatttccatgtattttattatataaatatgtatatcaggataaagggtgtcacatttagcagtcgaaattgcatcgacaattgcagatacagtaccattaacagtgtttgtaccatgtctacaccggaatctatgacacacaataccatgaacagtgtttgcacaatgtcgttgtaggattcctgcgtgcacaatgtctctacaggattcctgtcgcgcacagtgacgtaccacagagtctctgtaggattcctgacatgcacattgtctctacaggattcttgatgcatacaatgatgcacatagtgtctctacaagaaacctaacgggcacaatgtcgatgcacattgtctctacatgattcttattgcgcacagtgtcactgcatagtgatccgacaagattcctaacgtgtatagtgatgtgcacaatgtctttgcatgattcctaacacacccagtgatgtacccagtgacacacccagtgatgtacacagtaacacacccagtgatgtacccagtgaaacaatgtttaagcagtcatgttatgcaattttttttttaatttatctccaatacattaaaaaatgtgtggcaaatttatttcatatttttcatgtcaaaaaattcaaataaaaaatatatggtgtaatagtttcatcaacaacaacctcaaattaagaggaaaaaaattgtttccacccttgaaacaatgtttaagtggtcatgttatgtaatatttttaatttatctccaatacattaaaaaaattcatgacaaatttatttcatatttttcacgtcaaaaaatccaaaaaaaatatatcgtgtaacagtttcatcaacaacgacc

SEQ ID NO: 19047 - DNA, 237 bp, Glycine max
  Clone ID: PAT_MRT3847_117202C.1
ggattcagaattgacattgatcatggatgccaccattttgattttctagacctttgcaagtgccctgcgggggcgggtatggcattggatgcagttgccaacaactgccagaatctgactgagttgccaattgaattttgacctaacaacggtcatgaagggttatcagccattgggacagtatgcctccattccgaagctcatatccctcaaaagacctgcattggtgtttagtga

SEQ ID NO: 19048 - DNA, 559 bp, Glycine max
  Clone ID: PAT_MRT3847_117203C.1
gaattctcctcgcgtccggttttagatttcatcgtcgtagattgcaacctaggagacatgtccatgaagtcattcaaattagcacttttctttgtgattcttgccatagaggcctgctatggtgattcattgtcaaatgaacaattaacaaaggatcaagtgataactatagttccgtgtcaaacaaagcaggattgcattcgcaacattcgttttatgaagtgtggcccatcagtcgtattctgctatgaaggatattgtgcttgtaaacatttaaacaaagaatcaggtcattcattttcagaggatccaatgacaaagacaggaatggacagatctacttaatgaaacattttaaaaaaatgtgttttaaggttgtaagaatcaagggatccaataggatagtctagccatcaataatagtgtgaacatatatgattcatgcttgacatgtataaaattggagaataaaagaaaggtgtcccttattctattttatgagatcattttgagtcttattgaatcaaataaaggaataaatatataaaactctcttgga

SEQ ID NO: 19049 - DNA, 535 bp, Glycine max
  Clone ID: PAT_MRT3847_117204C.1
aaaccactaagaattgttcactgcttgttctagtcttcactaacaatgtttttgccccaagcagattctctcatttctatgactatgaaagccctcacccacaacacatgaaaacctacaaccaggtaagaaagaagtccccaaatacagaggtgttaacagagaacaaaggtaggtgtattcatataaaacattgacaccatctggacaaaaacagacaaaagcaaaatagcattcacattataatgattcatcaactcccacctagaagtctaaaagcttaatcctccgaaaattgtcagaaaatcaaaatggaagataaaaacaatgaaacatttttaagccattaaactggtggtggttacaaaaacaagcatagtatgatctagtgctcagcaattcccaaacatttacctgcagcaagatgagtaagttgagaggaaaaagagtaaaaaccttgagcttacattaggtgcgccaggaatgaccttagcaacagattttttacaggaaatcaactcttccattaagctgt

SEQ ID NO: 19050 - DNA, 1057 bp, Glycine max
  Clone ID: PAT_MRT3847_117205C.1
gcacgagcacaaccactgctagagttgagtacagtggcaattacactccaccttcatctccttcattgcctaaccttcccaacttcaacgacacgcgtgcggcgttgaacttcattacaaacttgagaggcttacctgagagagcccccagccatggctcaacaaacatcacaactcaaatagtaaccactatttcagttaacactttgccatgccctaatggcagaaacgactgccaggggctaaatggaaccattttctctgctagcatgaacaacataagctttcgaatccccaccattgacatactaaaagcctattactaccatatcaacggggtatacgaacctggatttccaacatttccaccgtttatatttaacttcactggggattttttgcctataacactgaatacaccaaagcaagggactagggttaatgtgctgaactatggtgcaacagttgaaattgttttccaagggacaaaccttgttggcgggatagaccatcccatccatctccatggctacagtttccatgttgttggatatgggctaggcaattttaaccaaagcgtggatcccatgaatttcaatctcgttgatcctccttatttgaatacagtgatagtgcctataaatggctgggctgccattaggttcgaggctgtaaaccctggagtatggtttatgcactgccatctagaacgccaccaatcttggggtatggagacagtttttattgtgaaggatggagagtctgaaaatctaagattgccaccaccaccgccagacatgcccccatgttgaagaaaattaaattctggattttccctattcagtgaactttgaaaacaataagttacacatttgttttacctttttcgtttctttcaggaaggcgtgtattgcaaatttagagacaaaagttctccgtgtgctttgatttgtcatgattttgttcttttattatttttggcacctgcactgcggggtttgtccatcaacatcggagatttataacattaaattttcctttaagttaaaaaaaaaaa

SEQ ID NO: 19051 - DNA, 333 bp, Glycine max
  Clone ID: PAT_MRT3847_117206C.1
ggcccggggaaaacagagactggttcccctggggacttggttttattaacatactaggaagagagcataaaaaaaaataatttggtgattttaaggacaaatccccaaaacgcgcgggcggaaagggaattaacacttttggaagggttctttatataacttacaacctccgccctacaaccaaattcacattaaacaaatgaggatattttaaagggctgggaaaaaaaaaaaccggtccctaggaggatacagtcttcttgcgaacaggaggggaaagcacaacgttgggcaaatttttagggcgttccggccggattttgcttttttttt

SEQ ID NO: 19052 - DNA, 694 bp, Glycine max
  Clone ID: PAT_MRT3847_117207C.1
agaagacgacagaagggggaaggatgatgaggttgtcaatggcagggtttcgaagctcgttgcccttttctgcgctaattagacaggtcgagcaagagatggaaactgtgatgaaggtgcttcagcctggacccttgggaatcatagagcacaagttttccgccgacgaaattcgcaaggctaatgccacggtttctaaagcagtgaccaattggcgaaccaatgcgatcctcgaagactacaatcacgttttaaaagactatattcacaacaagtgaagccaattttagttcctcccgccaaattttgacccaaggttacttccattttcctttggtgtgtgtgtgtgcctatttgtttagatgtatgatcgttattgaggtgtttaagtattgtaaatgctggttacttgattataagtttgtatgaagttattcaatagtatctgaactttggtatgattgttaattatgtttactataatttgatgatgtggagtgtggattgagttgcattattttgtttttggggttggtacccattgcaagtaaatgttgtcatccgtgaaggcgacgacaacaactagtctttgctttttgacgatctgaccttgttcggtgtcagcattgtctttttgtatgtcagctttttacgtaatctcttcttatggagtaaaatttgtatatttttagat

SEQ ID NO: 19053 - DNA, 503 bp, Glycine max
  Clone ID: PAT_MRT3847_117208C.1
tcgaggaaaaatcccaagctaaaaatccggttggtgacggtttggaagcccgctgcagatatgtgttaattcatccctccaagaagaagggtgccatcgccctccttacatacctgtataacctaccttgtacagccattatgtcgactaagaggcataacggctccgtccacaaagctatgcgtaaaaagtcctaccctagtaacacccaatgcacctgtaatgtgaccaaacctgctgttgttatcaaagtcaatcctctgaccggcatcctaatcatatggcagaggactcacgggccacaaaatggtgctatgccatctaggagcactgagcacccccgtcttaataacatccctaatgatcaactgagaactgatcgcccgtgtctgggatacaatatgaccatcgcaagaccgtcttcggatccgaaacctgctttgatggtctaaggggctacggtgcgcacagatacccctattgcctatgatagcggcaatgac

SEQ ID NO: 19054 - DNA, 432 bp, Glycine max
  Clone ID: PAT_MRT3847_117209C.1
tttttgcaagaccaaaagcatatccacccaataaagtgggggccaatttatttgtttaaactactatccatcacacccttttgaacattcaataacggctgactacatactgaaccaatttttaaccttgtaagtgcctccgaaacccctaaactgcctgcggtgaacctgcggactgagcaagagattaccatgaatgctgctccacaggaaacttcgcatataagcaaaaccaaaaaaatgggtttcagagcgctccagaaacataaaactgtaatttctgcggaaagggtagcaattaaaaagctctaacttttgccggtgaaataatacctcatattgatgaataaaaacctccaatcctccatcttaaatagagacatatatcaaaaacctcccaaaagatagtgcagctgtaaaacttgagctgat

SEQ ID NO: 19055 - DNA, 485 bp, Glycine max
  Clone ID: PAT_MRT3847_11720C.1
caatcttgcaaggactattgggacctgatcacaataaccaaacccaacaacaacctatgagttttccatatcatacaacaagctatggattaaactctaatgaattggttccttcttggtccaaagttcctcaattcttgagagcttcccctccaaaaccaccacccaataaccagttgcatttcactaaccccgcaaccttttggaatgcttctgaggctgcaaacatcaaagatgttcgccccagcttcttcccttcattgcaaccccctttctctacgccaaattttgaagtacagtcaaagaatatatctgaagttagggagtcaggtactgtggtaaagaaaagtgggaatgagccagcacccaaaaggacccgtaacgaaacaccatctcctttgccagcttttaaggtgagaaaagagaagatgggggacagaatcactgcactccaacaattggtgtcgcctttcggaaagactgat

SEQ ID NO: 19056 - DNA, 1008 bp, Glycine max
  Clone ID: PAT_MRT3847_117210C.1
cgagtcaagtcgtgagtgcgggaggacgacagaagggggaagcagaggcgaagtggtgccgtcatgccataaaccccagaaagcacaagcatatgaatatggcgactcccaaccctaacgtcgttttcatagacaccaacctcgatacccacttggccctcgtcgtttccgaccttgacactgtctccgacctcaaaagtaatctttttatttatttatttatttatttctatctcttcttcaattttttagagactggttctggaacaattatgccttacttggttcataatgcttctcttccattgtagtttatgcaataaattccatcaccttcttgtcaatagactttgaactcagtcgtcgttttcttggagactattctcaatagcgacctgcccctcgtcaactttaaatgacatactgtcttcaagttcaaaaagagtattctgtcggaacatcctttatgctttccgaaaattgggaaaattctttttcatgggataaaggttgagcgcaaggggtacttttaccaccttacagattccatgcctgtgagaagtgccttcaggggcatcaatgggagctggtttctcagtgttgatgtttctgtgttgagggagtgttctcagaatgagcaattattttctcacggttcccctaaccaggtggccactcttggcattgcaaataatgctttattgtgggttctccatccaagagggtgtccacctttgaccatttcaagttgcctcagttggagaacagacaaaatgaagaaattcatgttgctagtccatgtgtttcaaaacatactggcaaaggagttaaatcgtctgctgacaacgacatggaaaccccattacctggttctgttcatgagacagaggaccattgctttgtaaatcgtgaactgccaagtttaaatattgagtgcgaagtagatggatctggtaaaggaattaaggatgatcataatgtatgtgaagagactcctgtgtcaagggt

SEQ ID NO: 19057 - DNA, 432 bp, Glycine max
  Clone ID: PAT_MRT3847_117211C.1
cccactcggggtttttgtctttaccatgaaagccgccccttacgagctcttccgcctattcaccatagcataagggctgctcactctcaaatgtcatgctcccaatccacatgatcatgatggatacaccctcaacgtgttgcatgtgtccatactatgtactccatatacgccctcagagccgatgtcgaggtaagagagcatactctagctactaccgagggaccaacccaggatgcatcacctgactagcttggtggctacgaggtccattacaccaagagcctgaaggaggtaaatcacataacgccgtacttacctatggaacgctcagattgctacatcagctcacactctcctgaatctgtgaacactagaaatgatgcttgttgggtacgatgatatgcttgcgttggatggtcaacaacgcac

SEQ ID NO: 19058 - DNA, 280 bp, Glycine max
  Clone ID: PAT_MRT3847_117212C.1
gttctccaaaacttggaaacctaagaagacaggcacgataactggccctgttgtttttggaggttagtattttctctccatgctcattttctttgagtaaattacacttgcaatccctgaattttcatgagattgcacaaactccccatgttttttaaggattacagctacctcccttgaaagggggatacggtatcatgtttttcaaacaatgaaggtggttagtgtaatagtttttaaacaattaagggagttagtgtagaggtagaaaacataggaa

SEQ ID NO: 19059 - DNA, 380 bp, Glycine max
  unsure (1)..(380): unsure at all n locations
  Clone ID: PAT_MRT3847_117213C.1
gggccggaagcannngaagggggggatatttagaactgattccatatttttccccagccgcgcaagctcaaagngctgaagtttacttagacttcttccctgcggaggtcgatagtcaagagggagtcgctcatattggtgaatcgaaatccggtgcctatgttccaangnctacaaaaactaattaggcggaaactcccaaggaatggcaactggatcaaacctgtgacaaaattcctagtgtcttgactacaaccgaagagagacccccnnncacagaacacgagggatatgaaccttttcttgggggaaaacaaaaatatgccactcccaagatgcccctagatgaagaaattctttctaaggatgcacaagatatg

SEQ ID NO: 19060 - DNA, 482 bp, Glycine max
  unsure (1)..(482): unsure at all n locations
  Clone ID: PAT_MRT3847_117214C.1
atcatgtgtacttttgaatttaaaaatatgagtatcttttttttcagtttggcgcttttttcaaaaaacaaagcaaaaggcaacgggtaagaaatctcccactaaacagtttcaatttctttgcaagaaaaagggaaccaagtcctcccccctctttcttagatgggcaaataaagcctctcctttttttttccctccccagggggaagttacacaccccccttttctttttgttgggcaaaaaaaaagccaccatttctgaagggcgggttttttcatcttccaggggggattgggaaaaaactgggccccgcctccccccgcatactttttaacatccacgctccgccggctcaaattttgttccccttccctttttcttaccnagaaaaaaaaggggggcttgggtttttctcggggggcctcaaaaaagaatttgtttttctccccacaaaaggggggggggggggaaaaccccccca

SEQ ID NO: 19061 - DNA, 415 bp, Glycine max
  unsure (1)..(415): unsure at all n locations
  Clone ID: PAT_MRT3847_117215C.1
gcagcgtcagaggcagcgaccgagtcatgctccaattcaggtaactaactatgcaggagaattgggaacagtagctgatctaccagccgaagaagaaaggttgcatcaagagtttggtggtattgatgttggaggagagatggtgggagatgggagaacgtgtnnaaggaaggctagctntttggttgctaaagcattgggtgtggaaaccagtcagggtgagggttttgcagcaaatttgtttcattgtaatgtatgcttggacacggcaagagatccgggtttgacctgttgtggtcacttgttttgctggccatgctttcataagttgtcgtatgctgattcagatgtcaggaaatgtccggtttgtaaaggagatgtcccgtgagaaggagtggtcgcagtatatggcagt

SEQ ID NO: 19062 - DNA, 846 bp, Glycine max
  Clone ID: PAT_MRT3847_117216C.1
cagctttgaaatattgtagagtagagctgtcgattccaccaaaattctgtgcttcattcccaccaaaattctgtgtttcattcgctaacaaaaaagaactcgtttttacttggtgaattccgcaataactcacaattctatgacgaggacatttgaaattgctaaatacaatacattattcagtacagaatgcttcacagcatagcttggatttaagctttcctttacactcgaaaaagcgctccctctaatctctattatcctctgactatgtagcgagtctgacacattgcataccagggtagggtggtgcactagtgcaacttcctctcaaaagttgacaagaaattgatgataattcctgcaagccactgctttgagcctggaatttaggacaattcccttttgataaaatgcctacttcagcagcatgtttctcatgatttctgataaaaatttcaaactaaactagcctccctgtgaaatacaattgcttcttaatgattgattttgattagggcaaagtggatatacggtatcaaatacaatccttgcgaaaacatgtcgtacttcttgcaggttacccagagctaaggactggtaatcaattttcctgtgttgctttgacaaaaatttcttaacggtactccttctcacacagtcgaacatgttgtatacttttacatataatgttatcgggatgaatacctgtaaaattgacaaagcatgaagaaaaaaatcaagaaagttattgtagtgtattacacttatcagtcaaaacaagacatggcacagaaatggaatctacatcgtcaaattaattttaaagcaaaatatagtccttga

SEQ ID NO: 19063 - DNA, 511 bp, Glycine max
  Clone ID: PAT_MRT3847_117217C.1
ttgatacttgtgatcatcgaaagtcactgtagtctattttgtctacaaaatatctggactgacggagtagaaacaactgcaacacaaggggattggggataatttcaatacgtctagtgtttgcaaaaatggaagaagaaagtgcgttgaggccgatggacgctgagcaactgagagagcaggctcataagatggtcgacttcattgccgattactacaaaaccatcgaagacttccccgttctaagccaagttcagccaggttatcttgggaagcttttaccagattctgcacctgattctcctgagtcattgcaaaatgttttggatgatgtgcaggaaaaaatactgccaggggtgacacactggcaaagcccaaattattttgcgtattttcctttcaacagtagcattgctgggtttctaggagagatgctcaatgcgggtcttaacatcgtgggtttcagctggataactttttctgctgcaactgaacttgagacgattgttct

SEQ ID NO: 19064 - DNA, 1271 bp, Glycine max
  Clone ID: PAT_MRT3847_117218C.1
tgatctcgagcggcgaaagtcactgtagtctattttgtctacaaaatatctggactgacggagtagaaacaactgcaccacaaggggattggggataatttcaagtcagtcttcttctctatcttccgttttttctgagaaagtaacaaatgtgagtcgctaagcgtatcaaactcgtgaacacagttagttaattagttttctcattctcattcaaagtacgtctagtgtttgcaaaaatggaagaagaaagtgcgttgaggccgatggacgctgagcaactgagagagcaggctcataagatggtcgacttcattgccgattactacaaaaccatcgaagacttccccgttctaagccaagttcagccaggttatcttgggaagcttttaccagattctgcacctgattctcctgagtcattgcaaaatgttttggatgatgtgcaggaaaaaatactgccaggggtgacgcactggcaaagcccaaattattttgcgtattttccttccaacagtagcattgctgggtttctaggaggatgcgtcagtgcgggtcttaacatcgtgggtttcagctggataacttctcctgctgcaactgaacttgagacgattgttctggattggcttgcaaaggctttccagctgcctgattatttctattctagtgggaaaggtggtggagttatacagggaactgcaagtgaagctgtactagttgtcttattagctgcccgtgacaagatcttaaggagggttggaaggaatgcccttcctaagcttgtgatgtatgcatctgatcaaacacactctgctttactaaaagcttgccagttgaaatgttttttcacttctccttggcagatagcaggaattaatccagagctatgcaggttgcttaaaactgattcttccacaaattatgcactttctcctgatgtgctttctgaagcaatttcaaatgacattgctggcggtcttgtaccctttttcttatgtgctactgttggtaccacttcatcaacagctgttgatcctctgcctgcattgggaaaaattgccaagaccaacaaacttttttttcatgtggatgctgcttatgctggaagtgcttgtgtatgtccagagtaccgccactgcattgatggtgttgaagaaaccgactcatttaacatgaatgcacataaaatggttcctgactaactttgactgttcattactttgggtttaggacagaagttctctgattcatcattggctacaaatcct

SEQ ID NO: 19065 - DNA, 332 bp, Glycine max
  Clone ID: PAT_MRT3847_117219C.1
gcacttgatcactgtcacttgcattccatgtggatatttaaatctaccaaatagttcaaaatttcaagccccagcctttggtttcgatttttgtttcttagcatccaatgatgacaagcccttgcctagtccaaccggagaatgtgatccaactggagcatgttcctgttcttgcacaggcattgtttggcctttcttggcatcaattgaatcacttggaggaatgtcatttgcttccttctttgctccgtctgcattcccattgtccactgcatctggagtcacacctgaatttataatattcagaagttgggtaaggggtggcaaggatt

SEQ ID NO: 19066 - DNA, 234 bp, Glycine max
  Clone ID: PAT_MRT3847_11721C.1
acaacaatacattttatacattaatttttttttttcgttgcaagtgtattttctaaaccaagagagagaatccataccccaaaagcaagctaaatactagtttgagtacactaagttctaatatagtacccctttatcccaaataagagaaaaccttgcttaacagcaaaaaaaataatggtatatactatcaaaataaaaaacaaaacaaatttcagcgggtccatgtaatgg

SEQ ID NO: 19067 - DNA, 3607 bp, Glycine max
  unsure (1)..(3607): unsure at all n locations
  Clone ID: PAT_MRT3847_117220C.1
aacagacaataccaacattttattaatgataataatgtcatacaaaaattgcagcaaaaaattctacaggatagattatgcattgaatttgcctcaattcagcatcaattaaatttgttacagatgcaagggttcgttatcaaaatgatcgtcgttaccctatatccccaaatatataatttactgaaagattatcagtaattgaccagacaaaaaatgcacttgatcactgtcacttgcattccatgtggatatttaaatctaccaaatctacagagaaaggacaaaaaaaggcgccaaaattatttctgatcgctacaacactcttcaaaaaaaaaaaactgagcaaagtactggtcaatccaaccatctcacaaagaatatttgatctcaaataaatctaccattgccaactaccagagcttacagttcaaaatttcaagccccagcctttggtttcgatttttgtttcttagcatccaatgatgacaagcccttgcctagtccaaccggagaatgtgatccaactggagcatgttcctgttcttgcacaggcattgtttggcctttcttggcatcaattgaatcacttggaggaatgtcatttgcttccttctttgctccgtctgcattcccattgtccactgcatctggagtcacacctgaatttataatattcagaagttgggtaaggggtggcaaggattggactggtacaccgtggggacgaaccgacagggccccttgctgcagcctttttcctgacttcggcagctgcacgtgcagctctttcatcaattccccttcctctggaaagtgcctcacccattactgcagcattgagagatttgttagcagatgcacctgaacttccagatcctccagcaactgcggcagcttggaatgcatgtatcaaatcagggtgagccttcaagatatcaatagccttctgagctgaagcagcattcagagcttgacccttttgtttttgagcattcatctgtagctcacgcatcttaaatgtgttcatccaattctgcgaatcccgtgtccttgaatcatcttcaccaagttgtttgaccagtatatcatatgttttcttctcatgctggtgagagagcttgaaagcacccatacaattaaatgcaatagcaagagcatgataacaaacagcagtttgaatatgttcctctccaagaagcctttcattcttctttaaagcttcttgtagataacgaagagctgtgttcatctttcctatatcctgatacatcattgcaacattgataaatgttgctgcaacatcaggatgatctggccccgatgaaaaacttaataatagcaaagcacgggacatatggcgaagtgcaagttctgtctggttaagcccgtggtagaacagagccatatttccataactgtgagcagtatcaggatgatctagaccaagacaacgttcatttataattagctccttgtgttgttgcataatagccccagccatatctccagcatgatacaaaactcatggcaagataccgacagcaattagcaacctcccgatgcatgggaccagtcacctgttgtagaatcgagaatgcctcggagaataaagtgtaggcttcactgagcatgccctcagccaattgaagttttccagtttccacaagttccttggcttctgaacaggcaggaactgaatgcttgacaaccggacggagatctaagacatctgatgtttggaagggagttgcagaactaagatcatatttacgagctgcaacagttataccaaccttcagacagagattacgtataagagaaattttcttgacacgcgacctagcatctgctggcaattcaaacttatatttaaccattgcaaattcttgaatgtctaaccaaagagcttccgagctgatacttgcatacaaaggttgagtctttcttaaagatgccctgcctttccaccgagctagccctttggaatgtttccctggagaccgttgccctgcatgttcctttttaggagtgttggactgcgtgctattagcaggaacttttccactgggagcttgacaacttcccaaataggcaatttaagaaatgagatactgctggtgcaagatcatggtcctctgtctctctcaataaatccttgataatatgcttagcagatctgacaacaatctcactattacaaagatcccacagatgaggtagatgtttagtccccccagccactctgccaatataacgaacattaattccatgagcatgcaatgcttcagttaagtgtctggccatccattggcgaaacttcaagtgtacataggtcttgtataaactttggaagtaccacatctgtaagatattgactaacttttctaacattatcttcatcagctgctatttcctctggactcccagcaagtttgaattcagtgaagacattaggattaaaaacaatatcctcacaaccatcagaggctttggcaatcacagaagcaagctctttaacatcctcagctttttcttcctttgttgaatccagcttgtcagcatcagcagcattttgggaatcatttaccagctggtcagcttcagcagcattttgggattcagtggccaaactgtttgcctcttgaaaattcttctccttagatttcaatgcctctgctgcttgggcctggcaataggcagtaattaattctggtctcaagatacaaaatcgggaaccaggtccagtatagttggcatcacgaggagttactctcaacaaatcaagaagataatgtcggtcatcaccaccaacaatgcccttgcattccactggtgcagctaatttgaaaagatttccagatccatcaaggactaaatgtnccttcaaatgaaggcatttggcagcctctgacaccttagaatgaaaatcttcattccagcaaattttctttccattgtcaacagagccatacaagagagagtctgacttgtccccttgaagaatgcctggtaagacactctgagctaccactctatgacccctgtagtcaattatagccatagcaagattataaagtccaggaacatcagcttcttggtaagcctttgtgcccttcaaatcattgtttgcagaagcatatgtggcttgctcattctcagccagctgagcttctggagaaacatcttgagtaatttctgtgccattaagatcttctgaacttgaactgtcatctttacccccattaggaacctgactttctccatgaagtggaatggaatctttatcagaagaactttgcaaagtgctggagctccaagattttgaattagcatccacacgtttctttggcagcttctcaaggtcagcatcaatagcaaaactaaagaatatattgtgcacatacatgtgaaagcattcagggtcagttgggtttatcggaggaatgcaaccactgatcactccaatagcaccattaatagctgcatcaacaaagtctgatgtcactttataaagtgccctatcccgcaaaatcctctcctgaggagatgtatgaggaaattctctacaagactgcagctcttcattccagtctctttgcatgcc

SEQ ID NO: 19068 - DNA, 800 bp, Glycine max
  Clone ID: PAT_MRT3847_117221C.1
ctcgagccgcattggttggaataactggagtgatatcggaaatccagaaagagaagaagggacgagatgtttacattctgggttcagctaatgttgggaaatctgctttcatcaatgctttactaaaaacaatggctataaatgatccagtggctgcatctgcacaaagatacaaaccaatacaatctgcagttcctggaactaccttagggccaattcaaattaatgctttcctaggaggagggaaattgtacgacactcctggagttcatctctaccataggcaaactgcagttgttcattctgaagatctacccatccttgctccacaaagccgactgaggggcctgtctttcccaagttctatattatcttcagtagaggaaggagcttccaccatagtgaatggcttgaatgcattttcaatattttggggaggtcttgttagaattgatgtcttgaaggttctcccagaaacttgtttgacattttatggacccaagagaataccaattcatatggtacccacagagcaagcagttgaattttatcagacagaacttggagttctgctgaccccaccaagtggaggagaaaatgctgagaactggaaaggacttgaatcagaacgaaaattgcaaattaaatttgaagatgtggacagttatgatcccaaaccagcttgtgatatagctatatcaggtctaggatggtttactgttgagccagttagtcggtcactcaaaatctcacaaaccaaaaccgtagagactgctggggaaattgattttggctgtgca

SEQ ID NO: 19069 - DNA, 143 bp, Glycine max
  Clone ID: PAT_MRT3847_117222C.1
tttcaattattttgcatcaatcttcgtctctgatccatgtcgtacgtggagctaggtgttgtctaatcaaatcgatcaatatgtccacttaatacaatcacctatcttctctgttccattgtttacttcataggcgtatactt

SEQ ID NO: 19070 - DNA, 566 bp, Glycine max
  Clone ID: PAT_MRT3847_117223C.1
acaacaacttccatattatatcttgggtctcaattctcactctatataattactatgggcagaataggaaaataatacatcaaaataaaagctagcattcacatcgacccaccggtaataaagcttatgatttttcagatatggagattatagaaactaattgggagaacatgaagctaatatgatacgacacatgatcggtcacctagttaaattttatcaattatcaaggggttgctttacacctttgaaacctttccattaggggttttaatactataataataacagtaagagtttgaagagttttgttttcaatggttacaaaaattctttggcactttctaaaggggtatgttagggagggagtcaatcaaagaaaaagagcattttggtaactatctgacgaattcagagcctttttccaacatatggccctgtttccctttcaactggtgggggtaaaacatcaatctcaaagaaggcaatgggcaggttcataattctggctcaacccccagcctattcactccttttaccattcccaaatggatttattttcctta

SEQ ID NO: 19071 - DNA, 1341 bp, Glycine max
  Clone ID: PAT_MRT3847_117224C.1
cggtgccatcggctcgaggccgtgcccgtcttctgggatccgaaagagggttgacttctatgtgtgtgagattggggaagcaaggagagggtgttggagtccctggtgcccagagcatacgttggaggtcccccctgggttatgggtcaaaattgggagttgctcaacataaagagggttggtggcaatgtgcagcgtgtccacttgatcacaagcaccaagcattgaagaagaagtcattaggattaaaaacgagcatcctgatgatgcccaatgtatagtcaatggcagagttaaaggtcgccttaaggtcaccagagcatttggggctggatttttgaaacagccgaagtggaatgatgccgtactagagatgtttcgtaatgaatttattggcactgctccatatatatcctgctctccttcactatgtcaccatagattatgccagagagaccagttcctgatcctctcatctgatggtttatatcaatatctaaacaatgatgaagtggtttctcatgttgagagcttcatggaaaaatttccggaaggagatccagcccaacatttaatagaagaactgctgctccgtgcagctaagaaggctggaatggattttcatgaattgctggatatcccacaaggagatcggaggaagtatcacgatgacgttactgtcatggtgatatcacttgaagggagaatctggaaatcatcagggaagtatccatgagacaatgagaccttcaacttgatgttggctctatacatgtgataacttttctggacccaagtgtgccatgaagccagtgccaaagtttcaaagccgatccatttttcatggatctgggtgtgttgttcctgatcttactacattaaaaatgatcaactgaggaatcattttactggcaaaaggctactgctttagctctatccagagttaaagaaagctaaatgcaatttggtatgagctaaaaacaggcattgcagatgggtctttgggaattctgctgagttaaaaaagaaaaaaggaaaaagtaaagcctctgtttctttttccattcgcagctctatttcctcttccccttttttgctgctaaagatgaaaaatgatagaaaatttgctcagccaagaccctttctatttattttcgtttatttccttcttttttttttcccctctggctcagccaagaaaacatgggtgtatatgggtggggatacaattgaattgattgacctcgatcagtccttagtcagaaatgatgatccgtaatgaagagtggatttccaccgttgcatattaaaacgattcttctgaatcattgatctttaaaa

SEQ ID NO: 19072 - DNA, 520 bp, Glycine max
  Clone ID: PAT_MRT3847_117225C.1
caaagatgttacttccaaaatatttcaagaagggatgttgtccactaaataggagataaataataatgcttatgctccaaaagtctgaagcatagctcgacttcccactcaaaaccttatttagtaaagtgtaccaacatacaatgaagatcctctcccgtttctaagaactgggataatccaaaatcagaagcttttaatgttgaatttttgctagatgatcgaaacaaaaaattcttaggtttaaaatctctatgaaccgcatggtgtgaatgacactgaagtgatgtttagcatttgtctcacaattggaattacttcccccttcagcataccgctgatgcttcttggtgagtgtgcgctccaaaaggttgtctcccctacatagttccataacaatgtagacattgtaattatctccataagcactttgaaattggaccacattttagaggccctggccaatcaacgacttcataattcaaagttgctgattttggattatccctcttaaaaatgg

SEQ ID NO: 19073 - DNA, 230 bp, Glycine max
  Clone ID: PAT_MRT3847_117226C.1
attcttagttttaaggttgttagttcttacgtgcagttcacacagaaagaaagggggaccgggccaaggaggaaaccaccgggggggggcacccgaacaataatggccaagaaaacccggacgcaggggcccaaaaggaccccaagaatcccggagggggacacatgtaccccgactacgggaagcgctcgaggcgagggggggaaacaaagggctcagacctaaaaggg

SEQ ID NO: 19074 - DNA, 362 bp, Glycine max
  Clone ID: PAT_MRT3847_117227C.1
tagtctcctgggcggacgcatgggcggacgcgtgggctttctttatagcacatggacatttggctgatgacaccaaaaattttgaggcttatccccacaagctggtgccgcttgcagagatgcaggaaaaagacgtattgaaactggcacaagacgaattgcatacagctcggtcaacacaggagcgacctgcaacaaccctgttggctgaggggtgaacatatacgcatgctatggagcatgatagtgcagagtctacaacaccaggagattccaggataggtgttaagaaggcaaccataaacaatacgagtgcatatgggctaaatggaggaaccacaaggactcgtctattggggacc

SEQ ID NO: 19075 - DNA, 167 bp, Glycine max
  unsure (1)..(167): unsure at all n locations
  Clone ID: PAT_MRT3847_117228C.1
gtcgcccttgcgtcttcactattgcgtcgcctgtctcacccttcttttttacatagtttgggggtatttattttgatggccttccggcatgcttccaatctgggcccgtttcttcttttgagcgtgggtnnntttcaaggtttgtggagagcaacgtttggttgtgg

SEQ ID NO: 19076 - DNA, 233 bp, Glycine max
  Clone ID: PAT_MRT3847_117229C.1
aaaacgctttttttacgcgatacgaccacgcatccaaaaaaggaaaagaatccaacacaaggaaaaaacattgagggaaaggaaacaagatgtgttgttgggtagcgaacaatatttcggggggggccctttttgggggttccagtttaacgtcccggggatggcaaggactaactttttttatggggccccctaatttaattacccggccggattttttacatgggttttac

SEQ ID NO: 19077 - DNA, 241 bp, Glycine max
  Clone ID: PAT_MRT3847_11722C.1
ggctcgagctaaaatgctttgttctctgatcatatgtcttattatatatcttgatctgctgccgggaactggaacagtactgagggcagcttcaagatccactatcccaaacaacgaagatgacacattacacacaaggctcttgagttcctctatccaagaaggataagcgtctactgttcaaacagcgtcaagcgcaatcagaactcagcgcataggaccaagcatacggtactcctac

SEQ ID NO: 19078 - DNA, 118 bp, Glycine max
  Clone ID: PAT_MRT3847_117230C.1
cacacgcttccccttacaatttgttccactttggcgcctcatgcctaacacgctgcccaagcctcattctttctgtattctggtccatatatgacttcatctgctattgcactactac

SEQ ID NO: 19079 - DNA, 276 bp, Glycine max
  Clone ID: PAT_MRT3847_117231C.1
cccacgcgtccttttaagcgaccttccacgcgtcagcaaaggggctaacaggaagtacaggcaaatgaatgcacacagaaaagtgggacgcgtgggtcggcccgataaaggcgaaccagaacatagaggcgaaagagattttagtacagggaggcaaataaaagcggagcgtagtcatgatcatagacgtatcaagagggaactatgtatgaagaacacttaaaaaagcaccacactatcaaggaacgaacggtgctaaacctgcggagccaactg

SEQ ID NO: 19080 - DNA, 202 bp, Glycine max
  Clone ID: PAT_MRT3847_117232C.1
tgttcacgcgtccgcccacgcgtccggcaaattaaagtggttcacgaaccttagcagaggctctccttgggtgctcttcaaacatgggaaaacagagcacaccccaattctctgccctcaactgcatcgatctctccaaccccgacatcaaccaatccgtcaacttactcaaagaggcatgtttggattccggttttttcta

SEQ ID NO: 19081 - DNA, 376 bp, Glycine max
  Clone ID: PAT_MRT3847_117233C.1
cccacgcgtccgtacggctgcgagaagacgacagaaggggaacaaaaacttcctttgacagacgaaacgctgcgttgagagtagtggcgcccaaattctgcactgaaccgaactctctgttcgttcgcgttgcgctctctccgaaggattcgtttcaattcgaaaactctctgaagtgttctgatggatgtggagtggtctgattcacggtacgatggtagaaatgataagggggattccccggtgagggagcaatatgacaatgatggggcggagaaatctagcaagcatagaggcaaggacaggaagaaggagcaccgtcgggaacatccaaaggatgcttcaaaaaaaaaaaaaaaaaaaaaaaaatttaata

SEQ ID NO: 19082 - DNA, 528 bp, Glycine max
  Clone ID: PAT_MRT3847_117234C.1
gcaagtttatcaaaaactcaattacattaaaccactggaaggatttataatccactatttaagttctatgggagtctctactagaagaagatttccagaaaaaataccacattttgttagaaataaattcaaagctaaacacgaagcaaaggaaaaggaaaaggaaaagttaattgcagataaagattcaattaaaccagtgacattgggagatttggttaatcaaagttcttcaaccagtttacaaagcaatcatacaaaccactccttcaatggacagtctattcttaagtctgataaaccaatggtatctaatcaagtcatgactaatgcacaaagttttcaaaacactccatcaaccaaagctgccatcacgacaaataagaatgttacttttcctagcccaccagagagaatgatgttttctccgactaagcctaccgttatcacattaccgtgtggtcaactcatggtcagaaactcggcccccaacactcctgttaatttaaatcaatccgcaagtttact

SEQ ID NO: 19083 - DNA, 191 bp, Glycine max
  Clone ID: PAT_MRT3847_117235C.1
aacttcttttttccatgcccatcccactggataccttgtgttcctttcactcgttaggatttttccctggcgtatagaaaaaactaggggcagcttttggacgcttttactaattggaaaattgtgttcattccggtaaggaatattcaaggtacaggcatctctcatttaattcaaatgaacgattagca

SEQ ID NO: 19084 - DNA, 134 bp, Glycine max
  Clone ID: PAT_MRT3847_117236C.1
cacaatccatatccggtattagatatccatataaggtttggctttccaactcaatacatggggaggaaatgttgatcaattgcaagggcttgacctgccactttatttttttccaaaggcttgtcaaaccaata

SEQ ID NO: 19085 - DNA, 310 bp, Glycine max
  Clone ID: PAT_MRT3847_117237C.1
cccagggggggaaacttttttgggggcccattttgaatttaaaaacccattttccttaaaataaaacgaaattttcgaagtcttaaaaaccaaaaaacaaagaaccgctttttcattatgggtaacaaacaagatgtttaaaaaggggtctttcaatattgtgaacaggggaatttttatccttccggtcaaaaaaaaccccttcaaaaagggccaaatgaaatttttcaaaaaaaccctccaaaaaatttcaccaggcccacccccttttttcccaatttatgcggccccggggggggggacccctaaa

SEQ ID NO: 19086 - DNA, 325 bp, Glycine max
  Clone ID: PAT_MRT3847_117238C.1
gggctcaagaacaaaggcttgaaaagttaagagaaagtgttgttgctcctgcactgaatttgacttgagctcaaacagcaaaggaagaggatactgattcagattcagcacctcaagtgcagtttactcaacacaatgatgggggcagatcttctaattccagaggaagaggtggcagatctggttatgtatatagaggaggcagaaattatggtaacaatgataacaggaattttgaaaatggttacttcaggaattatggaaatgctggaaattatggaaatactgatagtataaaatacagtgtcaagtctgctacaagttt

SEQ ID NO: 19087 - DNA, 384 bp, Glycine max
  unsure (1)..(384): unsure at all n locations
  Clone ID: PAT_MRT3847_117239C.1
cctcgtgccgaattcggcacgaggcctcgtgccgaattcctgcagcccgggggatccactagttctagagcggccgccaccgcggtggagctccaattcgccctatagtgagtcgtattacgcgcgctcactggccgtcgttttacaacgtcgtgactgggaaacacaaannagnttcnatgcataaaaaatttttaaaatttattttttttattanagggtatcgttgagaaaagtggaggtcctgatctgacctatcaggatttcgctgtatccatttctgtacatgattgccaatacattgtctttgactctcattttatgacatctaagaactgccatctgagaaatgtcttcattatagaatggtttccttcagattcc

SEQ ID NO: 19088 - DNA, 255 bp, Glycine max
  Clone ID: PAT_MRT3847_11723C.1
cccacgcgtccgatgatagtgtttgcatgatagtagcacagatgcttcctttgggacaggaggtacaaaaaatacaggggactatggtggttatacataataatgtgttagatatcaacagcatcaccagcgttaaactgatcgttgaccaacgcttacgcttcatacgactatcagtcgatgcacttactttcgcagccaccaaaatcttcattcagctgattagtgctaccaaggctgatcttggtaaatgaa

SEQ ID NO: 19089 - DNA, 348 bp, Glycine max
  Clone ID: PAT_MRT3847_117240C.1
ggctcgagggtatatactcttgtctggttggttgttgtctcagccactgcttcgctgaagagtattcctcaatacatggggtgggacgattaccagggttgaatgcgtgcagacatcgccgctattctaagagcgccctgctccctcattcatgtgctatctgtaccacagaggacctggtgttgcgttactgccagtaaccgttactggacagtgggcgagaagctctgacttcagaatggggaggcccttacacttgctatttcctaactgagtggtagagtcttcagaatgtacaatctatggttgctggtactctgcatcgctataatgaactaagagactact

SEQ ID NO: 19090 - DNA, 342 bp, Glycine max
  Clone ID: PAT_MRT3847_117241C.1
ggctcgagagaaatgtcaaggaaaaatgtagatcactatcttggtaaagataatgtttgggagtatgtcttggatgcctgtagaaatctgttagatagtccttcggaacagcagattgatgaatgcgttactaagcttgacattgtttgttcaccttggccaatgtgtgttggctatgctaacgaaacatggattgtcccccacaaggaaaactttgatacaacctacacgaatatggtgatgcccttaggagacactgccactgacaggggtgtatctgctcattgggctatatatagagtatgacagaatagccttggagacttatctactgttgggcat

SEQ ID NO: 19091 - DNA, 282 bp, Glycine max
  unsure (1)..(282): unsure at all n locations
  Clone ID: PAT_MRT3847_117242C.1
attagctgaccctgtaggcagagcncctagaagatgtgtatngnggangtagcannggaatattgnnggctgtagngcttcttcgacccactaacccgagggnctcaagtggcgcnatcacnngccnttntggnagcncactncctnatacgtnnngggnnaagttagttgntgtagctgataangcttcgttccatcncttggntttgggcatcnnatgngccatggatacagtccttatcggacccccacttttaccggagctggctagggaaacacttc

SEQ ID NO: 19092 - DNA, 418 bp, Glycine max
  Clone ID: PAT_MRT3847_117243C.1
acaaaaacaaagcattcacatgccgagcaggacatgggactgtttttttccgatacactcataactgatgccgttgaacgtgttcgtggttacaaacagcattggaaaatccatttggatgagggtgctaatagcaatggcaaccttcttgagagtcctcatttttataggctataagatcttgtgataagtggaaagtcaaacattattgaagccggcgtatgcaagaggatagctcattggagctaccgggcaagacacctgcaatagcgggtgccggttcagttgaattagcatcataaggatttgaagggctacttctgttggagtacttgtagggcgccgaaggatataatggaagagcaggtgcgtattgaactggctatggcaacctgacaaaagtatgaggcgtaaggaa

SEQ ID NO: 19093 - DNA, 129 bp, Glycine max
  Clone ID: PAT_MRT3847_117244C.1
atgctataaatttattacaaaggctgtgttgtaagttgaatttcacatcatttgctaatttcaaaaacaagtgatttcaaaaacatttccaatgcctaggtcccacttcccagagtgttattagaaaca

SEQ ID NO: 19094 - DNA, 1741 bp, Glycine max
  Clone ID: PAT_MRT3847_117246C.1
taccgtcgaggagagagagagaaggttccggtgcgagaagactcgaaaatccctagacagacagagagaaagatgcagaagagagagcagggcaagtccggcggatccgccggaggaggggcgacgccacctgcgaagagaggccgtcccttcggcagcggtaacaacagttcctctgccgctgcttcagccgcggattcggcggctccgtcaaccctccttggtccttcccttcacgttcacaactccttcgccgatcagaacaacaaaagaattgtcttggctcttcaaagtggtctgaagaatgagctaacatgggctttgaatacacttacgctgctctcctttaaagaaaaggatgacatgcgcaaggatgcgactccccttgcaaaaattcccggcttgcttgatgcgctcctacaagttatagatgattggcgtgatatagcactcccaaaggaatttgccaagacaacgagggtgaggactttaggtgcaaattctgttgtaagtggatttgggagtgaatatcaggcgctgggctcaactggtactcaccaccgccctggtgtaggatctggctctgctggtatagaatcaacgcagcagaatggcgtgacaaaatctcgtttttcggagttgtggcttgatgaagatagcctatttaatttagatgatgaagggcgaacagaaaagcagcaatgtgctgttgctgcttcaaatatcatcaggaacttctctttcatgccagataatgaagttataatggcccaacatcgccattgtttggaaacagccttccaatgcatagaagatcatcttgtagaggatgaggaacttgtaacaaatgctctagagacaattgttaacttagctccacttctggatcttcgaatatttagctcttccaaaccttcatttattaaaataacagaaaaacgtgcagttcaggccatcatggggatgttggaatctgcagtcaaagcatggcattgtgctgctgctgaattacttgggcgtttgatcattaatcctgacaatgaacctttcttgcttccattttttccacagatacacaaacgcttaattgatctcatcagcatgccagctctagatgctcaggcagctgctataggtgcactctataaccttgctgaagttaatatggactgcagattgaagattgctaacgagagatgggctattgatcggttgcttaaagtgataaagatgccacatccagttccagaagtttgccggaaatctgccatgatattggagagtcttgtgtctgagccgcaaaacagaagtttgctgctagcatatgagaatgcttttgcagagatagttttcactgatggaagatattccgatacatttgcgaggatattgtatgaactaacatctagaccaagtaacaaagtggcagcggctcgtggcatatggggtatgtaaacatcaaactgtgaaatgactttgattagtgatcagtgctatatatagttttgcgacttggatggcttttggacgacttttgaagattcaaaatgtacatgtcttctgtgtaggattgtactataccttaagcatattcaagttgtcatgtactccagttgtatgatgataacttcagaattattcttgtgtttaagacgatgtgaagattagaaacttcatttcctagatatacggttggaaagtgttgtagcacctaaaaaaaagggaaatgctcaattcgtag

SEQ ID NO: 19095 - DNA, 527 bp, Glycine max
  Clone ID: PAT_MRT3847_117247C.1
atgttgttataaattgcctcttaaaatgctcataatgtggatgatgatagaggacgaggaacttgtaacaaatgccctagagaccattgttaacttagctccacttctggatcttcgaatatttagttcttccaagccttcatttattaaaataacgtaagtgattgatctatcttgaatgttcttttttgcatgcaattattattctgttactgattgataagctggtgttacttacagagaaaaacgtgcagtgcaggccatcatggggatgttggaatctgcagtcaaagcctggcattgtgctgctgctgaattacttgggcgtttgatcattaatcctgacaatgaacctttcttgcttccattttttccacagatacacaaacgctgaattgatctcatcagcatgccagctttagatgctcaggcagctgctataggtgcactctataaccttgctgaagttaatatggactgcatgctgaagattgctaacgagagatgggctattgatccgttgctta

SEQ ID NO: 19096 - DNA, 386 bp, Glycine max
  Clone ID: PAT_MRT3847_117248C.1
ccgccctttttttttttttttttttttttttttgcatgctaagggtgttgggttaatgttcatctgaaatgtggcaagattacaagtttgatggaattcattaatgttctttattggaacattgtttgtttttatccgaaaccaaggggcacccccattttgtgggggcacacttttttttggaaaaagggggggggaaaaaaaaaatgcccaaaatcattctcccccggggggctaggggggcccccacttttgggaggggcaatattgcaacccacccctttttcccctgatcagcccctaccaacaatttttttcttgccatttttttttttttttttttttgggggcgccttttttggagaaaaaataatattttttttgcc

SEQ ID NO: 19097 - DNA, 279 bp, Glycine max
  Clone ID: PAT_MRT3847_117249C.1
ccacgctttcgtttattcttttttttttttttttactcaaatgtatttaattttgagggcggggggccgggatgtaataagtgaataaacatataccaaaaggcgcaaaactcgacaagcaacctaggaataggcggacatgtataccacgggaggaaacacagcagagggatcacatgggcgcagcgcccgggggcccggtgacgtacgacgcaaaatgcccgaagcaaacgcacaaaaaaactataagaaggacaacccgggcacggggcaaacccg

SEQ ID NO: 19098 - DNA, 110 bp, Glycine max
  unsure (1)..(110): unsure at all n locations
  Clone ID: PAT_MRT3847_11724C.1
ctagtacatagccacacctgggangggcatcttggcngcagatgngagcactngcaccattgggangcgcctntcgaggcattcancgtctnacgaacattgacggacca

SEQ ID NO: 19099 - DNA, 515 bp, Glycine max
  unsure (1)..(515): unsure at all n locations
  Clone ID: PAT_MRT3847_117250C.1
agcatattcactgaaaagacggcaggaaatgctaaacagctttctgctgcacagaatgctaaactcactcttgcccacgaagatatacgcaatgcagttggggatagctctcgtttaagcaattacaaatgtttgttggaatgacgcttttcaagcatcttccatgaatttcccttcaacctgtgcatcttccgtctaggccgtgcggttttgttctcaaaccaactgcaaacttatttcctatctctgctggtgaggctagccttctgagttataaaagaaaaggccaagcttggatttgtccacatcctgcagaagtagttcaaatctttatatatctcggccaacctacccatgtttccncgcttcttctcacattatcccatggcgcacatgatccctcttatgcactcgccgatgatgcccagacaggaggccattgagatgggctgaaactggtcttagagggtgcttctataccacggtgcgcgagtggcaccaaccttttaataccc

SEQ ID NO: 19100 - DNA, 887 bp, Glycine max
  Clone ID: PAT_MRT3847_117251C.1
gcacagtttgattttcgacctctctgatcttcattcattttcaagtttcattttttttttatatagcgaaaagtttaagtgagttgagtgaacgctcacgaatttcaagtgtttcatatttgacatcatggcaagaggtggaaaactaacgaagctaaagtcagtgctgaagaaatggaactcattcggcaacaacagcaagcatagccgccaccacagcatcagcgccgtcgcagacgacgaatcctcctccagatcagacctccacgccgtctacgtcggcaagtcccgccgcctctaccgcgtcgcctccgacgtcgtcgaccaccccgtcttccgggaactcgtcgagagatcccgcgactccgaccaacaacaacaaagcgaagacaccactatcaatgtcgtcgcatgtgaggttgtccttttcgaacacttgctctggatgctcgataacgccgacccacaacccgagtcactcaacgaactcgtcgacttctacgcttgctaatgctacctcataatttcaagccttccacgtgtcactttcaccctacattattaaaaaaaaaacacgtatattatattatattacatcatatatcatattatatcatgtaatactcgcatctatttgtgactgtaatttaattagttgtaataactaacattcatccataaatgttgtccatagttatatttagtaattaagttgaattaattagtaaatattggttatatatattatggtttagattttagttttaattaccatggtggggatggatgttgagttggttgaaggggtttggggtgaacttgatgaaccgttcggaaactcctccaatcaatgtattgaaagggaccgaaattgtacgcaatgtaac

SEQ ID NO: 19101 - DNA, 235 bp, Glycine max
  Clone ID: PAT_MRT3847_117252C.1
cccatgcgtacgaacaggcatgcctgattgaactggaatatctctgctcaatacttcgaagagtcccttcagcgggcgacccaatactaagatctacaccatttggcagcaaaacggccattaatgggcaccctgacgcacataagccgcgactatgatatgtgaataaaccatgtgttccgtggtgtggactagacaacttccgcacatgacctggttacatagccagaggcta

SEQ ID NO: 19102 - DNA, 227 bp, Glycine max
  Clone ID: PAT_MRT3847_117253C.1
tcaaaacttgtcccaaaaatcatgctctgcgtcgtacctactcttcccttacatataattgaaattcatctttatcctatactttaccgctttcattttaatctcatgcttctacagttccttcaaaacccaaacttgaacttcttgcttattgctcttgtaagcaaatgacatcctctccctgtgtttctgcttccttgtcatacgctgtctgattccgtgactgg

SEQ ID NO: 19103 - DNA, 344 bp, Glycine max
  Clone ID: PAT_MRT3847_117254C.1
ctatcgttctttttaactaaaaaattcgagctgaacactagcctaacgatacattgttgcgcgattgacacatgatcggctgaccctgaagtcgtaactgtagcgttgatcgatctcttttatgttggagactggtgtatcaggtgggctggcgcgtatggcactcaagctttgaccggttcgaagattaagaaggggtgggatgtggcttggtgaagcgtgaggacttagggatcactatgaaactctggtgttgagatcatgcaccagatgatgcgccagatgcattggatctaacatgacaggaactgcaactggactatcttgacctctatctgatccac

SEQ ID NO: 19104 - DNA, 303 bp, Glycine max
  unsure (1)..(303): unsure at all n locations
  Clone ID: PAT_MRT3847_117255C.1
cgggtgctgcatagatctggtgcgtagaggctcatatctacggggccgcggtgtgtgattcatgttcgacttgcttgtggaatctgaaacggagaaagtcggaaggccatgcatatggcatggttctagaggtattttttggcaggtacatcataaaatcgatgacaggagcagcatatccgacagaagatccagaccgtatcagcttgatccatcgatactagacccctgtatctggatcattaatcatcgtgtgtaagagcaggctacacaatgttgcacgatctgngatgtctgtaaaat

SEQ ID NO: 19105 - DNA, 250 bp, Glycine max
  Clone ID: PAT_MRT3847_117256C.1
gaacgaaaaggaattccaatggctggggtcctcttgacgatggtgccgcttcttcattgcttcctcttcctctcacctcgttcgcgcttccgatgactccgacgacgccgtaatttcgatactattgttgttgtcgtcatgtcgtgatgcatctctgattctacaatgcttgtgtccttcacatcttctacgaatcgttcgacgaggattttgatctaccgtggattgtatccgacaactatgattacaa

SEQ ID NO: 19106 - DNA, 125 bp, Glycine max
  Clone ID: PAT_MRT3847_117257C.1
attccttagaacatttgcaccagctcatgttgagaatggacgatggactcaaggtgggcagtgagtcagaagtcagccgatgaagggacatgagacaagattagcgggcactaatttggagctat

SEQ ID NO: 19107 - DNA, 523 bp, Glycine max
  Clone ID: PAT_MRT3847_117258C.1
gggcggggttttttcaatctacagcaccagcattgttttttcagcttaatcatttcgacagaaccaaacttgttatctcaataggaatagttcaaaattaatacaaagatggaaaacatttgaattacaatggaaggaacaagttaactaaaactaaaatatcactatcatattttagtatttcccaacaccacctgcatttctccacgtctaaagtgaactacaattactaagttgaaagttgcagttacatgcaaattatccaccagaaagaaggtaactggatctagaatgcacgacactgttgtaaagctttcaagctgtactgtgttagcctgctgaagcagtttatctgtgtaaaggcttttttatagtcacagtcatcacaagtattgttcttgtatcctagcacgattcttttcccaccacaatctcgcatgcatttctccaaacctttctcggctgaaccggacacgcctgagttctctggttccacctggcagtgctctgatagggatgtata

SEQ ID NO: 19108 - DNA, 2295 bp, Glycine max
  Clone ID: PAT_MRT3847_117259C.1
tggtttgacagttatatctctcttacaaatattgtcaatggtggtttgaattgtatccttcatcagtaaaaggtgttattcgttgtcaattgatggacttggactgttattgttctggttggcttgtttttaaattgtgtttttgttgttaattcttataattgattattgggatgtccatcaaattatgcccatgttcacatttcgtggtaaaacattgaatttcaaattttccaaatagaagattattatgtttacccaactcaaacttgcatttcctgcagatgtttgattattgtgtaatattcaaatgtagcagtctaaaggtttaaggttgttgtgcagcagtatgcatttgcatctgaaggtgtgagtttggatgtgcccataataaatagcatcatcgtgctggtgcctcctctctctatattcattcttctgcttcttgtagggggttgccaacaacaaacactcgagccgttttttttttctttttttttcatttgagagtttgtacaatgctccacgctttttttttactttttctttccattacagaggtttaagtgagacaatgacgtcttcaatggtggaaggtggacgcgacgaggggaaacacgagccgtcggatttgatcacggaaaccatgaatctgacggctccaaacctttcacttcccagtgaaactgaaacattcttgagcgcagcaatttccctcaaggacaaggtggtggaggagacttggaaccggagagatcaagtggttgatccgacggtgtacacgggactgttgggcaccgcctttacttgcttgcggtcctaccaggttaccggttgccggaacgacttaatattatccagcgaaatcattgacacgtgtgtcaccgctgcacgtgcctccctcaggcacgtgacttttttgtgtggtagaggaggcgtttatgcgcttggtgctgtcgttgccaattacatgggggacctatgatcttctgtatggacgagctggattcttatggggtgtcattgtttgtgaacaagcacctaggagaagatgcagtgcccaaagacattttgatgcttattattgatgcggtgttggctggtggtagagcaggagcatctgatgttaaagactgcccattgatgtatagatggcatggaacaaggtacttgggtgcagcaaatggccttgctggtatccttcatgtgctgctacattttccacttccaagtgaggatgctgaggatgtcaagggaactttgtggtacctcatgagtaagcgtttccctcacagtggaaactatccctccagtgaaggtaatccaagggataagttagtgcaatggggtcatggggcgactggcatggccatcacgttgtccaaagcagcagaggtatttcctaatgacagagaactaagagatgctgcaatagaagcaggtgaagttgtatggaagagtggattggtgaagaaggtgggacttgcagatggggtatctggaaatgcctatgccttcctttccctctacagactcactaaagagggtatatacgaagagagagcaaaatcattcgcttccttcttgtatgataatgcaaaatctctggctgctgccaatggctattcacttttccaaggacttgctgggacagcatgcctctggtttgatctgcttgcacccgacaactctaggttcccaggttatgaattatagatggttaaagtagagatggtacttattctacaagcagaaggaacgtggcatggatggaaaatgttaggtagaacaccaatcataagtgatatgatctgatgaaaagaaaaaaaaaaaagaataggtgtttaaagattatatgttatatagatcctatatatcatcactagacttgactatagcaaacaagccacgaggttctgctgctgttaatagtttatatgatattgtgtttgacaattaaaaaaactttactatattctgcacttagaagaggtgctgcttggcctgtcaaggtgtttccatgaacaatagcaattggcttttggaaggggagagcaagtttgactgtaatggttggtgcattggaatgccaagaactgctcgaaaggcttataatgcgtctagaaaaagtaacagatccggacccctccatgcataagaacagaccgtctgataacaagggagatgaagcacaagaatcaaacggtaaaaatgaagatgttgaaattactgggtgttaaaaattaataattaacggatatttatcactgattactacgagtagttaatctaggt

SEQ ID NO: 19109 - DNA, 243 bp, Glycine max
  Clone ID: PAT_MRT3847_11725C.1
ggcatttcaaaaaaacaaagaaggatatgaaagcgcggcttcttcttcttcagctgctgctgctgctgctgcttcaacttcccaacaaatatttcaacacactctctcatttcttcaatttccgttacgtaaagccactttctcaaacctcaatttcctgttgttgcggctgaagctggcgagagactaatcttggggaattttggatctgtttgccgtgaaaccctaatttcttccttgtga

SEQ ID NO: 19110 - DNA, 2811 bp, Glycine max
  Clone ID: PAT_MRT3847_117260C.1
atgacgtcttcaatggtggaaggtggacgcgacgaggggaaacacgagccgtcggatttgatcacggaaaccatgaatctgacggctccaaacctttcacttcccagtgaaactgaaacattcttgagcgcagcaatttccctcaaggacaaggtggtggaggagacttggaaccggagagatcaagtggttgatccgacggtgtacacgggactgttgggcaccgcctttacttgcttgcggtcctaccaggttaccggttgccggaacgacttaatattatccagcgaaatcattgacacgtgtgtcaccgctgcacgtgcctccctcagaggaggcgtttatgcgcttggtgctgtcgttgccaattacatgggggaccttcaaaagcgtgacctgtttttgggtctattcattgaggtggcaaaagagagagccctaccagttggaccagaggaaggtggttttggaatgtcatatgatcttctgtatggacgagctggattcttatggggtgcattgttcgtgaacaagcacctaggagaagatgcagtgcccaaagacattttgatgcttattattgatgcggtgttggctggtggtagagcaggagcatctgatattaaagactgcccattgatgtatagatggcatggaacaaggtacttgggtgcagcaaatggccttgctggtatccttcatgtgctgctacattttccacttccaagtgaggatgctgaggatgtcaagggaactttgtggtacctcatgagtaagcgtttccctcacagtggaaactatccctccagtgaaggtaatccaagggataagttagtgcaatggggtcatggggcgactggcatggccatcacgttgtccaaagcagcagaggtatttcctaatgacagagaactaagagatgctgcaatagaagcaggtgaagttgtatggaagagtggattggtgaagaaggtgggacttgcagatggggtatctggaaatgcctatgccttcctttccctctacagactcactaaagagggtatatacgaagagagagcaaaatcattcgcttccttcttgtatgataatgcaaaatctctggctgctgccaatggctattcacttttccaaggacttgctgggacagcatgcctctggtttgatctgcttgcacccgacaactctaggttcccagtgagactgcaacacgatggggagaggaaaaggagggaaagagcatttccagcagaacagagagaatgtgtggacatggaaacgagcagggaatcgctttcgataaaacatgtcatgtctagaaatggatatattgattgtcttacacatggaaaagtcgagcatgattcgtatttctggagtttaggaggaaataatgccttcattgcttatgattatgaattaaactacttgaattttcttgtgtcatctgaaagggttttgaaggaaagctgtgtatgtgacaagggcaagtggttcgtctcttgcaaagatgttcccatgtctcttagaaatgtagtttttcccagcatgtttccaaatggtggaaactatcaggatgttgttgatacagagaatcctgtgatgcatgaatttactgaggaagtttctgatttcccacttgagcggttcatgaggttactgcctcatgatcagaataccggagctttctttattgcagtattgcagaaagtttctcctctgccagcaattcaggttaatccattggaaagtacacctgaagaaatttcagaggctaatataaatgacaatggacctaatacagatttgaaagttagttctgctacatttgaagaagtggatttcaaggcagctcaagatccgtgcaatgtagaaaacataacaaagaatactccaggcaaaagaaaactgcagattcaaggcaaatggagaggcattgaccctgttgtcttcttcaaagatgaagtagttattaacagcataaaggaattttatgctattgacgagcagtttccattcaatggtcaccttgtaactaggaacagtgatacaagccacatgaaaagaatttactacatctccaagtcagtcaaagatgttctggagttgaacttctcagtcggacagcaacttaaaataacttctgttggcctgaagatttttgaaagacaaacgtcatgtgaaggtaggtctgcaccatgtgcttttcggatcacttctgaaggattgccccttattctccctcacatctccaaacagattctgagttcatctgctatagacttcaagcatcttctgcagtatagagctgtaaaatttgcagattttgtcgatgccaagtttggtgaaagggctgcaaacctaatgcccggctgttgtgttgtagttctggggagaagaggtgctgcatggcccctccaagtggatgagtcaacaatagccattggctgctggaagggtagagcaagtttgactgtaatggttggtgcattggaatgccaagaactgctcgaaaggcttataatgcgtctagaaaaagtaacagaaaaggactcctccatgcataagaacagaccgtctgataacaagggagatgaagcacaagaatcaaacggtaaaaatgaagatgttgaaattactgggtgttaaaaattaataattaacggatatttatcactgattactacgagtagttaatctaggtttttacttttttattctcggctcctatcctccttacagtttagtcatggctcccatccttcttataagaacaattacagaaattaaggtttttgattcacccgtgaa

SEQ ID NO: 19111 - DNA, 726 bp, Glycine max
  Clone ID: PAT_MRT3847_117261C.1
gatgctgaggatgtcaagggaactttgaggtacctcatgagtaagcgtttccctcacagtggaaactacccctccagtgaagggaatccgagggataagttagtgcaatggggtcatggtgcaactggcatggccatcacattgtctaaagcagcacaggtatttccaaatgacagagaactacgagatgctgcaatagaagcaggagaagttgtatggaagagtggattggtgaagaaggtgggacttgcagatggggtatctggaaatgcctatgccttcctttccctctacagactcactaaagagagcatatacgaagagagagcaaagtcattcgcttccttcatgtatgataatgcaaaatctctggcttctgccaatggctattcactttcccaaggacttgctgggacagtatgcctctggtttgatctacttgcacccgacagctctaggttcccaggttatgaactatagatggttccagtagagatggaaaatgttaggtagacaccaatcataagtgatatgatcttggtgaaaagaaaagaaaaataataggtgtttcaaggattatatgatatataagatcctatatatcatctctcgacttgattatagcaaaacacgagccatgaggttctgctactgtaaataatttagatgatatattgtatttgacactctgactgccttacaatataatctaatctttgatcagat

SEQ ID NO: 19112 - DNA, 1862 bp, Glycine max
  Clone ID: PAT_MRT3847_117262C.1
atgggctaccacttggactgtacgcgtgcagtgagactgcaacacgatggggagaggaaaaggagggaaagagcatttccagcagaacagagagaatgtgtggacatggaaacgagcagggaatcgctttcgataaaacatgtcatgtctagaaatggatatattgattgtcttacacatggaaaagtcgagcatgattcgtatttctggagtttaggaggaaataatgccttcattgcttatgattatgaattaaactacttgaattttcttgtgtcatctgaaagggttttgaaggaaagctgtgtgagtggggctgtctatgtttcttctttgccacaccccctcgggtttaaggttgttgtgcagcagtatgcatttgcatctgaaggtgtgagtttggatgtgcaggtatgtgacaagggcaagtggttcgtctcttgcaaagatgttcccatgtctcttagaaatgtagtttttcccagcatgtttccaaatggtggaaactatcaggatgttgttgatacagagaatcctgtgatgcatgaatttactgaggaagtttctgatttcccacttgagcggttcatgaggttactgcctcatgatcagaataccggagctttctttattgcagtattgcagaaagtttctcctctgccagacaatgaagatgcacaagaattgcaggttaatccattggaaagtacacctgaagaaatttcagaggctaatataaatgacaatggacctaatacagatttgaaagttagttctgctacatttgaagaagtggatttcaaggcagctcaagatccgtgcaatgtagaaaacataacaaagaatactccaggcaaaagaaaactgcagattcaaggcaaatggagaggcattgaccctgttgtcttcttcaaagatgaagtagttattaacagcataaaggaattttatgctattgacgagcagtttccattcaatggtcaccttgtaactaggaacagtgatacaagccacatgaaaagaatttactacatctccaagtcagtcaaagatgttctggagttgaacttctcagtcggacagcaacttaaaataacttctgttggcctgaagatttttgaaagacaaacgtcatgtgaaggtaggtctgcaccatgtgcttttcggatcacttctgaaggattgccccttattctccctcacatctccaaacagattctgagttcatctgctatagacttcaagcatcttctgcagtatagagctgtaaaatttgcagattttgtcgatgccaagtttggtgaaagggctgcaaacctaatgccctggctgttgtgttgtagttctggggggagaagaggtgctgcatggcccctccaagtggatgagtcaacaatagccattggctgctggaagggtagagcaagtttgactgtaatggttggtgcattggaatgccaagaactgctcgaaaggcttataatgcgtctagaaaaagtaacagaaaaggactcctccatgcataagaacagaccgtctgataacaagggagatgaagcacaagaatcaaacggtaaaaatgaagatgttgaaattactgggtgttaaaaattaataattaacgtatatttatattacattttagtcatggttcccactcctaactcccatccttataagaacatttagagaaatttaaggcttttgctccacccgtgaaagtttgagtttgtttttttttctctccaattttttgttcgtccaatctttgtatccaagttagcaggctttgctcaaatttgtatcaatatccaaagcttctagtaagtttagcagaattgcttaaacacgataaaaccaac

SEQ ID NO: 19113 - DNA, 224 bp, Glycine max
  Clone ID: PAT_MRT3847_117263C.1
tgtaggacaaagtctatcatacatttacctatggattttgtatttatagtgacagtttttgtccgtaggtataggtcatttttcttgtagtgtgagctgataatttttttattagttaactgaatattatatgacagcacttgttcatgagacgtcaagagagtagattctttccttatcttttaaccatgatcccaacctaattgatatggtgactccatagt

SEQ ID NO: 19114 - DNA, 377 bp, Glycine max
  Clone ID: PAT_MRT3847_117264C.1
atggtttcgggttttttattgaagcataccagcatcatatattatatactttatgtatcaaatagataactagtgtgagctcacatgacgctcagaatgctgatcttgcactgttccagacggctatagtacgctagaatacccacactagatgccgagcgcattgaaaaggaagaattgactgaaccatatgacaatgctactgtgtatcatcgatcgttgcctgatggatgacatgaccatgaaaaagaatggatctgtaggatctaggaagtctagcactactttctctactatctgatgatctaaggggaacgtgagggaactctggcccacttggttaagacagctcaaagtgccgcgagggcgagaactga

SEQ ID NO: 19115 - DNA, 256 bp, Glycine max
  unsure (1)..(256): unsure at all n locations
  Clone ID: PAT_MRT3847_117265C.1
angccacgcgcacgacaggnccccacaccgaangaacacgggcnanggagaccgcacnccggaggcgaaacgcgcaagacggaggacagccgcggaagcacacaacagcgggggcggcgattttttttttgaagagggcgccgaagcaacaaaggaatacatctttggcgaacactatagatcagactccaaaacaggtaaccaacaagcttacttttatgccagagacctcgaatgccatcccaaggacacattt

SEQ ID NO: 19116 - DNA, 484 bp, Glycine max
  Clone ID: PAT_MRT3847_117266C.1
gctgggaattcggctcgagggaagttctttatttttaatttttattctattatacttcacagctataattattatctattttattcaagctccaaagtcttcctctaattttttatataaatctctacaaaataaatcagaatcttgttgaaaatgataactaatttattttctatttttgaccccgcatcatctattaattcatcatccaattgattaagtagattaattcttttaagtataatttgtccattaatttgattaatccctaatcgattaaacttaattattaaaaatattttaataaccctccacatggaattcaaaacattacttggtccttcttcttttaagggaagaactcttagatttttaagactttttctatttattggtattaataactttataggacttttcccatatattttcacaagatcaagtcacttaattactacattaactttagctgctcctttatgac

SEQ ID NO: 19117 - DNA, 255 bp, Glycine max
  Clone ID: PAT_MRT3847_117267C.1
caggtggaaacttacaacgccatgggataaccggtggagattgtacatttgactgacttggcaaattaattgaatgatcggatccccacatacacaacaaggcgtgactgatagaaaaaggggcttaacgctacgatgtgctaaacctgagaaggatccaagtgacaagggttgaccacaggacatgggctggctcacagaactgcctagactacggttggttgctataacgcaagctatgatcacgaaccatgc

SEQ ID NO: 19118 - DNA, 929 bp, Glycine max
  Clone ID: PAT_MRT3847_117268C.1
tttcgctttctcgtccgggcattttcgtctttctctaatttcttcttctttctttctctcacttctcttttgaatcaatctcatctcatccctaacaaccacacatgcacgcaccaccatcaggcatgttctttccatgctttcaattttggaaaaaagcttaaaattttgtaacactttaataaaaactaattggaactggtgctagttcagcttgatttataaccccatttttggccaaacaaatagggttgcccattttattattattcttttgaaattttcaactttcttatgctgtggatctttgacttcagttggagattttgagtttttttttttaaccctcttttcagatgttgttctgagataatccagataccctttaaggttttttacttcatagctgcagagttccttgcattgtgcttgcgctttacgtcttttctgggctgcgagaagacgacagatgggggtgcatcagtctctttgcaaaaggatatgggttcaatgaggatgagatcagcccctcaaaacattcgtaagaaatggtggcgccaagtacgcattgttctagctattgatgcagctgtgtgtatattactatttatcatctggttagtaatatgtcatggtatatcctgcattcgatagaattcaaacttcttgtgtgactctgaaattgaatcactatcatatttggaacttgagattttccatgcatgatctgatcagcaacagaaattggtttctttgatggggcatgtaaatggaagttacatactggtcatgttgattagatctttagtgctatttgcaggcacgtgcttcttgtcacccatatataggcattttactttataaagtctcctgtacagtttcattacttttagacatctgtacttgtatatgaattttgggaagatttt

SEQ ID NO: 19119 - DNA, 684 bp, Glycine max
  Clone ID: PAT_MRT3847_117269C.1
acgcgatcgatttggtcttggatcccattggatacgacgacttaggtcgttccttctacttccaagttctaaccattgcccactgtcttcgacaatagggcattaaatctgacatggcagcagcactcgctagagctcgagccgatgacgagtacgtcattaagcttcttgttatcggccacagcggggtgtggaaaagttgtctactagttgaggttttctgatggctcattcacaaccagatgcatcaccaccattggcatcggttgtaacataagaaccattgaactaaacagcaaacagatgccgttgcagctcaaatatcctgctgtccaagtgccgttccgaactgtttctacagcttattttcctggagccaggagtatattgctgatttatgatattacagctgaagcatctctcaataatattacgaattggatccttgctattgaacaacatgcttctgacaatgtggacactattcttgttgacaccacggctgatatggatgatagctgaagggctgtacctacctgcaacgggcaagcacttgctgatgagtatgggataaagtgctatgaaactagtgcaaacaccaacatgaacgtggaagaggacatattttcaataacatgagatattaagcaaaggcttgccatcacagatttcagagctgagcct

SEQ ID NO: 19120 - DNA, 163 bp, Glycine max
  Clone ID: PAT_MRT3847_11726C.1
ggctcgaggtccttgatagtttaatgattgaaaatgcgtaatctttctaccgcgggttgaatgagtggtcgcttggcttggagggtggattaaagatgtctcttgcatcaacgtgcccaatggaattgtataccctgcctgcacatttttgccaatatcgtca

SEQ ID NO: 19121 - DNA, 334 bp, Glycine max
  Clone ID: PAT_MRT3847_117270C.1
aaaatacacacaattaactacttttactttctatggctatcaacaaacttcaggacaaggtttatgagctttgagtgcactataacccaacaataaataatgccatttgcccaccatcaaatgcttctcaaaagcccacaccaccaactgcaataccaacagttcatcataccaattgaccacaccagccactcgaaagacgacacgacctactcttcagcacactcaacccacaccaaatcccacactcacctactccaaaacctacgtttccatctcctatgctttcttcatcatcatcaaacaaagcctcatgcccaacagacacattaaa

SEQ ID NO: 19122 - DNA, 788 bp, Glycine max
  Clone ID: PAT_MRT3847_117271C.1
tgtcgctctggttttatataaaaccagagcgacatcagcaaatattttttgttttacggctgcgagaagacgacagaaggggaagtcttatccattcatttcatccatccagcacgcgcacttcctttggagtctctgcctgaagatggcaagccttcagttaacaacaacacccttcactcttttgagacaacaaaggcagcaccccacaaagaagaagtccactgcttctcagctgaaccctcctcggccacgtcccctcagagtgagtgtgaggtcctataaagtggtgattgagcacgatggagagtccactgaggtggaggttgaacctgacgagaccattctgtcaaaggcattggactctggcttgtctgtgcctcatgattgcaagcttggagtctgcatgacatgccctgctcgcctcattagtggatctgttgatcagagtgatggaatgctaagtgatgatgtggtggagcgtggctatgcactcttgtgtgcagcctaccctcaatccgattgtcatattaagattatccccgaggatgagctattgtctttgcagttagccacagccaatgactagtcagtttttgagttttgaatctagtgtaattaattccatgctgctgctgagtctttgcttgtttcttaaaaatatttgctgatgtcgctctggttttatatatactacttctgttactattatgtagcattttattgatgcctgaaatacaacatttgactcaaattagaatccaatataacagacatggatgtggctt

SEQ ID NO: 19123 - DNA, 1465 bp, Glycine max
  Clone ID: PAT_MRT3847_117272C.1
aattcggctcgagcggctcgagcttgggattcccccattaccagcagcgcgcgagaggtgagtttgattgagtcagtccaacaataactaaaaacccgtgactcagcccactcttgctttgcttggcctaaccgctaaccaaaccaaagctctctcaatggcttcggagcaacacgacgccgttttccgcgaagaagacatggacgacgacgacgacgagtctcaggaggacgaagagtacgaagaagacgacgacgaagaaaacgtgccctctccctccaccgctctcgctgtcaccgtcgccgtccccggttccgccgtctccaacggcggcggtggctctccaatttcgaagcccaccgccaccgccaccaccgccaccatcgtcctcgccgactcatccgatccgaagcggcgtcgcctggagctaatcgaggagaaaaagccgccgccgccgctggatgactcgcggcggctgtttcagcggctgtggaccgatgaggatgagatcgggctcttgcagggttttctcgactacacgtcgcagcgaggatcctcgcaccacaacgacaccgctctgttctacgaccaaatcaagtcgaagctccaactcggcttcaacaagaaccagctcgtcgagaagctccgaaggctgaagaagaagtaccgcaacgtcctcaacaaaatcagctccggcaaggaagtctctttcaagagccctcacgaccgagccaccttcgaaatctcgcgcaggatctggagcaacaccgctccaatcaccggtcccgtcgaagacgacgacgaaatcatcactaaccctaatttcggcaattcggcgaagatgcctatttcgcggaagcggtcgcggcctcagaagcgcgagttgaacgacggttcaacgttgaatagagataataattgcattagtaacagtaataataataataataatgaggattgtaatagtaggcttaacttacagggtttgatttaagagacggtgaggagttgcgtgtcgccggtgttgaaggagttggcgtgtggtactggtggcatgggattgggaagagggttcgcattgaatcccttgcaaatgccaatgccaatgagtttaatgaatttggggattgttggggaaacggcgatggatgagaagtggaggaagcaacagattttggagctggaagtgtattccaaacgtttggaattggtgcagaatgagatcaaggttgctctcgaggaattgcgttcagctggtggaggatgacccaaaataaaactaagcttttaggtgtttacagtacttcataaggatttgcttgctaatttattgatccactaatggttgatagggtagctagccagtttgtattttttccccctttttttctatagtttagctttttccttactttttttgcttttcagtatagcttttgattattgcaaacagtatttgttcaat

SEQ ID NO: 19124 - DNA, 454 bp, Glycine max
  Clone ID: PAT_MRT3847_117273C.1
gaaaaatcttgctctgcagaggaggaaaatatggaagtgcttagaaatcgaggccttcctgctgatgttcttgcaaagcgagctcatgaatttgaaaaacatgttgctcatgaaagcctcaaggatcaaattcctgcctgcgacaagctgtattatactcaggtccataagtttgcaaacatcatgaaccttatacatagtgctgttggcgatcttaaacttcttactgatgggaagatgcatgagggtaagcatattactgtatctaatactattgcaagggaaaatcatgtagttcaaatacccctaatggcacaggaggaaattctgtcttctagtgcaagcgatttcataactgcaatggtgagtgacaattgcaagcctcaagctactgcaatgcatgtgggagctatagaaatcatcattgatagtttcgcatgtcctgactgcacat

SEQ ID NO: 19125 - DNA, 709 bp, Glycine max
  unsure (1)..(709): unsure at all n locations
  Clone ID: PAT_MRT3847_117274C.1
tacggctgcgagaagacgacagaagggtctcttagattttttatgaaatttatgaaaatgtataccaatactattcggtacacccatcttcgtctaacaaacttgaattattatttttcagggtgaaataatctttataaatatttctcttcccggttaagtttgttacttcttcattttgtaatgcatactttataaacccgcatatcaaaattctctttaattaattatttaataaaaaaatcattttttcataattttttagagttgaatagtgatgcattgacagtgtgaaactatttcacatggtcaatcaatcacaaattaacgttactacttaacatgacttttaaagaaattattataaaaattaataaatttatcttatatgaatattgtgattacatcatctattttctcatttttttagaagaaaaaataattaaatgagaaattgacttatcaaaattaattaatgattttgaacaaattttaattaattacatagaaaatatttttttaaaaaaatattaaaaaaaatgccgctaatacatctgacacagtaacatttcttttcttttaattntaagattttggttacagaacttctccaaatgtttcagtcaggtccatttttcggtcttccattctttttttttttaaacgaaatatgctaatctcattcatattagtattcttagatgctgat

SEQ ID NO: 19126 - DNA, 358 bp, Glycine max
  unsure (1)..(358): unsure at all n locations
  Clone ID: PAT_MRT3847_117275C.1
attcaagtgcaagtaagagaagcaagtcaaatcatagtaacgctactgatgagactcgatttaaatacaaaatttcccaaaactcaatctgacacatctcatgatgaggcagcacatttgggtagccatgaacgcagaagaaaagctgcaatagttgaaaaattagcaaaagatacttctaaatgcagaactgtgccttacttgagtggttcaagtaagtatgttgtaattgatgatgtagnaganggntctcatntgcccaaatacagagtagcacgaagatcatcatctagntctcgtgaacgactatcctcagctactaangnggatttcctcgnagcnnnaantgtntggancc

SEQ ID NO: 19127 - DNA, 142 bp, Glycine max
  Clone ID: PAT_MRT3847_117276C.1
cccacgcgtccgcgcacgcgtgcatctgtgcctctcctaatctatatgcttctcttatcagaacaacctcagccaatggccatagtcaccaaccaattaacatacgtctatatatcatcatatcatcaccaaattaacaata

SEQ ID NO: 19128 - DNA, 371 bp, Glycine max
  unsure (1)..(371): unsure at all n locations
  Clone ID: PAT_MRT3847_117277C.1
tntcananacgcgtacagtagagctcggaattcngctcgagaaantcacgngngcngcgtgttagncgcncntcggnggtacgngttagtggncaaagnnacnngagacngcaacnngcgngnangnagnangattntgnctnacngngcgnntanggtgnagaggtnngngnangangnnacnngnanaangnttttgaatnantncaggtgngtgttggggggaaannaangttnnntgagnagtcgggnantncaaagaagnnaggggntttttttnnnaggatgatnngnggcccgtgtgnngnncnagaacacnnnnnnanaanannttgnggatgnttttcagngnagnnccaaaaanncccncc

SEQ ID NO: 19129 - DNA, 2739 bp, Glycine max
  Clone ID: PAT_MRT3847_117278C.1
tttttcgcgtgggcggacgcgtgggcggacgcgtgggccaagacatggttgaacccaaagatcacgtgatagtgtttgacaaagcagactactattcacatcctgagcattacaatcccactttccatgaaaaaatagcaccatatgcatctgttattgtcaattgcatgtattgggagaaaagatttcctcaattgctgagctataagcagatgcaagacttaatgagccaggggtgcccccttgttggaatagcagacataacgtgtgatatagggggttcaattgagtttgttaaccgtgctacatcaattgattcaccctttttcagatatgatcctccgacaaattcctaccatgatgatatggaggggaatggtgtgatatgcttagctgttgacattcttccaacagaatttgcaaaggaggcttcccaacattttggaaacatactttcccaatttgtcataaatttggcttctgctacagacattacaaagttgcctgctcacttaaggagagcttgcatagccaataaaggagtgctaacctccttatatgattatatcccacgcatgcggagttctgattcagaggaagtatcagaaaacgcagaaaattctctatctaacaaaaggaagtacaatatatcggtgtctctgagtggtcacttatttgatcagtttctgataaatgaggccttagatattattgaagctgcaggaggctccttccacttagtcaactgccatgtcggtcagagcgttgaagctgtatcattctctgaacttgaagttggtgcagatgacagggctgttctggatcaaatcattgattctttaactgctattgctaatccaactgaaaatgatagattttcaaatcaagattcaagtaaaatttcacttaagcttggtaaagtcgaagagaatggcatagagaagtgatcaaagcagactactttgcacatcctgagaattcttggtgctggtcgggtctgtcaaccagctgctgaaatgctgttcatcatttggaaggccatcatcgagccaatggtataaaacattgttggaagatgattttgaatgtcaaattgatatagaaatcattgtgggatctctgtacctgaaggatgcagagcagactgttgagggcattccaaatgtaaccggaattcagcttgatgtgatggatcatgccaatttgtgtaagtacatttcacaggttgacgttgttataagtttgctgcccccaagttgtcatattattgtagcaaatgcttgcattgagctgaaaaaacatcttgtcactgctagctatgttgatagctccatgtcaatgctaaatgataaggctaaagatgctggcataacaattcttggagagatgggcttagacccaggaattgatcatatgatggcaatgaagatgatcaaccaagcacatgtgaggaaggggaaaataaagtctttcacttcttattgtggtggacttccatctcctgaagctgctaacaatccattagcatataaattcagttggaatcctgcaggagccatccgagctgggcgcaatcctgccacctacaaatggggtggtgaaactgtacatattgatggggacgatctttatgattcggctacaagactaaggctaccggaccttcctgcttttgctttggaatgtctcccaaatcgcaattcattactttttagggatttgtatggaataactgaagcatcgaccattttccgtggaaccctccgctatgaaggatttagtgagatcatggggacactgtctaggattggcttatttaacaatgaagctcattcgttgctaatgaatgaacagagacaaactttcagaaaattcttatttgaacttctcaaagttgttggcgataatccagatgaactattgataggagagaatgacatcatggagcaaatattaatacaagggcactgcaaagatcaaagaacggcaatggagacagcaaaaacaatcattttcttgggacttcttgaccaaactgaaatccctgcttcctgcaaaagtgcttttgatgttgcttgtttccgcatggaggagaggttatcatacaccagcacagaaaaggatatggtgcttttgcatcatgaactggaaatagaatacccagatagccaaattacagagaagcatagagctactttacttgaatttgggaagactcttgatgaaaaaaccacaactgccatggcccttactgttggtattccagctgctgttggagctttgcttttattgacaaacaaaattcagacaagaggagtcttaaggcctatcgaacctgaagtatacaatccagcactggatattatagaagcttatgggatcaagttgatagagaagaccgagtaattttcatctatgaattgatgtataggtgtacattaatgtacaccatgcaatgtttgatttgaataagataaaatataataattactgcagtcatggaattgcaactaccattctataccagtgtcagaaatggaccacacggtaccagcatagttataacacttacacatgagatgccaatttcaattgcagcagtacaatccaaccagtaatgaaattctagaaaaattgttaattggtgatcaatgaaactactccctcatttcttatttatcagacttaattacttaatttattagaataaaaaaaataattaatttaagaaaattctta

SEQ ID NO: 19130 - DNA, 837 bp, Glycine max
  Clone ID: PAT_MRT3847_117279C.1
ccacgcgtccggttctgtttcgcttcttcttgtgttgtgttggtcaagtgtgttgtgcaatggataatcaaaagaagggcaaaggaggagaccaacccaagaagttagcgaaggtattgaatacgagctctctccaaataaatgaaaaagatgcttttcagttggttggttccatcgtcgaaaagggtatctctgattcacacaacaaccccacaacaacaccacccttccattttttccccaaacccactgttcttcctttccccgttgcgcgccatcgttcacatggccctcattggcgtccactgagtagtagaggggatgatgatggtgaggatgatgatagtgacaataatgttaaggatgaagaagataaaaatttgcaggagtttgaaaaagtttcagcctttgccaagccggtacagaggaggaggaaaaagggtttggattttagaaaatggaaagagatcactcgggatgatagttcttccttcgggaaggaatcagagaaggatgtgtcaagctttagccaaactactgggaaaaagaagaatgaaaagggcagtaagagcacatacaagaaaacctcatctttggatgataatgtcatttctccaatgaaagtggatacaaaaccactgttagataactcagatggtgggtttatcaattcaactaccactatggaagtagatacattaaataaggtagatcatgaggaaaaagttaaacacgcccagaatttatgatgacaaggagcaaaatgaatctgtgcctggattggaccaaatttcttctgattggatgcctgattacaattttggatccctggatgtg

SEQ ID NO: 19131 - DNA, 854 bp, Glycine max
  unsure (1)..(854): unsure at all n locations
  Clone ID: PAT_MRT3847_11727C.1
ctctctattgtgtcactcaatcgaacataaaatcagaagaccatatgaacttgcacaattgaaactctggaacaacatgaacacaatgcataatcgaaacaaaaaagaagaacatagaaacataggagatggacgaaaaagagaaagaaaacgcacgaggtggtgcaggcggcacggcggcgtcgtttaaggtgcaagggtgcatgtgtttggaggcgaaagggtcgcgcgcgatcagatctggaggtggaggcggtgcgcgacgtcgaaggagggtggcggggttggtacacgacgtcgaaagaggggggcaggtctggtgcgtgatttcttttgctttctttatttacaaattttgccatgttttaaaatttgtagaattatatatttttaagatagattcatgttgtattcttgagtttgtgtggtgttgttggctatcaagttagagatgtcaaacaaaagcagagcactcagctttaatactcagccaatttctcatagttccttctcatttctcttgcattgccatctcaagcttagtgcaataaacgactttgacactgctaaagtcatgtcttaagaaattggaatcatagacaaaaagtgctccttagcatgagatgcaaatgcngaatgtttgtggtcatgctttgaggtttcgcagtgacaagcattagttttgtgattgtttgtaaccagngttctccaaacacttgggtaactagaagtatctaagatgaagtgcatgtttagattacatatgcaaagataagtttgaatcaaaagtgtgttgtaaactcaaagttgacccaattttcagcccatggctgcctccccatcttcactctagc

SEQ ID NO: 19132 - DNA, 425 bp, Glycine max
  Clone ID: PAT_MRT3847_117280C.1
ggcgaactcactttacaaaccaggtgggtctaaagtatcaagctttatttttaactggctctttacccactggagcgggatccccacagttttcggcctcccaccctccctatatatgagtcactctgatacttactttcatactaatggatagactcctcatcatgctcagaccataagggaccacagccttctcaatataaaacttagagcccggaatctaaacaaaacaaaaactatccttataccagtatctatattagcctactaaaaatgactgctaaattatatgctctgaccaattaacccggagcatgtgcctattgctctgacagggaaattcaccaccaaagacaacatttctgaggaaagaattcctagcacaaaagatggctggaaagacaacaagaacacctgcttacaac

SEQ ID NO: 19133 - DNA, 351 bp, Glycine max
  Clone ID: PAT_MRT3847_117281C.1
ttttcctccatctgtttgcgattatgcatttggtttatagcatttcatcactatacctaattgtggtgtctttgatatccagtttggtccatgatctatcagataagctttggctatacccaaaaatcacaagcatgcagacttagtatttgcagactgattttcgtttcagatttcacttaatttgagatgttttgtcaaattttgggaaataaagttattgcttgttggtccattttacttctgtaattagctttgaagtgcttcacacatttgtaatcacatcattcacgggcaatacatgcacttaaatatctatttgaactacttatcattcaatcagatgattta

SEQ ID NO: 19134 - DNA, 485 bp, Glycine max
  unsure (1)..(485): unsure at all n locations
  Clone ID: PAT_MRT3847_117282C.1
gtcagaggctttgtataacttatacctcacaaggccacaacacatattttgttggtgtaagaatcttaatctctgacaaagtttcaccacaaactagttggcgattccagttntnacaataaaaaaattctctttgacaaatttcactgccattcaatagagaattccaaaggagcagagcaatggtttcatatatgcaaaagtntttggtgggtttgcaaagataagatcatcgatccccgatcttgttgctatttctagaattttaaatgctactcttgtcattcctgaatttcaagaaagtactcgctcaaaaagaattagcttaaagttcaagagtttttcctatttttataaccaggagcaattcataacatttttcaaaaattacgtaatcattgcaaagagccttccagaaaattttattgaaaggagaagaagaaatgaaattcctacattttaaccccataagtttcaatttttta

SEQ ID NO: 19135 - DNA, 435 bp, Glycine max
  Clone ID: PAT_MRT3847_117283C.1
gataggcaaaaaaactatactgattgacatttgtaacagattagttgcaagagatatgttatgggttatccaaaggatacccccttacccaatcgaatgtcagcttgaaatttactgcatttgcaaattttggcctagacaacgggtacatttgagatcattaacggggcccaaggactgtcgagggaccatgtctcctgctggagttcccactgctcaaacccttagcacttaacattaacggttgcgagtcatggctcgctttcaccaacaaagtgttcacagttcatgcatggacttagctccgaattattcgctgaaaagcctcttcgaagttcatcacctagggatattccgggaaacataggccaggccgggtgtggaaccacctttctttactgttttcttacttcttcaccaataacggccgaaaag

SEQ ID NO: 19136 - DNA, 308 bp, Glycine max
  Clone ID: PAT_MRT3847_117284C.1
tttggtttggtaaggtaaccttgtgttgttgttccaaaaaataaaaagttttgttaaagttaaactacttcctaagtaccccaaaatccacttttaagggtaagggtcctaataataatggaataaaatttggttaaaagaccaaaaaaaaaaaaaaccacaaaaatcctactctcgaacaccaaagttcacatccaacctctcacaacaaaaaaacaaaaaaaaaaaaggggggccccccccaatagtgcccccctaccccgggaaaaaattcccgcccggttcttcacgggtgtaaaattttcccc

SEQ ID NO: 19137 - DNA, 250 bp, Glycine max
  unsure (1)..(250): unsure at all n locations
  Clone ID: PAT_MRT3847_117285C.1
acggacgcgtnaccagacnccntaacatctgcttataagactacagaaagcgataattttaattggggttgggggacttattgaacatacaacattcttttcctaatggctgaggcatcgccaccattaacacaacattgaaccataaataaacactcgtgctctctccgttgggttctagcgaggatccaaacaacacagtcttttttacctactatttcccggacataaaaccctttctatttaaacc

SEQ ID NO: 19138 - DNA, 677 bp, Glycine max
  unsure (1)..(677): unsure at all n locations
  Clone ID: PAT_MRT3847_117286C.1
ttccggnccggaantcccgggtcgaccacgcgtccgctctgctttccattccagcttctccgatggacacccactctccatccaaaccctctctccgccttctccaccgccgaagctctctccgaaaccgaccacccctctccgccctccccgcagccccaacccccaccaatcattccccctggcgagaacaatctcgaactcaccatctgcaagatgatgtgcaaccgcgcatggaccacgcgcctgcaaaactcgatccgctccctcgtgccggaattcgacccctgcctcgtgtacaacgtgctgcacggcgccggctggccggaacacgcgcttcagttgtaccggtggggcgagcgcgccgggctgttcacccacaccccggaaaccaccctgaagatcgggcaaatgctggagcggtactgcaagctgaaccacgctgggtggatgctgttggacggcactgggggggggagggggcgcgccaccgggaccagaggcggcttggggtgcctgatgggcaggtacgggcagagccgggatcgggcaggaagggcgggagggtggggagaaaatggagggggggggggggggccgggcgggggagtgctgcggcgcggtggggagatgggtggggcggcgcgggcggggcgggggggggggggggggcgggg

SEQ ID NO: 19139 - DNA, 3404 bp, Glycine max
  Clone ID: PAT_MRT3847_117287C.1
tcgttcatcgcgtccgcccacgcgtccgcccacgcgtacgcatagatgacaggcgggatgtttggaaggaaggggcaaaagataaaggggacagtggtgttgatgccaaagaatgtgttggacttcaacgccataacctccgtcggaaaaggcagtgctaaggacaccgccaccgatttcttgggcaaaggcttggacgcattaggtcatgcagttgatgctctcactgccttcgctggccatagcatctccttgcagcttatcagtgctactcagactgatggtagtggaaaaggaaaagttggaaacgaagcctatttggaaaaacatcttccgaccttgccaacgttgggagcaaggcaggaagcattcgatattaactttgaatgggatgctagttttggaattccaggagcattttacatcaaaaactttatgactgatgagtttttcctcgtcagtgttaaactcgaggacattccaaaccatggaaccattaacttcgtttgtaactcatgggtttataacttcaaaagttacaaaaagaatcgcattttctttgtcaatgatacatatcttccgagtgctacaccaggtccactagttaagtacagacaagaagaattggaggttttaagaggagatggaacagggaagcgcagagactttgacagaatctatgattatgatatctataatgatttgggcaatccagatggtggtgatcctcgcccaatcattggaggctctagcaactatccttaccctcgcagggttagaaccggtagagaaaagaccaggaaagatcccaacagtgagaaaccaggcgagatatatgttccaagagatgaaaacttcggtcacttgaagtcatctgatttccttacatatggaatcaaatccttatctcagaacgtgatacctttgttcaaatctataatatttgacttaagggtcacatcgagtgagttcgatagcttcgacgaagtgcgtggtctctttgaaggtggaatcaagctgccaacaaatatactgagccaaattagccccttaccagtcctcaaggaaatcttccgcactgatggtgaaaatacccttcaatttccaccacctcatgtaatcagagttagtaaatctggatggatgactgatgatgagtttgcaagagagatgattgctggtgtaaatccaaatgtaattcgtcgtcttcaagagttcccaccaaaaagcactcttgatcccgcaacctatggtgatcaaactagtaccataacaaaacaacagttggagattaacttgggtggggtcacagtagaagaggcaattagtgctcacagattattcatattagattaccatgatgcattcttcccgtatttgacgaagataaacagcctacctattgcaaaagcttatgccacaaggacaatcctgttcttgaaagacgatggatctttaaagccacttgctatcgaattaagcaagcctgcaacagtgagtaaagtggtgttgcctgcaacagaaggtgttgagagtacaatttggttgttggccaaggctcatgtcattgtgaatgactctggttatcatcagctcataagccattggttaaatactcatgcagtgatggagccatttgccatagcaacaaacaggcatctcagtgtgcttcaccccatttataaacttctttatcctcactacaaggacacaataaatatcaatggccttgctaggcagtccctgattaacgcaggtggcattattgagcaaacatttttgcctggaaagtactccattgaaatgtcatcagttgtttacaagaattgggttttcactgaccaagcattaccagctgatcttgtcaagagaggattggcagttgaggatccctctgccccacatggtcttcgccttgtgatagaggactacccttatgctgttgatggacttgaaatatgggatgctattaagacatgggtccatgagtatgtctctgtgtattacccaacaaatgcagcaattcaacaagacactgaacttcaagcatggtggaaggaagttgtggagaagggtcatggtgacttaaaagataagccttggtggcctaaactgcagactgtggaggatctcattcaatcctgctctattatcatatggacagcttcggctctccatgcagctgttaattttgggcaatacccttatggaggttatatcgtgaaccgtccaactctagccagaaggtttatcccagaagaaggaaccaaagaatatgatgagatggtgaaggatcctcaaaaggcatatctgagaacaatcacacccaagttcgagacccttattgacatttcagtgatagagatattgtcaaggcatgcttctgatgaggtctaccttggccaaagggataatccaaattggactacggattcaaaggcattggaagctttcaaaaagtttggaaacaaactggcagaaattgagggaaaaatcacacagaggaacaatgatccaagtctgaaaagccgacatgggccagttcagcttccatacacattgctccatcgttcaagtgaggaagggatgagtttcaaaggaattcccaacagtatctccatctaaaatgtgtgtgtggtttgcttatctattgtgcttttgaataaaatagacaatacttgtctatggttattattggctgtatgtctgtatttggatgctctcgatcggtttgcaagtaataagagtgttttcactgtcactttgtatttcgatcaaaaaaaaaaaaaaaaaaaaaaaaaaaaaaaaaaaaaaaaaaaaaaaaaaaaaaaaaaaaaaaaaaaaaaaaaaaaaaaaaaaaaaaaaaaaaaaaaaaaaaaaacctggggggggggcccggcccccaattcccctttatggggggttttttaccccccctccttggccggtttttaaaaacggggggaggggaaaaacccgggggttccccaatttaatccctttggaaaaaatccccttttcccccgtgggggtaaaaagaaaagggccccccccggtcccctttcccaaaaattggcaaacctaaatgggaaagggaacccccctcttaacggcccaaataaccgggggggttgtggggtacccccaaggtacaccttacctttccacgccccaaccccccgtcctttttttttttcttttttttttgcccagtgggcgggtttcccgggaaagttaaaaagggggttccttttgggtccgatatgggtttccggccctcacccaaaaattttgttagggggtgggtcaaatggggccaccccctgaaaaacgttttcccctttgcgtggagcccagttttaatggggatttgtcaaaagggaacaaccaaccattatcggcca

SEQ ID NO: 19140 - DNA, 568 bp, Glycine max
  Clone ID: PAT_MRT3847_117288C.1
tggaattccaggagcattttacatcaaaaactttatgactgatgagtttttcctcgtcagtgttaaactcgaggacattccaaaccatggaaccattgaatttgtttgcaactcatgggtttacaacttcaggagttacaaaaagaatcgcattttctttgtcaatgatgtaagcttctttgtttttttcaattatggtcccaatcaattttgttttcattctttaaatgaaatatattgtagacatatcttccaagtgccacaccagctccactacttaagtacagaaaagaagaattggaggttttaagaggagatggaacagggaagagaaaggactttgacagaatctatgattatgatgtctataatgatttgggcaatccagatggtggtgatcctcgcccaatccttggtgggtctagcatctatccctaccctcgcagggttagaacaggaagagaaaggaccaggacagatcccaacagtgagaaaccgggcgaggtttatgttccaagagatgaaaattttggtcacttgaagtcatcggatttccttacatacggaa

SEQ ID NO: 19141 - DNA, 204 bp, Glycine max
  Clone ID: PAT_MRT3847_117289C.1
aaaccccaaaaactatatccatcgcagttttaaaagagaggggcacccaaaaaaactttccaaatcatttaaccattctctttgcttgcaactcatgggtatacaactcaaaattgtacaaaaaacatcgcattttctatgctaataaggcatatctaccaaattacactccaactccactagtaacgtacataaaataacaat

SEQ ID NO: 19142 - DNA, 279 bp, Glycine max
  unsure (1)..(279): unsure at all n locations
  Clone ID: PAT_MRT3847_11728C.1
cccagttcanaggtaaggtangttaacaaccctcctcaacctcctcccaatgggaccttttattcgttcccaaccttagggaacaaggtccgtcctcaagtcccaaaacgcaacaacgcaaagggcctgcacacttctcgagcccctacttttcggaaagcaaaggggatctcaaaggggtttgcacccaaattttatctaaacccttgcccggggcgcccctctcccaagtcgccttccgccaccctttcagatacaagaagcacaacgagctcttca

SEQ ID NO: 19143 - DNA, 925 bp, Glycine max
  unsure (1)..(925): unsure at all n locations
  Clone ID: PAT_MRT3847_117290C.1
atagntattctgctcggcgggcgccacccctccttagacccatccccgtagtgtcgttcgtttgtatttactaaaaaaaattcaagtaaatcttaaattaaaatatcacaaattgaaaaagtttccaccattaactatatgaaaattagtctcaattatttataccaattataaacatgcattgaaacatgaaaataacgcgatgggagcacacctaaacttgggccaccatagtgtacttgttgcttaattgaatgaatcaaatgaagcatcaccttgatcatctcaacccctttacacatcatctacctcgaggttaaaccacgaattctattagagatgccctcacaaatcccaagaaatatcatgcgcaactccctctccgtcttgtggaaactccatgtttgccaaaataaaccacccgtgaaaatatgtcacagggtcgcagcagcagcagcagaaaaaataccacacttatactagggtgcacgaacctcaatgaagattgtcttcaaaagcctgtctgaaaacgaagtgatgttggcagtgacgatcttgaccttcaaagattcgaacacctcgcaaagtttcaccactgtgtctgtgtccttttgctcaaggactttcattgagcttcttaactgacagaatcatatagatgctctgttatcttcttattggaccacagcagcacaaacagtaccacaagctcactggcatagccgaaccattttttggcaaccattgagccaatgagtattggctagacgcatcgtagtgtctcttgcccctgccagggccaggtgtgctccatcgcctcctgaacaatctcagcctgtcgagcccgtgggccccgaggcgcggctcgttggactccaacatcttttactttgaaattccaggttccagacctggaccaaggatg

SEQ ID NO: 19144 - DNA, 1282 bp, Glycine max
  Clone ID: PAT_MRT3847_117291C.1
gttatttgggttaatccaaactgccaacaccttttccctcacacagaaattggaggggttactttataaaggagtaaagttgacagtaccactgtaagatttcactgacaaaattgttgagactaccatttcagtggagatgtaagggatctagtcatctagaaccatgttattttcactctaattccttcagaaaatcaacattatcaacaaaggccaatatccaaccatgagggtccaggcaaaatacaatcttggtttggaataaaaacaacagacagggcaatagaatttgaatgtggaagtaaaggagacaaacagttctggcttgaggggatccagtatatgttgaattgccgtgtcaaagtaacattataaaaaaaaatacgattgacattgagatagctgtatatatgccttttttttttttctttccctttccctcacacagtgattggaggggttactttattaaggagtagagttgacagtgccactgtaagatttcactgacaaaattgttgagactaccatttcagtggagatgtaagggatctagtcatctagaaccatgcctattgtcactctaattccttcagaaaatcaacattatcaacaaatgccaatttccaaccatcagggtctaagcaagctacaatcttggtgttgatacctggcaagggcccaggttcaaggataatcttccctccacataatttgattgcttctgcagtcttatagacatcatttgtgcctatggcaatctgtgcataaccatttcctttgtcataattagtgacgccatagttatatgtcagttctagaacagtattcttgtcttcaggaccatagcccataaaagctactgtgtacttctgctcagggttgtccctcttgcggagaagtttcattccaacagctttttcatagaaggctatggcacgatcaagatcacctactcgaagcatcacttggcataggggttcagatgtaggtcttctctccaaaagttcaaacttataaccatcaggatcttcaatgaaagcaataactgcactgccatctttaacaggcccgggttcccttgtaacctttcctccttttgcctttattagatctactcttttgtaaatatcttcaactgcaacaccaaaatgaccaaagccacttccaatgtcatagttatccactccataattgtaggtaagttcaactgtaaaattgaaatcttcaggcccataccaagaaaagcattagaatatctgtcttcagagtatatcac

SEQ ID NO: 19145 - DNA, 239 bp, Glycine max
  Clone ID: PAT_MRT3847_117292C.1
cccacgcgtccgcccacgcgtccgcgtggctctctctcattgtcggtgtacgcagatcttagtacactccacgctcttggcacgtgctttctgctgttgttcttgcggattggctttgtggggtgtgacaaattgtggtttttctgttgagagtagctgaaaggtgggtttttgtgtggaaatgagggcgcttttgctggtggggtggtggagtgtatgataataataaagggtggtgg

SEQ ID NO: 19146 - DNA, 433 bp, Glycine max
  Clone ID: PAT_MRT3847_117293C.1
aaaaaaacctaaaccccctggggaccgaacgttttggaacaccctagatacctcccgaaaattaaaacccccgaacgtggggttaaaccttttaattttaagggggaaatttaaaacctggggaaaattgttaaaaaggtggtttccggggaaaaattttttcccgcaaaaaattctaaaaaaaaaaaactcttaaccaaaaaaattaaaaccctgggttccctaaggaaggattaaccttctatttttgggggaacaactaaattccctttttaaaattaaaaaacctgttttcccttgaaattaaaaaaacggcaaaccccccggggaaggtgttttttataattggcccacggggggtttttttttttccaccataagggcgcaaaaaatgtttttcttttaaccactggccctgaaaaaaatttaaata

SEQ ID NO: 19147 - DNA, 515 bp, Glycine max
  Clone ID: PAT_MRT3847_117294C.1
tgttcgcttggggaaattccgattaaccgagatcacaggtttgccgaccttaaaactcggtacaaaagcaatggttacttgatttcaagagtctctcatttttttcctacttttttgtgatcgattccttaagggaaagaaaatcactctctgtgctggccacagactttgtgaatcattttcttttccactcttagtttatttgctgaacactctcctatttgatataggacttcgtgtcagatttaaacttcttctggctctttctcagttctatgttaaatctcaagtccaagctggtgaaatcttggattaatactcccactctcctatctggtataggattttgagggaagacttttctatttatttcctttctatgactctgttcttctcactgatcccaattgccgttcaaagaggtcttatttgaaaaacacttgggcgttggtgccaatgtttgcttctttaatttctctttgagacaacatggtcacttgagaaacaatttttac

SEQ ID NO: 19148 - DNA, 319 bp, Glycine max
  Clone ID: PAT_MRT3847_117295C.1
cgatgatagacataattagtaccaacgggaggagaatcacaggacacggtctctgcaaccgctactatatagttaacaaggcacctacatgcgcacgatatgatccctctacaaaagaacactggctatggggccctgcctccttaggagaactgcacaccccaggagacttgactgagaaaacacacaacatctgtaagcggtgagaccaatactcatacatgttattaggctacaggagaatacatccatggcgaacaatataaatcagactccagaacagataaccaacaagcgcacttttatgccagagacctcg

SEQ ID NO: 19149 - DNA, 256 bp, Glycine max
  unsure (1)..(256): unsure at all n locations
  Clone ID: PAT_MRT3847_117296C.1
ctcagggtcaacatatgatgnttncaatgcaaggntgcggagtaggtatcaagtntattaaccctcctgntgnaacgtatgtnttccacgctagttanccannngctcacggcatattgaatgtctttttatgttatgtgaatactgacatagganatggttcttgtgtccnnnnnnnnnnnnnnnnnnngtacggtttgaatataatcntgnagncgaattatnatttgaaagttatnatatngtaaatcctaga

SEQ ID NO: 19150 - DNA, 337 bp, Glycine max
  Clone ID: PAT_MRT3847_117297C.1
ggaaatcaatatattttaagccttacattgaaacattatacctaaagacaaaggtgggcggccctacctgaccaccatgtgggcttgacaagaggcaacatcttgtaaggtttaaatgattagaatgatcgtctgtccctatatcaaggttactgtcgcagccacacatataagacccttactttattacgtgacctcatttaatattctggtcgtaaacttaaaccatattctatgggctaaccctgcctgaacccacctctgtcgccctgaagtacatatgctgttcatttattggaggacaaccgaataagatctatgcgtgcgtgcttgaaac

SEQ ID NO: 19151 - DNA, 144 bp, Glycine max
  unsure (1)..(144): unsure at all n locations
  Clone ID: PAT_MRT3847_117298C.1
ggaacatntatattttatatgatgaaacaagnnanaatgttctctcangntttatgntagaantatgtantaatctcaaattatagagagtatacaattttantatgtgaatngcagtactttcanggaaaannaaaanaaaag

SEQ ID NO: 19152 - DNA, 728 bp, Glycine max
  unsure (1)..(728): unsure at all n locations
  Clone ID: PAT_MRT3847_117299C.1
acagcctcctatgcaaactgtttggcagaccaaagtggacctgagcattccaccaacaaatgatttcaagaatcatcaagctccagcagttggaatgaacactgacattcaaaaggtatccgagtttggttttgataagtcaaaaagggtcaattttgatccttttgatcttccaagtgatgttagggcacttgcacgaattgtatactctcctcatggtggtgaaattgccattgcttttcttcggggtggagtgcacatcttttctggtccaaattttgcacctgtagacaactatcagattagtgttggatctgcaattgctgctcctgctttttcttcaacaagctgctgttcagcttctgtttggcatgacccaagcaaagatcagacaattttgaaaataatccgggttcttcctcctgctattccaactagtcaagtaaagaccaactcatcaaactgggagcgtgcaattgctgaaaggttttggtggagccttttggttggagttaattggtgggatgctgtgggctgtacacagagtgctgctgaggatggtattgtttcactcaacagtgttatcgcagtcttggatgcagatttccattctcttccttctgctcagcacagacaacattattgtccttgtttcagggatataatattacctgtataatggaccttgcagtagatccttagtcaactagtgcctgcgtcanaaggag

SEQ ID NO: 19153 - DNA, 327 bp, Glycine max
  Clone ID: PAT_MRT3847_11729C.1
aaatggaataaaaaaggccaaatttaaaacaattaaaagtttggttaaataaaccggaacccaaaaaaaaaaagggggattccttgggccttagggtcccaaagggggatccccatgaaaaggtaaatcctggtgggggacctacccctttggtaaaaggaaaattggtctgttaaaccttttagcccaaatgcaattaaatgccaagggggctaattcttaaagcctaaatgggggggccccaaaaaagggccccaaacccccgggatgaaaaacccaccccataaaatttcaagggggccccccaatatatatagggcaccccaa

SEQ ID NO: 19154 - DNA, 399 bp, Glycine max
  unsure (1)..(399): unsure at all n locations
  Clone ID: PAT_MRT3847_1172C.1
tcggctgcataggacacgcagcancggancaccgcggcgaccggcaaaaggacgcaaaaggccgcccaaaaggggaacggcgcgggacggacgaacacacacggcgacaaggaaaaagcgcncagcggacagcccgaaaaggcagcgaacaacccgccggagacgcgccaaaccaaaaacccgaccaccagcnaccaacccaaaaagnaagaggccgacaagggcgcggacgccaaaaacaaacncggcacacggncaacaagcacaccaagacaagaacaaggcaacgacaacccatacacacaacgcancagaangccggacaangagagggcagcaaacaaaccaggccgggaggngaaaagccaagcaacaaagcncgaagaagcacgaaggaag

SEQ ID NO: 19155 - DNA, 688 bp, Glycine max
  Clone ID: PAT_MRT3847_117300C.1
aaaatagatgaagggcaatagaggctgctccgtagtctagcaaacttcgtcgggtatctttatattgatagtcatctatttcccctagtttgatgaagctatgtatacgttgtatcttcctggttgtagtgtattgccctttcttgcatttgtttttccccacaatactaatggtttgaacagcaattagacttctatatgaactgaagttgtttctctaaaaaaaattggagtccatttataaaaaaaaaaaaaaaaaaaaaaaaaaaaaaaaaaaaaaaaaaaagaggggggaaaaaaaaaaaaaaaaaaaaaaaaaaaggggggcccccccttggggagtttttccccccgggatttatttcgggcccggtccctgggggggtcccctttttccttttggggggtggttttaaagtttggggtttttttgggtatagttgtttcttgtggaaaattgtttttctttaacatttccccccattttacggcccgggggcttaaagggtaaagcttggggggcctatggggggggtttcctcacattaatttgggtggggttttttgcccgttttctgttgggaaagccttttgggccgcttgtttttttgaagtggccaaccctctgggaagggggttttttttttttgtccccctggttgttttttttttttcctcgtgggggggg

SEQ ID NO: 19156 - DNA, 219 bp, Glycine max
  unsure (1)..(219): unsure at all n locations
  Clone ID: PAT_MRT3847_117301C.1
gctcgagctagttctagatcgcgggcggtctttcnngatctttatctagtcctgcatcaagaactgactcgggttttaatgtttgtaggaaaggcgggaatgagcatcaataaaggtttcaatttcaaccattcatgacaagtttcacaacatccaaattataaaccattcatttaaacacaatttccacagaacatttgacgatcaaaattcaattga

SEQ ID NO: 19157 - DNA, 571 bp, Glycine max
  Clone ID: PAT_MRT3847_117302C.1
acatgacagaaatctttttgaacattcctcgttcgactcgtctttattgtgtatatagtttgcaagtggggaaaattgagattgggattgggatggcagagaaaaaaagcagagatttttctaaagtaaacatgattttgacactttaaaaagctaataatagatgatggaccagaaaagacatatcctttaaatcttcttttaagtaattatatatgcattatggttaaacattttcattttttttaactaatctacacaatacaatctttcatttgtaagttgtaattgaggattgcttatgatttcagttattatatccttcctatttgatcatttgtataatttgtcttgcctgcatttgcagcttacggaacaaaaaaacaagaggtttcttcacttgttgctacaatccatattctgttacaaaatttggattgaaaattgacaaatcctatagcatttttgaaatttaaaggttttggaactactatagagaagctttttcttcccttagcttctctctcattcaactattgatcaaaaaataattgtgccaaagattttagat

SEQ ID NO: 19158 - DNA, 1416 bp, Glycine max
  Clone ID: PAT_MRT3847_117303C.1
cgaaacaatggttttggttgccctattaaagctgtcttcacggtttccttcttgttcagagagaatcagggaaataattgttcagtgcaaagggaaccttgtattagaattgcagcaaagatccatagaattcaatttgattattgcaaagcatcaaaatattaggtgaggcctacacttgtagagaggatgccagttttggatgaggtgactttcattgctaggagggctggatcttttccaggtgcaggtttaacatcgacaggatcttcagttggcctttcaaatggagtagccaaacctgtggctcctattgtagaccttcttgatatgaattcagatgatgctcctgcaccaagctcttctggtggtgattttcttcaggaccttcttggtgttgatctgtcactggcatcacaacaatctgatgccagtcaaccttcaagaaatggtactgatgttcttttggatctattatctattggatcggcttctgcacctattgaatcacctgcacagagcaactcatctacaattgacatattgtcccccaaacaaagtaaaaaggcaccaatttcaccattagatgatctatcatcactttcactttcttcaagagcaacatcaaatgctggagctgctcccatgatggatttattagatggatttgccccaggcccaccaacagaagaaaacaatgaactagtttatccatctataactgcatttgagagtagctccttgaggttggtgttcaatttctcaaaacagcgtggatactcgcaaacaaccaatattcaggcctcctttacaaatttgaccataaatgtatatacagagtttacttttcaggcagcagttccaaagtttcttcagttgaacttagatccagctagcggcaatactctccctgctagtggaaaggggtccgtcacacaaaatatgaaagttactaatagccaacacggaaagaaatctcttgtcatgcgcataaagatagcatacaagataaatggcaaagagacacaagaagaaggacaaatcaataattttcctcgtgatttatgaggccagttggtcagtggtctatctggttatgcacaaagcctatatattttccgcactttataatcacttgttaaatattcatgatccattctttcacatgaggtctcagtatggttcatgcatttaaccgggtcactttttggaacaaagttgtctattcggtggcttcacatcttcactatagaatttttttccctcttagattgtttatgtaaccattagtacaaattatacctgtatgaaaatgtcgtaaccaattttttcttttcaaggcataaaatattgtatcacgcttagttctttaggtgcttactgttttgcttaagtgttgcatgcagtttgataaaa

SEQ ID NO: 19159 - DNA, 293 bp, Glycine max
  Clone ID: PAT_MRT3847_117304C.1
aaagccaagggggtctggttggttttggcctttatttcaaaaaccccaaggccattaaaacttaaaaccccagtttttccaaagggggttaaggtttatttattaaaaattttgcttaattcttccctattttgaagaaattccaaggtcccaccccaatgaaccaatggcaaccttcttattgcttttaaaaataaattttaaaccttaaggctgaaggaactgaatttggaaaattggttttcttgggttcacccctttggggcaggcccaaccccagtcaattttggggg

SEQ ID NO: 19160 - DNA, 317 bp, Glycine max
  Clone ID: PAT_MRT3847_117305C.1
cacttttgtaacactttatcttctctcttctatattttgcttggcaactgcctccccctatcaacctaaggttttaggttgaactggttgttagactttagagttttcaacatgaaatatgttattgttctcacttctgctagatttctagttcttgatgaccaacctgctaggttttgtgtgtgttttttttatcagagaggtctttgcaaatgcacctttttttatttcagcataggttgctggtgcattggaagcaaggtaaatattaaatcttgctttattgcatgattttctctattttcaagtaatttttg

SEQ ID NO: 19161 - DNA, 370 bp, Glycine max
  unsure (1)..(370): unsure at all n locations
  Clone ID: PAT_MRT3847_117306C.1
ttcgtttccaggaaggtttcccgtcatcactgtatgacagtgctctcttctcttgcggttngngaggagggggggcgagcggagagatagagaccaccgagacgagagagtggaaattaggcgtgaaaccgaagatattaagaaggaccatttagggccttaagacacatagttagttgcaattgaagacaaccgaaagaggctttttgattcgcactggtaaagtggagtgcgaatgggcccatgtagaaaagtacagcgtggtaaagttattaacgttgcgaaagtaaagaggttcgtcgaacatccaagtgaaaaaggcttggatgctacggtaacataggaaccgtgaggatgtggtctgatatat

SEQ ID NO: 19162 - DNA, 427 bp, Glycine max
  Clone ID: PAT_MRT3847_117307C.1
atgaagaagtaccatatcattagcagcaagggtgctgccattattggcagcaaacctccaagtcagtgtagtcgccagcttcgctccgcgtcactcgaattctcctccaagcagatcaatccaggacactgctccctctccagatctacactggagagttcgtcagcacatcaaagcctccctgtccacaccacacgacagtcagagagattggaggtagcagatcaacagctactaccgaggaatgggagtggaaagcgtgcagcggggtcaacgaaaaagtcaaagcggttacgacggaatgcaggaatcgaatgacgcatggattggtttagcggtggcggtggtgggagtgtttgtgacaatgagcaccgacaacagctccagcctgcaagctcatagcctcgccgcgtcatttaacggctag

SEQ ID NO: 19163 - DNA, 798 bp, Glycine max
  unsure (1)..(798): unsure at all n locations
  Clone ID: PAT_MRT3847_117308C.1
ggagtctnnnncacacgtttgcgcattgaggaagaggcatgcagacaagatcagaaagatgaagtgttggttgtgtctgacaacaacaataaaaggaagaacacaggtgcagttctgaagcctactggctaaaactttaagaatcagaaccgcaatgtgaacaatacctccaaccgcaacaagaaccccacaagggtccaacatgctagacaacatccacctgccaagaataatcctggtgaaccattcctctgctacaattgtggcaaaccaggacatatggcacgtaaatgcagaaatccttcaatgacaggtgctccccagtctaacatgactcaagaaccatacatagctgtgataactgagatcaatatgattggaggatcagatggatggtgggtagacactggcgcctcccgccatgtttgctatgatcgtgctatgtttaaaacatacacgaatgttgaaaataagaaagtgctgctgggtgattcccacaccactactgttgctggaactagagatgttgaactgaagtttacctctggaaagactttgatcctcaaagatgtgatgcatactccagagatgagaaagaatctggtttctggttttcttttaaacaaggctgggtttacttagaccataggtgtagatttatttactttgaccaagaatggaatatttgtaaggaaagggtacgccactgatggcatgttcaaattgaatcttgatattaataaagtttctccttctgctttcttgctatgtgattttaatatctggcattatagagtc

SEQ ID NO: 19164 - DNA, 507 bp, Glycine max
  unsure (1)..(507): unsure at all n locations
  Clone ID: PAT_MRT3847_117309C.1
ggctcgagttacaccacaatgggacaaagtagttacactttgaatgacagatcctcatatccaatgacatcaaatgccacgtttgctcttgatccttggcatgaaacatctcgatacagagccaatacaccacctggtggatctccaagaatgagactaatttaagttaagattgtaaatagctatagaaccaaaatatttccacatctccccagtataccttgtggtctttccctctgaggttgaacttcaatttggactctgaagcacaaaccatccaaaatattctgctggtccattctttatacaagagaaccatatacacgagaaccagatgacggaagaaatgattctggccctatgctctcggtgcattggattggggagaccatatttgcttgtaacaatttcttgattattggaaatgcaatgtgcttactgggttngtagtaacgtttatgttggataatgatagttcatggcagaataaaaaaagtaattttcatc

SEQ ID NO: 19165 - DNA, 382 bp, Glycine max
  Clone ID: PAT_MRT3847_11730C.1
ggggtgaatgcgaaaacagaatctgcagagtcttcaaccaaaatccccgtctacaagagacaaaagtctctatttaatgcaaggctaaatcaatttaacaaatataaaaccggatatgctcatattttgacgacattcaaagacgtataatatgtgaatgtacttccttattaaggaccctcagagaatcctattgaagaattgtatcttttgagatgaccacagaacatccatgtcgactactaactacacgttataaaagtaagatgcccaccatccacgcatatatttggagtctttctctgagaaccctgcgcaacatgttttattactgtatcttagacgctcactcttacaacacactgggcaaggatgctctctg

SEQ ID NO: 19166 - DNA, 797 bp, Glycine max
  Clone ID: PAT_MRT3847_117310C.1
ctcgagccgctcttacggaagagtcactgtgcttttcctgcttaaagtgtagtggggttgtgctttttggtttcatctgctgttagattttttttctgaacaaggaaaacagctgcacttgcatcacagctcaagccttaaagctttagttctgaaaaatatagaaaaaaagaagaagatggaaacacgagtgtcttccaccaagatcattcttctgccattacctggctgtttttaatgctttggttgacattattgagggtatgctttaattgaagactttgttgtgcttgtccttggatgtgacacgcaagttttgcttcaacatgtgctgctgcttccaccgaattctcttcaattttactctccatgctggggtgttgttggtgaaagaaagctgagagatcttcagagttgttgatctagtttttcttaaggagaaaatgggactgccgcttattttcttgctaattgagctgcatttagtggtcagcactcagcaggtccatgaatatgcagccaccaagctgcaacattccagtgacagaaaccattttagtattgcaatcccaccaacaaagtcatcttctgaaggtcattcaagtattgcacacccaccttccgagtcatcttctggtgtacctgcaagtattgcactttcaccttccaagtcaattcacaaagctcctagaattatatggacacatggttctgtggattctcctgtattacatcataagcattactattccaaaagaaagtcccacaatccaactccagcgccaacctacccagtc

SEQ ID NO: 19167 - DNA, 2444 bp, Glycine max
  unsure (1)..(2444): unsure at all n locations
  Clone ID: PAT_MRT3847_117311C.1
cggaattcccgggtcgacccacgcgtccgccaattttagcagttagaaattgaccacttggtgtttgtagtagttgcaaagtcgcataattttaatctctaggcatgactaggttcaaacaagtcataatttgttgctacctttttcaatgttttttgttggcattcttaaatcttactattgtggttgcaaaagtgggtcctcaaaagttgattcatttgaaaggctatgtgtagaatcattgatgtattttcttaaatcttacattacatctttgccttgacactcctgactccataattagatgaaaagaagagaagggggtgggngtgggngggtggttaaatcttttcctttttcttgtccgttcttttttatcttcttccgaaattaactttatccattatttgcttccgtaaattcctctctatttggtatgcatagagagagagagagagagagagagagagagagagagagagagagagagagagagagagagagagaatgaatgggtaaaatataaatgtagtagctccgttccgtcaatttctctttctctctccaaaattaaaacggggagcgaggatccaacggtcccaattgggtgtgatggttgttatattcatttgaattaatttggttcattttgtgtctgactttcttagaggatcactcttcttccatcctttcctctctctctctctccctctgcatttcccaagcagagcagatattagaagatggcagacgctgaggatattcaaccccttgtttgcgacaatggaactggaatggtgaaggcaggatttgcaggagacgatgccccacgtgcagtgtttcctagcattgttggtcgtcctcgtcacactggtgtgatggttggtatgggccagaaagatgcatatgttggtgatgaggcacaatctaaacgtggtattctgactctcaagtatcccattgagcatggtattgttagcaactgggatgatatggaaaagatttggcatcataccttctataatgagcttcgtgtggccccagaagagcatccagttctgttgacagaggctcctcttaaccctaaggctaaccgtgagaagatgacccaaattatgtttgagacctttaatgcccctgctatgtatgttgctattcaggctgttctttcactgtatgccagtggtcgtacaactggtattgtgttggattctggggatggtgtcagccacacagtccctatctatgagggttatgccctcccacatgcaatccttcgtcttgatttggctggtcgtgacctcacagatttcttgatgaagattttgactgaacgtggatattcttttaccacctcagcagagcgtgaaattgtgagggatatgaaggaaaagctggcttacatagccctcgactatgagcaagagctagagacatccaagaccagctcttcagtggagaagagctatgagttgcctgatgggcaggttatcactattggcgctgagcgtttcaggtgtccggaggtcttgtaccaaccatccatggtaggaatggaagcatcaggcattcatgaaacgacatacaactccataatgaaatgtgatgttgacatcaggaaagacctgtacggtaacattgtcctttcaggaggtacaaccatgttccctggcatcgctgatagaatgagcaaggaaatctctgctttagccccaagcagcatgaagatcaaggtggtagcacctcctgagagaaagtatagtgtctggattggaggttctatcttggcatccctgagcaccttccaacagatgtggattgcgaaggcagagtacgacgagtctggaccatcaattgttcatagaaagtgcttctaaattgtttgagcaatagggttattgaagaaaaagatagttgttttattcctcgggaagaaatgctgcttgcttgtaaccctttcattctattctaacttttgttactcattcacgttattctctggagtggtgatttggagaaggcgaggagtttgttttgtcataacagtgcaattcttcactattattatatatttttatttttttgagattcaaaaaaaaaaaaaaacaaaaaaaaaaaaaaaaaactcgagactaggatgagagggggagaattcagatgaacctaacagggagttctgaatacaagtctttcacatcagatgaagcaaagtgtcagctagctctctctcttttgcagcctttggtttcttacaagccaagcatgtataaagaccctttgttgttacatgagtagaattaaaatcacacttcccaccaaaaaaatagaaaaaaacttgtctgngtttgttctnngggttagggttggggccgcggtacacntttagctcggaggggtgtcgcctcgcctcatatatgtaataatattaaaatgtgggaggggcg

SEQ ID NO: 19168 - DNA, 636 bp, Glycine max
  Clone ID: PAT_MRT3847_117312C.1
ggggggaaaaaaaaaaattcagggttcaaaaaaaaaaggaaaaaaaccgggaaaaaaacttggcccaaccaaacccccattaaaaatttgccccctaaaaaaaaacaccggaaaccaaaaaaaaggtgggcccaaaaaaaaggccctccccccccaatttttttttaaaaaaaaaaggacaaaagggggggggcataggccccacccccccttgaacctaaccctaacaaacccccttcatctgggcatgggtttttttcctttccaacccaaactttttccaaaggggggggaattcccctgggggccccaaaggaatttttttaaaaaccccaaccctcccatttttttttgcccgggggggcccaagggggctggtgaaaacccctgccggaagggaaaaaaggttatggagaaccttttcccaaatggacccaaaaccccccgggaggggccctgaaaaagcccccttgggaaaacccaaagccctgggacatgttgagaatttgggggccggggggaatcctggcccttttccccccaagccccctaaaaaagggtgaaaaattgggaaattttaaaaaagagggggggggggttttttaagggggggaaaccccccccaaagggcccccc

SEQ ID NO: 19169 - DNA, 318 bp, Glycine max
  unsure (1)..(318): unsure at all n locations
  Clone ID: PAT_MRT3847_117313C.1
tttttcctcttttatttttncttttgggggaaaatgaaacactttttatatatccgcggaacaggggtttaaaatttaattaaggtaaaaaagaaaaaaaaaacctttttttaatgcaggaaaattatctaatgtcaaggggaaaactttgttgacatgtgacaattgtctttaaccccccaattttttcagaaataaaacaaattttcttttaaaaaaagtggattataagggtttttactaaaacaaatttatttaattagtaatgcaatttttttatttattaattagtctttttcaaaccccctttaaagaaaa

SEQ ID NO: 19170 - DNA, 590 bp, Glycine max
  unsure (1)..(590): unsure at all n locations
  Clone ID: PAT_MRT3847_117314C.1
gacacacagatcgtgaaagcgcctttctactctggtctcgtctttggtagaggtctctcacgtccgcacagatcttggctgtgcctgcgcctacggggatagaggaaactgaagcctttggtacatgccacggtggcaatagcagcattattactcctaaatttttcatgcttatcttctgctacacactctctctctctctgctagagcgcgcgctaaaactgtaataagtttaagaagagcaggcaaaagtgaatgtatctatctatctgaaacagcattattatttgttcgctctgtgcaactgcaactgcaactgcaaccaaccgcgctttaccgaatgccaacaaataaagctgtgggtagtgaagatctgggaataatcttagagtaagagtacctaattagatctctcgaatgtctcaaatcgagagctgctgttcctttcacaactacaattgctagggttntgattcattcttaccaatgactaccaaacgggcttacaagcttcaggaatntgtagcacatgcttctactgtcaattgcctcaagattggacggaaatcatccagggttcttgtcactgg

SEQ ID NO: 19171 - DNA, 190 bp, Glycine max
  Clone ID: PAT_MRT3847_117315C.1
cgcgtccgcccacgcatccgtcaagcattgcatccctctttatctgtagtttgttttgtgcttgatataggagatctgccaaatcaagatgggttttaagatcatagtgtgcgttttgcatcagtggctaatttctatgctgctatgatcttggcactcattgccatttacatacttcatacagtggtaa

SEQ ID NO: 19172 - DNA, 101 bp, Glycine max
  Clone ID: PAT_MRT3847_117316C.1
cacggcgggcagtaacagtccctgtcaatgattcttacttgggttgggcggtgaatgagaatgacccacccaatcaatatcacacttgcttattgctgctg

SEQ ID NO: 19173 - DNA, 156 bp, Glycine max
  Clone ID: PAT_MRT3847_117317C.1
gagagtgaggcacacagaaaaaatgggttcttcttcttctatgtcgacggtgtgtgtgattttggcagcagtgagcgctacaggactctgtgtgaggggacgcaggcgagtggatctacaagttggccgaaacgacgtgcccagatggggctgtga

SEQ ID NO: 19174 - DNA, 289 bp, Glycine max
  Clone ID: PAT_MRT3847_117318C.1
cggctctagacggaagcgttttcgattacgcacgcaccttatattacctacgagaaaattattattgcgactattacagagagtagcatgcgcccaacggttatggtcagaaggattagctctcatttggattcttcatcttcctcacgatcctgtgatcgcatactcaagactctcgctagtggcttctcacgtcaatgtggcgtcagacctagatcatctccgacttttccaatcgtgcgcatctgaatccgtcaacaatcacctccttcgtgatccccatgatcgt

SEQ ID NO: 19175 - DNA, 207 bp, Glycine max
  Clone ID: PAT_MRT3847_117319C.1
aattcggctcgagctcaagccgctccagcactgcattactaaaatcttaccagactgaaagcacacgctgcgaaggctgatgttctaaatctactctctgctgtgcggaaagcatcattgatacgcatgatcctttgtattgtatgctgccgttcattacagctactaaacatgatcgggccgaagctttggtctttgactgatcaa

SEQ ID NO: 19176 - DNA, 312 bp, Glycine max
  Clone ID: PAT_MRT3847_11731C.1
ctagatttttctttcatcatctaatatctggagttagctattgtcattccatggtgcatatgcattcagaattttgttgttggtggtaatttaaaagtcctttggaatatcatcttatgcctcctactgcagcttatatgtcatagagatctgaaattggaaaacactctacttgacggatatccatctcctagacttaatacttgtgactctggtttctccaagggggaaacatctcaccaaaatgagcctttatggactagtcctttcatatatatgtttgttgactatcctatttaatttattattcaa

SEQ ID NO: 19177 - DNA, 330 bp, Glycine max
  Clone ID: PAT_MRT3847_117320C.1
gcgcgataataactgggggttaacaataacatccaaaaagagttcagtttcaaaaatctaatcttagcaccctacaaaaagctaaaaatacgggtccagatgctaattacattgaaaggggggggatatttatatttatatgtgaaattagcataaaatatttgatgttgcttaatacaatgggatttccaaggaaaacattggaggttattggaagattctgtccatttactagtgcgggggcctccaaccccatgacaacacttgcatacaactccaggcgttgaaaaaatctttgagtaccctgttttccatgtgaagacaaacttt

SEQ ID NO: 19178 - DNA, 267 bp, Glycine max
  Clone ID: PAT_MRT3847_117321C.1
gacaattcaccacagactaacagtaagcttgcacataacaatcttgttcccaaccgcgctcttgaatctggacaccaggactggctacaaaaccactgagcaagctcattattgctctctgcccattttgattgaactgtatatctgctgttcataccatgtctaggaaagaaagctgtcctctcattgtgaccttgtattaggtttgaagcttgcggatcttgattcacattgtatacctatcctcttgcatagactagataacca

SEQ ID NO: 19179 - DNA, 513 bp, Glycine max
  unsure (1)..(513): unsure at all n locations
  Clone ID: PAT_MRT3847_117322C.1
cgtaagcttggatcctntagattggncgggcttggtaaggcttttttaatagaannaaangntgattttntgagtaggtttataattngtttggtttagagagtaaaaggaaaatanantttttgttatttgtataatgtgtgggggaaaaaagaagaaataagggaagattgggagaattttttctagngggggtgggaagatcaaaatagtatttgggntgtaaaatttgcgaaagtgaggtgggtcggggggtcacaaatctggatgggcaacggtatgatcaatgacaaagttctcgatcttacgaaacgactcaatagcaatgtcagtttggtgttagcttccatacatgagaaggaccctggttagaagcaagnttgtaaagagaaaccctcccatcaggagttcgataagcatcgcccctttgctccaggagcatgctgagnataaaaaaagccattgggtacggatcaccggatgggtgaactagaaaaggacgggaggaagacc

SEQ ID NO: 19180 - DNA, 506 bp, Glycine max
  Clone ID: PAT_MRT3847_117323C.1
ttaggccctccaaatgcctaggattattgatctaagccctcaacgactcttagaacttgtgcaatctctttcattttcacaacatatgatctttagtgcttcctaggatttctttttctctgcttaacctcctcattctccggtcgtaactcattcacgatgattgtgatttgttgtagggttggaggatcaagagcctaattatgtagtcccatttagtgacgatttcataatcacctagtgtgtgtcactacaaagctacaagggtgtggggaatagtttcaccatagtcacacggtgggtactaaaatgttagggtataggtttccttagggcttaaggccacatagccaaaagcatgtgagtacgtaatttgtgcttcataagtgaactccctaggtttatatgtgcataactaatatccagtccactctcaagtttttttcaagtggtttctctatatcgtaggttaaccatcctttagtatctttgcactagtgggtaag

SEQ ID NO: 19181 - DNA, 394 bp, Glycine max
  Clone ID: PAT_MRT3847_117324C.1
ggggagaaggaaaagaacttttcatatatcaaatcgctgctatatacatttaaatctacattgaaaatacaccagctaagggaaacctcaagtagcattgagaactttcgtccctcattatgattattctctcttccccgctctagggctaaacatcatgaggcaattccattaagcatgtcaaactccaaaccacccttatatattaagccaaggttaatgcatactcatatacaccttcctcccaatagattattctgcatgctttctccttaatcccacctttgccgctgacttgattgcaattgaactatatgcaacaaagctcttgtacttgatccttcaatgcatgctagcggcttctctagggtggtaattggtatcattacccaca

SEQ ID NO: 19182 - DNA, 320 bp, Glycine max
  Clone ID: PAT_MRT3847_117325C.1
attaagaaacaaaatgccatcaaatcactaatttgcaaccaggttcactcgaaaaattacaaacaaccgctgggagctcttccttccccccccccacatgaacggggacaccatcttcatcgatccctgccctgctgaatacatactgaacagcagatgataattggtgcgccggcttttacaaaagacactcgattgtgggacggatactgcacattcccgaaaacacggttgaatatacgaccacaatggatggagggatggaattctgacggcagacacaaaaaaccgccttaagaaagcctgtctactactgatta

SEQ ID NO: 19183 - DNA, 688 bp, Glycine max
  Clone ID: PAT_MRT3847_117326C.1
cggctgcaggaggaatatgtttgaaaccccaccaaggtttcatatcaaacatcagtagtcgtttaatcatttctcggcagttctccctgctgagtgtgctgttgcagaggtagccagttaacatgggacctggtgggccagggggtcctgggcctggtggacctagttggggtcctgggcctggtggacctggttggggtcctggtggtggaggacctggcgggccaggatggggtcctgggcctggtgggccaggctggggtccaggcctgggtggacctggcttctttgggcctggcggacctggcttctttgggcctgatgggttttttggtggatgtgcaaatggtttatgcagccttgtatcttcatgcttctactgcttgtgctgttgttggtttttccgagattgttttggtggtccaggcatggcacctcctttctgataacaggaacattatcactgttattattattaatttggattagaagagttgaagatttacttgctgccgcccatgactgtcagaccatgtccattgttcatttaattcgagggttgtgttatttgtatttcattccagtttttatgctttagctgactcccaagtcacttttttatcccatgtaatcagaggctattgttattatacacgtcttatttataatagtctataacttcatcatt

SEQ ID NO: 19184 - DNA, 641 bp, Glycine max
  Clone ID: PAT_MRT3847_117327C.1
ctcttctaagttctaacttctaacgctccttctctcactctgtgctgtgtgtgagaaagagaaaccaaacacaaggaattagaatggcaaaggtaagagatcagaagctatacgtcaccgttccgagtctctttcggtgcccaatctccatggacgtgatgcgctctcccgtaagcctctgcaccggcgtcacatacgatcgcgccagcattcagcactggctcgactcaggacacgacacgtgtcccgccaccatgcaggttcttccctccaaagacttcatccccaatctcacgctccaccgcctcatccgcctctggctcctctcctccccctcctcctcctccgccgccgaacctccctccccctcctcctccgccgaccacctccgccctctcctccgccaaatccaaacctccgacgacaacgtccccggtattctctccaaaatcgccgaattcgccaagaaatccggtgagaatcgccggtctctcgccgccttccccggcttcgactccgccgtggtccgcgcgctcgccggaggcaattcactcatcgacgtggcggaaaacgcgatctatcttctcggttcagttttccgaggaaacggaaagtcaactggagagaggaatccaaagctg

SEQ ID NO: 19185 - DNA, 271 bp, Glycine max
  Clone ID: PAT_MRT3847_117328C.1
tgatatgcttgattaaatttaattactgaagacgttaagtagatgcatgtccaattcagggactgaggaaaaaactgtaggtggtctttctgctttaataaatttgggttaatcaacaagggacaatactattggaacgtgtatttatccagttcatatggtggctagagagaggtgggaacataaaagagcagctatggcggacgtttagtttcattgtggtgtcctttgtcagtgagtgtctggtgtatgtgtcactcattggggataa

SEQ ID NO: 19186 - DNA, 348 bp, Glycine max
  Clone ID: PAT_MRT3847_117329C.1
gaatttcagaccaaccccaagtagactttctaacatgtccatggcctaattttttttcctttggatgtttgtacaatcgagtttgacaatccaatgaaattagactattctatattctttatcaagcttcagtctttttgctattgggtgatctagtttcagatccttgtcttttgaatgctgaaaaattgggtacataacaaaacaaaaaattgatgtttgagttagttagataaaaacttaaactagtgatttatgtgtgcattattattcctttgcctgttgatagagataacaattatttgctgtctgtctcataattataggaattggaaatattcttgccat

SEQ ID NO: 19187 - DNA, 278 bp, Glycine max
  Clone ID: PAT_MRT3847_11732C.1
aattcggctcgaggtattctaagtgttttggccggtcttttgactacagtttgttttccaagttatgacaaatggccatgcagagaacatgatggaactgaagaaaggaagaatgtggacacttccaatgcgattcttatacggatcaacagtaacaggtgaacaaactgtattctaagtgttttggccggtcttttgactactttattggaaaatttactttgttcattcgcataagtttatattggatttcttatctaaaaaaaggtttattattt

SEQ ID NO: 19188 - DNA, 822 bp, Glycine max
  Clone ID: PAT_MRT3847_117330C.1
cttccaaagatttgatttcgctcactgaacggatcccccatccccatctttgaaattttcacctctctcgtgtgatggagaagtaggatgaagagggggctgatgatgtaccaaacattacagcagtggtcggagtgcctcggttaccactctcagactcgaagattaggaccactcctttgattccaccaacaattacaatcattgattttcccttctctggtgcgtccaaatcccccaccatcaagatcagaaagataaggattacggataagtggtttttacgggatgggtacattagcttcctttatgctgattcagttggaagtgtatcagaagcttttggaaatttattgatggaacaggatgcggtgctgcaatgcagaaagtgtgttgctttataggagtcaaaggaatcacaaagtgagtttgttggatatttggactgccattcctttttaacaaatgatagcagctccatggtgaagtataaggtttctacactgaaactttggaaagcatggttgggttggtatcagataacatggaaattgaaaccttcacatgatagatagtagtgtaaagctagatattgtggtctagaaatgctttaattagctattgtttctatattgctggtttgttttggaagttggcataaatcaatgatgcatagatctgtcagttggtgttccacggttatagaagatttattattgttcttggagtctatgagggatgcagggggaatgagtcactgtcattgtctcttgaaattttatttttattgtcccttgaattataatttgacttgataacctt

SEQ ID NO: 19189 - DNA, 440 bp, Glycine max
  Clone ID: PAT_MRT3847_117331C.1
gtattattaatactttatatacttctttttaataaaacacaagtattttttacactagacaatctactcaagttgagttagataagattattttaaatgataaatttttttcctctaagtatttaatatatagttagatacttataacacaagttaaaaattaataattttttattcaacaacaacaacaacgtctcatcccactaggtgagatcgactacatggatcaacttccgccataatgttctatcacttctatccaaattttttattcataaaaataaaaaacagatgataaagagtatataataacctagattttttggattaaaattagaataaatttgtgtaagttgatatatttgctaagtgatattaatacttcatgtataactaaatagaatagaataaaacagatatgcgtatataataaggttgta

SEQ ID NO: 19190 - DNA, 229 bp, Glycine max
  Clone ID: PAT_MRT3847_117332C.1
gctcggattcggtcctcgaagtcgggaggccgaccattcttcctgaccgacaccgcccttccgggggagacctctcttataacgacgctccccgcgacgcgcctccgctttatcgacgctcccttccgtcgattcgttcctttccgaccgggtggtacctcatccgactcctccgcgataatatcttctcgcctcctctcgaccgggatcggcacgcgcccggactctc

SEQ ID NO: 19191 - DNA, 213 bp, Glycine max
  Clone ID: PAT_MRT3847_117333C.1
accatggtccagagagcttactgacgaggaagctgcaccttttctttcacttagctttattgatggaaccgaatggatcaaagtgtagtttaatcaatacacaatatttatttatttttatattgattttctttggagaaaacactttgatgtataaattatatattgttagaaccagagaaaagaattttatgtaatgccgtgagaaactgt

SEQ ID NO: 19192 - DNA, 570 bp, Glycine max
  Clone ID: PAT_MRT3847_117334C.1
gttcgtgatcctattcttttccctagcttcattcacactcaaaagcgtaatccagcaacccacctcaaggacgttaacatggtttgggacttctttaccctgagacctgaatcaacccaccaggccatgtttttgttctccgaccgcggaattcccgatggttaccgtaaaatgaatggatatggatctcacacattcaaacttgtcaatgacaaaaacgaagtggtctattgtaaattccacatgaagactgcacaaggaatcaaaaacttgcctgtagataaggctgagcaaatatctgcgcaagacccagattactctatccgagacctgtacaatgccatcgccaatggtgactatcctaagtggaacttcttcattcaagttatgacagttgcacaggctgaaaagaacaagttcaatccctttgatgttaccaaggtttggtctcacaaggagttccccctgattcctgtcggtcagttggtcttggatagaaacccaaccaactattttgctgaagtggagcaaattgcctttgctccctcccacttggttcctggtattgag

SEQ ID NO: 19193 - DNA, 117 bp, Glycine max
  Clone ID: PAT_MRT3847_117335C.1
gaggactcgtaggagctgtctgtagctccattgaagataaagagactgcagagagaaggacatctacgagttgttgtacgtgataggagaggataataggagcatatataatgacac

SEQ ID NO: 19194 - DNA, 334 bp, Glycine max
  Clone ID: PAT_MRT3847_117336C.1
ttatgctaaaaacaataaaaacttaaatttatcaaagataataaaaatccacattgacacgaaggatgccccataatcatagaatagtatgttatcaaactgcaacatgaacttttataatacagaaccaaacacaacataaactggaaaatgtaacaggttctgaattatttatcaaatatatgcactcagctcatacatctgaatcataaaaactaaagttccgtgcaatcgacatattgaccggaactaactagatagctgccaagatgataaaaaaaaaaactgctcggaccgacaatttaggatctgcaggacggaagagagatgcctg

SEQ ID NO: 19195 - DNA, 725 bp, Glycine max
  unsure (1)..(725): unsure at all n locations
  Clone ID: PAT_MRT3847_117337C.1
cccacgcgtccgcccacgcgtccggttgggagcttatgtctcaaggaaactaggtttcaagcacttattgacagtggatcttctttcacatttcttcccaatgaagtttatcaaaaagttgtaacagagtttgacaaacaagtaaatgcgtccaggattgttctccaaagttcatgggagtactgctataatgccaggaacaggaatacaccatcttttgtttgcctgtaagcccttctgctgatgactacgctgccattggacagaacttcctgatgggttatcgattggtgtttgatcgggagaatctaaggtttggctggtctagatggaattgccaagatagagctagtttcacatcaccttccaatgggggatcaccaaaccctttaccggcaaatcagcagcagactgtccctaatgctcgtggtgtaccgcctgccattgctggacacacgtnccccaaaccctctgcagccacacctgaacttattacctctaggcattccttagtttcattgttactgatatgtcacctttggctttggttattttgttaagtcttatcttatttgcttgtaaatttatctcgtgtccagacttaaaacctatgaggtttagtttttcaattttgtaggctgttgtatctattggggttagtgtgttagtgaggtacttttttttaccaaaataaataaaagtacctcacttttatttattttggt

SEQ ID NO: 19196 - DNA, 2111 bp, Glycine max
  unsure (1)..(2111): unsure at all n locations
  Clone ID: PAT_MRT3847_117338C.1
ccacgcatcatggtcgcctttctcatggaaaaacagtcttggaacccacaaaggtgcatgctccgcaccccacccctaccaccctctctctcccctgaagagaacaaaaaaaagcttcaaagtttcaaactttgcaccaccccacctgcaaattcaaggatcagaactccttttccccaaaatttaactccttttccgcatacccatttgggttttgttcgtgtaacagttacttctggaactaaagttaaactttttttttccttccttagttgggtactttgggtttagctttttgtcttctttttccatggggattgggcttcttctgtggctgttactggccaagggtctttccatggagggtgctgtgggggccacattttcttcaaggctcattcaccggttctctgaggaggccaaggctcatttggcttcaaggggcttcaaaagttctgtgcttcttcaagcgtggcctcagaggaacagctctgagtgttgctgtttgcttcttaggggtgacataccaaggcgtacgatgatgcttggcacgcagtatgagtctttttacccttctgctctaatgcaggacagcttctttggcaatgcgcgacattcgttgcattacacatggatcgatatagtgggtccaaatgtttcatttcttgttgcattagatgctggaagtgacatgcttttgggttccctgtgactgcattgaatgtgcttccctgtcggccggtaattacaatgtgttgatgctcccttttatatgggggcatctctgatgcaggacagggatctgaatcagtatagaccatcattatccaacaccagcaggcatctaccttgtggtcataagttgtgtgatgtccattccttttgcaaaggctctaaggatccttgcccttatgaagttcagtatgcctcagctaatacctcaagttctggatatgtttttgaagacaaactacatttgacatccgatggcaaacatgcagaacaaaattctgtgcaagcctctatcattttaggttgtggaaggaaacaaactggtgactatttacatggagctggtcctgatggtgttctaggcctagggcctggaaacatttcagtcccaagtttactggcaaaggcaggacttattcagaattccttttcgatttgtctagatgagaatgaatcggggagaattatctttggtgatcaaggtcatgtcacccaacattctacaccattcttacccatggatgggaaatttattgcctacatggttggagtagagagcttttgtgttgggagcttatgtctcaaggaaactaggtttcaagcacttattgacagtggatcttctttcacatttcttcccaatgaagtttatcaaaaagttgtaacagagtttgacaaacaagtaaatgcgtccaggattgttctccaaagttcatgggagtactgctataatgccagttcacaggagttggttaacattccaccattgaaactcgctttttctaggaatcaaacttttttaattcaaaatcctattttttatgatcctgctagtcaggaacaggaatacaccatcttttgtttgcctgtaagcccttctgctgatgactacgctgccattggacagaacttcctgatgggttatcgattggtgtttgatcgggagaatctaaggtttggctggtctagatggaattgccaagatagagctagtttcacatcaccttccaatgggggatcaccaaaccctttaccggcaaatcagcagcagactgtccctaatgctcgtggtgtaccgcctgccattgctggacacacgtcccccaaaccctctgcagccacacctggacttgttactacctctaggcattccttagcttcattgttactgatatgtcacctttggctttggttatcttgttaagtttaatcttatttgcttgtaaatttatcttgtgtccagactcaaatctatatgaggctcagtttttcaattttgtaggctgttgtatctattggggttagtgtctaggtgaggtacttttatttcttttggtatattctttcggtnnnngtccctttttattctctgtcctatg

SEQ ID NO: 19197 - DNA, 504 bp, Glycine max
  Clone ID: PAT_MRT3847_117339C.1
gaaaagccttcgaggtcccaaaagagtcataatttgcctcaaagccatgtcttgctggtctgcagaaaatgccacaaaggcttatctcaacacattgaaaatgggtcaaaaggccaaagaacccgcggttgcagagttcatatcagcactagccgctggcaacactgcacaactaatggttgtggcatgtgctggtgcagcagactcaaccacactagcattggtcactgctgcacaccaaactggtggtcttctggatcaaaaactcagttgttgcctataggaaaagggcttttggtgacaagatttggagcaagtgctactagtccaaaatatggatctggagtgagtaagatcaaaagtagtcgttggattgtcaaggtggacaaatgcactggtgaagaacatgtgtataggatcagagttccacaaggaaaagtgatttaagcttaatcatatggttaattgggatggagattgacaagagtaggattatttattagc

SEQ ID NO: 19198 - DNA, 202 bp, Glycine max
  Clone ID: PAT_MRT3847_11733C.1
gtgttcatgaacgcctttcttctccgtttccgtttcctcgttcggattcgctttttgctctgcggaaatgagagagcgcatgtcgatccacattggtcagtctggtatccaggtcggaaatgcatggtgggagctctgctgcctcgagcacggcatcgggcccgatgtgcagatgccacgtgacactacagttggcggtggt

SEQ ID NO: 19199 - DNA, 1017 bp, Glycine max
  Clone ID: PAT_MRT3847_117340C.1
gagcaagagaaatggttgttttgatctccattagaagtacttatgcaagacaataaaatttttcaaaccaatttttgaaataatatatatctataatttgctatatacatttgaagcaggaccagctcctaggttctttctaattgcaaaatttaactactccattttccctaggaaataactggtaaagtagcttgtggtggctaataaataatcctactcttgtcaatctccatcccaattaaccatatgattaagcttaaatcacttttccttgtggaactctgatcctatacacatgttcttcaccagtgcatttgtccaccttgacaatccaacgactacttttgatcttactcactccagatccatattttggactagtagcacttgctccagatcttgtcactaacaacccttttcctataggcaacaactgagtttttgatccagaagaccaccaagaccctctacaattaagtgcattgtagccaacaacaactgtgccattttgcatgccacctacttggattgctttaacaatctctccatggttcacaaggttgcaatcaatgagcacaaaatctgcttgacttaacatcactagttcttgttgagcctctccaaccatgaattggacttgacttgcatttactccaataaggacttttttggaggcacttaaatcctcatgtctagggacaatgcaaacgacatggccaccagtttggtgtgcagcagtgaccaatgctagtgtggttgagtctgctgcaccagcacatgccacaaccattagttgtgcattgttgccagcagctagtgctgatatgaactctgcaacagctggctctttggccttttgacccattttcaatgtgttgagataggcctttgtggcattttctgcagaccagcaagccatggctttgatgcaaattatgactcttttgggtcctctaaggcttttcttggaaggaatgaaagagggtattcaatgcggacgcgtgggctggtgcc

SEQ ID NO: 19200 - DNA, 158 bp, Glycine max
  Clone ID: PAT_MRT3847_117341C.1
cgaaaaaatgttatcgagtggtgggtctaaggagtgaagatttgagttcggttgtatgtggagaaaattggttaaaggaggacaatccacttaccaatacattcaaatgtctacaatgaattaaatagtgtagataaacaatcgaaaacattcctgca

SEQ ID NO: 19201 - DNA, 402 bp, Glycine max
  Clone ID: PAT_MRT3847_117342C.1
atttttaaaattaaagatgaaaatttggaagtaaattgtttgaatcaagaaataccgtctcaatgtcttctaatttgatgccaaaatctaaacttggagtaaaatttcgatttgactaaatttaagcaataatatatgaaagaaataaaatttagaaataaaatgtgaaatacataacgtaggagaagccacttggggcttattgagaaagactgtaggtcttagaattcatctcacctaagaatgactacgtagatttatattttataatgaaggggtggatagagattgggatttgttttgataagctctccaataaaatgctttcattgtacccatatttttatttctagatatcttagctggaaatatgggtaaaacgagtgagatttgtgtcgcaat

SEQ ID NO: 19202 - DNA, 326 bp, Glycine max
  unsure (1)..(326): unsure at all n locations
  Clone ID: PAT_MRT3847_117343C.1
cncgcntacgtnagctcggaattcggctcgagnngnnanctgattctnctgcttcagtaatcctnngtnacnagggtgacngcattnnagcatcntacntccntcatccggctctatngaagaagantgcngntgttgcanagatcacnaganagnnctcaacnnatgagancatnnttacagtaggngggncntntgctntngancctcngacacaggtcnangcaaggctcaacnatcatggnaagctnggggccntcctgnagcatnngatcataccagagtcagtgtntactnannctggtgagatggacacnaaggnctgg

SEQ ID NO: 19203 - DNA, 710 bp, Glycine max
  Clone ID: PAT_MRT3847_117344C.1
tttccctgtgtggcttgcggtgggttgatatctgacaaaaaaatgggcggaggaggagcaatgaggtcggcggcggcgaagatcgccggcatcggcatttccaaggcggcgctccgtccttcggcgctcccgacggagcaggcggtccacaacgcgtcgagaccgacatcggttgtcggagtgaagggggcgaaatccactgaggttgcgtcgcttcacgcggcagcgccgtgggacgactgggacttggccgacgacggcgatttggtcgtgccgaggatggtgttcggctctgtccccactttcgctgaagctaaggaagccaccgcagaattgaaggatgctattgatcaagtatatctttctcctgagtcctctcaatattcatctcgtggtggtcaagtctctgctttgtctcctactggtggtcaagtctctgctttgtctcctactctttatgagccagtgaacagatcttgtgtagttgatgctatttcagattcttcagcgccaaagcatgccattcaagcttttcatttgcttagcacaagtcgtgatggtgtttcaagtcaaaattacagtattcgcacatgtggcttcacttgcttgtcacaaaaatgtatggaatgcagtcatggaaaatcctgccgtcagtagtttcttccaatcacaacagtcagtggctgatcttggagcagcaggaaatactg

SEQ ID NO: 19204 - DNA, 493 bp, Glycine max
  Clone ID: PAT_MRT3847_117345C.1
ggctcgagcacattgacatcatcagccatggctgcctgcgtctcctctgtcggagctgtcaacagagcgtctcttcaacctgaatggatctggatctggaacttcagctcccagtacatacttctttgggaccagctggaagaaggctcttgcctcaagggtccccaactgcaaggaatccgcgtgaagcttcagatagttgttgtcaacagaagatagagattgatgagacccacacagaccgacatcggacagatgcgaaggatcttgcctatgatatctcagacgaccagcgagacttcacaacaggagagggtgtgcttgacgtccattcccaagctgcacaggacgctggaactcactatgcagtcatgagcttctacgagtgcctcagcactggacttcgcagtacttggacatcaaaacgtatggattctacattgctacagctcttatggacgatcatgatgatcacatcgaccagaacttcatg

SEQ ID NO: 19205 - DNA, 108 bp, Glycine max
  Clone ID: PAT_MRT3847_117346C.1
tcggctctagctcgtcgagcctgagctcttttcgccctgcaaggccactcttccccatctcagctgtggagaaaaccaacgaggctgctgccgctggggaggatcccc

SEQ ID NO: 19206 - DNA, 190 bp, Glycine max
  Clone ID: PAT_MRT3847_117347C.1
gctacacctatggggatggcccacctcctgagggtgttcatttttgcaaagccaaacacggcctgtccttacactgaccaacactcgttgatgaagactgcctctctccattttgaaaacaggttaacttggaattgttagtcaagtcaaacagaatgtgcaggtagaatatagcgaatgaactaatatc

SEQ ID NO: 19207 - DNA, 266 bp, Glycine max
  Clone ID: PAT_MRT3847_117348C.1
atcattactacctcttgaaaccacgagggtcactctgtgctatgacctcagtttcaaacgaaagccttgttcatttccgtgacattccttcctatcacagtcatctaacctacaactcagataattcatttactctatatcctcagttgagttacaaccgtttcgaatgtgaatacctgcagataccagctattcagttagggtatcacatcaggccaccactcttatattgattattacagagcaagatgcaccagctcacacat

SEQ ID NO: 19208 - DNA, 799 bp, Glycine max
  Clone ID: PAT_MRT3847_117349C.1
ccacgcgtccgcccacgcgtccgtacggctgcgagaagacgacagaagggggtttcagtttgttgaggttataccaccttcctccaatcaatatactctacctatctatctcttcttctttgcaaatcaataatgggtttggatttgttcttttggtttgtgctttgtttgcctctcaactttgcttttttagcctcaacgttctaccaggttttgatgttgtctgacttggaagctgactttatcaacccctatgacgctgcatctcggattaactactttatcgttcctgagtttattgggcagggattgttgtgcgctttctgccttttaactggtcattggatcatgtttttgattacggttcctgttacatgctatcatgtgatgctgtacatgaaacggaagcatctcattgatgttactgaggtgtttaggttacttaatgctgagaagaaatttcggatagccaaaattttgcttattacttaacaatcatctttatatctatcttcaggcttgtattgatgcttgtctactatttagattctgaagatgaatgaggtgcacaaacctttaaatacccactacttgtgcactatggtgtaaggaggtgcttctttttcattttctctttttttgttaattcttttttgagggtgtgattgagttttatagcataagatttagtacttaaaaatcacagctctaggaggaaacaaaaatctgtcactaatttgaatgagtatcgacaactcaggtataacattatttgactcctgttaagcatgttcccttg

SEQ ID NO: 19209 - DNA, 303 bp, Glycine max
  Clone ID: PAT_MRT3847_11734C.1
gggtggaatttatataggtagcgggtaccaaaataaaatttatgacaacaatccatctattccacctttagaactgacaaaaaaaatatacactctcagtcaaaggctttcaaatcctaagctgccttagagcttaagggattctttgcaggggataaacctatactaatgtaaaagcccggcattctttacactacaattgagcacgactcccccacatgataggccggggactaagaagagattgtgagggattcacaaacagaaaatggtagcagagtgctgccacattgctcacctttt

SEQ ID NO: 19210 - DNA, 827 bp, Glycine max
  Clone ID: PAT_MRT3847_117350C.1
aattggaacacagaatagaataatagtaaaaaaagtaaaacacaatgaagcagttcggctcgaggtgggcacttatctgaattgagcggggaaatggaaaaagaggaggaggagcagcgcgagtggaggctatacgaaggctacaatgagctccacgcgctggcccaggacttgcacacgcccttcgacgcccccgccgtcttggtcgtcggccaccagaccgacggcaagagcgccctagtcgaggccctgatgggcttccagttcaaccacgtcggcggcggcaccaaaacccgccgccccatcaccctccacatgaaatacgaccctcaatgcgagtccccttcctgccacctcgtctccgactccgacccttctctttcccaccataaatccctcccccaaatccaggcatatattgaagcggaaaatgcgaggttggagcaggacacgagccaattctctgccaaagaaatcatcatcaaagttgaatacaagtactgccccaacctcaccatcatcgacactcccggcctcatcgcgccggctccgggccggaagaaccgtgctctgcaggcgcaggcgcgtgccgtggagtcgctggtgcgggaaaagatgcagcacaaggagttcatcatcctctgccttgaagattgcagcgactggagcaacgccaccacgagggcgcgtcgtcatgcaggtcgatcccgaattggccaggacagtcatcgtgtccaccaagctggacaccaggattcctcagtttgcacgtccttctgatgttgaggtcttcctctcgccgccgccgtcgacgctcgacggctgca

SEQ ID NO: 19211 - DNA, 173 bp, Glycine max
  unsure (1)..(173): unsure at all n locations
  Clone ID: PAT_MRT3847_117351C.1
aaactaattaactatctctntctctgtctcnacaaaactnagctctgttttntaattattgccntgcatnctcttganttacanatggaancaactaatggccaccanaatggtnngttttgcttgtcccantactaagggaagtgatccgtgtaaactggggagcggcggcg

SEQ ID NO: 19212 - DNA, 107 bp, Glycine max
  Clone ID: PAT_MRT3847_117352C.1
agggttttcattgaattccatcatccatctaatgcttatgctggagactaaacacagtaaaagtttaactctaactgatccgttgaatcttgacacactaaggttta

SEQ ID NO: 19213 - DNA, 446 bp, Glycine max
  Clone ID: PAT_MRT3847_117353C.1
ttgtttctcccctgctttcaccacctgattgagttctctttgtcatcccacaaaaattgttaccaccaaaagaaaaatcaatcatcgctctgatccccgcttgctctcttctctgatttttgttctgttctttctacaacactaaatttaagatgggtaggtctaaaggaaacaactttggcatccgattctgtttttgatttgatcggtgtacagattctaaaattttgttctttctttaattggacgaccaaatctgtgaatctgagtcctgaacttggatcactctgattcgaatctttctttggctcacacccatcttgttatttgtcattaatttcctcggaacaagaacaaggtttgattttgaagagagtgagcagagtgttgcttaattatagacactcatggctgcagcgaacagtggcaaatccgtgtgggagatg

SEQ ID NO: 19214 - DNA, 139 bp, Glycine max
  Clone ID: PAT_MRT3847_117354C.1
gggcctatagaaagggtacctctagaatgctttatatggatcaagaggaccgacttatggcaccaatgttgccaactaccctccatgctccaacccagagctggtgaagggtgtttgttctcactctgatgccggagga

SEQ ID NO: 19215 - DNA, 289 bp, Glycine max
  Clone ID: PAT_MRT3847_117355C.1
accagagtactacaagggaagaagaacttattctcaatctaaggaaggatcaaagagaatggctcatgcaatagcatcaatgactagcttacatgattcctctcaggctgtgttggaatgtagccattacttcacacactttaatgtactgagtggcaacaacctttcctaatttacacatgcagacatcacaattagaccacagcaacaacaatttaattgctgatatgtacaaagcatccttatgacattactttcactcactgctactgtattgaccactttctct

SEQ ID NO: 19216 - DNA, 266 bp, Glycine max
  Clone ID: PAT_MRT3847_117356C.1
gctgttgctaggacattagctccatgatttttagataacaatctgtatcacattcaaacattgcaacatgaaaggaggatgacccgaacttgctactcaacaatgtcattcataccttcaggaggagatactatatggggtggagttgattgggcaccataagaaggctttcaccctagccagagaaagcgcagctatagcaatactcacttgaaagacctctaaacaaatcaaacacattttgaaaactatggacaaatgatttc

SEQ ID NO: 19217 - DNA, 389 bp, Glycine max
  Clone ID: PAT_MRT3847_117357C.1
gttctagatcgcgagcggcctccctattttctgtggttggaacttaaaggccttggcaattcgatttggtttatgaagatttaatcacccgtaattttgggttcccgtgttccgactttaactggaagttaagggatgagacctaatgaaaaatagaaacatcgaaatccgtatcacactttgtgtgtatgacccatataaagctgttaaattgaagcaatatcattactaaaagttctgagtgttcaagacactggggggcacttttaagggagaccaatttaaaacccctgacttgaaacttaagaacttcttatatgtgtagctaaaactaagaccaatggccccactttttaaaatctttagatggtaaaaaccatgtggttccc

SEQ ID NO: 19218 - DNA, 351 bp, Glycine max
  Clone ID: PAT_MRT3847_117358C.1
cccacgcgtccgcccacgcgtccgcccacgcgtccgcgggactgtaactagccgcagcacgaggagcagcctcaggttctcccatcttcactctctctagcaattgctcatgctccttttctcttcttcgtttgcatttcgagattcgtaggaaaaatgatgttgttgacgatgcagtttcatgtctgttttcgttgtcacatttccgaatccgaacgcgatagtagtgacaatattaacaacgatttctttcctcattttgtcgtgttaaaatttatcaccctgctctcggtttcattacttgccgttaattttaatttttggttttggaagaaggaaaagatgtctcac

SEQ ID NO: 19219 - DNA, 540 bp, Glycine max
  Clone ID: PAT_MRT3847_117359C.1
ccccttggaaaaaaaaagatttgcgaggggggcattatctaaaacctgggggcggggagatgcctagggtgctaaacccccccactggtcccctattgggtgttgccctccacggcctggtaaagggggggcttgctcccgcgggggaataaacaagacggcccccccattagggtttgggggagttctagcaaaactatctcccttttaacgagaaacaataacctttgaacaaacccctttcttttgaaaaaaaccgcgcctaccataaaatgttccgatccttaggccccccccaggaacctttcctcttgggggggcccccttttaaccgctgggtgcttccccccgccccaatttgggggggatcaaagggggggggcgttttgcaaaacccgtgtaaccccttggaggttggaaaggtcgcccttttcaatttttagggcgaatacttggctaccgaacaaagcccctcccctttgtttttttggaaaatcccggcgggggagagctcttccccctaaaaacgccccctttttt

SEQ ID NO: 19220 - DNA, 160 bp, Glycine max
  Clone ID: PAT_MRT3847_11735C.1
acgcccacgcgtacgtcgacgcttgctgatcctgctgagattacgtctgggctggcaccatcaggtgatcaagagcgaggggatacagtgacctggttgctgtggaagctacccatggctagatgtactgactgacactgtctgtttacaacgggattca

SEQ ID NO: 19221 - DNA, 2153 bp, Glycine max
  Clone ID: PAT_MRT3847_117360C.1
gtgccttgtgacatgtgctgtacatgatgggttgtttctgatgagcagtctcggctataccttgggcttggcagggatggcttactacccttagtatttgctaaagtccactccaaacgccacacccctattcattctcagatctgggttggcttggttgccagtgttttggctgggctatttaatgtgcatgtgctctctcacattctttccgttggtacactgactggctattcggttgtctcagcgtgtgtcgtcgttcttcgctggaaggacaagacaaatagtcaagtgtcatcttctgctgagcgggaaggcgtaatttgcctcattgctgtcgccctttgtggatttgctagtgggctcttgtatcgatatgatgcttcatttatttttctgattctggctttagttattgcagctggtgcttctgctgctcttgttttccgccagggttatgcagatgcaccagggttttcttgcccaggggttccccttctgccaaatatttgcatcttttttaacatgttcttatttgcccagttacatcatgaagcatgggtgagatttgtgattctttgtgttgtcatggttggtgtttatgcaatatatggccaatatcatgctaaccccagtgcagaagagaatgtctatcaaagggcgctagaggaagaagctccatacgcctggctcgcacaaacactcacactctctctttctttcttcctgctgctacaatatggagcctctctcttccaccaaacacaacaacaatctctccaagccttcctccctccacacggaggctccgccgccggaggccagtcccctccggaagatcatggtggtggcctccatcgccgccggggtgcaattcgggtgggccctacagctctctctacttaccccttacgtccaactgctggggattccccacacttgggccgccttcatctggctctgcggcccaatctccggcatgctcgtccagcccatcgtgggataccacagcgaccgctgcacctcccgcttcggccgccgctctgttgtgcttggtgcgacgtcgttgggagtggaagtgctggcgcgtggggttgggggcgtcaagaggctgtgggggattgttaacttcttgctcgcggtttgtttggccatgacggttttggttactaagatggcccaacattctcgacaatacaccctactccccaacgcccaccaggaacccctgcctcctcccgccgccgtcaaagccggcgcgttggctctcttctctctcctcggaatcccactcgcgattacttacagcataccctttgctctagcatcaatattctccagcacctcaggggcaggccaaggtttgtctctgggagtgctcaatcttgcaattgtcataccacagatggtggtgtctgtgataagtggaccatgggatgctctatttggaggtggtaacttgccagcgttcgtggtgggtgcggtggcggcggccgccagtggcattttatccataatcctgctgccatctccaccaccggatttggccaaagcagcaacggcagccggaggaggattccactaatcagagttgaccgtgttcatcatctttcttttttggcccagtctttaatatggaagaaaaaaggaaaaggagagctttttttttttgtttgaagccgtttgtataaggcttttaatcttagatcccaacaaatgctacagttgccatggtttttgtggcatcaatgactaataacagtcatttttaattgtaaagtttgatgtggctgtacataaccctgttgaaccaggacccaggcctgtcttaatttataatactagttggtatattgtgggttctcaggtcaggtcaggggaatgtagtgattgaagtagcatgcatggatgttaatccaataataacatatgtgggctgaattggaccagactggactactttccattgtcttcttctccagtgattactagtactataataataattaacattctctctttatctcaatcccagtgaaaggctcacttgtgtttgtctcatacaaaaaatggtggtgtctgtgataagtggaccatggccccgctctatatggaggtggtaactagccagcgttagtggtgggtgcggtgac

SEQ ID NO: 19222 - DNA, 1779 bp, Glycine max
  Clone ID: PAT_MRT3847_117361C.1
ggctcgagcaaacactcacactctctctttctttcttcctgctgctacaatatggagcctctctcttccaccaaacacaacaacaatctctccaagccttcctccctccacacggaggctccgccgccggaggccagtcccctccggaagatcatggtggtggcctccatcgccgccggggtgcaattcgggtgggccctacagctctctctacttaccccttacgtccaactgctggggattccccacacttgggccgccttcatctggctctgcggcccaatctccggcatgctcgtccagcccatcgtgggataccacagcgaccgctgcacctcccgcttcggccgccgccgccccttcatcgccgccggctccctcgccgtcgccatcgccgtcttccttatcggctacgccgccgacctcggccacatgttcggcgactccctagccaaaaaaaacccgcccccgcgccatcgccatcttcgttgtcggcttctggatcctcgacgtcgcaaacaacatgctacaaggcccctgccgcgccctcctggccgacctctgcgccggagaccaccggaaaacgcgaaacgccaacgccttcttctccttcttcatggccgtcggaaacgtcctgggctacgccgcgggctcttacagcggcctccacaacgtcttccctttcactaaaacaaaagcatgtgatgtttactgcgcgaatttgaagagttgtttcttcctctccatcgcgcttcttctcactctctccacaatcgccttgacctacgtgaaggagaaaacggtgtcgtcagagaaaacggtgaggagttcggtggaggaggatgggtcccacgggggcatgccgtgcttcgggcagttattcggtgcgttccgcgaactgaagcgtcccatgtggatccttctgttggtgacgtgtctgaactggatcgcctggttcccttttttgctattcgacaccgactggatggggcgtgaggtgtacggagggacagtaggggaagggaaggcgtacgataggggtgtccgtgcgggtgcgttggggctgatgttgaactctgttgtgcttggtgcgacgtcgttgggagtggaagtgctggcgcgtggggttgggggcgtcaagaggctgtgggggattgttaacttcttgctcgcggtttgtttggccatgacggttttggttactaagatggcccaacattctcgacaatacaccctactccccaacgcccaccaggaacccctgcctcctcccgccgccgtcaaagccggcgcgttggctctcttctctctcctcggaatcccactcgcgattacttacagcataccctttgctctagcatcaatattctccagcacctcaggggcaggccaaggtttgtctctgggagtgctcaatcttgcaattgtcataccacagatggtggtgtctgtgataagtggaccatgggatgctctatttggaggtggtaacttgccagcgttcgtggtgggtgcggtggcgagtcatttgttcaataatatacaatgtgttcattgtgcgatggttaaaatgtatccagcaaattagctgctattccttctgttacgaatgtccatcttgtatgaataactatctggctatactagctactagattgtatatgatatggtcaagttagcatgtgtatgatgtatctcttgtatactacttcatagacaaagaaaaatcatcatgtagctcgcgcgagttataagtggatccatcttttgcatatgttg

SEQ ID NO: 19223 - DNA, 846 bp, Glycine max
  Clone ID: PAT_MRT3847_117362C.1
aagatccctcaatggagggactaaaaataaatttttttaaaggactcaacatattttatgttattctagagcaagttttgtgaaaaaaaatgcaagtcttagttaggttaataaaaacaacattaatatttctaccttaattcaaaccattcttctgattctgcaaattgttttgtttttgccattgctgccatcaccattctccactaacctaagcaacctttgtcgattggtgaaagagcaattgatgtccgattggaatccaagatgagtttcgtgccaaaggagacaatcgaagtcattgcacagagcatcggcatcaccaatttgtcctccgatgttgccctctctctcgctcccgatctcgaatatcgcattcgcgaaatcatgcaggagtcggtaaaatgcatgcgccattcaaagagaacttttcttactacagaggatgtggatactgcacttgcattgagaaatttggagccaatatatgggttcacatctaatgatcctccacgattcaaaagagctgctggacacaaggatttgttctacattgacgacaaagatgtggatatcaaagatattgttgaagctcctttaccaaaagcaccccttgatacatcaattactagtcactggttggctattgaaggtgtgcaacctgcaattcctgaaaatgctccagttgaagctccgtctgagataagaaaatctgaatttaaggaagatgggcttactgttgatgttaaattacctgttaacatttaatacagggagcttcgctgtctactagaattactgactacacatttaataacaaaggagcttcgctttactatgagaaaa

SEQ ID NO: 19224 - DNA, 264 bp, Glycine max
  Clone ID: PAT_MRT3847_117363C.1
cccgcgttcgaacggttgaaagaagacaacctattgtggttttcgcagagagacaaattggggggttgagcacatagaacgatggggttaggttggttcaggatcaagttttaaattttacttgctcgtgcatgcaaccacacaactattgtaaacagaaaaccaaatctttttcattgtcgtctgcttagatacttcttcaacatgataaacatgcttatttcatataccaaacaatgattgcccttctcttctttatgagat

SEQ ID NO: 19225 - DNA, 190 bp, Glycine max
  Clone ID: PAT_MRT3847_117364C.1
accagatcacggactttgatgagatggacaacaataaatatttgtgcaagataatataacaataacaacaacaaaaagaaagcctttgtcttaggtgagcaaggcaagacaagcagcaacaaataatttaaataatgtctcccataatatatgttattggcctatatatgagaaaaagctctatcttcaa

SEQ ID NO: 19226 - DNA, 250 bp, Glycine max
  Clone ID: PAT_MRT3847_117365C.1
atcttaaaagggaggaaaaataacctcgaaactctaacacacatccaaaatttctcatacattactattgaccaagggatcaaatatttaatatttccaatcttaaaaaaaactacctttcataacagcctaacaaaaaacactctctccctattctaatatgcccagggagacaacaaaacatcgaattctccaacagatccttaaccatataaaaaacctccacctcttctaagtaaaaatattgatc

SEQ ID NO: 19227 - DNA, 270 bp, Glycine max
  Clone ID: PAT_MRT3847_117366C.1
ctatttatcttaatgtttttgttatattaacagaggcccacacaactaacaaacaattgctgtaaagttaatagaataagcccaaaaccaatgggccaagcatcaattaggctatcgccaacctcacagccaagggaaggaggtgcatccctttagggtgctaattatcacatgaataaaatacccatgcagacattgcaaaaaccttcacgaaaagaccaactactcacgcaaccatagacacatgtatgaagcagagcgtgcctacca

SEQ ID NO: 19228 - DNA, 386 bp, Glycine max
  Clone ID: PAT_MRT3847_117367C.1
tcatcacacccccgagcgacgcaggggagggggggaggccaacagaacagacgccgcagaacccccaggaccaaccaggaaccaaaggcagcagcagcgaccgaaaccaacaggacagcgagcgcgacagcagcacccaagcagaaacgacggcgcggcacccgaacaaccgacaccgggaccgacaggagaccgagacaaaacaacagccaccgaccggacccagacacgacgaggagacccagggggccgcccaccgaagcccgcaaagacagccccgaccagcccccaaaccggaaccgaaggacacaaacaggcggacccaaggaacacacacgcaaagggaaagacgccgaaggggcaccaaaacaacaacccggaagggg

SEQ ID NO: 19229 - DNA, 1163 bp, Glycine max
  Clone ID: PAT_MRT3847_117368C.1
ctatacggctgcgagaagacgacagaagggggtgtgagttcattaacatatacaaattctctgtgttgtgttgtgtacttgtgttaattgtgttgttgttgtaggaaatttaagtgaagagagaatgatgatgaagtctgctatgtgtgcattggtgcttgtggcactggttgtggttgaagtggggcccatggctgaggctgcggtgacttgcaacccaacacagttgactccttgtcttccggcaattaattcaggttctgcaccttcgagtgcttgttgccagaagctgaaggagcaaaagccatgcttctgtggctacctcaaaaaccctagcttgaagcagtatgttaactctcctaatgccaaaaaaaccgttagttcttgtggtattgcctatccaacttgttaagcacctcttatatatatatataaaatgtgtgaacaatatatatatattgattaaaaaatatagtttaatttatatacacactttgatcctataaaaacatcttgacacaagcattcaatagaatttcaccactttatcatgacattttactataatgatgtggtaataaagtaaattcttgttgaatattttgtataaagatgctttatactcatggtttctgtgtataaattaagcttatatatatttacactatatattgccactttacgtttgtgtgatattaattatacagtcaagtatttattagctatctttgaatatggtgtatacactagtatacatgttgtatccagggaattatggttaaagagctatataaattgagaaataatgatgttctagagtgacaaaaaaaaaaaaaaaaaaaaaaaaaaaaaaaaaaaaaaaaaaaagtgccacaaagtggttgaactggggcccatggctgaagctgcggtgacttgcaacccaacacagttgactccttgtcttccggcaattaattcaggttctgcaccttcgagtgcttgttgccagaagctgaaggagcaaaagccatgcttctgtggctacctcaaaaaccctagcttgaagcagtgtgttaactctcctaatgccaaaaaaaccgttagttcttgtggtattgcctatccaacttgttgagcgcctcttatatgtatatgtaaaatgcgtgaacaatatatatata

SEQ ID NO: 19230 - DNA, 187 bp, Glycine max
  Clone ID: PAT_MRT3847_117369C.1
ggctcgagggggacaatttactggtttctcggtgaacgatcatagaagctttttttaccgttatcttgcttttgtacaaatcgtttagctttatctcaaaagatcatacaagatctgtgctttcccactttattttaatttacagattttttttttcttttatttaaaaaaaaaaaaataagataaa

SEQ ID NO: 19231 - DNA, 335 bp, Glycine max
  Clone ID: PAT_MRT3847_11736C.1
gatcatagacctcttgggatgatggtatcaaagcctcttaagaacaactggtcagaaatatggtccatgctgatcccgttcttcataattaaatttcagcaaatggtaaaagtaaaactggatctgttagagacataagacaacaactctaaagataaccagaagtaaaccatacggtcttaactcttaaagccttcttctcttcatccatactccaaatagccctccagaaccattcttcaaagggtctgactctatccacccaacctgccttcttagtgaaagatttagacaaatttgtgccattcaaatatcaccaacacttctagtatcat

SEQ ID NO: 19232 - DNA, 297 bp, Glycine max
  Clone ID: PAT_MRT3847_117370C.1
aacgaataaaaagcgttcttgagtgaaacgaaaattaatgaacttaaacatgctcaaaggcctggcagctatgtgtcaaaaaattttatacataaacaatcatgcgcgtgaccaggcttcgcattatctggctaataacagataggcacggatctttggctcaggcaaacaaggcaggagtaattcagtcataactccctttaattagcctgcctaacaaaaccgctttgtggataatattatggaccaaatatagccaccatacgccggtggattgtaaattctacagaacagatt

SEQ ID NO: 19233 - DNA, 479 bp, Glycine max
  unsure (1)..(479): unsure at all n locations
  Clone ID: PAT_MRT3847_117371C.1
gtcgtgcgaccatgcaaagaatggagtggacattgtctctgggacacgagtcatgtctcactttgcaaaacccaattggcgcagtgtctacaagcgcattgcgcttaatcatccagatgcccgagttggggtattttactgtgtgctancagccgtggggcatgagcttcgtcagctagcattggataaatctcacaacacatccaccaagtacgacttccacactttgtgaaagcattcgttcctctgatgaaggagaaattgtagaagaattggagcatatggagaaaacaaaggcgagctcatcaagtgatccaccatgtgttgtttaattagtattgccaaatctgaggggtacataatgaattagaactttaaatagtattgattctattggacgtcatattcattttgggtacatattaataacttccgattttagtagtgtaaattgcgttaatgtttgaatctcttgcatc

SEQ ID NO: 19234 - DNA, 2469 bp, Glycine max
  Clone ID: PAT_MRT3847_117372C.1
gcacgagctccgcgtcgctggccactccatagtgtagaaagattccgtgaagtgtcgtagtcagatgacaagcttagtgcgcgagtctctctaccttataacccttctgccacttccgtgtcttttacgagttggattactccagtcattcatggaacaacacattcactcactctctctttagtaagattttggatttgattgtcaaacacaacgaaccaaagtaaaatattataaagagaaagagagagagagacagagaaagagagagagctggaacatgaaggaacaagagaaggttgagtgcgacactttacagtaccgatgagtctgctgttcgattttcagaacatttgtcaaagaacaatgcaagagtaacttgcacaggggcgtcactgatctttgagaacccactctggattccagagtttggctcgcgtcccagcatccccttgtcgcagttcgcacacgcctaagagctggggccttgaatgcagccggcgaccctccagacgcttcaacttcgctgagggattgttcatatggggcgccagcgcaagactcccgggagtatgagttggtattgctattggggcttagaattggggctaccccaatgataagtatactaaaggacatggtgaacaattttaaggccattgatgaggaggagggaataggtggtgctaaatcaccaacgaggttgagtgacttcaagacaagtagggcatacttctattgggtgactagagagcagggttcatttgactggttcaaaggggtcatgaacgaagtggccgaagaggaccgaaggaaagtgattgaactccacagctactgcaccagcgtctacgaagagggtgatgctcgctctgctcttattgctatgttgcagtccctaaaccatgcaaagaatggagtggacattgtctctggcacacgcgtcatgtctcactttgccaaacccaattggcgcagtgtctacaagcgcattgcgcttaatcatccagatgcccgagttggggtattttactgtgggccatcagccctcacccatgagcttcgtcagctagcattggatttctctcacaacacatccaccaagtacgacttccataaagaaaatttctgacaagataggggaattatcggagatcaggtgaaggatgatgtggaacgagctaaggcgtccaccttgatccccattccccaccacctagatgattgcctataaataattaagtttctacatatggttggttgttatggctttgtaaaagcacgaaggctggcggctgctaaatggttgaagtagtgagttggctaccaattacaaaaggtgtgggcgtctggttggatggccctattattgtgtctgaaagaatggagtggacattgtctctggcacacgtctcactttgccacccaattggcgcagtgtctacaagcgcattgcgcttaatcatccagatgcccgagttggggtattttactgtgggccatcagccctcacccatgagcttcgtcagctagcattggatttctctcacaacacatccaccaagtacgacttccataaagaaaatttctgacaagataggggaattatcggagatcaggtgaaggatgatgtggaacgagctaaggcgtccaccttgatccccattccccaccacctagatgattgcctataaataattaagtttctacatatggttggttgttatggctttgtaaaagcacgaaggctggcggctgctaaatggttgaagtagtgagttggctaccaattacaaaaggtgtgggcgtctggttggatggccctattattgtgtctgcgtgtctttgtgtctatgtaaatttaaggagaaataaccacaagggtattttattttttctctttttggaaggacctgggagaaactagaaagtaatacagaagggagaataatgtccagccggagtgcacttgatagtttgtattaatccacaatgcctttttgttgatcaattgcagaattcagagattcattataaatatcatacataacttgtccactcggagtgaacctaatagtagtagtttatatctttaaaattgtgccttttcgttgattaattacacaggagaaaaaaaaaaaaaaaagggcgcgccgccactttgtgaaagcattcgttcctctgatgaaggagaaattgtagaagaattggagcatatggagaaaacaaaggcgagctcatcaagtgatccaccatgtgttgtttaattagtattgccaaatctgaggggtacataatgaattagaactttaaatagtattgattctcttggaagtaataatcattttgggtacatattaataacttccgattttagtagtgtaaattgcgttaatgtttgaatctcttgcatccatgcattagtttgtacttctaatataatatagtaaaatctgatgtgaatacaac

SEQ ID NO: 19235 - DNA, 247 bp, Glycine max
  unsure (1)..(247): unsure at all n locations
  Clone ID: PAT_MRT3847_117373C.1
gaagaactactgcgacaanagatgggaatgtgaaggctggtcaatatacggaagtgaccttaccattacctatttttatcagagctaccatgtccataatctgctctacaagcggaacttgacggtggcgcacgccgtcggatcactggactaccactactttatctgctcccgcgcgctgcttgatccggcaggtgtttgcacacccgtgaacaatacgatgcacatgatgaagatcgccgactac

SEQ ID NO: 19236 - DNA, 520 bp, Glycine max
  Clone ID: PAT_MRT3847_117374C.1
aaggtatgattaaaaacatgcactccactaagcaaacagtcaaaccaagtcatgatttacaaatccacactcactgaaaacgtcaacaatgagaacaatcgtgtatggactataagaatacatgtaaaaacaaataattacattctcaactgctgccacacacaggaaaatcaaacaaaatgaaataatatgtctctactttttgtggaaaaaagtggggattgtcttataacacactcaatgtcaccttaagttgctactcccaattctgttcatttggttaaaggcaggtaagactttgttccttaaatctgaatcatggtctgaatcggacccgtggaaatgaacaggcctcctagtggaaccgtatctgtcaaactccagcctttgtcttggggcactttgggatctaaccttagccctaaaagattcagggtttgccatgtaattggggtgacctgggtagccactgaggaaaccccacgaacactcactcctggtaggtgtaaagggtcctcct

SEQ ID NO: 19237 - DNA, 367 bp, Glycine max
  Clone ID: PAT_MRT3847_117375C.1
aaaataaccacacacttcacacatcattacgacaattaaaagaagggtgggaattttcaaataggccgaacatacctcaccagaagggcctgccctatttcccttattggatttaaccaaccaaccaacgaaagaaaaccccaattgccaaatcttgccaaaggttcccgattttccaaaaaatctggcagtaccctgtggacaaaaaaaggctgccaaaaaagtataaccagcaatttcaaaatctggagaatttcccaaaagattgtcaaaaactgtaaactgttgggaattgtcattaaggaaactcaaatgccatgaagtttgattggcccactcagaactccacatttcaaaaccattatta

SEQ ID NO: 19238 - DNA, 409 bp, Glycine max
  Clone ID: PAT_MRT3847_117376C.1
aagggggaaaaaactggactttaaatgctaaaggtgaatttttggcaggcaaggattgggtgacttttctttttacttccgtaccccctgcactggtaaaacttttggtgcggcctgaaaatggtcagaattgaaaacttgagggtcgtctattttttgatccccagctttcttagaggccgcgagggcatggaaatgcccaccttcggggaggggaacaattgcgcggacacaaggggtctcatccgtttcctaaaaaatcggggggggggatcccttttcatccgggtgaacctgggcatttttttttttaacaaagcaggggggtttgaccttcccctccccttttgtagatgttaactccatccgaggtgcggcaggggctattggctttgatccaacggggggg

SEQ ID NO: 19239 - DNA, 316 bp, Glycine max
  Clone ID: PAT_MRT3847_117377C.1
ttgtctttgtctacgtcgacgacaacttcaacaccgtcacgctttattcgcaagtcggggtgttgaacatcaactggtttcagaaacagcccaactgcaatgaccaggtcagcatgacacttaatatatctgcagatttgcttttcctttttacattgaacacacaataactttttgactttctaactgctgactttgaaactcccaacaattccttgcatcatatatccctgcggtatggaatcactcccttttaagagcattccaaattttcgattcatacatctaattaataccacttcatttaccaaaccag

SEQ ID NO: 19240 - DNA, 454 bp, Glycine max
  Clone ID: PAT_MRT3847_117378C.1
gttatctgccggaaaaaagctcggggagaagttttttactgtggaatgtttagctaccgggctaggtgatgctcaacatggtgggtgatttctgcagctcgagaaaagtacaagaaatccttacctattctcatttgagtgggatatcgaggcccagccggacaagctgcgcgaccagatctccactgctgtacttgatgcgtgccttgaacaggaccctgacaacatggccgcctgtgagacatgcaccaagaccaacatggtcatggacttcggagagatcacaacctaggccagcgtagactatgataagagtgtccgcgacacaaggcacgaaattggattgatctctgatagacgtgggccttgatgctgacaaatgcaaggtgatggtcgacattgagcaccaatgcccggttatggcacatggtgtgctccgacagttcaccaagcg

SEQ ID NO: 19241 - DNA, 1106 bp, Glycine max
  Clone ID: PAT_MRT3847_117379C.1
gcgtcttcaaattagggttagggttagggtttttttgttacaaataaaattcctattatgcttctgcttttgtgtgtgtgtttgtgattttataattattgataattgtgtgttgaaaatgaaagccaatttgcagagcatgggcgtcgactatgaatgtcgcatcttgccttgaaggttggcgaaaacaatgacgattctccgtgcctatcaaatttactctgttttgatgatggcctcgaacaagtcgcaacattctttttattgagaaatttaaaaaccttttctgttttcttaatctttacttctttcatttttttcagaaatttatttcttttttccctcctaatagatgattgctattgaagtttcgaagtttttttttttttaaaaaaaatcttatgttttatgaatagatcaatgtcaaagctctttcgatttaagcgagatattctccattttttttcatagttcgtgggtaaaatcgatagttgtactcttccttcacattgaagagaacactgataaaacttcttccaagtcaactttggctaccaaacatttaataattgtactcacgctcatcaagtcatgctttagtaccaaaaaatgattgctggaactggggggaaacaaaggaaagattgtaagcatttcagaacatatagtgcaatgttaagggagaaggacatgctcttgggttcagctagacaaagaataaaatagaaaattcttgataagtttcaataactttagcagttaatagattctagaatagcttttaaaataggtgtgataaggatgctttacataattgacagttaaacaattgaatttatgatgtagcaagcatgttcaaaagaatctgagtgaaacatacaatgagctacagacattttgagtttgtgactaacactaacacctcaccaactgttgacctaaaatattcaaactagtccttgagaaaacttagcatgaagctcccattattttgggattctagggagggttagatggatgcaaccttatccaagtgagcggaaaggctatttccactgctagaacctattaatacaggctacaacttgcaagaaaaaaaagttgtt

SEQ ID NO: 19242 - DNA, 403 bp, Glycine max
  Clone ID: PAT_MRT3847_11737C.1
tccgggttgtgcctgcatgaggttttccatttgctttaattgtaatggtagttgcaaagtgttcaccaccaatggtgacaacaaaaatgaatgtttcatcaggtgtcctgaatgcaacgagaatggacttgtcaaatgccccatttgctgctagaaattgattaagaccaagggtatgtgtatttttccattttcttaacttttaggctcaacgtgtattgttaactgaataactgaatcatactcgttgggttgttgatgtatgtgatagagtccttagaaatggatatagtactaatttctttagatgggaagaactataagccaatgccatgcagggacatataaacaagttacttgttttttattagttctggatatttattgaatgaaaatttgtgtc

SEQ ID NO: 19243 - DNA, 556 bp, Glycine max
  Clone ID: PAT_MRT3847_117380C.1
ctctcttttctctacctacaaaaaaaaaaaatcatctaagttctaacgatgaatcaccaacaacaatctcctggcaagtctctcgtgtatatatattttttatactggataattatcaatattccttcatcataattgatctccatcatttggaaaaattctttctcagtttcataccaaatatgcatgttttatatcatagaattaatggatgggttgatcatatttgggtgtttaattacaaatccatgttttatattcaaagctagaattataaatttctataggaagatatatattgatcacttaaattagaattcaatggatatacacagtataaaagattttatgcaactcatcagttaaaaatctgttttgacggaacttaaaggatgattattattaaaattaagaaacttattatacataatagtttatgattaaagattttattagtagtgaaggaagaaaaagaaaagagaaattatgagtttaaattcctactaacaaaaagttaatgatcattattttttaaattgataaatattagtcatta

SEQ ID NO: 19244 - DNA, 497 bp, Glycine max
  unsure (1)..(497): unsure at all n locations
  Clone ID: PAT_MRT3847_117381C.1
ctccaacttaatccgattncgcnatnccnnannnncnnntttnnnnnntnnnnncccnnngngggnnnnntnnntnnnnntgnnnnnnnnnnnnnnnnnnnnnnnttttttntntttttntttttntntttttttttttggggttgtgtttttttttttttctttttttttttttttttttttttttttttttttgtnggggtgntttttgttttaaacaaaaaaacttttccatcctccaaaaacttctacttacaaaaaaaaaagacttatatcacccaatccaacaagatcaactacaaaaaaaatttaactttccaaaacctacccactcttttttagacctcaaaaacattaatattagctttcttttcctaaaaaacacttacttgtttaaccacaataaaccttacctttaaactttccaaacaaaaataatgaactgcacataacccccaaaaaaaaaaaaaataaagccttttttaaaaaaagcgtcc

SEQ ID NO: 19245 - DNA, 129 bp, Glycine max
  Clone ID: PAT_MRT3847_117382C.1
gggtttttctaagtggttgatacaactgtgcgaggggcaaccactaatgctcccctacgaggaactgttatgcaggcattctggcgtgcggcggggtcagtcctcaaaataggggtacagtgtggagtg

SEQ ID NO: 19246 - DNA, 446 bp, Glycine max
  Clone ID: PAT_MRT3847_117383C.1
gtttcatacattcaggtctcagtttaaatcataggaccattgtgttagggtttaacttttggcttccagtactatttttccgttttgtcttatttgcatcttattttgttttagttttcaataagtttgtcattagatatgcttcacttagacattaactactttatagtatatttttcttggatttattggttaatcctttgcattctgttggtaatttatatacattcttctttcctatgaagtattctaacattcttcctatgttcataggtgcttgtgatttcctatcgcttggaaacagttatgatggctaaacgagtattccttttggacgatgggaagctaaaagagctgcctcaatcaactatgttggatggtcaaaaggattcattgctatcatctgggcttgttatttgaatatttactgcaattgcatgggcgat

SEQ ID NO: 19247 - DNA, 1795 bp, Glycine max
  Clone ID: PAT_MRT3847_117384C.1
ccacgcgtccgcaagtgtgaagcttcgtgaggcactttggtgtttgagctgaaggaacaaccttattaacatgaaaggctacaaggtttggacctcaaccttcaacagcagcaccaccaccaccttcatccctttcaataataatctctccccaaattacccgttaacccctccatcctatactgcttcaaactgcttcccatccttccaaagccaaagaccaaaacttatagctcagaatttcaaaccccacattcttctatgcacctctctgcccagtccacaggcaagcagtgcttccacagctcaagctgaggagcatgaggttgaaattgcaaagggttacactatgacacaattttgtgacaaaatgatagatttctttttgaatgaaaaaacgaaatcaaaagaatggaggaagtacctgatatttagagaggagtggaaaaaatacagggatagattttacaatcggtgccaaagaagggcagacatggagaatgacccagttatgaaggaaaaatttatttcattgcggagaaagttgaagaaggagtaagcattgcagattgatgatgaaatggaaggacactatgtactgctcatggaaatacaagatagcccaatggacattaatgccatagttgcacgaaggcgtaaagattttacaggggagttcttccactacctctctcttatttcagatacatatgacagcttggaggatcgtgatgggatttccaggctgggcagtagatgcttgtcagctgtcagtgcatacgataatactctagagaatatagagacattagatgctgcccaggccaaatttgatgatatcctcaattctccttctattgatattgcttgtcagaagatcaaaagcttagcaaaggcaaaggaacttgattcttcattgatattgttgataagcagtgcttgggctaaagcaaaagaatctacaacaatgaagaatgaggtgaaagatataatgtaccaattgtacagggccacaaagagcagcctaaggagtattactccaaaagaaataaagctactcaaacatttgttgaacatcattgatcccgaggagcgattctctgcattggcaactgctttcacccctggtgacgaacacgaagccaaggaccctaatgcactatacaccaccaccccaaaggagctgcacaagtggattaagatcatgctcgatgcatatcatttgaacaaggaagaaacagatttgagagaagccaggcagatgactgaccctgtggtaattcagaggttgtttatccttaaagatactattgaacaagaatatatggaaaaagatacaacccagaagtctgagacaaaagatgactctaaatcagaagagttttaaggtgcttctcataaacatccatgcttgccaatgtgtttcctgtttcatgcctcttttgatcgagaaggaagggttgaagtggagagaacgaccaaatgctagaaaaatgtaatgaagttactacttactaccctttcaaagattttgtaatatttgcagttggatgttaacatatttcacctgattttcattgcaaagttgaggattgtacttctaggtgtaaattataaagcatccaccagatcaaggtggatgatgacaaaccattttgaggtttaacctagaataatagaatcaatataagtaggaagtagattttccttctatatataaacaatcctccatgtttctaagggaaattttcttaactagttatatatacaaaaaaaaaaaaaaaaaactcgagac

SEQ ID NO: 19248 - DNA, 836 bp, Glycine max
  Clone ID: PAT_MRT3847_117385C.1
aacatgaagggtacaaggtttggaactcaaccttcatacctttcaataataatctctccccaaattaccccttaaccccttcctcctatactgcttcaaactacaccccatccttccaaaaccaaagaccaaaacttaaagctcagaatttcaaaccccacattcttctatgcgcctctctgcccattttattcttgggctttatttgaagtgttaagggtgtcactagagttgggtagtagtataatatgaaggggagagcagcctgctgaattctctctagaaattacagtggcatgcaaggttttaaattggggtctgcaaccgcagcatcaaggtccgcaggcaagcagtgcttccacggctcaagctgaggagcaagaggttgaaattgcaaggggttacactatgacacaattttgtgacaaaatgatagatttctttttgaatgaaaaaactaaatcaaaagaatggaagaagtacctgatatttagagaggagtggaaaaaatacagtgatagatttttcagtaggtgccaaagaagggcagacatggagaatgacccagttatgaaggaaaaatttatttcattgcggagaaagttgaagaagattgatgatgaaatggaaggacactatgaactgctcaaggaagtacaagatagcccaatggacattaatgccatagttgcccgaaggcgaaaagattttacaggagaattcttccactacctcacttcttatttcagattgtatgaccactttggagggcgtgatgggatttcccggacgggggataggtgtttgtcagctgtcagtgcatatgataatacact

SEQ ID NO: 19249 - DNA, 421 bp, Glycine max
  unsure (1)..(421): unsure at all n locations
  Clone ID: PAT_MRT3847_117386C.1
actgtcaaccgcgaccagagccggcatggttgctccattcactggcctaaagaccatggctggcttccccaccagtaagaccaacaatgacattacccccagagctagcaacggaggaagagtgtcttttttttaggagcggacaccagacggcaagaacgaagttgatactcttcgccacctgccagacgatgatgatgcacaattggcaaaggaaccagcaaccgtccttangaagggatggattccttggttggaattcgagaaggaggatggtttcgtgtacagagagcacaagagggcacccggatactacnatggccgctactggaccatgagcgacaccgaaacgtttggccgcactgaccgttctccggtgttgaaacgactttcanagggtaacactggatacccccaagcg

SEQ ID NO: 19250 - DNA, 198 bp, Glycine max
  unsure (1)..(198): unsure at all n locations
  Clone ID: PAT_MRT3847_117387C.1
cgtcccgattagcgtgctanngtttgcctttattggtgtaccttttgttgggtctctatcccnntgctggatgccgtgcatctgagcggatggctcannaaaatcangnnatgaagaaagcagaagggannggcagatnactatgcagnntttctgggaatttnntctggaannnatggtgctnnngggataccctat

SEQ ID NO: 19251 - DNA, 332 bp, Glycine max
  Clone ID: PAT_MRT3847_117388C.1
aaacgttagaaactcgtaatgtatacattgtggatttacacaacgaacttgccagagccgatgtgagtaatacattgcattaagatgaaaagaatgccgagatgacttacctgatgatacagcagcctgtgttgcatataggtctggacaactgggtggctgctaaagagttagaggctatatgttctcacggtactaacctactagtgtattagaaagtctacaatcacggattgaggatgatgcataattctatgggcagtggatatgacattcattatcttggtgagcctagccctttttactcgacaaatcacattctctcgcataag

SEQ ID NO: 19252 - DNA, 1302 bp, Glycine max
  unsure (1)..(1302): unsure at all n locations
  Clone ID: PAT_MRT3847_117389C.1
atgttctatttgtcagtgaagaagtggagcgtgctttggcaaaattgggccatgcaaaactgactgaaagatctccaccaccaagattagaaggaccagcggcaaagaatctgcagcttcagttcagaacaagaatgccacctcatttgttcactggtggaaaggttgagggagaacaaggatcagcaatccacgttatgttgatggatcctaacacaggcagtgtcgttcaagttggaccagaatctgttgctaaattgaatgtggtggtacttgaaggtgactttaatgaggaagtagacgatgattggacaaaagaacactttgaaagccatgaagtaaaggaacgtgaggggaaaaggccacttctaactggagatttgcaggttagcctaaaggaaggggtaggaacctttggtgatcttactttcaccgacaattctagctggataagaagcagaaaattccggcttggtgttaaggtggctcctggttattgtgaggagattcgtattcgtgagggaaagactgacgccttcgcgctgttaaagatcatagaggagaattgtacaagaaacactacccacctgctttgcatgatgaagtttggagattggatcggatagctaaggatggtgcacttcacaaaaaattgattcaggcaaaaatagtaactgtagaagatttcctacgtcttcttgttcgtgagccacaaaagttaagaagtatacttggtagtggaatgtccaatagaatgtgggagaatactgtggagcatgccaagacatgtgtcttgggtggcaagctctttgtatactacactgatgaaaccaatagtgctggcattgtgttcaacaatatatacgagctgagaggcctcatttctgatggccaatttttctctttggaatcacttgctccaaatcagaagatgtctgtagattccttggtgaagaaagcatatgaaaattgggatcaagttgtagaatatgatggaaaagttttaaattctcttgctaattcgaaaaagggatcaagagctgtggccactcaaataatgcaccataacagtttccaagagcagcagtatgcctcagcaaagaacaaggtgtcatatgtctcctctgaaccaaatcaacatttgcaaataacaaataactactcatccggtcccggtttgaccgattatccatttgngagatccgacaatcagatggtaggaacgtctttaactgactctcaatagcattgcctggcagcatgaattacatgtctggtgaaaatcatgaaattggtagtact

SEQ ID NO: 19253 - DNA, 596 bp, Glycine max
  Clone ID: PAT_MRT3847_11738C.1
ttatccatcattcttctacccaaagcttgctgcacttacgaagaccttcctacctatgatggaaactgtgtattacattcataatttcaagggccgcaatggaggaacactttttaggtgctatccaggaccctggaaggtccttagaagagtggggaataggaaatatgtttgtctacatcagcagaatagtatgccatccctcaaggaagttgcccttgagattcttccatctgcttgataaatacttatggggttggtctccagctcttttgcagagattttgaaaggactctacacacttgccatttgattaacgaagtattgaagttggggcccaaagaaatggcgttttctagcataaaagtggtgtcaatgagtagcaagttgttacttgtacagtttataaattcatctttcgtcatttgtgtgtggactattgtgtagaactttatcagaccatcacaatcactgattaaaagaatcactttgtgtttttcgctgttttttttttgttataatacaaatgaagataaggtcctgtattttggtaaacaaaaggtggtggcttgttattaatctttgctattgacgat

SEQ ID NO: 19254 - DNA, 248 bp, Glycine max
  Clone ID: PAT_MRT3847_117390C.1
cccacgcgtccgcccacgcgtccgaaaaaaaaaaaaaaaagtaaaaaaaaaaaaaacaaaggcaccaagctaaaacaaccaaaggactcccactctcgcaggccccagcttacgtcctcgatcatgcaacccaaaaacattttcaatggcgtgacctaaacaacgttcactcgtcgatatcctccaacgctcccactcgaaaaaccctgacgttccccaccttattcccctttcgcatcatacccctt

SEQ ID NO: 19255 - DNA, 316 bp, Glycine max
  unsure (1)..(316): unsure at all n locations
  Clone ID: PAT_MRT3847_117391C.1
ggaaaaagttgtattgaaattttcctgaatctctccaaactgcaccaggttgtnttangtgcggggtggggcaactctgtattctgatgggttcccatatttgtatgctatggtgcatgatatttcagtgtctacaataccaggtgattttgtcattttttttaagttttcaaccataaacaatttgttgtgcatattggcttattccttgtattttaggttttcttcttttgagcactatttcttattccattttacagcttacttttttgatatcaaattgcttctatttttaacaccattttaatttttattt

SEQ ID NO: 19256 - DNA, 260 bp, Glycine max
  Clone ID: PAT_MRT3847_117392C.1
ccgataagtcatacgcagcacaccgcgcgtgtatcaacgtccacgagctcatgccggggacgaggagcggatcattgagatttcctacacgcgccgtcgcgacccggaggggtgaatgctgttctttttctctcttctatatacttttgttctgtttttatttgctgtttttattttagttcttttctttttttatttttttaatttaattattttttgtttttcttatttttttttgttgttttgaatttatatttttt

SEQ ID NO: 19257 - DNA, 220 bp, Glycine max
  Clone ID: PAT_MRT3847_117393C.1
gatttttgtgaattgtctttatcctgtaagtcaattaccttcagaagctgtcgttgtaaatgttacatgtggtagtggacgtggtggtttacccaccactgcttgtatgaactctgcagttatcagtgaccctatccacctaaagagagcgtttgtgactgtacttctgaaacgtcagagtattcttcttcttaatgcagtagaaactctgccttcagct

SEQ ID NO: 19258 - DNA, 693 bp, Glycine max
  Clone ID: PAT_MRT3847_117394C.1
tgggtggcctgagatggtgatggcaaaagaagttgatgcgttggctaagaaaactcctggaaagaagtctcttgctattgaggcattctcccgtgcactcttggctattccaacgatcattgctgataatgctggtttggacagtgctgagttgatttctcaactccgggcagagcatcagaaggagggctgtacttctggaattgatgttatttctggctctgttggagacatggctgaacgcggaatatctgaagcattcaaagtcaagcaagctgtattgctatcttcaacagaggcagctgagatgatccttagagttgatgaaatcatcacttgtgctccaaggaggagagaagacagaatgtaaaatatgagggtccttctttggatgcttggggtgccatggcattttcttgcgtagttttacgagttctgtgatatttatatggtggttgtgattggaagaactggttgtaatgttaaaaaattgttagatcaattttgatttgttttggaacccagtcgcatgccagtgaattggggtgggtggcagggtcaggttggtggagaaattttacgtagaaccatttgttcctaccctgcaattagagttaattatgtctatttgaatttaaagacatgatcttttacttcattcttcaatgaagatatcttgagatttttcgttga

SEQ ID NO: 19259 - DNA, 2253 bp, Glycine max
  Clone ID: PAT_MRT3847_117395C.1
tccaacaaagcattacgagcacactctgctgccattcgaaaacctgatattattgtcatcggatgaatcttggttgcaaccagcttttctgcctcccttaaaagttcaccagccaacacaacaactgaggtagttccatccccaacttcatcatcttgaacttttgatatgtcaacaaggactttagcagctgggttatcaatatggagggacttcaagattgtagcgccatcattcgtgacagtaacttcacgtcctctacctgttgactgcaaaattttatccattccctttggccccaaggttgtcttcactaagtcagcaatagccatggctccaacaaaaggagagcgtgccagaatggcttcttttgttggagccatggctattgctgacttagtgaagacaaccttggggccaaagggaatggataaaattttgcagtcaacaggtagaggacgtgaagttactgtcacgaatgatggcgctacaatcttgaagtccctccatattgataacccagctgctaaagtccttgttgacatatcaaaagttcaagatgatgaagttggggatggaactacctcagttgttgtgttggctggtgaacttttaagggaggcagaaaagctggttgcaaccaagattcatccgatgacaataatatcaggttttcgaatggcagcagagtgtgctcgtaatgctttgttggagaaggttgtggacaataaagcagattctgagaaattcaggtcagacttattgaacattgcaatgactactttgagctccaagattctctcacaggacaaggagcattttgcaaaattagctgtggatgctgtaatgagactaaagggaagcaccaatttagaatctatccagattataaagaaacctggaggctcattaatggattcattcttagatgaaggattcattcttgacaagaaaattggtattggacaacccaaacgtatagagaatgcaaagatactggtggcaaacactgccatggacacagacaaagtgaagatatatggtgcacgtgttcgtgttgattctatggctagagttgctcagattgaaacagctgagaaagagaaaatgagagaaaaggtgcagaagataataggtcatggtatcaactgttttgttaacagacagttgatttacaattttccagaggagctctttgctgatgcaggaatattggctattgagcatgctgattttggttggtattgagcgtctggctttggtaactggtggtgaaattgcgtcaacctttgacaatcctgagtctgttaagcttgggcattgcgaccttattgaggagattatgattggcgaggataaactgattcatttttctggtgttgctatggggcaggcatgtacaatagttttgagaggggctagccaccatgttcttgatgaggctgagaggtcattgcatgatgccttgtgtgtgctatctcagactgtcaatgacagcagggtgttgcttggaggtgggtggcctgagatggtgatggcaaaagaagttgatgcattggctaagaaaactcctggaaagaagtctcttgctattgaggcattctcccgtgcactcttggctattccaacaatcattgctgataatgctggtttggacagtgctgagttgatttctcagctccgtgcagagcatcagaaggagggctgtactgctggaattgatgttatttctggctctgttggagacatggctgaacgggggatatgcgaagcattcaaagtcaagcaagctgtattgctatcttcaacagaggcagctgagatgatccttagagttgatgaaatcatcacgtgtgctccgaggaggagagaagaccgaatgtaaaatatcctgagggtccaactttggatgattggggtgccagcattttttggcgtaatatgagtgctgtgatattttgatatggtggttgtaattggaagaaacttggttgtaatgctaaaaatttgttaggtaaattttgatttgttttggaacccagtcgcacgccagtggattggggtgggtggcggagaaattttacttagaaccatttgttcctgccctgcaattagagttaattatgtctacttgaatttaaagacattatcttttacttcattcttgaatgaagatatctttcgagatttttcgttaatttgcgtctttaaagattctttcattctttaacaaataatttagaaactgtactc

SEQ ID NO: 19260 - DNA, 261 bp, Glycine max
  unsure (1)..(261): unsure at all n locations
  Clone ID: PAT_MRT3847_117396C.1
attagtaaaataanaaaaagttgggcccaaatcttgcgggttttttttatttgtttcccctttcagtttgagcagttatattgtgatgcagtgaaggtatttgtatttgttccccaaccgagtaacagaaaaggctgtgtccgtnactcgggattggaagatggcgacggccccgggaaatcaaatgttggagggcggaggaggaanccccgnagccctccgggtanagacatgactgaaatatncntngggnancanctc

SEQ ID NO: 19261 - DNA, 1707 bp, Glycine max
  Clone ID: PAT_MRT3847_117397C.1
tacggctgcgagaagacgacagaaggggagaggaaggcattttcaaagtgcagtcacctcagagacatcatttctctctctaactttctctctcctctccgctccggcgagtaagaaaaatgcagcatttcgtggatttgcaagagaattcggagttgggtgagtcgaattcatggctttcagcgaaagagcagtccggtgcggcacccaacaccaatttggatcgcgtcctcttcaacgacctcgtcgagattgtccctctcgttcagtcactcatcgatcgtaaagcaagccgttcattcacgcggcgtggttccatgatctacaccaagacacccacaagagaatcattgtccaaaagaacaacagattcaaaaagtaggaatgttgcccaatctattcttgccaaaaagaaaagggaccatggagaaaaagaacaaggaaaaaatggcagcaatgatgctgataactattccatgttttctacaagaactttggcttcagaaaaggacatagaagagttaggtatgttgaaggagcaggtagaggaacttcagaggaaattgttggagaaagatgaacttttaaagtcagcggaaaactcaagagaccagatgaatgctttcaatgcaaaacttgatgaacttaaacaccaggcttcagaaaaggaatctttactgaagtatactcaacagcagctctccgatgctaagattaagcttgcagacaagcaagctgctcttgaaaagatacaatgggaagcaatgacatccaacaagaaagtagataaactccaagatgagctaggttccatgcaagcagatattacatcattcacgttattactggaaggattgtcaaaaactgacactgctaagtataccaatgattatgatgtcaaaccttatgatttcagtcacctgcctagtattgatgatttggacgaggtggaattgcagaaaatggatgaagcaagaaaagcctatatggctgctgtttcgatttccaaggaaaaacgagatgaggaatctattgctgctgctgccaatgctaggttacatcttcagtcacttgttttcaaatccaaaaattttaacctgtaatatcattgctagttttatttaatgtgctacgtgttaggtccctttagtcaaaatggtgaggcacttatcttgtgtgtgagatttatttgtacaagcctgttatgaacaaatatataaagttatgccatttaatgtgatgaggtactaaacgagcatattcaatgaagtgaaaatgtgttctctcgcgggtctacctgcattcagaattataccagacctgtggcatcgggtttttcaaaagcagaagagttaatcattagtttctctttgaagtggcattcagcaagtttccttctagcagctgattctgattggcagaggttatatacttggtattattgatttgtggactgcttatttttcactcctgctaactgttccaaagtatttgtgtatgtatgtatatattccacttcttgtacccaagctagtttttggttccctactttcgtatatggtccatgcatgcattatatccacaaggtggggatcttgttccatttataaactatgttgtctcatgtggacaaggtatatttgtgcttcttgtataaattctacttaaaacttgaaatatgaaaacctattctttatttctcgagac

SEQ ID NO: 19262 - DNA, 278 bp, Glycine max
  Clone ID: PAT_MRT3847_117398C.1
gggtgggcttttttttttttttattttttttttttggtttttttttgggcaaaaaaaaaaaggggtatatataaaccccaccaaaaaccaaaaaattgagatgtttataaaaatttcatcccccccaaaccggggggttccttaataaagggacaaaagggggggggggcccaatttcttccaccccaaacctttgagtttcaaacacaagcaaaatcgcccttaaaaaagtttatttggaccaccagtttcggagaaaaactccctgttagcacccc

SEQ ID NO: 19263 - DNA, 918 bp, Glycine max
  Clone ID: PAT_MRT3847_117399C.1
ctctttgcagtagtaagtagtaccgtctcaatcactcactgttggccatggaaaaccaaaaccgtctcaaacttcgaatctctcgcatgttccgatcctcattcgggtcgtgcaggactcgtaacctaaccgatgtaatggaaaaagcggtgtttgcaccacccaaccccatcgaagtcgaaccaccctcccccaaaaccatcaacaacacttgcatcctgtcgtttaaggattctcttcccaggcgcaaaatctcggagtggtcatcaccttttgtcttgggtggcggcagcaaaaacaaaaacaacaacctcaaccttaacctcggtgtcatgtcgtgcccacccacttcctcaaacatttccctcaacacagtccacgaacaagatttcggttacgacgacaaaaagaaggtttcaacgaaaaactcgaggaccaagaagaagaagaagaagaagaagaagagacgtgcccagaacaaaagggagtttttccctttcaattcatgcgccagagacaccaactttggtggatactggtggtatagcagcgacgaagacgacgaaaccgacacccttttctcctccaaaagcctctcctcggattcctcacgctcgcgggcgccgatgccggcgccgcgaaaatgaccggagctccgacatgggtgttctgccgctgcacgggaaggtgaaggacacattcgcggtggtgaagcgctccagcgacccttacagtgatttcaggacttcgatgctcgaaatgatcgtcgagaagcagattttttcgcccgctgatttggagaatctcttgcagtgttttctgacgatgaattcgcatcaccattataagatcattgtccatgtcttcaccgagatttgggaggctctgttctctgactggtattgataattagagaga

SEQ ID NO: 19264 - DNA, 495 bp, Glycine max
  Clone ID: PAT_MRT3847_11739C.1
caactcatattcaaataaaacattaaaaaatatagcccgtctgtcagaaacatgtgcaacgtaccgaaacttttgcttttggggcagtaaacaaattaaaaaaataatttataatagtaaataaatataaaccaaaacttcaaattcttctttgaaaaaatttataattacgcacgtcatttcttaataataccttgttttttaagaaaatataaacattaaacaatcatatcacaccttacacaaccaaataattaacatttaagtggcaggtactaacattaaattttcgcctttctaaaatttgtcatgttcgtaaaaaaaaaagaaattcacaaataaatagggaaattcactgaaaaatccagtaattaaaacaaaattactacacacatttactttatgccaatgcagtgctatcaaaaactgatgacgttttgattgttgaggaaactgcgacattgatatgaaaaaaaaaaaaaaaaagtgtgtaaa

SEQ ID NO: 19265 - DNA, 1804 bp, Glycine max
  Clone ID: PAT_MRT3847_1173C.1
tagctaatcccttgaaccattttactaatcccatggtcaaaagtggtggtaaggttgtttggacaaaaaatttaactaatggggatttcttatttttatttagtcataacgtgaaacaacttttcgaatcattgtagtgctaagcatgcatttttttttgttctaaaccacgcgtccggtgatgccactcctccgccaccgcctagccactctcactcaccgcttacgccactcctccgccgccgccgccaccccgaaaccccccatcctctacaccgccgacacaaccgccgacgccaccgccaccctccaagtcctctcgtggggcaaaggcgcctccggccagctcggcggaggcgtcgaggagacccgcctctacccttctccggttgccaacctcgccgtccccaaatcctccttcgccctctcccaaacccctggccgccgccgcctcctcccaagcccaccgaagcgggcccttgaagtgggcctctcttgtgggcttttccactcctccctgatcgtcgatggggccctctggatttggggcaaaggcgacggcggaagattgggcttcggccacgaaaaccccttgttcgttcccacactgaaccctcacctcgataacctcctctccgtcgcactcggcggcttgcattccgtcgcgcttacctcgaagcgtcaggaagtttgcaggggttatggtggttttggtgcacttgggcactcagtatatcatagagagctatttcctaggttggtaaaaggctcctgggagggaactataaaacacattgctaccagtggaacacatactgcagcaatcacagaatcaggggagctttatatctggggtcgagatgaaggggatggccgattgggccttggtcctggtcggggcccagatcatgcaggtggacttagtatcccttccaaagtaaaagagttaccttaccctattgctgctgtatcctgtgggggatttttcacaatggcattgacagtggatggacaattatggaactggggagccaattccaactatgaacttgggagaggtgataagattggtggttggaaaccaagaccagtacccagccttgagaatgttaaaataattcaattagcaagtggtggatatcactcccttgcattaacagatgatggcaaagtgctctcatggggccatggtggacaaggtcagttgggccatggatctatccagaatcagaagataccagcagtagttgaggctttagctcatgagaatattatatatatttcttgtgggggttcctcatcagcagctgtgacggataatggaaagttgtacatgtggggaaatgctaatgattctcaattgggaattcctgggctaccaccggttcaatcatgccctgttgaagtcaactttttaatggaagatgatggattaggacctcacaaagttttatcagttgcaattggtgcatcacatgccatgtgtttagctttgagggagagtagttgattttgtcagctgacatggaaatttcttctttgactataatgccccactgaattttgtaagaagatcattgaattgtcgtggtctaatagtgtataccctgatgggttactagcagcatttgttcttggagtctaacacatcaaattgactattctggatataccagaactccagcgtttacagtttgattgtcctaaaacctgattccaaaaattaatactttcaggaattatgtaacttttgatgcttattccttcgtaaatgaaagagattgaattttgaatttcacctcgt

SEQ ID NO: 19266 - DNA, 194 bp, Glycine max
  Clone ID: PAT_MRT3847_117400C.1
ttcggctcgagtggatgaagaagcatattataggctgattgtgataactggttcagtagggtgtctcctcttgttgctgtacgttttgaaatcgatattactaaagagtaaaaacctgccaccaagctcaccttatgctgtgccacgcataggtcaactccatgttataagaggatcccttcagctaagtctcc

SEQ ID NO: 19267 - DNA, 124 bp, Glycine max
  Clone ID: PAT_MRT3847_117401C.1
ggctcgagacaaaagagtagtggcctttaggtggtgaaaaacagaacctaaatcaaatcgaattcgagaaagaaagaaagatcctattcctggcgaaggccagcctggctcgacggaagggtta

SEQ ID NO: 19268 - DNA, 180 bp, Glycine max
  unsure (1)..(180): unsure at all n locations
  Clone ID: PAT_MRT3847_117402C.1
gttccttgaagttagtttgctttcaatttnntntgaataataacataacataagantagtttatatgancacgcaaggnaagttaattagaccaaaggnagaagaagaagtagtggagtgatcctggttgggtgtgaaaaatgtcgcacagcgataccataccccttcacccatcttccc

SEQ ID NO: 19269 - DNA, 488 bp, Glycine max
  Clone ID: PAT_MRT3847_117403C.1
cttgtgaaaaacgaagcacgttatttctgggcttttaatctctcaacccaaactctgacctacatagccctatgcaactctactattacaaacaccgctacacttgcctcatcccttttactctgactcacgcggatgggtatgcataaccccctttgccacctcgctcggatgcgtcccctggttaataaaaagcgccagccccctcctcaaaggggaaggggccttcgggggccacaatagccgctaccttcccagtttgtaaggaggcgccagtgccctcagaacttatcccttggaagtaactacaaatctgaagccaggaggtgtaacagctcctgtgaaagccacctcactgccatgttatttgacatcctgcactgccctgacacattgcccaatggcttaataatctacatcaaattttgagggccaatcttcaaagatcccctgtgtgtactcaatggacagatcaggtcccaaacttt

SEQ ID NO: 19270 - DNA, 390 bp, Glycine max
  Clone ID: PAT_MRT3847_117404C.1
aacactaaatcggtggcccaattaattaatagtaatactgatagcagcgactacgcctgttatgtgcgcattctccacattaccagtgactggaaacactgcctagagaactccatcactcaatgttgatcatcaaggggccgtattctctgaaaaactatttgcccaaacatgggctatataactgattatagggcggtgacatacgaccatcttagatagaacgctcccctgcccactaggtgggtccccgagacgatgcttgaccccttatatgaaacagtatagacttgcaaccctcttctcacatccctggctggaatatatcatcctttacatattgctcattcacacccgtccgagaatcttgatcggtcatatctccagagt

SEQ ID NO: 19271 - DNA, 148 bp, Glycine max
  Clone ID: PAT_MRT3847_117405C.1
gacgtgataagcatgaaccagtcagccctagccctaatagtgcagcaatgtcactcggcacaatcaacttatatgtcacattctccagtgctcaatctcgaatggtgtcaggagtagacgtgacagctcatccatcgacaggtgagat

SEQ ID NO: 19272 - DNA, 332 bp, Glycine max
  Clone ID: PAT_MRT3847_117406C.1
gtttctcttggaggtggagggactattttggtggttgcagtttcgatacccattgtgcctatagaccctgggatgattctagggcaatggctcttgtgcctccgtaactcaggagttcatgcataaagacacacacaaacattgtgatacagcaatgttttattgtgctgttgtaggcgggtaatatacacacatttccacattaaagaaggacacacacatgttagatgacagatggacccatgcgggggcgatagaatggtttagagcgagagattatagcgttatgggtccaaacgcggaggaggggaaacaagcggagaaacttcgga

SEQ ID NO: 19273 - DNA, 363 bp, Glycine max
  Clone ID: PAT_MRT3847_117407C.1
atatattgggggggggggaaaagaggaaaggggaagagagggagaaaaaaagaaaagggaaaaaaaaaaaagcgggggaaaaaaagaacgaaggaggaaaaaggaaaaacggaaaaaaaaaaaaggaaaaaaaaaaaagggaaagggaaaaaaaaagaaaagaaaaaaaaaaggaaaaaaaaggaaaaaaaaaaaccacactaagaaaaggaaaaaaagaaaagggggaaagaaaataaaggcgggtctaaaataaaaatgtaactccttgaaagagggataactactgaaaggctgagacccgaggattcggcccgggaagtgcggaccgggccccgaaaggctgggagaggaaccttgaaa

SEQ ID NO: 19274 - DNA, 2159 bp, Glycine max
  Clone ID: PAT_MRT3847_117408C.1
ggagaatagaatgactccatctgctattgctgcttgcatggcacccttgctcttacggcctctgctagctggagaatgtgaactggaggatgaatttgatgccagtggtgatagttcggcccagcttcttgctgctgctaatgctgctaataatgctcaagcaattattacaactttgttagaggagtatgagaatatatttgatgaagaaaatatacagagatgttccatgtcagcagattctcaggttgaaaacagtgggagtgaagattcaactgatgatgataatatagatgtgaaagaaaatggttaccatgatgcagagaatgaagttgatcaggagacagatgatgatgctgatcgtattcagagtggaaaattgagtgagagtagtggttatgctggcagtgatctttatgattacaaggcatttggaggtgatgattccgatgttggatcctccagtagtaaccatgctaagactgaaaatgctaatctgaatgctgttccagataccccagtctctgaggatcaaaacaagcaaagaaaggtcagtgaaaacccagttgatgaaaatgatgcttctaatttgttgccttcatctgaatcttatcgatccatgggtgagagttttagattctatggacccctgaaatccatttacccatgccagtgattgaattcgggctctggaaatgcaaacaagtaaagctagtagttctagctttcagttctaaggcggtcgacattctggggaaggagcaagccaaggaagacaccgtcagtggaatcagttgattcttctggagaagaggagcttgctattcagagactggagattgcaaaaagtgatttgcaactcagaattgcaaaggaggctagaggcaatgcaattttgcaagcaagcttagagagaaggaagcaagctttgcatgagcggcgcttggcacttgaacaagatgtttcaagattgcaagaacagttgcaagctgagagggatcttagagctgcattggaagtaggcttgagcatgtcttcaggacagctttccagttcacgtggcatggattccaagacaaaggctgagctggaggagattgcacttgctgaagctgatgtggccaggttgaagcagaaggttgcagaactccatcatcaacttaatcagcaacgacagcatcactatggttcacttactgatgtaggcgatcgataccaacatgcccaaaatcatcctcaacagaggtttcttcagcaagattttgattcaaccctggcctttgttaatcacgagaggaaacaaaggactgaggagagtttgttgggcactgattggagaaatatcaaaggacaagtattggcatctggtagacagccttctcgaaagcaatttttagagtcaagtcctagcgattccaaaagtaccgaggcatcaacaagcatgtctgtcgatgatctcggtgcccttgattcggcctctgtgccttccacctcaagagcagcagaggtgggggaatatgcaagacatccatcagtagcatcttcaacattagtagagttaactactcgtcttgactttttcaaggaacggcggtcccagttgatggaacagctccataaccttgatttgaattatggttctacaacttcccaagactttgtctataaaccgtcgtcgccatcatggagttgactggccaaatcataggtgcttcataaaatccgtggggaagaattttggctgacatgtatatcctttgagtctgacttattgcatatatttttatccttcatgggtctgtactgcttcaatctcttgtttcctatttaattttttcttcttttggtagtgaagttaattggagttgaaatgaaaggctttccttttggtcttcaggttttctctttttttaataacattgagttcttttgtttctttaggggagggggtggaatttggtgtaattatatggcatgtcaatagatggggaattttgttgaacaaacaacgaaagtgaagaaattttaattaccgttttggcaaattctttgtacatagggacatgcaaattgccagtttatatgtcacctatgtggaatgattggtatgtatctagcagcaggttgtttgtgatgctattaaattatttctttagtat

SEQ ID NO: 19275 - DNA, 644 bp, Glycine max
  unsure (1)..(644): unsure at all n locations
  Clone ID: PAT_MRT3847_117409C.1
aaaacccaattaatcaaaaattgagatacaccacttacaactatcatcatgacttcttcatcacttcaccttctgcctcttacctattccgatcatgcaccccaaaagcctcgtagtgtgttacccatctttggtttcatcaacatgacaatcagcagcgtggtcacaatctaccgcgcgcacaacaacaacgacactcccaccgtagtgttcgtgggttttgtctactttggttccttcttgttggattattgctttcgcttgtaccactccctacctaaatcttcatcatccaattcccataatattaaacgcaacgttaaaatcatcatttgggtcttgattagcaccatcatgttgggatttgcgtgcgagttttcgacctttatgagcttcctcgagtcttcattcttctttgggcttgtgattagtggcaacatctttcttttctatgtgtacttcatttgggagggtgacaagagtgctactactagtgcttgctccaataatgatacttgctgctataatgattatgattataaaccaatattaacagaggctaaggtagatgtataatgtgtaatganttgactgattgagggtttttttgtttgaattatttacgtgtatttgtttatatgaaa

SEQ ID NO: 19276 - DNA, 497 bp, Glycine max
  Clone ID: PAT_MRT3847_11740C.1
aagtcatctagatatttgctacttgttcttggtttatataatttatcttgatcttattccttgggtttaacattagggatttgaagatcaataaggtttaataggctagtaattaacaattcccttgaagtcaggtgtatattaactattatgttttgtgatgttctctgagtggttcctagatagctcctattaagattaatacggctttcatgaccagtactggtagaactgctcgaaggataaaatgtttccactttttcaaattttcaatttgtatttctttggttatagactttttaaatttggaatatctaatatggttagggggtattcttttcaacaagcttctttcccctgtttctcagtattgttagaaagaatttttccgtagtttttgttctgctctgctgaattttcctattagatatgaaaaagaatagtcttagatgtcatgttagatgcacatctatttatgtttaatatgatcatacaaa

SEQ ID NO: 19277 - DNA, 1278 bp, Glycine max
  Clone ID: PAT_MRT3847_117410C.1
ccgcgcgcccacgcggccggcgaagaagtagagaacaaagaaagagagagagaattgaatgtgaatggggaatcagaagcagaagtggacgcaggacgaagaagatgctctcatcgccggcgttgaaaagcacggccccggaaagtggaagaacattctcaaggatccccaattcgcccctttcctcacttcccgttccaacatcgacctcaaggataaatggcgcaatttgagcgtcagcaacggtgctcagggctccaaagaaaaatctagggttcccaagcttaaagccctccctgctcctcctgctcctaccgccactcctcagaacgccgctcctgctctgcaaaacgcagcatctgatgtcactcccccagatgcttctcagaatgaccaagatgccaaaaaccctccaaggtataatgcaatgatttttgaagctctatcagcgctgaaagatagtaatggatctgacatgaatgccatcattaaattcatggagcaaaaaatcttcaggtaaaccaaaattttagaagggcattaagtacaaagttgaggaggcttgttagtcaagggaaacttgaaaaggtacaaaatggttacaaggtgaaaaaggaagcctcctcggggacaaaatcaccttcaccaaaaccaaaggatgtccggccaccacaaccacaacagcaatccccagcttctgtcttaatgactaatgacacaataaaggaagctgcggatactgcagcctacagagttgctgatgctgaaagtaaatcatatctggctgcagaagcagtaaaggaggctgaaaaaaatatcattgctggttgaacatagtgattcaatgttacagctagcaaaagatatatatgaacaatgttcccgtggtgaaattatcctcttggcttaagatggtctaagtaaggtctataaatagattcgtcctgatgttggtttctaaatgtaaaattttgttgatacaatgaaatactattttaacttttatttttgtattttatcagattcccttaaacatttgtattccttaaaattgcatggaaagtcatgtttatagtaatatcatcggtccaccaaatcttgccagattttggatccaaaatgtaagcaatagaaactcatttatgttttttttggcgatgtaatacagatcattcatgtcttgattcttgactctagtctagaactcgatccttcgtatccaatttttttaattaaaagtgaaattttcacgtaaaaaaaaaaaaaaaaaaaaaataa

SEQ ID NO: 19278 - DNA, 717 bp, Glycine max
  Clone ID: PAT_MRT3847_117411C.1
cgaattcgagctctgtacccggggatcctctagagtcgacctgcagaagcagtaaaggaggcagaaaaatatcattgctggttgaacatagtgattcaatgttacagctagcaaaagatatatatgaacaatgtactatagataaacgatccttcctgcctcttatttgtgaatttttcaatcttttattgattatttttaactaccattgatcttgtgggtctattcatgcaggttcccgtggtgaaattatcctcttggcttaagatggtcgaagtaaggtctataaatagattcgttctgatgttggtttctaaatgtaaaattttgttgatccaatgaaatactatttttacatatttttttgtattttatcagattcctttaacatttttattccttaaaagtgcatggaaagtcatgtttatagtaatatcatcggtccaccaaatctttccggatttcggatccaaagtgtaagcaatagaaactcatttgtgttttttggcgatgtaatatagatcattcatgtgtcttgagtcttgactctagtctagaactcgatccttcctatccaattcttttaattaaaagtgaaatcttaacgtaactgagggcgatattaaagatgaaatataaatcatcaatgtgttttttatctaacagtttgagccattgaggtaaggctcaatgttatttttggtaagggttcttctg

SEQ ID NO: 19279 - DNA, 269 bp, Glycine max
  Clone ID: PAT_MRT3847_117412C.1
ccctctaaaaggggtttaattttgaattttgataaaaaaaaaatccccttcctttaaaaggggtttaatttcgaattttgataaaaaaaaaaaaaatcccctttttttaaaccccaaaacattttcagtttccttggttaaccactacattctaaggccctgattttgcacaaccggcctcccacttattttcctaaaaaggggaaaaaaagtggggcaactttggcttgaaaacattaccggggttttaaaacccaacctaggggggt

SEQ ID NO: 19280 - DNA, 285 bp, Glycine max
  Clone ID: PAT_MRT3847_117413C.1
cttactcggccgcgcgctcgttctttttttttttttttttaatactatttcacccaacatcatgtggtgtaaaaaaatcagtgagcggagcaaccagtggtccttaatttaattttagcctatgacagggcccaatgacgactttgaatgctccaattatataatgtaacaacatgcatcaatacgaagcttcttctctcgaagaacaaaacaagggtatcccttctccaagctaagtatcctaacaccttcttcaggcacctgatggtttcagatacactctcg

SEQ ID NO: 19281 - DNA, 234 bp, Glycine max
  Clone ID: PAT_MRT3847_117414C.1
ctattgtattttttagttgaagcctagccgcgcccaaaggcagaccttctgaagaagggtatacccttttataggggcaaaaaaatgcccaccaaggcggccgcattacaaacgggaaaaaaaggtggaccggggggaaccccgcggtaacccccgaaaaaacacctgcctataacacacttgggacaaaaggaaaaaggaacaaaaagggggcccccccaaaaacgttccaaa

SEQ ID NO: 19282 - DNA, 307 bp, Glycine max
  unsure (1)..(307): unsure at all n locations
  Clone ID: PAT_MRT3847_117415C.1
ggatatcatgactgccttacaacttgtgctcagaaaatctctggcttatggtggtttgtcacgtggccttcatgaaagtgcaaaagtgattgagaagcatgctgcacaactctgtgttcttgcagaagactgtgaccagcctaactatattaaactggttaaggccctttatgcaaancacaatgttagcctactaacagttccgagtgcaaaaacccttagagaatgggctggtttatacaagattaattccgaaggaaaagcaaagaaagttactanttactcctatatagttgtaaaagatttc

SEQ ID NO: 19283 - DNA, 329 bp, Glycine max
  Clone ID: PAT_MRT3847_117416C.1
caccccaaacaaggccaaaaaagttttgcccctgggtttcaatttacagtgggggggaacatgtctccaaaccattggtcctaacagcggtcctttaacgcgggggcaaagaataaaatgggaagggggccaaaaaaaaatccactttttttgcaaaaatagcagccaaattggatgaaagccgttttcaccccatttagccaaatcaccccttttttaagccaagccctttttttttgggggaagagttacctccaacctagttttttttggagccccagggggaccatcaaaaatttttttaccacccttactttttttaaaaattt

SEQ ID NO: 19284 - DNA, 557 bp, Glycine max
  Clone ID: PAT_MRT3847_117417C.1
tatacataggagtgtgcattatgttggcatctactattggtggcttgaggaatattgttgctgatgcatccagttatagtttctacacctaaactatatgatggtattgcaataatatagcaaatataattaatccagtaaatcaagctggattagattatctaattattttggtctttgttactttgaactctaggctgtagcctttttccaccatcttactctcctttttttaatggtaaaatcacctctgaaagtttattttgtcaattgagatcaagggttattgaataacttggtaaggggcgattttattacattgtatgtgtcatgtcagcaatgtggagtatgagtcatgtcagcaatgcggagatgttgaaaaaagccgcagatattccatttatacttgattgtttttcttctcaaaatggctaaactgttattgagattctcatgctagtgattttatgtaacccgttccaagctgatgaatatcttggataatgtaactcttgttcacatttgcaaagggaaaaaggcaatttgcttacgattgt

SEQ ID NO: 19285 - DNA, 1987 bp, Glycine max
  Clone ID: PAT_MRT3847_117418C.1
gtgctctctctgcattccttccagttctgccatatctccctgtttcagcagatggatcagatggcctaaactatgatggtagagatggtaaaagacatggacgtggacattcatattcaagtgggtatggaggctcaagtgatttagcagctggtgacgtctatgcaggtagaatgcaatcttcataaatgcatttatcttttagctggcaacttcctataatttagaacagtgtcattagtatgtaagagattgatatcttaacctgaccgatgcccgtttagaattctgatgctcttgttttccctttgttccctttcccttaccacccaaacagctgagatctatgaagcccgcagcctgcctactgcctaaacctgaagacctgatgaaccagggtttgacaaacttatggcccaccctgatgcttctacttagaggaccaaacttatgtggagactattgaaattggccatgtccattttaccttaattcccaagcttgataacttgtgctcccaagaacctataaagctggcttgcctttgcttctgttttttattattggggttcatttgtctttaaaactgaaaacaccttgtagctttgatcatccagcagttatatactattggtttttggttttattttctcatagttcactgtcacatgtagtatgatcttttctgggtatttgaatttcatgtttttccttctaagttgaccttatatacatcaaagttggtggagttttggtgttgtgtattgcaggtgccactatttgcctataatatatcatcgtgagcaggtaaaggcgtgtcacattatttgattctgatatttcatacttatggatattgttaagtaccttgtccgactacacctttctagtttaaaggtatgaaagctgttcttagtatgttcttaatgttaactgaactactgaagctcatagtcaagaaataagttgttttaggaaagataattgcatgacatgtatggtctttggtgattcagaaatatctggatctgtttgatgaattttgttttgaggataagttgtgaaagcttgaaggcactccagcagcagtggtggtgatggtggcagtggctgtggtagtctgaagtgaaaatagaaaatttattaaaacaagttaaagaaaacaaaaacagctaaaatgtattttaattttctgctctaaaaacagattatgagaaagaagtcttcaaaattagatataaaaaaatagacaccaaacagattgtgtctaatttttgaaaataaagaacttttcaaaaatagtattcaaacgggccttctcttgttgcacgtttctttcctctgttgccaatatgaaacatgcttggatatttcaattgtcaatgcagtgcatggtttttgtttgagtttaattagcatttaactgcattgaaattgaatcattttaattttaatttattttgaactctgattgcttggttcaaattttattgggctactgctactgacaaaagttggcataaaaaacgaagatatttcttgtcaggccattaggtcacctgcacagtcagagtcttttgatatgctgtcagtgatccaatggccagtgcaaagttgtgcctagtgttactcttataatactattctcaagtacttgtctgaaaaccatggcccagggatgcattgatctgaatttcttttggaggtttggtgtctttcacatttccaggtagttggattagataacattgtgctttcagtactttgatgatgcctggagagatattttggatgaattggaattctgtggctaatgtggtaacggttatattgtttacactgatttgtaattataactgaaatgcaccttgatttgttctatgccaactcatttggtaagccgtattaggtataatatttttttgttgggaactggtgatgattcccttatgattggtgcaaaaacatcatgactaaatttgctttt

SEQ ID NO: 19286 - DNA, 1649 bp, Glycine max
  Clone ID: PAT_MRT3847_117419C.1
tatcaactttgattgttgccccggactcctgcctaatttgatagttcaacaacagaaggagatgaatgcttgatagccattttgaccaaagagttctttgaagagactttctctccaacaatagaagcagctgtgcgtttgcaacctcgatgcagtgagaaggttgaaagagattcaggaatcatctctttcactacccgtctgctggtaccaacctcacgtattggttgccttattggtaaaggggggtctatcataactgagatgaggaggcttacaaaagctaacattcgcattatttcgaaggaaaatcttcctaagattgcatctgaagatgatgaaatggtgcagatttcaggagaccttgatattgccaaggatgctctagtgcatgtacttacgcggttgagagcaaatctttttgatagggagggtgctctctcttcattccttccagttctgccatatctccctgtttcagcagatggatcagatggcctaaactatgatggtagagatggtaaaagacatggacgtggacattcatattcaagtgggtatggaggctcaagtgatttagcagctggtgacatttatggaagctatggtggttctcagcttggaagcaacagtgcttatggggcttatggaagttattctttgggacggtctagtactgctgggttgtcaagtcagagtggtgcttctaggaggagaaaccatgcttactagacttaatggtccatgcagctgagatctatgaagcctgcagcctgcctactgcctaaaccagaagacctgatgaaccagggtttgacaaacttatggcccaccctgaagcttctacttagaggaccaaacatatgtggagactattgaaattggccatgtccattttaccttaattcccaagcttgataacttgtgctcccaagaacctataaagctggcttgcctttgcttctgtttttattattgtggttcatttgtctttaaaactgaaaacaccatgtagctttgatcagcctgcagttgtatactatttaatgttttttggttttattttctcatagttcactgtcacatgcagtatgaacttttctggttatttgaatttcatctttttccttctaagttgaccttattatatacatcaaagtttggtggagttttggtgtcgtgtattgcaggtgccactctttgcctataatatatcatcttgagcaggtaaaggcgtgttgcattatttgattctgatattccatacttatggttattgttaagtaccttgcccaacttcacctttttagtttgaagttatgaaagccgttcttagtatgttgttaatgttaacttaactactgaagctcatagtaagaaataagttgtttgaggaaagataattgcatggcatgtatggtctctagtcattcagaaatatctggatctgcttgatgaattttgttttgagaataagttgtgaaagcttgaaggcactctagcagcaggggtggtgatggtggcagtggccgtggtcgtggtagtttgaagtgaaaatagaaaatttattaaaacgttaaagaaaacaaaaacatctaaaacgtattttaattttctgcactaaaaacagattatgagaaagaagtctt

SEQ ID NO: 19287 - DNA, 464 bp, Glycine max
  Clone ID: PAT_MRT3847_11741C.1
ggccttttgtagataacaaaatgaaaaggagtacatggaaaagagaagaggagataattgaaccataccctacccgaggcatgcattgagaaatctgaatttctgatcttgtagcccacgctacaatgcaaaggcatcaattccatacaccaaaggaaattcagcattgtgggtacctcaacattggtctttttataagtgagttaaacataatgccacattgattctcaaccatggaacatggcctccttcagacacacaaccctatttaatataggagttgtcactttttaactaaccaaaatgaaatatgtcaacaataataggcaacttttaattagatttcaacaaattaataccttctttttcatgagatcgattacacaaatattttagcttactttttctcacgcaccctcgtgtacactctgtccaaccacaccaatattctactggatttctgc

SEQ ID NO: 19288 - DNA, 261 bp, Glycine max
  Clone ID: PAT_MRT3847_117420C.1
gagcctagaagcagagatccgggcgcgggacaatgcccatctcactcccctagatgacggatactctcgggaacccacaggtctcgaatcttcctatacccgcgagcttgaggctgtcagaaatggagagaagaagtcgctcgaggaagagctaagccacctgtccattggggcagcctcctattcagacgtgtgctccttacaagcgcccgacagttacgcgagcaacggcgcagcaaagtcagccacagcggccccgag

SEQ ID NO: 19289 - DNA, 455 bp, Glycine max
  Clone ID: PAT_MRT3847_117421C.1
ggaaataattttataaaatttaattaaataaataagtaattttaaaaccaattaaaaaaattaaataatataatatttatattctataatattttaaataaaaaaaacaagaaggagagagagtgtattcacgttcatttgagtttgcaactgatctctttggccatgttcatttggaaagtggtgtgaatcaaagcacaaagtgcaaagtagtgtagattggaaattagattgaaaagtgatgtacattgggaaaaaacaagagaaagatggtatattttcttgttgtgcagaataattgaagtatttaaaggaaaaggggaaaaccctaggatcgatatttcggttgattgataaaatttcaaagggctccattgtcgtcactccaaaattgtcaagtgactaaatcaaacagaacatacactctgagggagtccctaacgagatttgcaaaa

SEQ ID NO: 19290 - DNA, 1389 bp, Glycine max
  Clone ID: PAT_MRT3847_117422C.1
tgagctcaagcacatcttcaaggactggtattattcttgcagacctctctacaggagttgagagtattcctgtatcacttgtcaatgaagttgacaatgggtggggcccttcttttgtctctgtttgccagtctccctgggctccccagcccttccgctgtgcgcaatccgcttctggctgcaactgtaacaaaacatgtgtccctggagatttgagctgctcttgcattcaaagaaatgaaggtgactttccatatactgcaaatggtgttctagtgagtcggaaaccattggttcatgagtgtggcccattgtgcaagtgttctcctaactgcaagaatcgagtatcccagactggtttgaagcaccaaatggaagtgttcaaaacaaaagatagagggtggggacttagatcactggatcctatacgtgctggtacttttatttgtgagtatgcaggagaagttattgacgttgccaaggtaaataagaataggggatatgatgatgagtatgtttttgatacaagccgtatttacgatacattcaaatggaattatgaacctagcttattggaagaaataagctcaaatgtctctagtgaggattatgatataccgtctcctctaattatcagttctaagaaatttggaaatgtggctagatacatgaatcatagttgctccccaaatgttttctggcagccagtcttgtatgcagaaaataatcaatcctttcttcacattgcattttttgccctcagacacattcctcctatgacagagttaacatatgattatggctgttctggtcatgctgatggtagcagtgcacccaaagggagaaagaaatgctcatgtggatcatcaaaatgccgtggttcttttggttgatgttttgttgcagttgctgatggacaggcatggtgctggcaaatgtattcacagctaaaagatggggacattcaatgtgaaggccagatacagcttggaagttccaacttcgctgatgcttgtttccaaatatggttgtcaagggtggatgtactcgattaaaagttaaccatgttagtccttaggcatggctctttcttggcttctacttgtagttagtgacttttgatcatcttaccccattcctagttttgaggggaaaaagttttagtgagcagcttgtgtaaaattattgttgtagggaatggccatgagtacttgaaaatatcattaacatgcatatctttgtacccttttggcttttgtaattgtaatagagttagtgttgatgttgattagaaggctagaactatatatcatattttggattctagaaactattttgttaaaacatgctatgtatcttttctatgccaattgaattgatctgaactcc

SEQ ID NO: 19291 - DNA, 377 bp, Glycine max
  Clone ID: PAT_MRT3847_117423C.1
ccgcccttttttttttttttgtttttttttttaagaatgagaataccattttttattattcttaaaatcagaagaaaagtcttttaacatcagataaagaaaactaacccaaccttattttatccaaaatacattttattttggaatttggattttaaaatttgacctgaaaataaaacacacaaacacgaaaaattattaggtaattttaaatcattacttatctatagtcttaactaatttttacgtgacacatacttaattaagtggtcctcaatcactaccttatccatggtgttagcagatttctatatgacacataattaagtatgtgtcacgtaaaaattacttatctatagtcttactcgagccgaatt

SEQ ID NO: 19292 - DNA, 517 bp, Glycine max
  Clone ID: PAT_MRT3847_117424C.1
atcctcctgtcaaacaatgatctatcccttgctgcttaaagtaaccttgtttgtggttgtaggttattcaacttcaaggtgatcagaggaagaatgtttctactttcctagtacaggtaactataacctcatctttgtgttatatagtgtgttgtcccgattaatttctccattttaattttcatattttttttgttgtctcttctgtctttgctgtttttcataattgtgtttctaggcttatttttggaatggctcattttagagaataagcttcttgattgtgccttttgctttattatattgttttggcaatgatattgatatagtaatagcataggcaattggatatccttttgaagaatacttcacacgtaaattggatgttgcaatgttagttgtagagttttttgacaaatattttgccagttaaaatccaaagaccatatccaatgttttggaaatatatatggtgaatgtgcacctatcccctatttactatgctaatttaacttaa

SEQ ID NO: 19293 - DNA, 343 bp, Glycine max
  Clone ID: PAT_MRT3847_117425C.1
agaaaaaaaagggggcccggggttccaccgggaaattctggccggttccctggggggtacccatttttttttttggggggcctaattaaagttgggggaaaaaagggaaaaagggttttccgggggaaaatttttttccgccccaatttccccccaatttacaaccgggagttttaaaggggaagcccggggggccctatgggggggcctacccccctttaatggggtggcccaccttgccggtttttgggggggaaacctttgcgggcccttttatttaataaattggccaccccccggggaggggggtttttttttttgccccccccgtgggttttttttt

SEQ ID NO: 19294 - DNA, 883 bp, Glycine max
  unsure (1)..(883): unsure at all n locations
  Clone ID: PAT_MRT3847_117426C.1
gcacgngcaacgatcattgttcattcggcaaattatcctattcaacactcattgcctttccatctatctctctctccttcctttcctgcgacacaacatttctttctcctttctttcaaaatttcttttaattccatctttcgccaattcatacccccaacgttcacctcttcaaaccataaaaaatcacttaccaaatcgtcaaggtgcttccttttcctcacctctgatttcatagttgcctcagaaacatttccgcaactgggtttttcacnagctctataacgtgccgaatcagattaaggtcatgnttttcttattgtcggtattaccaaacaacgatttaatacgtgtcttttgtgtttttttntcttcttttgttttttccccgacaatttggcaactttaaggaagctaacttagttgtaatccatccgaaacatgccgttgccagttgaaattgacccttttgttttttctttccatcattgcagaaaaaattaatttttgttttgtttgatgggtttgagtttccttcaaatagcagatattgttggtgttgatgagtcccaactctctagtaaggagcttgttggattgaaaacttgttggggtttagtaaanggttggttaagaanaattctnggaactactgatttgaatacttttacccattaaaccanaatgttnaagcaaangttcccagccactcctttttaaaccaangggctggcaaaactctaantcaaanaaaanngnnggctcattctcccaananggtcattngatattgcnaaattgctaaaaaaaatacngggaaggggtgtccttccttcaacaagggggaaattttggaattctgctaggttgcaanatccnaaca

SEQ ID NO: 19295 - DNA, 299 bp, Glycine max
  unsure (1)..(299): unsure at all n locations
  Clone ID: PAT_MRT3847_117427C.1
caacgcanatagttgaattgataagagcgtcacacttactatatgatattttttatcactgtgatattggtgtggaatattcataaactttactaataattagtttgtgcctaacaattttgtcaatcatctttaatgagattttttctttcaatcaccttttcatatgcaaaactcaaatgaatttgagagaatttgagatcttgcttaggagatctgaacccaatttcacttaagccaatgacatgttgatgcagtgtggcttgatcctaagcataccatngntatatttcataaat

SEQ ID NO: 19296 - DNA, 468 bp, Glycine max
  Clone ID: PAT_MRT3847_117428C.1
ttcaaaatgaagaaccgttgttatggttagttgtgtgacctaacatggagaacgaggaagccaaagaacacaaacggatctgccaagataaaatgcgacatcctatccttcttgcatggtcagaaatagatctgatttacacgcatttatcagtttccaaccaactaagtcggccaaaatctcaatatagtgaatcatcattcaaagcattgggacccggataatctcgtaccataaatgcgttgtactgttgaatggaactaatatggttgatgaactacaagatccaactcaaagaagcctgatcattctagggagaagttgttgctttgttggctggcttggcacaaatgacaacctccctgattactgaacagttttgctaatgcagctgcaatctggtacagagattaagtgtttaatttcttgtgaaattaacaagaaaaattatagacttgatatattatc

SEQ ID NO: 19297 - DNA, 439 bp, Glycine max
  Clone ID: PAT_MRT3847_117429C.1
aaaaaaaatttttttttttttttttatgggtattgaaacccccaaggggggaaaattacctgcctggggcgaaattatagcaaattatcctcctgggggtataaaaaagacccttgttaacctgggtcccacattgagggacccacttgactgaaaatgaacccccacccccccttggccaaattgggattttacacccgcccttgtatcaacacctttaccctttctaaaggttacgaaaattattggactccccattgatgaaaaaggtggaggaataaccaaacctggtctaaccccaccccaaagaaaaaaaaattttgcctttttctccaacaaatttgtaaaaaaacaaatctctcttcgctgaaaaaaaaagagcggccctgcaggggcgattttttttttaaaccccccccgaaaccgccaattaaaaatc

SEQ ID NO: 19298 - DNA, 535 bp, Glycine max
  Clone ID: PAT_MRT3847_11742C.1
agcaaatgcaatactactaaggcaaactaaagaaccaaacacaaatcctctcatttaccttgtctctctgccttcaaaattttcaaacaagaaaagaaaggaattctgctccaatataattacctctatatctattccacaatctcagattctcttcctagctcacaatggttacattcttcagaaatttggctttcagctatgcttttcttgcaatttttctctcagcaggtattggagtttttctaggtgttgaatctttcggaatcaactatggccaagtggccaacgcggtgccgcaacctgccttagcccttccactgctgtgcccccttcgccccgcaatttcaagcctctacggcaccattcccgagttcctgtctccttccccttattccattaattgtgcaaccaatcacaggtattggagtttttctaggtgttgaatctttcggaatcaactatggccaagtggctaacaatttgccacaaccagacaaagtcgttgaattgttgagcaccttaacctcacaaa

SEQ ID NO: 19299 - DNA, 255 bp, Glycine max
  Clone ID: PAT_MRT3847_117430C.1
gaaaaagaaaaaaaaagtttgcaatgtaaatcacttaataataatttaactgttgctcagttagagttttcaattgttttactgtttggataaatatcttcataagtacttatagaagaagaaagtaaaatgaatgaagcttctttcataaagtcaaatcatatatgcgcctcaacttttggagaagttagttgagagagctttcataaaaattaagtgcataggttgattttaacttctttttttttttttccg

SEQ ID NO: 19300 - DNA, 997 bp, Glycine max
  Clone ID: PAT_MRT3847_117431C.1
ggaattttgctctgcaaagtgtatcatatcatatcacaccattctatcgcttcacacagagtgagatatagaatcactgaagagcttccttcaatggcggtttcttctctctctgttactcctctttcgctctcaaattcttccccctctctatcttccaagccaaagtttccatctttgtgttttctctctggcaacaacaccacattgagggtaacatgcccaaaacctctgcactcatccactgttgttcatgttgctaccgaagcgttggattcatcccctgatcccttggacccacctccagaaacccttgatgatgactctgacgccaccacctttgaggttggtgacttggggactcctagcacttcagcaattagcattggtggcgatgcagatacaatggcaccaaagcagaagattagaatcaagcttaggtcttactgggtgcccttgatagaggattcctgcaagcagatattagatgctgcaaggactaccaacgcgaaaacaatgggacccgtgccattaccaaccaagaagcgaatctactgtgttcttaaatccccgcacgtacataaggatgcccggttccatttcgagatcagaactcaccagcgtctcattgatattctatatcctacagctcaaacaatagattctctgatgcaacttgatcttcctgctggtgttgatgtggaggtcaagctgtagagatatttgcttttcaggttgctaactgtcttgaatttgagtgaggttcaacttgttatcaatagccaaaatatattggcagatatcatgtgtttcactgcctaaacttgatttctaagaacaatgctaaaagtccttttgtttgctttccctttctgtcttcattaaattagtttatccctgatttcctgttattgcttagatatttgtatatcatatacaatgttatgtaattcaggtatgccacaaaattttattttattttcctggtaataataaa

SEQ ID NO: 19301 - DNA, 510 bp, Glycine max
  Clone ID: PAT_MRT3847_117432C.1
gcaataaacacatccttcatcaacatgtcttcctcttccattcccacccatggtaaaggctacggaatctccgacaccaagaactacaccaacttcaccgttaaggagttcccccttaagactgccggtcccgatgatgtgaccatccacatcgagtgctgtggtgtctgcggctcggatgtccacaccgtcactggcggctggggcgagctgtccactgactgggtctgcccaggtcacgagattgtcggaaaggtcactcacgttggagagaacgtgaaggagttcaaggtcggagacagggccggtgttggtgctcaggtcttcgcttgcaagaagtgcgagcgatgcaagagcgacaacgagaactactgcccagagcaggtcgacacctacaacgccaagttccccgacggtgtcatcgcccagggaggctactccaccactatccgaaccgaccagcagttcgtcttcgccatccccgaggcactcaagtctgaggatgccgct

SEQ ID NO: 19302 - DNA, 376 bp, Glycine max
  Clone ID: PAT_MRT3847_117433C.1
ggtgatattcatttattgatataacggggggtgctggggcttttttattattttttttcccatttacaataagaatctcaaatgaaagcttgttttcccaaaagaaaggatccttgtcaggggccgaagacccccaaaaagaagggcttcttgggttgaaaagagaaaattataggctggggggccaaaaaaaacccccaataatcccttccccaaaggggggggttcccccccacccacccggcttatgtgttattgagacaagttcaacagcccccccgaaaattccttaaccggcgcttgagttggagagagggtccataaaaatcccccccacccgtaattggccctcggtggcaaaaaattttttttttta

SEQ ID NO: 19303 - DNA, 998 bp, Glycine max
  Clone ID: PAT_MRT3847_117434C.1
gtgtgttctataataaggttgtatatggtttggtgggatttgtctagagtctttagaaaagatatccatggctgagtccgacaacgagtcaggaggtcacacggggaacgcgagcgggagcaacgagttgtccggttgcagggagcaagacaggttcctcccaatagcaaacgtgagcaggatcatgaagaaggcgttgccggcgaacgcgaagatatcgaaggaggcgaaggagacggtgcaggagtgcgtgtcggagttcatcagcttcataacaggagaggcttccgataagtgccagaaggagaagaggaagacgatcaacggcgacgatcttctctgggccatgactaccctgggcttcgaggactacgtggatcctctcaagatttacctgcacaagtatagggagatggagggggagaaaaccgctatgatgggaaggccacatgagagggatgagggttatggccatggccatggtcatgcaactcctatgatgacgatgatgatggggcatcagccccagcaccagcaccagcaccagcaccagggacacgtgtatggatctggatcagcatcttctgcaagaactagataacatgtgtcatctgtttaagcttaattgattttattatgaggatgatatgatataagatttatattcgtatatgtttggttttagaaatacaccagctccagcttgtaattgcttgaaacttccttgttgagagaatatagacattattgtggatggtgatgtggcatatgtggcatacacagaatttttgtattcttctttctctctatggatttttgtgtaagggcaggactatggctttgtttgctgatcgtatagctagtatggtgctatctaggttcggatttttttctttttcatgtataatgaaaaattaacggaggaaattactcttacgttactttgaaattaattaactaactgctgcttctgcctttttttttttctcctttctgag

SEQ ID NO: 19304 - DNA, 113 bp, Glycine max
  Clone ID: PAT_MRT3847_117435C.1
tcttccattttcgtcatcaacactcacgctataagtaggaacgagattacctaaagtcttggtgaaacattttcaatgaataacttgttacaagggaagaaagctgcgcaagg

SEQ ID NO: 19305 - DNA, 771 bp, Glycine max
  Clone ID: PAT_MRT3847_117436C.1
ctttacacaacatattattgtaaggctagctagctagccatggctgagtcggacaacgagtccggaggtcacacggggaacgcaagcggaagcaacgaattctccggttgcagggagcaagacaggttccttccgatagcgaacgtgagcaggatcatgaagaaggcgttgccggcgaacgcgaagatctcgaaggaggcgaaggagacggtgcaggagtgcgtgtcggagttcatcagcttcataacaggagaagcgtccgataagtgccagaaggagaagaggaagacgatcaacggcgatgatctgctgtgggccatgaccacgctggggttcgaggagtacgtggagcctctcaaggtttatctgcataagtatagggagctggaaggggagaaaactgctatgatgggaaggccacatgagagggatgagggttatggtcatgcaactcctatgatgatcatgatggggcatcagcagcagcagcatcagggacacgtgtatggatctggaactactactggatcagcattttttgcaagaactagataacaggtttatgcatgtgttatctcatctgtttaagcttattaaggatggtgatatttgatttatattatgtttgattttagaaacaccccagctccagcttgtaattgttgcttgaaacttcgttgttgagagaatatagccattattgtggatggtgatgtgacatgcacagaatttttgtattcttctttcttccaatggatttatctcgggccc

SEQ ID NO: 19306 - DNA, 113 bp, Glycine max
  Clone ID: PAT_MRT3847_117437C.1
gctcggccgaggcatcgagcagcacggtttcggtaccgtcggctgcggtggcgacgatgcgctggatcgacacccagaccttggaatagtcgctcgtcaggttgtcggtgatg

SEQ ID NO: 19307 - DNA, 404 bp, Glycine max
  Clone ID: PAT_MRT3847_117438C.1
tcggttatttttttagatcccgctcacgggttgaccatcattaaaaccggacacatgagccatctgtgctagccttgaagaatttctcactttctacctactttttcggggccattccttgacggggagaatatcactctgtgtgcattgacacagacttagctgattgtcctctttcgctctctgagtgaacaagctgaacactatgctattttatctgggactaagggacagatggaaacttgttctgtctatctctcagaggtgtgttcaatcacaaggtcatacttgggaacttgtgcgttagtgacaacactctcatatgtaaaatccgagcttcgaccgaacacaattctattgctctacattctcatactctcttcttctcacagatccagaatgcc

SEQ ID NO: 19308 - DNA, 280 bp, Glycine max
  unsure (1)..(280): unsure at all n locations
  Clone ID: PAT_MRT3847_117439C.1
tcatcggaaaattaattgctacaatccatcgctccttttgcaaaccttactagactctttgagacggggggtgacaatgagtccatgtcacgctctaatttttacgacctttaaagcgacatttatacaatagaatttgacgtgagattagattgcttctaggctgcctcttatagcctttactccttgactgactaaatgacatctcatgttagatgctgatctgtatcaccttttccgctcctaangcagcatcttgcacacttcctcttactcgact

SEQ ID NO: 19309 - DNA, 428 bp, Glycine max
  Clone ID: PAT_MRT3847_11743C.1
ctttttttttttttttttttttttttttttttttttttttttttttttttttttttttttttttttttttttttttttttttttttttttttggggaacaaaaaaatgccttggaaagacaaagaaaagcccattgaaaagccaagtctcgaaaacaaaaaaatgccttggaaagataaacattttgggaacagaatacaaaaaattaatttttacatatttacctttacaagggaaataaaggaataaatgccttttaaccgaagcaaaagcaatgcaaaaaacaaaaaatattaaatgcccaataaaattaaaattaataaaaatctttaatttaaatgggggttgactgggaagtttttgagcgggaatgagggcttttgacattgccccacgtaagcactgacccatccacgttagcattgggc

SEQ ID NO: 19310 - DNA, 378 bp, Glycine max
  Clone ID: PAT_MRT3847_117440C.1
tatatcaatcctggtaattgaagatggattaatattatcaggctgaattggatgttggtattttcaaattctggaaggctgtgaacagtgactgtatgatttgaaaatgtgaaggactgtatctaactcaaaacttaagtctcaaaataaataatgcacgagaggtttgcatcttttcatgttagattgttgtagtcatattgcaatagtgcttctccttttcatgtacatcatcattggtggagattggatacaaagatcaatagcatgggcttgttttcaatcttaaccgagaggattaagactcttatttccagctgatcttgtcgacaatacattttttttaatcaagaaaacctgctttatttacttgctttt

SEQ ID NO: 19311 - DNA, 687 bp, Glycine max
  unsure (1)..(687): unsure at all n locations
  Clone ID: PAT_MRT3847_117441C.1
cgaagcaccaacggtgactgctcagctgagctgcagcaagctgcagctttgttcaaccctcactttgttcagattatcagacaactcancagcgaaattggttccaatgtcttcgttggagtcaacacgcaacagatgcacattgatttcatcagtaaccctcaaagatatggatttgttacatcaaaagtagcatgttgcggtcaaggaccctacaatggtcttggactgtgcactccggcatccaacttgtgccctaaccgtgacagttatgcgttttgggatcctttccatccaacagaaagggctaataggataatcgttcaacagattttgtcaggcacctcagagtatatgtacccaatgaatctcagcaccattatggctttggattcgtctaagaactagataaatcaagggtctgtgtccatcattttattaccgcacatcttctgtgtcttgcaaaagtctacctacctgttaatttgtcatatatgtgttcaaattaggtgccatatatagtaattaatcatctccaatgtgtcagtgaatagtatattataatgttggggtggatggatgatgttaagtgccgtcttcgttctccttctcttgggcagtacaaaagaaagactgcatatataataattgagtgaatttttatcttcaataatttctctttttttc

SEQ ID NO: 19312 - DNA, 1494 bp, Glycine max
  Clone ID: PAT_MRT3847_117442C.1
cgccacgcgtcgacatacgagtgtggcagcaactccactcaattgtatgcattgatccatggctagatacattaatattgtacttttgggaatagtgttggtagtggtgagattgaaaggtgcagaggcacagcgggcgttctttgtgtttggggattctcttgtggataatgggaacaacaactttttggcaactacagctcgagcagatgctcctccttatggcattgattacccaaccggaagacccactggccggttctctaatggctacaacattcctgacttcattagtcaatcacttggggccgaatccacattgccttatttagatcccgagctcgacggggaaagattgcttgttggtgccaactttgcttctgctggtattggaattctcaatgacactggaatccaatttgtaaacataatcagaatatacagacagttggagtactgggaagaataccaacaaagggtgagtggtctcataggacctgagcagactgagcgcttaataaatggagcattggtcctcatcactcttggaggcaacgactttgtcaataactattacttggtcccttactctgcaagatcacgccaatacaatttaccagattacgtcaagtatattatctctgagtacaagaaagttctaaggaggctatacgaaattggagcacgtagggtgctggtgacgggaactggtccattgggttgtgttccagcggaattggcccagcgaagcaccaacggtgactgctcagctgagctgcagcgagccgcagccttgttcaaccctcaacttgttcagattatccaacaactcaacagcgaaattggttccaatgtcttcgttggagtcaacacgcaacagatgcacatcgacttcatcagtaatcctcaacgatatggatttgttacatcaaaagtagcatgttgcggtcaaggaccctacaatggtcttggactgtgcactccggcatccaacttgtgccctaaccgtgatatttatgccttttgggatccttttcatccatcagaaagggctaataggttaatcgttcaacagattttgtcaggcacctcagagtatatgtatccaatgaatcttagcaccattatggctttggattccaagaactagatcaatcaatcaagggtctctgtccatcattttattaccgcacctcttttgtgtctcacaattatatatagtctacctgttaatttgtcatatatttatatatatatatatgtgtgtgttcaaatttggtttcatataatatatagtaattatctccaatgtgtcagtgaatagtatatatattataatgttggagtggatggatgatggtaagtaccgtcctccttctccttctcttgggcagtacagaagaaagactgcatgtataataattgagtgaatttttatcttcacaaaaaaaaaaaaaaaaaaaaaattaagggcgagggagctgggggaccggg

SEQ ID NO: 19313 - DNA, 351 bp, Glycine max
  Clone ID: PAT_MRT3847_117443C.1
aaaccccaaaaaaaaaaaaaaattaaaacgaaaaaaacaaaaccggcggcgaaaaaaaaaattccctaaaagggggggcccttacagaaaaaaaccaaaaacaaacccggggggatccaacattaatggaaggggggggccaaaaaaggggacccgccctggaaccaggtggggggggggtttttccttccaggcccttttccatccttgggggcaaaaaacccccagccttttaaaaagccggaaaagccttttttggggcccccaaagccttaaaaggcgggaactgggaaggattataaaacgcaacccccaaaaacgccaacccggaaccaaaaaagttaatcgggg

SEQ ID NO: 19314 - DNA, 420 bp, Glycine max
  Clone ID: PAT_MRT3847_117444C.1
atggccagatttgtgggaggacttggtctccttgtctgcatcatcatcattttattcatagtattgaaaattgtattcctttctattggacaaaaattaggaaaaggagatcacatatcagttcaaggaagggaaaatctcaaagttcaaatgtcactcacaggaaaagaagaccacatctcagttcaaggcaggaaaaatctaaaagttcaaatatcactcacagatttacttactgggttgatagaaaacacaaatagtgtaaagtgctgctttgacaaccatatagggagctgcgttcctggctcaagtgacgacgagacttgtgatgacatttgtaaaatcaactgcatcaaaggtggccattgcaaagttattgggaatgaaccaccaaatcatttttgtcattgtttatgctaa

SEQ ID NO: 19315 - DNA, 340 bp, Glycine max
  Clone ID: PAT_MRT3847_117445C.1
cttccttttttttttttttggagatctaactatataaattatatggaggggcattcaaaagtgatatatatcacatatgaatccataatatcaacacaactttttactccacgtaaccataacttcaaacataaagctgctccctacaatcttctcttccaaaaaaaaacaaacttaacaatggaaaaccctatcctccaccaccaagataaaaaatctgaataatttcccctggaaacacatttactgtattcttaccaccgtaataaatttttccattatctttttttacaatgtaataaagtccactatctccatattttcctcacattaacccttt

SEQ ID NO: 19316 - DNA, 283 bp, Glycine max
  Clone ID: PAT_MRT3847_117446C.1
gttcttacaaggtaaaaccttctaggaaaagattgatctttagggtatgatctgcaagggaaaaccttggaattgcaaagcatgagtttcaagggccagtttttagtctaaatcttccgtggggggggcatgaaattaattgcccctaaagatataaaagggctgcccccaatggggggctcggggaaatttttccccagtataacatttgggttcaaagggggcttttccctatttttttttaattattcccagtcaacccccggggccaagtacccttgga

SEQ ID NO: 19317 - DNA, 768 bp, Glycine max
  unsure (1)..(768): unsure at all n locations
  Clone ID: PAT_MRT3847_117447C.1
ttacgaattcgagctctgtacccggggatcctctagagtcgacctgcaggtagtgttcttttgacctcatgctagaagcaactttcttattgcgtgttgtgacaatgattctacttccctgagccccaaaatatagaggagtctgcacagctacccattcgtccagtttttcgttccaaacatcatccaaaacaagaagaaactttttatctttcaactctacttgcaatctttcatgaaccatctgtaggtttctactatcatcagttgacttagtgattgcctcaagaattgttcttgttaccttgaaaacagtaaaatcatctgaaacacagacccaagctttgatgtcaaatacatcatctatccttgggtcattgtatgcatgttgggcaagtgtggtcttacccattccccccatacccacaatagaaagtattgataacttgttgtggttgccagagtcagaagtgagccaattaattatcatttccttgtcattatctctgccataaataacactttcaaccaccaaagatgttgatggtgatttctgtgacacttcactaccgaatccagatccaacaccactagcattgttcaaacctagatcacccttttggctcgagagaaattctaggctgccaatgagttgttccatccttgatttaacttccttgttaaaggaactaagaggagaagatntgaagaaatttggtaccttgcaagtacaggtttgagattcaggttcagcttccacttggcatt

SEQ ID NO: 19318 - DNA, 382 bp, Glycine max
  Clone ID: PAT_MRT3847_117448C.1
acaaactaataatacctaatatcatccaaaccactaccttttaattccttatcaaaaaaaattcaggggtaatcacttcaaggagccccaatatcttaaacaccaatttccatacatatatctccccaaaaaattcgccgataaatatctcaatctttaattccctcttaaacgtacctatttagtaatatacacacctattaatacccatacatgtcacactggtacaattaataaaattcctcttttcaaacataaatataagttaaattttacatctcttaaacaaattaatcttctaaaatacctcaaacatccaaaccattttgaatttatttattcattcacacataaattaaattttcatcttctttctaaattc

SEQ ID NO: 19319 - DNA, 730 bp, Glycine max
  unsure (1)..(730): unsure at all n locations
  Clone ID: PAT_MRT3847_117449C.1
cagaattttcntgagcgaacatataaatcaatgcttattccccttctgcaagaagataagagagctggcgaaacaactcgcaaagggttttatttgtatgatgataaatgtaagcctagtcctgatcctgaattgaaaaactatatcgagaaagctaggagctttactggtgtctccgttgatcctaagcttgtcaagttacaagaaaaggacatcattgaaatgacattctttcctgtggtgaatgaggcttgtcgagtccttgatgaaggtattgcagtcaaaggatctgatcttgatatttctgctgtcatgggcatgggttttcccccttacaggggaggtatcctattctgggctgactctcttggatccaagtacatatattcaaaattggagaaatggtcagagttgtatggagaattcttcaagccttgtgcttacttggctgcaagagcggccaaaggaattccactgagtgcctctgtggagcaggcaaattcaccgttgtaataaaaaaatagctcgttacatgtttgcttgattcaatggtcctttcccctttcaaatggtaggaatatagtggtgaattgggagatacctaaaaaatgtacgatgagaaaatatttgaacagttgtgtgtgaggcaggaaattattaaatagtaaattttttcagtagaaaaaaaaagtatttttagtttaaaaaaaaaaaaaaaaaaaaaggccgc

SEQ ID NO: 19320 - DNA, 646 bp, Glycine max
  unsure (1)..(646): unsure at all n locations
  Clone ID: PAT_MRT3847_11744C.1
ccacgcgtccggctacccgctgagtttaagcatatcaataagcggagggattcaaagctgcgggaatgtacggaggtttacgtgccaaaggagaaaagcctgatctcgcgcttgtcacgtgcgatgttgatgcagtatctgcaggatcgtttactacaaacgtggttgcggctgcaccagtgttgtactgcaagaggacgttggatatttccaacactgcacgtgctgtgttaactaatgcaggtcaagcaaatgcagccacgggcaaagaaggttatcaagacgtggtagaatgtgtggaaagccttgctaagctattgaaagtgaagccagaagaagtattaattgagtccactggtgtaattggtcaaagaataaaaaagggggcgcttttaaactcacttcccactctagtaaattcactgtcatcttcagttgagggggcagattctgcagctgtggcaatcaccacgacagatcttgttagcaagagtgtggcaattgagtctctggttggaggaactagggtcagagttgggggaatggctaaaggttctggaatgatccacccaaatatggctaccatgcttggggtaataacaactgatgcctgggtaaccagtgatgnttggagaaagatggtgca

SEQ ID NO: 19321 - DNA, 2113 bp, Glycine max
  Clone ID: PAT_MRT3847_117450C.1
gcaaaggggttttatttgtatgatgataaatgcaagcctagtcctgatcctgaattgaaaaactatatcgagaaagcaattcggctcgctctttctctctcgctataccaatattaatttgaacctctctcagttcaattccagatagactttgttggcatttgagttttgtcgaatagaaccaaaaagaaaaaatgggaaggcaaccttgctgtgacaaagtggggttgaagaaggggccatggaccgcagaggaggataagaaactcatcaatttcatcctcactaatggccaatgttgctggagagctgtccctaaactagcagggctgttaaggtgtggcaaaagttgcaggctcaggtggacaaattatctgaggccagacttgaagagaggccttctatcagaatatgaagagaaaatggtcattgatctccatgctcaacttggcaatagatggtctaagattgcttctcatctcccaggaagaactgataatgagatcaagaatcactggaacacccacataaagaaaaagctcaagaaaatgggaattgatcctgttactcacaagccactttccaataaaactgagcaaactcaagcccaaccagatgaacaacaaacccaccaaccattgcaagaacaacaagaagaacctatcccagttgagaaagacaccaaatttgaacctgaaaaagagcaaaacaaggagccagagaagccagagagttcaattgaatcattaaccatcactgaagaagccaaggaggaagaccaaattatgacacccttatttgactcatgggaactaatgaatgagttctgcactgatgaagttcccataatagaatcaaatgagattctagttccttctgctccttcttccacttcaccaaccactactactactacatcatcttcaacatcaacatcagcatcttcaaattcaaattcatccaacttccttgaagaccttctgctcccagattttgagtggtctgatgattacaatgatactaattttgacaataataacaatagcagcatggccttgtgggatgatgactttattagaagttggaatttgcttattaatgatgatgatggtgatggtgacagaaagcaagtgtttgaggctcctatcaatcagtacccaagagtgatcatggattcagattcttgggcctatggcttgttttgatttgaaatttttttttctcctctctcccccggctgcttacttgtaattgttcttttaagttgttgcaaaagaaaataaaagaaaatcaggattcttgtttaagaaaaggacatcattgaaatgacattctttcctgtggtgaatgaggcttgtcgagtccttgatgaaggtattgcagtcaaaggatctgatcttgatatttctgctgtcatgggcatgggttttcccccttacaggggaggtatcctattctgggctgactctcttggatccaagtacatatattcaaaattggagaaatggtcagagttgtatggagaattcttcaagccttgtgcctacttggctgcaagagctgccaaaggaattccactgagtgcctctgtggagcaggcaaattcacggttgtaataaataaatagctcgttacatgtttgcttgattcaatggtcctttcctttctaatggtaggaatatagtggtgaattgggagataccaaaaaagtgtacgatgagaaaatatttgaacagttgtgtgtgaggcagtcgaaattattaaatgtcagtaaattttttcagagaaaaaaactgtattttttatttaggacgtggagcatggtttcttctttgtatgtttcatcataagttactgttgcagtgctgctgattattgttagaacctaagctcatttatttccttttcattcaagcaaactatttgtcatgttattcttggattgtttagtaacttaaggtaattttgaggtctaaagggcccttcacttacactttgcatctgtagccagaaagtcaagatcgtctaatggaatttgtctattaaaactatgcttggtagtactgtagtatttattagaataaaggctaaaagagttaactccattactccc

SEQ ID NO: 19322 - DNA, 1185 bp, Glycine max
  unsure (1)..(1185): unsure at all n locations
  Clone ID: PAT_MRT3847_117451C.1
atttttatttatttcactttaaaataattgagcgtgtagctcatggtcatgtttctatgatctttgatttcttctttccttgcctttgatcacatccctctacttgatatgtatacatataaactaaacataacagagcagagcaatgaatcatagttcccacatcaatatcacaaaaaatggctaccataaaagcttctcacactgtggttccaaatcaaccaacaccaaaaggtcgattgtggctatccaacagtgacaattccacacgtaaagcacattcaccagttatttacatctacaaagcaaaacacaacattgaatacaacattgagaggatgaaagagtctcttagcaaaactctagtgtacttctacgcgtccgtgctggcagattgagcgtaacagaaagtggtcgaatggaagtggattgcaacgcaaagggagtgacattgatcgaagccgaaaccgcaaaaacatttgatgattttggagacttcacaccctcagactccatcaaggaagaacttgttccagtgattgattatcactctcaacctatagaagagattcctttggtattagtccaagtaacaagattcaaaggtgaccgaaaacaacaaggccttgccgttgcagtggctgtttctcatcctgtggctgatgggtatgcttggattcacttcatcaacacatgggcaaaggttaatagaggaggcatgttagatcttaatgacatgccatgtctagatagaactatacgcagatcatcgtcgttgtcatcaccgccaccgcgcttcgatcaccctgaattgaagcctctaccatttaaactaggcaaatctgacagcactgaagagcaaaataagaagacaacagctgctgtattaaaactcacatcagaacaagtggagatgttgaggaagaaggctaatgaaaatgaaaacctatcaacaaagcaagggtcaagatcaagaccttgtagcagatttgaagctgtggctgcacacatatggagatgtgcatgcaaggctcgtgaactagatcgcaatcaaccaactcttgttcggttcaacgccgattttcgcaatagactaacccctcctctcccgagaaattattttgggaatgcattggcggcgacagtgacaccagaatgttatgctggnagaaatacatcgaaaac

SEQ ID NO: 19323 - DNA, 410 bp, Glycine max
  Clone ID: PAT_MRT3847_117452C.1
aaagctggtacccctgcaggaaccggggcggtacccacgggtctactttcgcgtccgttcatgcactgacttaccttgtgcgagatcatcactagtttcttgtgatggactacgagactgccagccagcatatgaatggcattagctaacggcatccatgtgaaatcactaacaccttgtgtgaacgcatgtatgcgcttctagtaggaactagcaaccttcatgggaacataaagaacaaattgtggtgaaaaagatgacaggtcaatagggctgctacctcttccatgttactactttaagagttgattgcacaggaaatcgacctatacgtgttagttgctgctgtggaggatcttagactaatggtaatgtagcatacattctcagtggtactggaaaaaggggca

SEQ ID NO: 19324 - DNA, 314 bp, Glycine max
  Clone ID: PAT_MRT3847_117453C.1
tcaacttttttttgttaatttcacactcttggaacagcaaaatgtagttttcttctgcgaaacttctacgaaaaaaggcccaaacgggtaacgaccaacatttgacacgcgacgttccgatcaaacggactatgcatacttacagcccccttaacctaacctacctgtgcaccctgctatttcaaccgcttgtgaccaatccacacccaaacagctgctctatgacattgcttcaccgcactgctgtcttgaactaccggtcacgcgccggcgaataacaaccgtccgattgaacgtccgcgtgaaacggctga

SEQ ID NO: 19325 - DNA, 684 bp, Glycine max
  Clone ID: PAT_MRT3847_117454C.1
caaaatagaagccagtttttcattgccgcgaagtcattgtggtataggagcctaggatgtactgtaggcaaaaaaaaaaaaaaactgcaatgcatctctgtactactaactaacatcatgacttgtggactatacttacagctaagatacgttgatacctgctctcagggtcaggctcaacctcaaaaatacactcatcttcaggttgaatgttattagctctgctaaaatctaaccatccatgtgtcagtaaccgaggttgttcatggtaaaagacaggccacaatctcatctgtgaatcccgaagtaacactaccatcttcttatgcgtgaatggttttaccctgcgagtcaaaggcaggtattcgggcaatttaagggaaacattatcattatcattggtcaccacacaggagagagggggtgcagttttaaagtggctctcatcatcttgattagatatgtcagagtccttaatctcctttggcaactctgttatattcaatttatccatggaaccacacaatttgggagtcatgtccataggcaatttcttcatttcaccattgtaaatatgaccatctaagtcatttgagattccatcgaagttctgtttggtgtcactaaaaccacaaatatgcaaagcaggttcttttttggatattgctgcttgatcactttcta

SEQ ID NO: 19326 - DNA, 356 bp, Glycine max
  Clone ID: PAT_MRT3847_117455C.1
cggactcgtacgcccacgcgtactgttacgcttccgaaaaaaaaaaaaaaaaaaaaatggaaaggttaaaaaaactaatatgaaaatgaatatattaaaaaatcaaattatttttaaattaattaattttatacattataattgaatatcataataatctaaaattttatacatgtcaatattgatcaacaaatattaaacgtattgacacactgtattaattacaactactatttattccactatatcatattgttaaaatgtattaattattgacatttagctatattaaaaaccaaacttatcatagaacaaatggtttaatgtttttttcaatgttttaacactattgacac

SEQ ID NO: 19327 - DNA, 265 bp, Glycine max
  unsure (1)..(265): unsure at all n locations
  Clone ID: PAT_MRT3847_117456C.1
caatctctcttcttacccatttcctcnccccctctttctnatttcttgttctgtttttattttcactgttctctgataacaacgttgttagtnntcaccatggttgttctgnctcagccancattaaaccagtttttccttctggaaancatgnaagccnacgnnccttgttacgcggggattccantggtcgacctnacggnncccgatnccaagncccacntagtcaatgcctgcagggattnggcttnttnaacctcgngaa

SEQ ID NO: 19328 - DNA, 264 bp, Glycine max
  Clone ID: PAT_MRT3847_117457C.1
ggacgatgggcaagagtgtgaacactatcattaataaacgaatgtaactagggtggagcacttcatgtggacatattcaattggacaactctatcgtacaagactaaacgtcgaacagtactcaatcattccaacacctgagtagttgagggacatgaattatagcaatctcgttctgaaggctatttctgcatagatcattagttacacaaagagaaactcgttcaatgagggctggcgtgcggtgaaaaagaaatgtatatt

SEQ ID NO: 19329 - DNA, 381 bp, Glycine max
  Clone ID: PAT_MRT3847_117458C.1
ccaagaaaccccactataatatataatgggttaattattccttaaattaataatgaccacaacaattattgaaaagcgggtttgaagaaactaggcctaggcctttgttttgggaggaccgggaaaaggagtgccggctaacaaatatttgagcaaaggtagggctctggctggttgggaacttggcacttggtgccctggttccctcaccggagctaatgtgggggctcccttggctacggctacatatccaccaacctctccatagggaaaccaagggtggcaaacatatttaatgggaagggtcatcttcttaactgaatacttggttcctggaatagggacccttccatctgtgtcaccactggaaattcaaaccct

SEQ ID NO: 19330 - DNA, 415 bp, Glycine max
  Clone ID: PAT_MRT3847_117459C.1
agaagaaagttactacttttatatagagctgggatataactggaaaacaataacaaaactacctgaaatttccgttcttaaaatagaacatcacagaaaataactcaataatatctccagagaacttcggtttgctgaccaattatttagcaacatacaaactgaagcactaaggctttttctaacatacatgaaagtttgaaaataacagagttcaaaattcacaaaatatcctgaaagctaatgcttcagactcaactgccgggagagataggcattgttggacccaaatagaacatgggagattgaaatttgacttcaaaacgaggcaagaagcttaaaatcctttggttctccaacaccttctattcatgttactgttgagatagaaggtcatccagttcttctatgatag

SEQ ID NO: 19331 - DNA, 614 bp, Glycine max
  Clone ID: PAT_MRT3847_11745C.1
ccacgcgtccgtttttttacactctctctaaatattagtaagaatacttaaaaaataaaaattaattctttatttaagttagttttaagaaattatattattggatcgatattttttcatctcaaaaatatataaatatatacaaggatctccatgccagtttataatcattttttatacattacgttattttattcttaaatttatatatttttatatccaaaaaaaattcatcatattattatgcataaaatgtattatgtataatatgaaataataataataataatattataaatacatatctttcattatattattacacatattttttttcattaattagcgagggattttcttggaaataattccctcactaactaaaattctatttttctaaattttgcatgggattaattctctcgctaattttcaaatgaatagcaagagtaatttgttcctaagggctcatttgggttagttgcaagtttttcgtttttcgttttcaaatgcaattgtcaaaacaagatgtgtttgacaaaaatagatatgaaatagttgttaaataattttcaaagcacttttacattcattgtcaagaacaagaaaagata

SEQ ID NO: 19332 - DNA, 237 bp, Glycine max
  Clone ID: PAT_MRT3847_117460C.1
tcaaattcctactgccttcaatccttttgcttattcaaatgctaatgactcctattctgtttcaaaagactattttcatattctcttacaacatctaaatgtaattaaaatccttacaacctttcatgtatttaaaaaataattcaactataacaagatacttaaatatgttaataaagacttctgttacaattcaacattttttcaagacccataactataacactttattcaact

SEQ ID NO: 19333 - DNA, 469 bp, Glycine max
  Clone ID: PAT_MRT3847_117461C.1
aaaattaaaattgcttaacgaaaaaattcttccccctcctttgttttactttctctcatttcagggggaaccgaagaaaaatcctcccctcaggggccaacaagaaacaaacaacagaagaaaataccccccccccaacttacaagcatctgggagaaaacaatagattttaagaaaacaaaccccgggacggccctgatgtttgcaaaaaaccatcccatcccccaaaagaaccctccctttaagacggggctgcttaagggaaagaaccccgcttgctcttcaagccgggcctgggaactaggaacaaaaacccccccccggacaagaggtgagctataaaacactcccctctaaaaaaaaccaaccccagcatttaaaaaaaaaccccgccctgaccttcaacaaaaaatctcaggactgcaacaaggggtaccatctgggacacctacaacgtaaggcccggggc

SEQ ID NO: 19334 - DNA, 219 bp, Glycine max
  Clone ID: PAT_MRT3847_117462C.1
catgaacttttattctccatacacatcaaactagacatcgcggtacctagcttgctcttaaaggccacacccacacatccgaacctatgagcatcatctactttatagcttaccgctcaagaggagtgatcccgaaggaagtcaacctgttctgtgctcgcacttgtactgcctttcattgggatggataaattctaatcgattgactgtggcgagcga

SEQ ID NO: 19335 - DNA, 693 bp, Glycine max
  Clone ID: PAT_MRT3847_117463C.1
ggaaaagaaagaagttttttcaattaggcagtaagatgaacaacccttaaccttttggaaacaatatgcatagcagagtttcataccaaaaataagaacaatgcccttgacatttgagtgtctgtctcctaagaaatgactgatgtttggcatagctgactagtcgtcaaaatttgggaaaagaatagataactcagaacttggcttattcaatcatctcctgggtacaaacatgattgaactttcaccccatcaatccacaaaaccctattaacataagttattttccacaaagcatccaacattgctgggagcttgagccaaattttctcattagttctatattttcagcaataacataagtgatattccacaaaaaacccagagatgcacagagctttacagtctcttcaacataaagaagtagatctggtagtctctgactggaacaataccttttactccttgagctacctgaatttgaaatgtctgcttgtcaatgagaagtagatctgagaatcacggactggcacaataccttttactaattgaagtttctgaatttgaattgaacctctgtccatgacccactgccatgttttttacggctgcttgccttaccagcttatcattctctttcaagaaatgcacgtactaattacgtttgtcactaattaaatcacctaaataagc

SEQ ID NO: 19336 - DNA, 211 bp, Glycine max
  Clone ID: PAT_MRT3847_117464C.1
tatattatatgaatatattcataaaaaatttgaaaatacttatgcccatattattctttatgctcctgactatgctattaatgatgactttttaaggttttttaaacaaaatattaaatattactccaataaccctaatgctgatatattaaaccgtcttaaatatgaaatgactcatgagataacagtgatgataaacaacattaacaaa

SEQ ID NO: 19337 - DNA, 220 bp, Glycine max
  Clone ID: PAT_MRT3847_117465C.1
ggaagcaaacaggaggggttgcggcagcccacgaggggggaggaggaggagttcttggggtggaataccggtacggcggaggcggttggggaggagcagttgctgcactcgtagctcgaggtgcatggtacccacgtgaggtggctgccggtgtatagcagtacggggagcgtatgctgcggtttgcctagctactccttgaaggcctttagccgaattt

SEQ ID NO: 19338 - DNA, 161 bp, Glycine max
  Clone ID: PAT_MRT3847_117466C.1
cccacgcgtccgtttaaggtccatagaacgaaaaaacgaaaagcataagaacacctacacgtagatatatatttacattatgtagagaattcgaagtgggtcccaaaagtgaacgagaaattagaaaggaattggtgattaactcaaattctaatcgaaag

SEQ ID NO: 19339 - DNA, 322 bp, Glycine max
  Clone ID: PAT_MRT3847_117467C.1
gttgggggaaaaccccaaagattatttcttttcccgttaaggcataaaggggggcaaataaaaaaagaaaacccataaataaaatcctttttaagtctctggggacccgtcccacccctgagggaaaaggggaaaaactttttttttaaaaaaacccaaaggtactggctacaaaatttttcggctctttgaaaagggggggggggataccccttgggagagaaaagaagatatccccccttttagaggtgtgtatgggcacccccccctttgaaaaaacgagggctccccctaaacctggttcattcttaaagggcggggg

SEQ ID NO: 19340 - DNA, 902 bp, Glycine max
  unsure (1)..(902): unsure at all n locations
  Clone ID: PAT_MRT3847_117468C.1
ggtccttgaacatctaacgcccttttgattcaaaaaccagggaaaacaatcattacagccgcacaacattttttccctaaaaatattttgcaagagctttggggatacatagtttgaaaaaaaaaatcactggaaagcccggaaatagatttttgggattgaaaaaggggggccgcttgatttttacgaggcacaggaactattatttcttggtatatggctgggaactattatgtttagtaggggccaaagcaaaactttatctatatggggggggatcaataaaaactaagcccgcgtctgggaactatttttttttttaattggctaaaaaagctgggaaaatacagcaatagtatctccaaaaaaagttaccctaaacatgcccttaagctagtacccctttgctttttttctgagctcattaagctccttctcaagctccaagtcaaggaagggaatttctttactggtgggaacacttcttccaggtggaagttctccccgcttagagcttccagataattctttctttaactctgcaagatcatcatcgacagaagagttctccagtagtgcaaactttccctcaagattgtcagtactcaactgattcaaagcatctgcctgagcctccatggttaataccttttcctccatcttatcaaaagctgcaagggcactgcttgtgttgatattgcccaccatctcactaactatggttgaagtctttgcagactgagctcttgctttgagggtatctttctttgactttgcctcctgtatcttgctctccaaaagctgtgttttggacacangnncatcagcaacattcntttgctgatcnngctgcannnnnnnngnnggtgcannatnngcataagnntntttctcttaagtnc

SEQ ID NO: 19341 - DNA, 590 bp, Glycine max
  Clone ID: PAT_MRT3847_117469C.1
cgacacagctactaggaggcggctgtcaacaatcaccatgggagaggaagtagacactgcttttgtccaagcaccagaacacaggccaaaatcctcagtgatcgtggcagaaggaatccctctgattgatctctctcccataaactaccaaaacgaagacaccctcttggattcttctatcgaaaacttagtcaaagaaataggcagtgcttgcaagaaatggggtttctttcaggtgatcaatcacaaggtgcctttggataaacgagagaggattgaagaggctgcaaaaaagttctttgcacttggtttagaggaaaagttgaaggtgagaagggatgcggttaacgtgttgggttactttgaagcagaacataccaagaacgttagggactggaaagagatctatgatttcaatgttcaggaacccacttttataccaccctcagatgaaccagatgatgaggaaaacgttcagttccaatgggataaccggtggcctcagaatcctcctgagttcaaagaagcatgccaagagtatgcacaagaagtggagaaacttgcttataagttgatggaacttggtgcac

SEQ ID NO: 19342 - DNA, 1950 bp, Glycine max
  Clone ID: PAT_MRT3847_11746C.1
ctccttttatcctttagattgatttctcttctcacatctcgatcaaacggataaaattttccaaattgccaccttttttctcatcttattgcatagaaaaagaaactattgttttctggttacaagtgctttcaaggggtgtcttttaagatatgggtttgagttctaagcaggtttctaatagaggacttgattggaaccaaaccttgttgcaggctcaaaacttggaactcccaaatcctcctcctatgaggaaacaacaacaaactcagccatcagagcctttgaagtgtccaagatgtgattctattaacaccaaattttgttactacaacaactacaacaagtctcaacctcgacattactgcagagcttgcaagaggcattggactaaaggtggaactctacgcaatgttcctgttggtggtggaaggaagaataagcgagtcaagaaatcaaccactccagcgatagccaccacttctattagtaccagcacctcaaatgccaacatggatggtgagttgaataaccccatcaccattccttctctagcagtggatgatcacaaaaccacaccttcctctctctatcaatatgtgtgcctgccccaacagatgatgatgagtaccaaagactcagaagaaggcaaagactttggtattggtaatggcatctttctgagttcaactgtgccttttcctcaaagccaaagccttctgttccccttcacaacatcaaactcctttgacccaaacctatgtgcaatatcatcctcttttcgatcctccagtgtgtataactatggtgaagagtttaaaataatggaggagccaaccctcaacagcataatgcccaacactagtggaagcaccaacacacaaccatgggagatagctgcaacaagttctggcatggaaatgtcaaattattggacttgggaggacattgattcgtttgtgtcaactgatccaaatgttccttgggatgattctgatatcaaaccctgacaaaagaaaagaagaaaaaaatgaaaatagtaacccatgtccttagattagttattaattaattgtggcgttttgtgtttcacacggattagtaagtgttcttgttttcagatggatcatatttcgatattatgccacactttgatggtttgaggagatatctgcaaatcacaaagccatgagaggaagtggcagatggatcatatcatattatccattgatctttctgcacttgtaagtcttgcaaagagaagtatttggagctgtcttattttagtttcagcttcagattcaagcaagggggtccaaatccaattaactgtaacccaatgagttttcctgttcatctctctatcataatttcctgtaataaaatgttacattaatgttgtatccaagtagtttagcattattcacaagtatagggaatttttttttgtttgttttgtagtatttctttaatggtttctgagtgccttgtgatggggattactattgagacatggggtctgctccagcacagctgaactgacagaatgtgatggaagattcttgtggatatgtatatatatgcatgtgttggaaattggaatgatatagcatggatttgattggccaagattcatccccaccacttgttgagaatcattctttgcttttgggccataaggaattctggttccagagtagtttattgatgttatgatattctgttactattatattcctcaaggatcgtttatctttgggcttatacttcacatggtgctttaatatttgttcctgtttaatacaacagtgtgtgtatctttggccccccgtattttcagtgtttgtttatgcttgtcgtttcttctatgattgcatggccatggaccaacagtagaaccctttattgtatgaatttttgccaatcatagaagatatcctcagggttttg

SEQ ID NO: 19343 - DNA, 498 bp, Glycine max
  Clone ID: PAT_MRT3847_117470C.1
cgctgtcatgagatggagaaaaaattgcatatccctgatgagaaaggcagggaatcaaaaaaaggcaacaggaaatctgaagagaagatagagaaaatgccaggttcctttttctcgattttctctttaggggactagttgtggcacctgtgacatgggtgctaagagaaagtaatatttttaaataaatgatgacgtgataattctctctctctctctctctctctctctctttccctagctgcactttctgttcttcagtagaaacttggtactgtgtctgatgaacttcttaacttatttgatttcagttttttttttttttttgcatatgctttgtttctgtttttcagctccagcagttttttcttaaaaaattatttttggcctatgtatatatgggtttccctgctatcacttgttgtagcttctatcagtttagtaaagcagatcaacaaatttaaattagcttttacatcatgatacaggctataacac

SEQ ID NO: 19344 - DNA, 699 bp, Glycine max
  Clone ID: PAT_MRT3847_117471C.1
gcccatggaccgtgattgccatgtaaaggaagaggccgtgcatgaccgcatttgcgcccaggaacaaaagatgagtttttcattctcaagcgcaaataacaactaagaagtcctttcttctttgtttttttgtttttctttttcttttaccttaatatgaaaaaaatccaaaataggatgttctaaagtatgatatttttttatcttttgtaggatccggatggttacaggatatagactctcatatatgttaattatctttatatgatttttttttagattatgtaagattttgccttaaaaattgttgaaaagatggaagacgaacaacatgaaatgaagtgaataagtttaatgcttgtttcatactctcaagagttgttgaaaagatggaaggcgaataacatgaaatgaggttaacaagttcacttcttgctacataatgatacacaacacataaaaaactacaataaagaccatatatcaaaaaggtccaccctcgtatacgatccaatgttaagtacatcggtatgctatgttgtacctaaatatagtgactgctcgtcaatttacatggccgtgattgtaaaacccctggactggccaaactttgtcgtttcgcaacttatccgcctttcggcacatgcccctttagccagctggcctgttagcaatgagctccgcaccaattgcccttcc

SEQ ID NO: 19345 - DNA, 287 bp, Glycine max
  Clone ID: PAT_MRT3847_117472C.1
gagctggttccgctgattgtttcagccagatgatgtcgtcgatgccgggtttttgcttccatcccacggatgaggagttggtgatgtactatctgaagcggaagatttgtgggaagaggctgaagctcgacgtgattcatgaaaccgatgtgtataagtgggatcccgaggatctgcctggttagggtaccaatcgttgacttgggtttgcttcaataaaggcaatctatattgaaaacgggagataggcaatggttcttttctttgacctataaataggaaatatc

SEQ ID NO: 19346 - DNA, 555 bp, Glycine max
  Clone ID: PAT_MRT3847_117473C.1
ccccggacccgggggcccacccggaaaatccggaccggacccggggggggaaccaattttccctaaaggggggcgaaaaaaagctgggggaaaaaagggcaaaagctgttcccggggaaaaaaggttacccgctaaaaattccacaaaaaaaacaacccgaaaaaaaaaagggaaaacccggggggccccaaggggggacccaacccaaattaatgggggggcccccacggccccttttcaaaggggaaaacctggggggccagttgaataaaaaaaacgcccaacccccggggaaagggggtttgcttattggcccccaggggggttttttttttcacaaagaaaacgggcaaaagttaattgcccttcccccccgggcccaaaaaaaatgccaccaaggcgccccccctggttggcccaacaggggaaaaaccctgtttaaggggggaaaacgggggaaaaaaaaaaaacgtgtctttggtaagccctaacccccaaccccaaaaaaccccaacaaaaccgaaaccggaaattgaaaatggccccctattgcc

SEQ ID NO: 19347 - DNA, 1297 bp, Glycine max
  unsure (1)..(1297): unsure at all n locations
  Clone ID: PAT_MRT3847_117474C.1
gacggaggaaggctccaatacaatcatcaaaatgtgcccttccgcctcccatttccgaccggcattccacgtcctcgacgccgaccacgacggcaaaatcagccacgacgacctccgcgccttctacgccggagtcggcggagaaggagacgacgtgatcggggcaatgatgacgctggccgacaccaacaaggacgggctcgcgcgggcaaacacgctgttcctacaatcattccaaatgtgcccttccggtcgcaccctcctcccttcctccgtctccgatttccgaccggcattcgacgtcctcgatgccgaccgcgacggcaaaatcagccgcgacgacctccgcgccttctacgccggagtcggcggcggaggagatgacgtgatcggggcaatgatgacagtggctgacaccaataaggacgggttcgtggagtacgaggagttcgagcgcgtggtctcggcggagagaaagcccgtggggtactgtggggccatggaggacgtgttcagggtcatggacaaggacggcgacggcaagctcagccaccatgatctgaagacttacatggcctgcgctggttttccggccaccgacaacgacatcaacgccatgatccgattcggcggcggcgaccaaaacggcggcgttacgttcgatggtttgcttcgtatattggcgcttgattgttcccccgctaattaattaaacctctcgggtattggctgcgcgcgtttcgttacattaattaaacaagtgttgggttttgtactttgtccaagtttgagaaattacagtgattaattgaatccaaaacaaaccaccggtgtaatcaaataccacccgttcttatattcttacgttcacaatttcttctatctcattatttctctgtctagattctttttatgcatacaccaaaaaatggtgagtaattctaaaaaaaaaacaagggttgtagtgagccatgccaaaatggtcgttcatattccaatgtttgtttgtccaaatatggagtaagggaccatttatttttgtttggcttggctcgtgagatttattggcaaattagtgcaagtatttttggggaactatcaaatattaattactaatatttacaactgcatgagagagcttagaaggagtaccccaactgattgaccaattttagcgacgctcttttgattaacctactgaaaagatttaccgaggagaatttgggaatatatgggattaanttaatcactgtaatttctcaaacttggacaaagtacaaaacctcgagccgaattt

SEQ ID NO: 19348 - DNA, 247 bp, Glycine max
  Clone ID: PAT_MRT3847_117475C.1
cagacccaaaaacactatagcatgatagtgaataactggatagcagttattttgaaattgttatccactttatataaagtaaatatatactatacaaatataagttctcaaaaatgataaaaattactcaataattgacattcataattcataattgacaataaaaagtcataggtgtctcagcaagtaaataccaacaaaagtcaaatacaagtcttctttatcattttcactactgtagatttca

SEQ ID NO: 19349 - DNA, 275 bp, Glycine max
  Clone ID: PAT_MRT3847_117476C.1
gaggaagagtctgaaagtggtgaagagtgcacctatggccctctgacctccagccagagcagggcctaggggaggcttagagaggccagggcctctccccgtggttgaagctcccatttatttaagaaaaagtggggggtggggaaaacgttatgttaaatgtttacatggaaccaatgaacaactttaacacacaaatacaacgaaacattcttgtttaattactggcgttatagaaaatatgaattcctgctacatgccgggcagtgtagtgt

SEQ ID NO: 19350 - DNA, 436 bp, Glycine max
  Clone ID: PAT_MRT3847_117477C.1
cttctctgctcctcgtttttctcacttctcaacttccttcctctctctctgcaacgccggcgaacacgcagcaccgccacctgctaacgtgcgccggcggagcaatgtcgcgagcaagatcacgctcacgctcaccctcaccgtcaccgtgctgcggtgacagtcacttagtgctgctgctgcctgtgatgctcgctgttttcttcaactcactccttctgcttcctcgttcctcgctcgctattcgacctaccgagtcggatcggatcgaactcgccaatgcgaccgagtccagcagcaacgtctctctctcgcgccctcgcgaaggaaccttcgccgacatgattgatcgcgcgctcgagcacgagttcaccgagaacgaccagaaccgaagcaacggctgatccgggaagcttcaacaacagtgtagcagaac

SEQ ID NO: 19351 - DNA, 249 bp, Glycine max
  Clone ID: PAT_MRT3847_117478C.1
cacacgcacactcatgccatgatttctcaaattagcatgctttcccttgtcatcttcctcttctcctctttactaatcgttttatgcttccgcagaacgtctgaaatacaaatgcgcactcagtggcacatttccttgagaaccgtgtcacacttcagcagtgcttgaaaatcactcggtataatctgcactcgctgggcgagagcctctaccggaaaatcctcacttagctcgacactcgtgcctgcg

SEQ ID NO: 19352 - DNA, 404 bp, Glycine max
  Clone ID: PAT_MRT3847_117479C.1
ggctcgagcactatcgtaaatacggcatctgtgttttctactacgcataccacatcgggggctgagggatatcagtccgatcactactatacattggactgcccttgaactggtgtctcaggaaactatggacgtggtgcccgcccactattctgtgactgcgactgtctaaaattcgggggagccttgaaggtggatctgtagaaccatgctagaggcatagaacacaacgcctgtttatcagtagaggctgctggctggcatggaatgaccccagcatagaggcacctatcatgacaccatgatgtttttggtggcaaatgcaaacccagagatgctgacgcatagttcaggagggtacccggattagctgccacaataaacttgctctatgggtatcaaac

SEQ ID NO: 19353 - DNA, 176 bp, Glycine max
  Clone ID: PAT_MRT3847_11747C.1
tggtgatgctgagggtgtttcaaaggtgtggggaggttttagtgatttatttgccttacctgccaggcgatccgtgaaaagggcacttggtcagaagtctgatgcgaaaaaaactaatgtggtggattcagtaaaacatggtagtgggtcagtaaatgatgaatatgctataatgt

SEQ ID NO: 19354 - DNA, 878 bp, Glycine max
  Clone ID: PAT_MRT3847_117480C.1
tcgctgccgcgtcgtagctcggattggctctaaattctaaggaaactcctcagatcgaaatcgaaaccatgtggcggagactcttctcttcttcaaacctcaaatccctacacacagcactctctccttctcgtccccgactcgccgcccctctcctcacccgtccggtgaccgctcattcaggtgcttcttccgtcaaaaggagggttgaagatgtcgtgccaattgctaccggccacgagcgtgaggagattcaggctgatcttgagggaagggatattcttgaaataaaccatcccgtcggcccttttggcacaaaggaagcacctgctgttgttaaatcttactttgacagaaggatagttggatgcccaggagatgaaggcgaagatgagcatgatgttgtctggttttggctggagaaaggcaagcctaaagaatgtccagtgtgctcacagtattttaagctcgaagtggtcggacctggtggtgatccttatggacatggagatcatgatcaccattgattgcatcccgtaattttccttcagaaataaaatttgcaaagagaagagagacatttccacctttcaaaattatgaggcattgttttgttcggatttgattggtctataccttgcggttttgcgactatagatatagaagatttctgtgattattttttagacacactttggtcacattcgattcagttatcaaatccttttaggatttttgtttttggctttgccaaataaataattgatagcaacactaatttttttaacgattcttgaatatatgtagatcgtacaactatgtgaagcacctaaaccacgaaagggattaaggattacaaacttgatcgaattgaaata

SEQ ID NO: 19355 - DNA, 430 bp, Glycine max
  Clone ID: PAT_MRT3847_117481C.1
tttctttctttttttttttttttttttttttttttttttttttttgtttttttttgtttgtgttttttttttttcatctaattcttgttttttacttatgaaatttttcaccaggacggggccctacaccgaaagaaaaggaccgcggactgaccaccttctaaaaaaaaaaaaaaccccactttcctttccagaatgccgtcaaaacccaaagaaaggatgttttatgacaaaaaaaatgctgaattccccctaaacagggcccgaaaaaaaagagtcaccccctatagccaaaaaggacgccgactaccgccaaaaaaatcaaaaaaaaatggccgcccgggggaatgaaaaacaaaaaaccctcccactggtaccaactgaccccagaaaaaaaaaaactctttttcgggggtaacaacccccgaac

SEQ ID NO: 19356 - DNA, 174 bp, Glycine max
  unsure (1)..(174): unsure at all n locations
  Clone ID: PAT_MRT3847_117482C.1
gacttttaccataaacatcatacagcanaagatagaggctagagaaaaaagatatgggtctcggctttgacttttgcagggttattgccgttaccaatgacttatgccagacggaactggggtctggctcctatgcctgattcattattcctcaagccactggctctaagtcct

SEQ ID NO: 19357 - DNA, 789 bp, Glycine max
  Clone ID: PAT_MRT3847_117483C.1
cccggcgtcggggggttgcgtcttaatttcaacacacacactgtctctgtacagggttgatgccacataaatgttggtgaaggaagagagagagagagagaatgggagcatgaaatctgaattggggggtcctatagacattttctttaggaaccttggaccacacatttcgctctataagaagccctttggagccccatttgtatcattgcttcacgggtttccagtttcaacacacacactgtctctgtacactacaaagtgtaagttgttaacaaagaaaggaaggagcatagactcaaagatgagcaaagattccatgagaggttcaaagaagaaacttttatgcagaaggcttggagggtacctcaaagagcaaaaaggaagactatacataatcagaagatgtgtagtcatgcttctctgttggcatgactagaatcattctcaacaacaagcattgtttaacgttcttctttgcggctcatcatatcgtggatcagcacactctagagtcctcaaagccatagccaaggatcaaagttcaagcacgcagaaaaaaggataaatgttttgttagctctttattattattattcactaggtaaatagcagagcaagtaacgttagagacaattttccttcatatcatgcctaaaaaatgtatgttctctacgtgcaaaaagctaattggtgaaagtattgaatcaaaattttcagtttcatgataaaaaaaaaaaaaaaaaaaaaaaaaaaagcggcccgagaagaggactctctctctctctc

SEQ ID NO: 19358 - DNA, 347 bp, Glycine max
  Clone ID: PAT_MRT3847_117484C.1
tcttccactctttcttccactctttctttccactcgttcttccactcttccgtaacgctgttttattactacagaggcggatactaaacactatttattttgtcttttttctttatcacatctgcattcaacaatacttataatgctatgagcaaaatatagaccttaattccgaattcaaatatatcactcaccatgtgaatccatgtctactcaatcccttttacctcttaacctatgttgtgaaatttatcaaacataatatttacatcaacataatatgttataagatcttggtaaacagatttcatacacatcatttttttttaactcatatccatttcatt

SEQ ID NO: 19359 - DNA, 422 bp, Glycine max
  Clone ID: PAT_MRT3847_117485C.1
aacatcaagcattcgcacattctttgcttcttctttcaggattgctaaaaactcagcggaaaacaaagatggtgcatgccaacttatacaacgtatgcgagctgttctctttacacaagacatttctccttctttgcaaagtaaaatgactttgccgatgcaagatagatgcttgagaaaactaaaacactaatatcatccaaaatgctaccttgttaccactaaacatttttatctgaatctattcgacgctccgcttgctttaagcattgctttattctaaggtgaagaacagctttactctttaaccccacccttgctggagattatattctgcatattggaacctactatacacattctttgcctgctcatgatgatttggagcgccttttggtttttattgccggctaaactatgtg

SEQ ID NO: 19360 - DNA, 252 bp, Glycine max
  Clone ID: PAT_MRT3847_117486C.1
tgtaaattccctctgctgcttaacaacatcgatcttctccaaacacgacgacaaagacatatctagaatctggaacttacgctgatctataatttgttgcttttcttccttcggacaatgtcagaactttaggatcagctttttgcctttccttcttactaactcagataactaccgccaccatgactgccatatctagagccaatctatctgataattccattaatggatcgatggcaactcctagagcga

SEQ ID NO: 19361 - DNA, 572 bp, Glycine max
  Clone ID: PAT_MRT3847_117487C.1
actcgttcgagattcaagtgggaacttctccattgggttcttccgttactattacttccctaaagagagcaagcttttagttaataattgttattaattttgtttttgacaggctaggatcatgatattgtatggttacattttacataaaatgtcttgatttgattttcttcctataattaagtcttacctagtctagaagaagcattcaactaagaaaaaaaaagtgcaatttgttcttttgagttcttattcaggcggcttttccctgcttctgctttagaccttaaacatcccattattacaaatgtctggtaacagcgttttgggcaatcattatagtttcatggggttacggaggtgattactgttactaaaatgatcggcaagatacaaatttatgttaatgttaacatagctgtaatgtagtgttttccgcaagcagattgtacacttggactttagattagtgttgtctaataatagctttgtggtggggcaacgtgcactcccctataactatatggattttgttttttccccctaataaaatggtataatatactgcaaga

SEQ ID NO: 19362 - DNA, 2362 bp, Glycine max
  Clone ID: PAT_MRT3847_117488C.1
ccgaagtgaacagacactaactcttttctttgcagttgcagttgctgcaatgcctacaaagctattctcccaactacatcttctccatcccctcctccccatgaagccccgcactctcccccttctctccagacccttcttcttcccttcctccaagttcctccgaacctcaccgtttaaggttcgcgccttctcctcccgggagaaggttcccctccgcccctccaagagcctcatcgacgacgaggccgacctcagcaactgggttgacgaattgcgctccggcgggcccgatgaaatgcggtctggccggggcaatgaagtgcggaccggtcggagagaccggtttgccgattctggccggttcagccgcgatgacagggaacgcgaattccggccgccgaggaataataaccgggcttccgcgttggggaagagaaggggcgaggatttgaggaaggggggacagagtgtcggttcgaggagaaatactcctggaaggctaagagatcatactgagaatactgctggttttgcaactaggctgatgggtgtgaaggtcttggtgcttgatgaagctgatcatttactagacatcggagttagtaaaggcattgagaaggtagttattgcagtccctaaacaacgacaaactcttatgttttctgccactgttccagaagaggtccgtcaagtatgtcatattgctttgagaagggatcatgaatttatcaatacagtgcaagagggaactgaggagacacattcacaggtccgccagacgcatttagttgccccattggacaaacatttctctttactgtatgttcttctgaaggaccacattgcagatgatgttgattacaaggttcttgttttctgcacaactgctatggtcactagacttgttgctgaacttcttggtgagttgaacttgaatgtgagagaaatcaattcaagaaagcctcagagttatagaactagagtctctgacgaattcccaaggtcagagggtgtcagtcaagctgctgcagaggccactaaactggggaagtatcatcctaccattggtgttcaagttgtgattggagggacaagacttgcgttagagcataaacaaatgcaagcaaacacctggcaaatccttgttgccacacctggaaggctgagagatcatactgagaatactgctggttttgcaactaggctgatgggtgtgaaggtcttggtgcttgatgaagctgatcatttactagacatgggatttcgcaaagacattgagaagataattgctgcggtccctaaacaacgacaaactcttatgttttctgccactgttccagaagaggtccgtcaagtatgtcatattgctttgagaagggatcatgaatttatcaatacagttcaagagggaacggaggagacacattcacaggtctgccagacgcatttagttgccccattggacaagcatttctctttactatatgttcttctgaaggaccacattgcagatgatgttgattacaaggtccttgttttctgcacaactgctatggtcactagacttgttgctgaacttcttggtgagttgaacttgaatgtgagagaaatccattcaagaaagcctcagagttacagaaccagagtctctgaggaatttcggaagtcaaagggtctcatcctggttacttcagatgtatctgcacgtggagttgattatccagatgtcactcttgttatacaggttggtttgccagcagatagagaacagtatatacatagactcggtagaacagggcgaagagggaaagaagggcagggcatactgctgctggctccttgggaagacttctttttatctaccgtaaaagatttgcctattgagaaagctcctgtagtaccttcagttgatcctgacaccaagaaaaaggtggaaaaagccctatccaatgtggagatgaagaataaagaagcagcatatcaggcgtggcttggttactacaattccaacaaaaaagtggggcgtgacaagtacaggctagtggagcttgcaaacgagtttagtcgaagcatggggcttgataaccctccagctatacctaagctagtccttggcaagatgggcctcaggaatatccctggtttacgggcaaaataggttattctttcaattcaatttctgacaggtcatgtgaaatatgtattgttttttagttaaaatggtcccttatattgtaagacttgagacatcaaattttcaattatatatacatccattttttgtttatcttctgctaaaaagaactcattgcctggcaattgtagttccagattaatttaattatatcatcatctagcc

SEQ ID NO: 19363 - DNA, 405 bp, Glycine max
  Clone ID: PAT_MRT3847_117489C.1
gacccacgtttgctaaaaattctgacatggtatgagcaggttgtcgatcggacctatgatttctttagcgacaccctccaaggtcgctcttggcttggtcttttcattgcttttggttcctgtgtttgggggtctatcgctctggtttgtgctagtgggtatcagggtgcaccggcggggggtcccaacattgtgatgtccctcatggatcacgattctctcttgaacggtggcgggttcagctttctctctggaagcccgaatggaaggttcagctatggatattccagtttcaagggtaaaaggtcatcaatggaggatttctttgagaccaaaatatcagagggtgatggtcagacagttgcgttttttggtgttttcgatggtcaccgaggttccccgggc

SEQ ID NO: 19364 - DNA, 1300 bp, Glycine max
  Clone ID: PAT_MRT3847_11748C.1
caaaataggacatttctgagaagaagagttaagttgagtcgagaagaagaaaagaacaagaaagggagagtatggactcgtgctgaatgtgggagaaagaagaggaagaggggaaggacagaatcgacagaaggtaaaaggggtagattggggtttttaaaaaacttgagaggtgcgggatgcaataaaagggtgcagattgcccttggaaaaacatccgacgagcgcttaaacgtctctctctcttcgtcccttgctctgtagcttggaatctgcagttgtagatcggagactgggcaagaaggtcgcattagcttcttcatcgcgcaatggcccatccctctgctgtcgtctccgtcagaaggccaatcacccacgtcgtttttgacatggacggtctcttgctcgacactgagaggttctatactcaagtccaggaaatcatactcgctaggtacaacaaaacctttgattggtccctaaaggcaaagatgatgggaaaaaaagcaatagaatctgctaggatctttgttgaagagactggaattagtgattctcttagtgccgagcaattcctggtagaaagagaggatatgctggagaagttgtttcctactagtgagcctatgccaggtgctagccgtttagtcaatcatctacatgcaaaaggagttccagtctgtgtggcaactggttctcacaagcgacattttgaattgaaaactcaaagacatcatgaaatcttctctttgatgcatcatgttgttcttggtgatgacccagaagttaaacaaggcaaaccttctccggatggatttcttgcagcagccaagagatttgagggtggaccggtagatccttctaacattcttgtttttgaagatgcacccgcaggagttcttgcagctaagaatgctggaatgtctgttgttatggtccctgatccaaggctggataagtcttttcttgatacagcagatcaagttttgaactcactgttggatttcaaccctagtgagtggggtttacctccttttgatgataatagagactgaaatcgtacattcttattgcagacagaaagagctgatgagtagttaatccatttccgtagattatttgacttttatatcattgttcttggtgaattactacaattgatattgactttttagatcttagagagtcaatgtatcgtttacatatttggccttcaaacttcgctgatacatacaatgctgtttggcaccgtttaatggtaataattcgttaaatagcagcaattcaacataaaaaaaaa

SEQ ID NO: 19365 - DNA, 326 bp, Glycine max
  Clone ID: PAT_MRT3847_117490C.1
aaggcgggtccccggccggaaccgccccggaaaccccggggtgacccacgcgtgcgtttacacacgggagaaaatgtacaggggattagccaagcacaaaaaatagaaccttaagtgcacatgcgactaggaaataccacttaaggaccaacattatatgcggaccggtaacaaaagaaacccgtaaactcgactccaaatggaactaacccgcgcaagtcagatgcacaactggaacgaaaaagaaggctggtgcaagcggaacagaaacatttagcgtgtccaaacaacaatcacaaaaattaaaagtgcattgtaaaacccct

SEQ ID NO: 19366 - DNA, 467 bp, Glycine max
  Clone ID: PAT_MRT3847_117491C.1
aaaggctaaaattatagcagttgtaaaatgggttccctaccaaccgggttttcctaaaaacggaaacaaacccgaaccgactttattgaacagttatgcaaactagacctacccggaacaaaacccttccctgaaaagagacaataatgaaccggcaaccggaaattgcagcttggtatccatattgttgtctaaaggccccggaatgaaccacacccaaggggaaattcacatattatggtggggaaacccctcctcgttcttttcctcttaaaactcaacctcatcagcagggggattccgggactggggaaactccgacaccagatcggtcatgggggtctcaacccttgggaactccattttgtccatggcttccccgggtttccaatggaagaaagccttcctgctaaacatagccgggaattggtcactcactttacggaacatttcccggatgggggtag

SEQ ID NO: 19367 - DNA, 372 bp, Glycine max
  unsure (1)..(372): unsure at all n locations
  Clone ID: PAT_MRT3847_117492C.1
ggctctcgtgtccgtaaatgcattcatatcatgcattgcataagcatctcttcaaggcatgataatgaacatattgttcgtgcatttttcccttatcatattccagcatcacattttgcatgagtcattgcctcatcatgcatatgcattcaacatactttttgttctacaaactgcataccttttggtttccatgttcgctcatgcatgatccttgcattttcctctgcaaaacaaaaaaagggngaagcgtggaaaattcacactacattcttagttgcatgtgttaggtaccacgagccaaccatgtttggatcataaacccatttcacaacaaaacaaaatgattgagcatggtacctaatgcgtggt

SEQ ID NO: 19368 - DNA, 320 bp, Glycine max
  unsure (1)..(320): unsure at all n locations
  Clone ID: PAT_MRT3847_117493C.1
ngtcgcatgcacgcgtacgtaagctcggaattcggctcgaggangnntanananttnnnnnattcncatgntnnnnctgtcggtctggggccatcantcnggcccnnnttaatcannnatcgtcnnctttcnanatcatgtggcnattgttgtcgantnatacntnnncactgcagntgtgctgcntttgantggtgntcatngactccnncctgnnngnttntgaaaatgtggaaaggnaaggggattngaanannaagccgtncattgttaaancncggntnnnnaggcnnagtcnangcgaaatggntttgnaancc

SEQ ID NO: 19369 - DNA, 347 bp, Glycine max
  Clone ID: PAT_MRT3847_117494C.1
tgcgctctaacatacttcttcaaccataccgcggcgcgtgtcctttacccttcgctttcattttctacttcaaattctcaatgaaaccaattcagatcactccaaatcccaaatccgaataaaaaaccgaaatgacatcttccaatatacacgcttcctctaatgccccctctaagcaagtaaagctctcatccaccatcccccagaatccccaactctcgatttctccaaacacgactacatctcctcactccatatcctcacaaaacttaaacactgcatgtctgtgaaacccatacatgtgatctgttttatactcctactactccggaacaacatcaccgctc

SEQ ID NO: 19370 - DNA, 539 bp, Glycine max
  unsure (1)..(539): unsure at all n locations
  Clone ID: PAT_MRT3847_117495C.1
tnttttttttttctttttttttttctttttttttttttttttttaaaaagcctcaaacggaaatatttttcatttgcctcacattgaacctccttttccaatcagcccaacaaggaccttgggtattccattttatcccaatccattccactaaacgggggacagaattcataaaacacaaaatcccctaatcttcccctttccacggatcctattgggggccccccgaacctggtaaatggaaccctcgatagggggggaaaggggccccataaaccgattccccggaaaaggggccaaatggggaaccaaaggggcctttctaaacccttgagggaaagccacaaaagccttttttttcatccccaaaaaattcgattctggagtttggctccccctatgcttcctaataaaaaccctactataccgcttggccaaccttctgccattttgcaccggaaaaccatacttggggaacttttccgcatccacaagccctaagggtacataatcccacccgggggccccaattagcgggg

SEQ ID NO: 19371 - DNA, 565 bp, Glycine max
  Clone ID: PAT_MRT3847_117496C.1
taccagtgttcatccaagaccatctgtttctaccaattcgaggtctaagcgtgctggtcatcatcatagtggaaagtgtaaaggtgataaatcaaatttaggtaaaggttttaagcatattccttcttctgggatggaaaagtcagtggtgtctccaaatattcctttaaataatcatgaacacagagcctttccacagagaacaacaacaaaatcaaatcacattgtgacaaattttggttcctacatgcgtgcttcaaacacacagatggtggaagtggttcctacaatcaaggaaagttttaataaacatcccagggatctgaaaatgtcagctagaactgctccaatgaacaggcgtattgtggaagtggtttcagacatactaaggcagttaaggtggggtcccactgcagaaaaggctttgtataacctgaatttttcaatggatgcatatcaagctaaccaaatcttgaaacaactccaagacccctcagttgctcttggtttttttgactggttaaggcgacaaccaggtttcaggcatgatggacatacttacacc

SEQ ID NO: 19372 - DNA, 831 bp, Glycine max
  Clone ID: PAT_MRT3847_117497C.1
ctttgaaacccggagaagaatggaaaggaaggttagagctttcagctgtgccctctagttattgcagtggagcaattaaagctcttagtttggtcttagttagattgctcggttgtctttcatatatgtgttaatccatttaaatgtctcactaatcgcttagggaagatttatctgcaggtagcctgttgcaacatttatggatgttgaaaggaaagtgtctcagtaattttgccccttcatgtttcatttaagtcggtgttggacagatgaactcatgttggatagaatttattaaacttttgttttttcccctgtaatggatgactagtgtggtcataacagactgcacaaagcatattaagctgaagagaccacacagttgttgccatggaagatcaaaattacagcctacaattcaacagattttcacgttgggttgaatggcccagacccagagggattccttttgaattcagtctttttgggttcttaaatccctacaaattgtttatttctaaatgttgtaggccaatgaacacatcttttgaagagtattttatttataatgccaaaggaatgtacaacacaagaactattgaaaggtcattttaaatgtttctgggttatttgttacatggtcctatgtttgcttaaatgattactttttctaccttcgccgtataaacatattttaccaagcaatgctgttcgtcttggtggatgagtaatgtatagctgataaaattaggagacctttttcatttttccttttaatcaccttcaatcatctgttatcatattttatatttgctgttcattattgttatt

SEQ ID NO: 19373 - DNA, 1016 bp, Glycine max
  Clone ID: PAT_MRT3847_117498C.1
ataggggaaaacaagttttcttgtgatgtatttagatctatttcaattacccgttgttacgttgtggatcttttcaagaagcaacgatcactatcaaactattttaataatgtagtatcaggtattttatgtcaaaaatcttttcaatttacaatgcatatcaaaattatatcccaaactaaaacttttatttatttatttattagctgtttaaataatgtatggttagattgtatttcataaactaacttgaatttttaattaagctgtacatgtaagccagtcaattttaatttttcattttttgaagataaatagatgacccatccaagaaataacaaaggagggtaacggttataaggaaaacagaaaaaattgaaaacatgttccacaaaaaatgatcgatttaggattacgtttttgtccatatccattctgcaacttttacgttgtctttttcactcttattacattaatccattctgcaacttttactttgtcttttttctctcgtattccatcaataacacgtaagctcacctgacaaacgactttaactacatgaagtggagatttcaaaagatgcaatatatagattacaggatactgaaagaaaaggaaagaacaaagtatctcatactgtatggatatgatccattctgaagttgtctaatgttgtctaattaacgttggatggggtggcggattggacctcagttggtaacagatagacaaacctctttaagcaattcatggtgctccatctaatttaagatgttttaagatcattgataaatctcatatccacatatcaactttgttgatttctaagtcgatcaacggtataagaaaattgtttaatttttatctgtaaatatttttacattacccaccaataaaaaatcattattattataataaattttaaataatattataaaaatcaatatacttattgtacaagacgactcgtgattaaattataatgttaaaataatttatattaagttaatagt

SEQ ID NO: 19374 - DNA, 180 bp, Glycine max
  Clone ID: PAT_MRT3847_117499C.1
catcagagatgcactcatcattcttcgtttgtctaagatccgccttctctgagttgtagagatgtcgctcggcgaaactgattgttcatacgcatctctcattcttcatgacgatggaatcagtgtagctgccgagaagatcagcaccttgttggaaactggcgaaggttcctgtagata

SEQ ID NO: 19375 - DNA, 184 bp, Glycine max
  Clone ID: PAT_MRT3847_11749C.1
gataatgtttttcatatattatatatttggcttacataaaatctggcctcagaggtggagaagaaggaatagcctctcaacctgttcgacattaacacgagctatgctgactcatgacatgaattggtccgataagagtaccaatgagctcactttagatctaccctactaggcactttcacta

SEQ ID NO: 19376 - DNA, 1071 bp, Glycine max
  Clone ID: PAT_MRT3847_1174C.1
acggctgcgagaagacgacagagccggaacgagaaataccgtgacactgcaacagagtgagagaaattgcaggcggcggcacagaggggaagtagtagtaaataaggatcaatggcggttcctgggaggcgcaacggcatcaacgacgacgaagaggagttagacgacaatgcccttttcgaagaacaaggtgtcgtcgaagacgacaccgatacccctcctcacctccgcgacctctccgccgccgctcaaatcggcgacgcccacgccctccgtctcgctcttgataacttgactggtagtattgatgagccagtggaggatggggatacggctcttcatttgacatgtttatatggccatttggcttgtgtccagctgctaatagaaagaggagcaaacattgaggctaaggatgaagagggtgctattcctttgcacgatgcttgtgcaggaggatttactgagatagtccagctgctgcttaacagagcaaatgatgcagaacatataaagagaatgctagaatcagttgattctgagggtgatactcctctccatcacgctgcaagaggtgagcatattgatgtaattaggttgctgctgtctaatggcgcatctcccacaaaggcaaacttatacgggaaggcccctgcggatttgcctgaacaggaagatgctcggaggctgcttgaagctgcagctcttgccatggcatgccagtagcatttcagtagaaatatttagttccattttgacagagatgctacactttttggaccataaaatctgtatttcatacactactcttttttcgaagttcaaaaatcaaaatgatttattagaggagcaccataggaagttttaactctggagacagataaaaatgaggattcccggattacttatagtggggcaagcttgtttgttttcgttactttgcttaagtgaaatatatttactcttcaacaatttgaaatgtatttactcttcaacatgtcagtgaactatgactggatagttatacttgtcattcagtttgtggcataatgttgctggttagattttgat

SEQ ID NO: 19377 - DNA, 520 bp, Glycine max
  Clone ID: PAT_MRT3847_117500C.1
gccacattaaagaagccggatggcagaagaaggaagctgcattgaatcttcaagttcagaagcttactgagagaaacacttatttggagatgctactagatatgcagagcaggcaattgatgttcaattttgaattgcagatgagcttgatgtctccatttgagatgcaagacatcttactgccttctggcacaaatggtgttaaagacctacacatttctgcttctcatagtagtagtagcctggccctcttttcttctctaggaaagaaattatcagtgctcagcttggacagcggcaaccttgttgtcaattatgacctacaggtgaagtttgattcaatattttgatttggtaatttagtagtaataaagctgttggaaatagtttgctatgttttgtggttttaagattggtattgcttgtatatttaactttttatcctccttgagttgagtaatataaattcataaggaccagccaaaaagacagcaagtcatctctgtaaaggttttcagtc

SEQ ID NO: 19378 - DNA, 180 bp, Glycine max
  Clone ID: PAT_MRT3847_117501C.1
cgagcagggccgcatcgtcgccgatgtctgggcggtcgagtccggcagcgcgaccagcgtgctgggcagctatgtgcgcggtggcgcgaccgccaccttcgactcgatcagctacaccgcggtcagcccggtgccggagcctgctccgatggccatgctgtttgccggcctgggcgtgct

SEQ ID NO: 19379 - DNA, 694 bp, Glycine max
  Clone ID: PAT_MRT3847_117502C.1
cccacgcgtccgggagttttcaactccgctctccagcccagcacatttctatgatgccaaatccaaggaatcagaggggtctagttcatggatttcatggatgaaaggaagtcgtggggggcagtccagtgactcagatagtcacagatacaaggatgaagttgatcctttcagcatacctgcggactacaaatgggtggacgccaatgagaagaagcgcagaatgaaggcgaagaaagccagaagtaagaagcataagaagcaagcagcggcaaaaggtggagatggagtgcagcatcaaaggacggaggatgtagaagaacagtaatatcgtggtttggtatctctgggtaaaatcacggctttgataattgttgccaaagagtctttctttgtgcacgccacaactgacgttacagttctatgttggagggcttctacaagaatttactagaaatttcttggccaaccaattgttattagttaagaaaaaggtgcctttatttttttcctcgtatcgcgaagaaagctttgtcttctataaattgctgtattgccagtgaagaggaattgaagagcaagagtgttttgctccctagatctcgctttggcttcattctagttgtccttagatacctactatttgtatctacacctgtcgatgattatcgatttttacattttcgtgagtggt

SEQ ID NO: 19380 - DNA, 2355 bp, Glycine max
  Clone ID: PAT_MRT3847_117503C.1
tacggctgcgagaagacgacagaaggggaattcgtgatttttatatggagataagttttcattttgagagctctgttattccttttattgggcgtatagctccttcagatacttatcggatttggaagcgtgggtctaatcttcgtgctgatatgacccttgctggttttgatggcttacgcatccagcgatcggaccaaacatttttgttccttggagagggctatgttgcagaggaaggtaatttaactctgccacctggttctttgattgctctttctcataaggagaaggaaatcacaaatgctttggaaggagctggtacacaaccaacagagtctgaagttgcttatgaagtttccttgatgtctcagacaaatatgtatagaccaggtattgatgttactcaggctgagcttgttccccatttaaattggaggcgtcaggagaagactgagatggttgggaattggaaggcaaaagtttatgacatgcttcatgtgatggttagtgtgaagtcaaggcgggttccaggtgctatgacagatgaagaactttttgctgtggaggatggagaaagcatgatgaatggggaaaacaatgatgagtatgatgatgtattgactgcagaggaaagaatgcaattagattctgccctgcatatggggaactctgatggtacttatgaggatgaggaacatggagcctttgatggtcaagaaaatggttctgcagcttcccgtgagaattctgaagccaatggtgtggttaaagaaaagaagagctggtttggttggaacaagaaaagtttgaagagtagcagtgatgatcctgaggattccaaagctgtgaagaaaaattccaggtttggctcagaaggtagcaatcagagatcagctgatcagcagaagttagcatctgactttctgagggaggatagtgtagactctaggaagggaaaagataaaaacattaaaaagaagaagaaaaaaggagcaaacaacaatgagtcaaagaatgagagtgagtataaaaagggtttaagacctgtgttgtggttgacgccagactttcctctgaaaactgatgagctgctgcctctgcttgacatcttagcaaataaggttaaggctattagaagactcagagagcttttgacaacaaagcttcctcatggaacttttcctgtcaaggtcgctatcccaatagttcctactattcgggtgcttgtcacttttacgaaatttgaggagcttcagccagtagaggagttttcaactccactttccagcccagctcatttctatgatgccaaatccaaggaatcagagggttctggttcatggatttcatggatgaaaggaagtcgtggggggcagtccagtgactcagatagtcacagatataaggatgaagttgatcctttcagcatacctgcggactacaaatgggtggatgccaatgagaagaaacgcagaatgaaggcgaagaaagccaaaagcaagaaacataagaagcagacagcggcaaaaggtggagatggagtgcagcatcagaggaccgaggacgtagaagaagaacagtaatatcgtgggttggtatctctgggtaaaattggggctttgataattgttgccagacagagtcttgctttgtgcacagccacaactgacattacagttctatgttggagggtttgtccaagaatttactagaaatttctcgggcaaccaattgttattagttaaggaaaaggtgcctttatttttttcctcgtatcacgaagaaagctttgtcttctataaattgctgtattgccagtgaagaggaattgaagagcaagggtgttttgctccctagatctcgcttggcttcattctagttgtccttagataccactatttgtatctacacctatgtcgatgattatcgatttttacattttcgtgagtggtaatctccagttttaactgtttcaagaggaggatgtagaaaaacagtaatatcgtggtttggtatctctgggtaaaatcacggctttgataattgttgccaaagagtctttctttgtgcacgccacaactgacgttacagttctatgttggagggcttctacaagaatttactagaaatttcttggccaaccaattgttattagttaagaaaaaggtgcctttatttttttcctcgtatcgcgaagaaagctttgtcttctataaattgttgtattgccagtgaagaggaattgaagagcaagagtgttttgctccctagatctcgctttggcttcattctagttgtccttagatacctactatttgtatctacacctgtcgatgattatcgatttttaca

SEQ ID NO: 19381 - DNA, 209 bp, Glycine max
  Clone ID: PAT_MRT3847_117504C.1
cgggcctggatttccgggttggcccacacccgtccggggattcaagggagtgatcgttgttaactggttctcaccataatcttaagcgtaaatggaagagtttcccattcataaccttttccgtcggaaggccttaaaaggcacctaacccggccccgttgaaggcggtttggattaagttattctaaaccttaattttcttttccgcc

SEQ ID NO: 19382 - DNA, 151 bp, Glycine max
  Clone ID: PAT_MRT3847_117505C.1
gtggttttctcccacaccaatatacccccccttcaacattcttgaatgaaacaacattacctacatcataccagccagatacagaatcccactcataccttaacaacaaagccgcgaaaatctaaacggagccacactttaaaagattttt

SEQ ID NO: 19383 - DNA, 364 bp, Glycine max
  Clone ID: PAT_MRT3847_117506C.1
acgatcatctatcctatcctgacaccgaccatgtacaatagactctctatcgctatccaacgggggaaacaaagataaacgcgtgtctgatcacaaatgtacatcaaaaaggcttctactgctagatatcatacattctgacattaccgacactgctggcaagattctctaatatgttgacataacttgtgcacctccacttgccacgatacttgataatgataatgatctcttgatatgtcttcacactgactagcactcatgctcccaattttaccttgactgtctatggagtagccataatgtcaaaatgaagcttctcaatgtacacgtaacttgcactatcgccacgatttatatgact

SEQ ID NO: 19384 - DNA, 1050 bp, Glycine max
  unsure (1)..(1050): unsure at all n locations
  Clone ID: PAT_MRT3847_117507C.1
aaacaaacgaatttgaactttgggaggctgaggctgctacattctattttgatcttcagatttcgtccattagtgaagcattanttggaaaacaaggtcaccgagcttactggagtatgcatgagacttgaagatgaaagtgatgcaaaaagcttggagattaaacagatgacagaaagagtctgtctactggaaagtgaaattggaggactgaaagggcagttatctgcatataatccagtcattagttcattgaaagaggattttgcttctttagaacacactgccctagttcggataaacaaaatgcctgttgaatgcaatcaagaacaaaaggatgcagtaattgaaacttgtctccatgaaaatggctatcaaagttcaagagataacaaaagcactttgataccagatggggtttcagatttgctgagtgtgaaggcaaggattagagcggttgaaaaatcaatggtggaagaaatcaagaagcttgtgaaggaagacaatttaaccactaaagctaatccaggagctctgacaaaggcaacaaatgtggaagtttcaccctatgtggagaattgcaacagaaaagaagacaaggtacccaaggatgagagcacacatgatgtcaactcgtggagaacaaaaactgaaaatgggtcattgatgaaagatattccacttgatcacatctcagacaattcatcctacaaaagttgcacgagagaaaatagtggtactgatgatcagatgcttgaattatgggaaactgccgagcaagattgctttgctagttccatgattagtgaagcaatgaaacaaagttctgttccaacagaggatgttattgcataccatcagtcagatcattcaggtaaattccaaaatacctcttcagaattggatgtggaaaaggaattgggtgttgacaggcttcagttgtcgagaagtataaaagagagaactcaagatggcaagaggagaaagatactggagaggctttcttctgatgcgcagaaactgaccattctcaagacagctgtgcaagat

SEQ ID NO: 19385 - DNA, 313 bp, Glycine max
  Clone ID: PAT_MRT3847_117508C.1
aaaggcctgctgaggcgaaagaaactccagggcatgctatatgaggggctgcacgcaccgtcgcggagggggaccatgtaatcactcgtgaacaggaaacctctcgaaccctagcgtatcaaggccatcatcagggtggaagctacgctggctgcgctatggggacatgcatcttgacaggcgagtctggatacacacagaccatgctgacgtattgctctcctaccaagatgatgcatgcttattatcagcgggtaaaaaaagctagctttgctatggttacgttgcgtgcgatgtgagggatccaagacaa

SEQ ID NO: 19386 - DNA, 495 bp, Glycine max
  Clone ID: PAT_MRT3847_117509C.1
ggctcatatgattgcagaggagtatccttggttggtcacaaaatttttattctcatccgagaaatctgctagccgtcataagtgaattgtttcctcccaacatgaatttctctaaacacatcaattagaatttgaactctggctacaagcttaagggacctgaacatggtgccactcagatcaaccacttgttcagcaataagtgaagtgttatccacatagcagtgaaaataaaaaaagtcaacctgaatttaattgaggggcccgaagaatgaggcaatttcctctcccagaaaaaaaggaagaaaggaaaaataacacagaatgagacaggttcacttgtatgttgtggacccataggttcgacatacttaagagctaaattgtctttcaaagacatattagtccagaaaatggatcatgtttcccgcataatagtactccgatcgagaaagaaaaaagtaaggctcgaacatcgctataaatgacgatgga

SEQ ID NO: 19387 - DNA, 471 bp, Glycine max
  unsure (1)..(471): unsure at all n locations
  Clone ID: PAT_MRT3847_11750C.1
cagccaagttgaccaataaagtcacaagtgaattatccgctgcatgtaaatgagccagcaagagacggacgatagcagttgttcaaagaaaatgcacaacaaacttgatgatactggagttttgctacatggatcaaactatccttacatggaagcaaagagcaaagagctaacagttggagatgtggacatgttattaagtgattacaaggatttagttgctaagtacacaatcctgtgcaaagctattggttgcctttccaccgcagagagagaacccctccttcgtcatctagaaatgcaaggaccagaaactctacttaatttcacagcaccgtcggatcatcacagacacaagtgatccacacccacaaaaagataattaattgacaataatgcccatgtgtgtatatatttatgtaattgttttagacttttagttctatcaattnttttaaaactggactggtt

SEQ ID NO: 19388 - DNA, 340 bp, Glycine max
  Clone ID: PAT_MRT3847_117510C.1
ccagctcatcgacgaccagatcgccgagttcaaggaggccttcatcctcttcgacaaggacggcgatggttgtattactactaaagaacttgggactgtgatgcggtcactagggcaaaacccatctgaggcataactgcaggatatgattaatgaggttgatgctgatggcaatggaaccatcaactacccatagatcgctcacctgatggcttgcgagatgatagacaccgactccgaggaggagctgagggaggctatctatgtgtgagacaaggatcagaatggttgcttctctgcgtctgatctccgccctgtcatcgacaaagtaaggggagaa

SEQ ID NO: 19389 - DNA, 627 bp, Glycine max
  unsure (1)..(627): unsure at all n locations
  Clone ID: PAT_MRT3847_117511C.1
ggccgaattcccgtcaccacgcgtccgggtataaggttgacattaagcatacggacctactatacgtgaatttgtattcaatttcagtttgtctttattcacccgtaaataaaaaaagcaacatacagaaaataatatccaacggatatcgcgtacaggtgtcggtttcttcactgataccttacagattatttaattctaggtagtaagacaattgatactcgtattggccttttgactgtaaaccgtgttactgatatctctttattagttaaaattgttgaaaattataaaattatgaatgaaattttttaaataaaaaattattttatataatatataatttttaataaattttaactaatacagtaacaaagagtgtattcaataaaatatattagaagggtgtgttacatttctcaacctttggataaaaatattcagaaatattactcccacaaatatgtttataatntnttgtaatttaaaattgggatgtaacaagataagatgagtaatataataaagaaaaataaaaatatgaagagaaataagaagatgaataatttaacaaagagcagtacaaaatgatgtcataaaaatgtattggtaatatattattaaaaa

SEQ ID NO: 19390 - DNA, 228 bp, Glycine max
  unsure (1)..(228): unsure at all n locations
  Clone ID: PAT_MRT3847_117512C.1
tntnngnnnnnnnnnnnnnnnnnnnnnnntaacgagaacatttttattctaagtataataataacaagcaagggcacaataaaatttggttcccttaaacttggcgaacaaaggtcttaaacttttattttgggaacaaaatggcaaaaaccattacctggctgaccttgtctttatcctgcttggcttccagaacaaacctaaaaccagcgaaaccggattattatt

SEQ ID NO: 19391 - DNA, 268 bp, Glycine max
  Clone ID: PAT_MRT3847_117513C.1
aaacaaaattttaacgcttgacaaaattcaaaaaaacacacgggcaaaatttccaacaagagaacataaaaagcccaaaaaataaccaaacacaatattaaacaaacacaataacaaataccatcgtcaccgatttacccttaggaacaaacactaaaggaactcaacacatcatcaaattcaacaccaaccaactacttagactcaacacctgaatgcagcacaaatgatctaactcagataatcaaaggtaagtaatccatgtgcc

SEQ ID NO: 19392 - DNA, 284 bp, Glycine max
  Clone ID: PAT_MRT3847_117514C.1
cccaatttttccacccatcaacagggaaagatccgaagagccacaatgcccacaaaaccggtcaattcacaagagattcctttccaaaaccccaaagttttgaaaaaaaaaaaaaaagggccccacccacgggcgaggaaaatccacaaaagacaacacgcacattgagcctggactggcgaagaagaatcatcaaacatccggggggccggaaaaaaaaaggggcattttaaataaggggggggaaccctggcgggaaacccaaacctaccactacctcgggg

SEQ ID NO: 19393 - DNA, 270 bp, Glycine max
  Clone ID: PAT_MRT3847_117515C.1
ccgctcgagggctcgagagctagtccttacgacactcgtcaacagggccttagaggctctgctaaagcctgttctgtcataagagattagattatattagaaggtgaccgaatacgctaaactagtgctctggaggcctataaactgataacataattaggcttgccaagtgcaagacaagccatatgccaagtggggcactcgatgcggtaattgaactgaggacaaaatgatcttagcgctgtgttatcatactttgacacgagacat

SEQ ID NO: 19394 - DNA, 381 bp, Glycine max
  unsure (1)..(381): unsure at all n locations
  Clone ID: PAT_MRT3847_117516C.1
tcgactcctaggtntctaaagaaggggggttgatttaanataccaatctatccccaattaaaattcactctctttttaattaataatgaaacggtgggtatgaattatttcaagaacaattcaaattaaactttctattaagtgaaatataaatcgcaattattaatattagcttaaggatagagggaatgcaaactcatttttttttactggttcgtccactccctgtgcctactttcagtctttatgcaacccggttaatattttcactattttagaaaagccttttacaaatatatgaaccactcagggacatcccttcccttgtgttcagattaccttacaacttaagagaccctcaatctcctaataaatcttttt

SEQ ID NO: 19395 - DNA, 369 bp, Glycine max
  Clone ID: PAT_MRT3847_117517C.1
aaataaaaaccgtccttcattactccaggactttttagaaaaaaaaaggcccccaagctttcaaaaaggcatccaaatatccgggaaggggaaagggaaaacggttggacttgcctacaaaacttggcccccaaagggaccttaaggcgaagaaacaccttgttcaaaggtcatttgggcctactggataatacgctttgcccagggctagactatcatcaatattgtgtaaccggagatatttattagggtcgtgaaaaaaaacttttaaaaaaactgggaaaagaaaaaacactttcaatggcattataaaaaaaattctgaaacacttttattttgttcaggcgggagaaacaattgtcaacgaca

SEQ ID NO: 19396 - DNA, 246 bp, Glycine max
  unsure (1)..(246): unsure at all n locations
  Clone ID: PAT_MRT3847_117518C.1
ctctttgggaatcaaatccgaaacatgatgcattgtgcgagcattgtgctcggctccgtcatacgcgttcccttttctctctggctccgcttccacnaancnaactnnnaaactcgctcactaagngcagttggaagccacctcngagcatggcaaaaggnccagtcagagcnaccgtntctatagagaaaganaccccggangnnaatncatcccgaaacgtttctcagangatggangaggccc

SEQ ID NO: 19397 - DNA, 411 bp, Glycine max
  Clone ID: PAT_MRT3847_117519C.1
cccacgcgtccgtacggctgcgagacgacgacagaaggtgcttcatgggaggaggacttcctgacgccgttatctctgtcttaagataatgcctcttcctctgatggaatacttcttatgttcttctccttgctttatcagctgtaatcggcggccttctttttggctatgacaccggagtgatatctgctgctctttttgttatgaaggatgaattccctgctgatgataggacgacttggcttgaggaatctatagtgactacagcagttgctgcagcaataatagctgctgcagtgggtggatggatcaaccaccgatttggaagaagataatcactccttgcagctgatgtcctctttataggtggatcagcagtgatggctgcagcacctgttcctgctgttctca

SEQ ID NO: 19398 - DNA, 516 bp, Glycine max
  Clone ID: PAT_MRT3847_11751C.1
aaaaaagcgtttttcaaaattgatgaactaaaaaaggagagtttaaatttaggggaccaaaaacaacagctatccaaattttgagggtccaaaaacatatttaagccttcattatttttccttgataagaatttttatcagttgggttgcaagcatacacactataccttagtttactccataaggagttttattttgcaagtacgaaatgaaaggaaaaaaccttcggaatggtagaacagaaatttatggttctgttgtatgctatttaatacatagattatgtatattgaatttttgccactgattttccatggtgtacatttcttaaattgggtcagttttggtaaatttatacctgaagagaatctcctttgattatgtggcttctccatttgtattgttctattttctttcgcattgtatattttatgcattttctttgtctctatcattgcctttcattattggatgtttatttgtatattgcatgtgagggcgagccctggtgcagcg

SEQ ID NO: 19399 - DNA, 916 bp, Glycine max
  Clone ID: PAT_MRT3847_117520C.1
ttttgtgactaggtgcattgccatagcacctagtcttattgtttccatcattggtggttctcaaggggctggtcggcttatcatcatcgcatcgatgatactttcattcgagctcccattcgcattaattccactccttaagttcagcagcagcagtaccaagatgggacctcacaagaattctataattatcattgtcatctcttggatcctaggcttggggatcattggtatcaacgtgtactacctctccaccgccttcgtgggttggctaattcatagcagtctaccaaaggtggcaaatgtgttcatagggatcatagtgtttcctctaatggcactatatgttgctgcagtaatctacctaaccttcagaaaagacactgttaagacatatattgagacaaagaatgaaccagcaatgcaaacccacatggaaaaggggtttatggctaatggtcaattagagttgagtcaagttccctacagagaagatttggctgatatcccactaccacaatagggtaccagctggtctataaattaaatgcatcaccaaaaggggtttttctttcaagtcattctaaaagtgaatgtaatattaggaccttgagaattctcctctcgagttgtcacccatgtgtttgttgtgcgtactacatacataactactatataagttttatggttattatgttatagcaaaatttataagaaccatttcagtgtaaaccccatagtttactggtcttgaaaaattttgaataataaaaccccaatagtaagtagttttgtcattttctacgttgtaaatgaaggcatgactgaagataagatcttacagtctgtacttgttgtattacatccattttgtctgagtaaatgaattgtgttcctctcttctgtttttaaaaaa

SEQ ID NO: 19400 - DNA, 404 bp, Glycine max
  Clone ID: PAT_MRT3847_117521C.1
ggaaccgaataattaacaaatatataagctaattggccccccaagttgctttttattggggggggtttaccaaccccaagcctttaaaaaaaaaaaggaaagagcttcgaaaagctttgggtcaaaataacaaatcctttgatttaaaaaagctttttgtttatccatatttaaaagcaggggaagttcgacgggcataaaatgggagagggattttggaggcatactaaaattccaaaacttggatggaacaggactccataaaattttaaacttttacgggcaaacaaaaaatccattcaacctggtgtttacacacctgccttttgacaaccttagggggagggaacaacaaatatgttgttggctagctggctgcaggcaatggcaaaacccattctgat

SEQ ID NO: 19401 - DNA, 2120 bp, Glycine max
  unsure (1)..(2120): unsure at all n locations
  Clone ID: PAT_MRT3847_117522C.1
tcccgggtcgacccacgcgtccggcggaagaaaacagagaaaatggcgctgttgtgtggcggcatgccatggtcgaaggtgatagttcctcccattttccaccactctcacacccctcgcaccttcttcttccaacgacgccgtttctcagtctctgctctctccgaacaaccaccacccgttcgcgttcgtttcgctccttctcccaccggaaacctccacgtcggcggtgcccgaacggccctcttcaactacttgttcgcaaggtccaaaggtgggaaatttgtgctgagaattgaggacactgacttggagaggtccagtagggagtctgaggaggccatgctcaaagatctttcttggcttggacttgattgggatgaagggcctggtgttggaggggattatggtccttataggcagtctgagaggaattctttatacaaacaatatgcggagaacctacaccaatccggtcatgtttatcgctgcttctgttctaatgaggaactagagaaaatgaaggaggttgctaaactaaagcaactgcctccagtgtacacaggtaaatgggccagtgcaacaaatgaggaagtagaagaggagctagaaaaaggaactccttacacatatcggtttcgagtccctaaaggaagtttaaaaattaatgaccaaatacgatcaaatacgaggcgaagttagttggaacttggatacgcttggagattttgtgataatgaggagtaatggtcagcctgtttataacttctgtgtaacggtggatgatgctaccatggcaatttcccatgttatcagggcagaagagcatttaccaaacactctaaggcaggcattgatatataaggcactaggatttcccatgccttattttgcacatgtttctttgattttagctcctgataggagtaaattatcaaaacgacatggggcaacatcagttggtcagttccgggagatgggatacctaccggaagcaatggtgaattacctagcattattaggttggggcgatgggactgaaaatgagttttttacacttgatcaacttgttgaaaaattcactatcgaacgtgttaacaaaagtggtgctatttttgactcaacgaaattaaggtggatgaatggtcagcatttaagagcacgtccgtcagaggagttgaccaaacttattggagagtactggaagacatctggcttactcacagtatcagatgggtcctttattgatgaagcagttcaactacgccgacatggaggaagcagttcacctacttaaggatgggattgacttgataaatgatgcagacaaggcccttgctaacttgctttcttatcctgtgcattctactttacagagcgatgaagcagaatctgtcttgctagataatctttctgaatttgctgctagcctcttggctgcctatgatagtggtgatctggtagcagcacttgaagaaggccataccggctggcaaaagtgggtgaaaggctttggaaaatcgctaaagcgcaagggaaaatcgcttttcatgccgctccgacttctgttgaccggcaaactccatggacctgacatgggggcaagtgttgcattgctctatagagctgggactagcaatgtagtagctcctgaatctggctttgtgacactggatgaaagatttaaaatgcttaggcaaattgactgggaagcattgtccaaggaccaacctgtcaaagagactgctgctcctgtctaacttagaattcactttcaaggtctatcaaataataccatggttttacacatctgtttggagccttctgttttttgtttttttttttttctgcaaatttgactagagaagtctgatttgtaatatttaccgagggatcttttatagtcatataatgagttccattttgtttaggcaagtttttatttcaatgtgactagatatatttcctatttttgtaatttggaaacatggatattttggagtgatgtttttttttaaattatttaaataaaatatggaacagagaagcagtatttgctttaatataaaaaaaaaaaaaaaaaaaaanaaaaaaaaaaaaaaaaaaaaaaaaaaaaaaaa

SEQ ID NO: 19402 - DNA, 370 bp, Glycine max
  Clone ID: PAT_MRT3847_117523C.1
aaaaaaaaaaaccccaaaacgttccttggaactaagggaagggcaggacccttgggcatttcccaaaaaacccaacaatcggaactttttccccccttctggggcatatataacaagggaaaaaaaaaccccgagccggggccttctttatttctaagaaaggacccctgggcaaaaaaaaaactttttttttttttacgggggcaaaaaaatatacccccaaagctttttccccccggaaataagaaatatcgggctttggaaaaccccaggggggcccaccacccttgtttttactggggggcccccgtcccccccagggcctttgggacaatgacaagacgttgacttgccccccaactgggggggg

SEQ ID NO: 19403 - DNA, 186 bp, Glycine max
  Clone ID: PAT_MRT3847_117524C.1
acctggctatacacgacaccatccacacactaagatgaagaacggtttccatactccactacttgctagccctatctcttacttgctctcttcttatcttcttatccgactcattcacccgtacggaacccaataaaccttgttgttctacccgttcaaaatggatgggttccacagggggctcca

SEQ ID NO: 19404 - DNA, 343 bp, Glycine max
  Clone ID: PAT_MRT3847_117525C.1
atcatacctagggcaaccacttccattctcaatcaccacactgatctggatcgaggttctcgaaattggctacataaagttccacaagaacgcagatctggacccataaaagaagctgtacccaggtggcagttactacgacccactgggcctgacctcatatccatagaagaaagccacccttcaattggcggagatcaaacacacccgtctctccatggtgggcttcttgagctttacaatccaagctaccaccactagcaaagacccactcaacaactagaccacccacttaagtaacccactccacacaaccatcattaacaccttctcatcctcctct

SEQ ID NO: 19405 - DNA, 333 bp, Glycine max
  Clone ID: PAT_MRT3847_117526C.1
ttatcgcataaagtacagcagaaaaccattaaattttgcttggtaatcactggtcttgtcttacaaccatattagaacatatctccaatctcatattgcgggatgtgaacatgcgaaaaaaatagtggcctattcgcattcggccttacacaggtattaacctgtgctttgccacccctgtttgatgccaccatccttgagagggataacttatcttaacgctccgaagtatataatggctactgtaaaataatggctcgacaaccttcccctatgtttgacaatatcttatatgtgccttctcaaaaagtcctctgagtttttgtttgaatg

SEQ ID NO: 19406 - DNA, 2126 bp, Glycine max
  unsure (1)..(2126): unsure at all n locations
  Clone ID: PAT_MRT3847_117527C.1
ggaangaccgggccggccgacgcgtccgcttcttctctactcctgtacaaacaccaacgcacaaaactttacaacatttgcatgatctgactgaccaatcatcctcttcatctctcttcgcacgcacaacaacagagaccggaccccaccttcccacagccaccatggtcgaaaccagacgcggcgcctcttcttccaagtgttctctctcttctccttctgcgcccaacaccaaacgatccaaggtgtccaaggattcctttgtggcggctccggtcaacaaatctggggaaccggagctacggccctctgatctgccagatacggcgtcgttgaaggccgtggatgtttgtgacgcggtgttgcccgataagtctccttctgaaggcgaggctttggtgcctccacggtgtgcaggtgaaactgcggagaaatcgaaggtggctggtcttcccccaaggagcgtgaagaaacgtgctgcgaaatcgtgccccaagactgcgtggggaaagctcctctctcagtgttctaaggaatgacactgttttgctttttacagtttgttttaccgttgattgagtattttctgggaatgggatgcatggtctaatcggatcctggttttagtttttatgaagtctaggttttaaactttggttgcgtcgatatcaatggaatcatggaaaattagaggccaaagctgctgaggccttcgaaacgttaatgttgttgggtaaaggctgtttccaaggtttgaatctatggcccgagagtgcaaaacagcaaactttctgttgccccaaggctcgctcaccttcaaattgatgatcttagtattgacagatagctaatgctttctgcatgatggactctctgaaattcttcgagctaactaaatttgctaaaagcattcttggatagttgccttaattgcagttacccctagcctgccttaagtgcagtatctttgggctgcctaatttcagtatcgagaggttgtgtttagttccacatcaattagtgatatagtcaatataattcttgtaaaaggctttgacaatcttccccttacaagccaatttgttgggttaagttaaccctaagcgcaaattataaggggcattgtttgcattgccaagtgcagtgtaaatataagctgacgttaagtgttttttttttgtggaaacctgacattagtgtttattacactctacattggtatcctttcttgttttgaatttttttgttgtgttgttttctagaagtggaaatggtgaggaagtgtacaaaaaagtgtcgtatctgagaagaatatacattaagcaagtcatgcaggttaattccccagatatttgtaacatctttgcttgttgacgtcttgacaactcacacactacagcactttacacggtgacacttcactcaatgttctttttggttagaatcctctaccggtcaaaactcttcgtaagtagccccttctgaaacttcgacaatttgcttcgacagcttccaggatcaatgattgtcaccacaaatcaacatgagatttcctagcgtgttttgtcctcattcacatgttttccaggaaacttcccagaaagtcatgcatcacataattgctctaagtcaaacacgcttgattgtggagctcttaaatgataggctaccgaaaaatagatgcatcttgtgggtataggtagatactaattaattcttttaagtcatcctcaatcgtacagttctacatctgcacaatctttggatccctctcattccgatgtgattcgcctggagtattatatgcccaccagctttcatggtgttgtggcataataaacacaaaacttgggaagttagtgtgagttaccctaagttgtgtttgttttaacttttaaggtatcaaaaaggattcctcaaaaagtgaacttgggagtatcacatttccatgtttggtacaagtcttgaataaatattttctagagttattgatgcctagaatataaaatgttcatatttccctcgcttcttattcccatggtgaaagttgggtatcttagagtgggaatgaaatttattttctacaaaaactacctatcctcactccattcttccttccttttttt

SEQ ID NO: 19407 - DNA, 957 bp, Glycine max
  unsure (1)..(957): unsure at all n locations
  Clone ID: PAT_MRT3847_117528C.1
gtaatctcggaattcggctcgagcaaagctgaaagctcaatagctcttctctctctctctccatggacttgcagttgaagcaatggagtaaccggcatgagtcagaacaagaacattattccccaaacatgccaaaatttctccctcaacaccacccaccaccatctccctctgcactccctctctttgtacctgaacaacccaaccaccaaagtctgcaccctgtcagcattttctgattccacactaccttctgctcccagattttccagtaagattgatttagcacattccttttgttctctttggtaacagaaacaaacaaagttggattggcctatattacatatagtagtatcttagttgctcccttttttcaaaggttctatttttgttcatttctcattagggatggagagttgcttcagctttgcacagtggcaagagcttgagttgcaggctctgatattcaggtacatgctggccggtgctcctgttcctcctgagctccttctaccaatcaagaaaagcttccttcaactttataaccctccttgtaaatttctaaccccatttttctacttgctaattatttgactatttgactaatataaagtggccatattaatcctcaataagtaaatcaattgttaacatttcaccacatttattacttatttcgttatgtatgttgtagagaaaacttaaatgtagtttcacgtgtgtttttttttttgtttgtcaacctgaattggaatttcattttattgctttaaatcattaagttgaagccaaataataaatagttgcttcaaatttttatcataattttagggtccaaaattgattctaggagctatccaaacatactataaggtgaaactctatttctggttgaaaactgtgtaaaagcagctataaaactgtatttaagttttatgctatntatagttgatt

SEQ ID NO: 19408 - DNA, 278 bp, Glycine max
  Clone ID: PAT_MRT3847_117529C.1
cttgcaaaaaaacaacatatcgcatttcttacaacttataattacctgggaaaacgctccttttacatgggatactgcctcactcctaatcacccaaacaaatttttatcaatctacaacaccaataactacctccgtaatttcaaccatccaaatgaacattttcaaacacacactctatcaacttctccaatcattactcaaaacttcactaatcactacaactcctaatcttcaatatattaaaaaaatttttcccctattaacatttcacaaaa

SEQ ID NO: 19409 - DNA, 455 bp, Glycine max
  Clone ID: PAT_MRT3847_11752C.1
ggttttgatatttgttgttttaggttgatgttttttcatttggtattgtgatgtgggaactcttgactggagaggagccatatgctgacttgcactatggtgctatcataggtggtattgttagcaacactttgcgccctcctgttccctcatcttgcgatccagaatggagattgttgatggagaggtgctggtcatcagagccatcagagagacctaccttcactgagattgccaatgaattacgttctttagcgaccaaggtatcctatcccagaggacaaaactctcctaaaggacaaaaccaacatcagcaacactctccattgcatactcaagtccacaaatgattttcccttgatttgtgtttttcatccaattgcatattatagggaaggaatgatttgttaattggttcagatagatatatttaccaaggttgttaacaagtgtag

SEQ ID NO: 19410 - DNA, 433 bp, Glycine max
  Clone ID: PAT_MRT3847_117530C.1
cccacgcgtgggcggctgccagatcgacagacgggggcacctaaactacttggggatggtcatggatttgatatcttgatttcttaaactacatggattcttccttccttctcatggtttgtcacataccaactagcttgggaccaataattcgatatgttgacccactagatgttccttctacatggtgctccaatctatcaaatacactttggcaaatctggtgaggcattcatatacctcttgttggttatggggactacaacctttcaaataccgaagtccttgcgatggatcctatcgtttcctgcttccctattgtacttgaatgtcagacttacttcatcttcttcctttaattatgaggctgtttatagaaaaccatattaatattctaactatggggaaggacctgtatctactaccatttcgg

SEQ ID NO: 19411 - DNA, 373 bp, Glycine max
  Clone ID: PAT_MRT3847_117531C.1
ttatttatgtgacttaaaattccaagggggagctggatagccagaaaaacaccccttttacataacagttggtgcacaaagttaattttgactccactatggccaaggcaatccacgggtgggaagttaaccgctgccttatttaaggcgaaaaactcaaacttaaaatccaacttttttttgcaggcttgaccaccatgctagtacccctgatggaaggaacaaagtgaaggtgttttgtaacaagagtgttctaaggttacagggcagggaacttcctacttaagcaaatttaagttaggacattggaaattgggcaggagattaaccgccacaaagaccaaaaaattttagcgtttttagttataaccct

SEQ ID NO: 19412 - DNA, 257 bp, Glycine max
  Clone ID: PAT_MRT3847_117532C.1
aattcggctcgagggaacataacacatctgatataatcacttgactctcgtatattacttaatctaactaatactgacctcatgccttatcaaaacgcatgccggtggggaaaacttctacaatgtataatgccaccttgctgaaggcctcatcctcgtacttataaccatattgatcactcgccaaatgaactctgtgatgtgctcatcattcataacattgcataccattgctgacacatatctgacgctcaaaa

SEQ ID NO: 19413 - DNA, 403 bp, Glycine max
  Clone ID: PAT_MRT3847_117533C.1
tcgtacaaagcaaaccgctcataagtccacaagaggaaaggctcctaagaagcagcttgcaaccaaagctgcacataagtctacaccaactactggtgatataaagaaaccccaccattatcgtcctagtaccattactcttcataaaattataaaataccagaaaactaccgagcttttaatccaaaaactccccttccacaaagctattcataaaattactcaagacttcaatactaatctacatttccacagccacaccatacttacgttacaaaaacctactaaatcataccttattaaactctttagaaacactaacctatatgccattcacaccaagcatataaccattatacccaaatatattcagctatcaataaaaattcataataagcgttct

SEQ ID NO: 19414 - DNA, 556 bp, Glycine max
  Clone ID: PAT_MRT3847_117534C.1
aaggaccccttttctattttatttggggcaaaaaacaaaaaaggcaaggtttaggggaacaaacccacagggcaacccttcttttttatcccccaggggcggtaaaaacttaaaacccccccccttcccaaaaaaaaagaaaagaaccaggggttccccccccaacggggtaaccccccccccccaccgggtttttttttccccccccacccaatataaaaaaacggggcccctttggttttttttttgggggggcccccccccccctaattggggggcccccccaaacccttttctttggggggaaacaaccccccccacccctaaaatgggggccctggcccccgccaaaaaagcccatcgggttggccggggaaagtccaaaacagttcccaaggggaaaggaccccccccttcgaaaaacacccccaacacctgggggggttggacgggccccgcacccaaaccttccccccccggggaaaactttgtggggaatccccccaagggcgggaaaccaaaaccccctttggaaaacccccccagccttcccaaa

SEQ ID NO: 19415 - DNA, 1299 bp, Glycine max
  Clone ID: PAT_MRT3847_117535C.1
gggcgtgcgtacggctgcgagaagacgacagaagggacaccaatttgttttaagtcaaaaaaacaaagaccaccttgttcggttgtttttgttgttatgggtgccacctctatggtccgaggaggagtcacgaggtttctaccccgaagggaatatttggggtgcgagaaattacaacttggagatgtggagtttgaatttctcgatgatggtgagatcatgtcgttggccaaaagtgaaggttctggcgatgagtttcatcaatccaatgaaatggaattggatgatgaagatgatggtgagagggttgatggtggcagcgttgaggagaatagaagcttttgggataatcaacaccagcttttgcagaccaacctatatagaacaacttcagttgagtcaaggataagaaatgtcaccaaagaagccgttcaggatatacaaaacgcggaaatagtgtgcagttgcagtagacagataatttccagatcctgtagaaactgtttcatgatacaagtctcaaggcgccttcagaagtctggttatgacagtgccatttgcaaaacaaaatggagcagctcaccaagtattccatcaggggagcatacttttctagatgttatagacagcagaagcaaaaagcaagaaattagggtgatcatagaactgaatttccgagcagagtttgagatggcaagggcaagtgaagagtacaacgggcttgttcggaagctccctgaggtgtatgtggggaaaatagagagattaagcaacatcatcaaggtgttgtgcatgggagcaaaaaggtgcatgaaggaaaacaaaatgcacatgggaccatggaggaagcacaagtacgtgcacgctaagtggctaggtccatgcaaaaggaacacctcaacaacttcactttcaaattcaatgatgggaaattccgaggtgatgatgccaaaaccaaagcctagggcatcactgctaacaatggatctgatgctagaaactaatactaagacagaaatgttgaagcttcccaatatgcattgttcagctgttgaagttttgtaattgtaattaagacagaaaagtagctaggtttcatttctctctctttaaataatttatttgtagcaataggttggtacttcaaagttgccctgaatttgaaagatccattaaacatgtacctatttttttttattattgatatgttgctttacatatagggtgactcaattgagggttaaaatcatatttattttgccattaatccaaaaaaaaaaaaaaaaaaaaaagggcgcc

SEQ ID NO: 19416 - DNA, 356 bp, Glycine max
  Clone ID: PAT_MRT3847_117536C.1
tattatttttttttattttttttcaaggaccgcgaagctccattatttcgggggaccaaactacagaatgcagccatttaaccattacatgcgttattcgaaagaaaaaataaaaatcttttaaatgctttgccttaaaaagtcctaattgactattaaaacctgtgtaaatttcctaattaatatttatagaggcattgaccttcgtacattacaaattacacaaccctaccatgtgtagaaagcataggtttttgcatttggttctttacccaaaataatttttgcttagccttttttttttttactaatcattatcctatttcttttttaattgcttaaaagattacctgggg

SEQ ID NO: 19417 - DNA, 144 bp, Glycine max
  unsure (1)..(144): unsure at all n locations
  Clone ID: PAT_MRT3847_117537C.1
gatgcaacaaaccggcttctnccgggcaggcctttaaccagcagacaccgcaattcactggacaaactccaatcgcatcaacaatcaccccagcagcaatcttttcaagggccgcagggcaccagcagccaccccaacaacagt

SEQ ID NO: 19418 - DNA, 174 bp, Glycine max
  Clone ID: PAT_MRT3847_117538C.1
gacaacacatagataagaagacagaaagatccaacactcaatcttccaacttccaatccctcgctttccgaacaaaatgtccattaacaacgaatccaagccgccaacggtgattgggaaaagccggccctacaacgtcgtcaagaatccgccgtccaaaagcaaagccgccga

SEQ ID NO: 19419 - DNA, 1200 bp, Glycine max
  Clone ID: PAT_MRT3847_117539C.1
ccccttttgtctgaacaagcaagttttcctcataggctcgcaatcggaaaccctaaccctaaccaattgcgataatctttccccaaaatggcaattgcacgcactggagtctacgtcgacgactatttggagtacgcgagcacattacccgctgaacttcagagactgctcaacactgtccgggaacttgatgatcgatcccaatctatgataacgcagaccaggcagcagacgaagtacactatggggttctcatcacatggctccaagaagggtaatcacagttataataacaattatgggaatgaggacgatgatgcagctattgagaaaatgcggaaagaaatcgaggtgaatcaggatagtgcattgagtctttgtactgagaaggttttgttggcaagacaagcatatgacttgatagatagccatataaaacgacttgatgaggatttaaacaactttgccgaagatttaaagcaagagggtaaaatagcaccagatgaaccagcaattctgcccccgttgcctatagtccctaaacctgaaaagcgtaaacccatatatgtaactcctcaatcaaagagaattgattacagggatagagattgggatagggagcgtgatagggactttgagctgatgcctccaccaggaagtcataaaaaggagtatgctaccccgatggatgttgaccaacccattgatccaaatgaaccgacatactgtgtttgtcatcaggtatcttttggagatatgattgcttgtgacaatgaaaattgccaaggaggtgaatggttccactattcgtgcgttgggctaacgcaagagacaaggttcaagggaaagtggtactgtccgacttgcatattactcccacaatgtcaacgatgaatctttgcacgaactaaattacattcataaatgaccactgtttcaatagaattgtcactttttagtgaatacataatatgtcggttttgaattatttgtcttctatattgcttggtcatttgtgtttggcaaagaaaccaagtgggctctaccagaacttgtataaagtcctctaagatttgagagaaatgattctagatttgaattttggagaagattaattacatgtgaaatgcataagtataggcgcgtgtggctgtataagaatgaagatattttgttgaaaattcttccaggtgagagagg

SEQ ID NO: 19420 - DNA, 1652 bp, Glycine max
  Clone ID: PAT_MRT3847_11753C.1
tcacaaaattgtttttaaatagaaataatcttgttcttgttcctgtacagaaaaaaacaattgcagcattcagggtctggtaaaagatgttacagggatatatatatacttggattcttaacacaaattattttatttacacagtattatctgctgcttaactttggagatgatgtaatgccataccaacccttgcaaaaatataacctctcgctatggctgtggagccccttatatcataatcttctatctatatataattaacagaatggaatatatgatggggccacgaatatattgagcatgaattattattagcctgtgcaggggggtaaaaaatgcttccttactgtggctataagaatggtcccaaaaggaggatgatgaattaatttgaagccttcttagatgctcttgtattcttaatagtcatcatgagtttttgtctttcaccttcaacctctgcaaattgaaggcttaactgagagtaacggtcatgcatctctttcagttctgtctctacagcagaatgtcttgtctttagttccaacatgtctttaattagctcattgatgtccctgaagcttctgaatactgcttcttcatcactgtgttgtttcaagaaagaactctgaaattggatgtttgaggacttcttggtccgcaatgcttcagcaagctcaatctccaaagcgagcaccctttctaatgcattaccgctgatagagaatttatcaaaaacagggaatatgtttcctaactcttgattggcctcgtgtaattgcatcagttctctttgcagacctggaaaacttgactcgtggctttgaccatctactgaaggaagcatattctcatttttcatcctttccaactccttattcaagtgatcgatgctagatttcaaactttcagttgatgccacatgcttcattacttcttctagttgcaagccctatggggtagcgcgagataggcgaccaggcaagacccacaatgcaagaggatcctcggattgcatattgatgcttgcactctctggctcatgactgcaagcagcacaagtagaaatgccagggggaccaaatgaggcgaatggaacattgccctcattcagagaattcacatgagatcccgaagtctcaaccaattcctttgccaaggtaagctctacttcgattttggacttctcctcattgcattttacaagagaagcttcaagttcttgcttttcttgtttacaacattcaaggcttatcactgaacactccttttcagcctgtaggaggtcataagcatttaacaaattgcgtttatcagaaagtacagcctgcaattcagcctccaattccaagatcttcattcccagctcttcattaatttttatttgagaagcttcagacttttttctattctcagtttcatcaactgcatcttgtagtttccacagcatttcctcactatgcttttttgacaaagacagctgttgtcttagttcttgtaactttgattcatattgttccttgataaatgcaattctcaaggactcctgcatagcaaccggtggtccttcatgtcctcttctgtcatgggcattaacacactcagcctcagctttgtctttcagttccttcaaatgaatagacaaattc

SEQ ID NO: 19421 - DNA, 3124 bp, Glycine max
  Clone ID: PAT_MRT3847_117540C.1
actggcagtgtggattttcaatccaaatcaactttgtcatggagcacaccagctaaatcattgcgtccgggaagggcgtgggcctatagtggtggtgcatggggtaaggagaaagtacatagcattggaaacttacctcatccttggcgcatgtggaagcttgatagtgttcatgagattttgaagcgtgattatcagcttcgtcctgttgctgttgaaatatttagcatggatggatgtaatgatctcttggttttccacaaaaaagagagagaagaagtttttaaaaatctagttgccataaatcttcctcggaatagcatgctggacacaactatttcaggatcatcaaaacaagaaagcaatgagggtagccgtcttttcaagataatggcaaaatccttttcaaaaagatggcagaatggagaaataagcaatttccagtacctcatgcatctaaacaccttggcaggacgtggatatagtgatctcacccaatatcctgtctttccatgggtccttgcagattatgagagtgaaaatcttgatttgtgtgtcccaaaaacatttcgtaggcttgataaaccgttgggggggctgactcctgacgaggtagatgagtgagagtaaagatatgagagctgggatgatccggaggtcccaaagtttcactatggatctcattattctagtgctggaattgtcctattctatcttctccgcctacccccattcagtacagagaatcaaaaacttcagggtggccagtttgaccatgctgatcgccttttcaatagcataaaggatacttggcttagtgctgctgggaagggaaacacatctgatgtgaaggaattgattccagaatttttctacatgcccgagttcttggagaatcaattcaatcttgacttgggagagaaacagtctggcgagaaggttggggatgttgtcctacctctatgggccaaaggtagtgctcgagagttcatcagtaagcatagggaagctcttgaatcagattatgtctcagaaaatttgcatcactggatagacctcatttttggatataagcaaagagggaaggctgctgaggaatcagttaatgtgttctatcattatacatatgaagggagtgtagacatagactcggttacagatcctgcaatgaaagcatccattttagcacaaattaatcattttgggcagacacctaaacaactgttcctcaagccccatgtgaaaagacgaactgacaggaaacttcctccccatccccttaaacattccagtcatcttgcagcacatgagattcgcaaaagctcttcacctatcactcaaattgtcactcttaatgataaaattctcatagctggaactaacaatttgctgaaaccaagaacgtataccaaatatgttgcttggggttttcctgatcgtagcttgagatttattagctatgaacaagataaacttctttcaacacatgaaaatttacatggaggtaatcaaattcagtgtgctagtgttagccatgatggtcacattctggttacaggggctgatgatgggctagttaatgtatggagagttagcaagtttgggccccgcgccttacgacgcttgaagttggagaagccactttgtggtcacacagccaaaattacatgccttcaagttagccagccttacatgcttattgtgagtggatcagatgattgcacagttattatatgggatctcagctccatggcatttgtacggcagctcccagaatttccagcaccagtttcagcaatttatgttaatgacttgaccggagagattgttacagcagctggtattcttctggctgtttggagtataaatggggattgcctggcaatgatcaaagcatcacaactgccatcagattccattctctctgtgacaagcagtacgttttctgattggttggacacaaagtggtatgcaacaggtcatcagagtggagctgtcaaggtgtggcagatgattcactgctccaacccagatagctcccttagcaaatcaggttttggtgggtcgggaggtttaaatcttggtggattagaaccagaatacaagttggtcctacgcaaagtgctaaagtttcataagcattcggttactgcacttcacctcacgaccgacctgaaacagttattgagtggggattcaggcgggcatttgctttcctggacactgcctgaagagagtctgcgaggttcattaaatcaggggtgagattggtaaatgatggttcgttatgctgacttaagcatttggccagcctttaattgttgaatcctaacattggcttgagtggatctcaattgttgaaagatggattcatgttcataattcgagagaattgcaaaagaatgctggccagattgaaacagagcaagcaagattgtaaaagaaaagatgatataacggcgtttagagggctatgaaactatatgcgtgtaagagtacaatgtattcactaggtgggtgaagcatccgtgaagaaagacggattttaggtgggagaggagaaagcaaatgttgcccgcggtcttgtattttgggtgactggcggagaatattttgattttgccagagaagtctactgttttactttgatgtaaatatgtgattttagtgtgtaattaatttgtatagtaaaagggtagtcatgaaatggattgtgattgcaatgataggcccaatacgaggcatgatcgtgggatgagtgcaatcctttatcgggaattctttttccatgttgacattggggcatttcttttattgagcccctgaaagaaaacaaggaaattcagaaggtcattgcctgtgatttgtacatttttttataaaaaaaatactcctcctttaaaaaaaaaaaaaaaaaaaaaaaaaaaaaaaaaaaaaaaaaaaaaaaaaaaaaaaaaaaaaaaaaaaaaaaaaaaaaaataaaaacagtggttaatcaccgaatttgtaccctaccgaatcggaaatgaacctaaaacgattgcttgagaagctttcgcaactatccatggggtggcccgtgttttgggtgttatctgcaagattcaatgttccgcccacaatt

SEQ ID NO: 19422 - DNA, 279 bp, Glycine max
  unsure (1)..(279): unsure at all n locations
  Clone ID: PAT_MRT3847_117541C.1
cttctgcgattcgggcaccccaacaccccgnngagcgacagtttaccatncaaacccacggccgaaaccaaacacaagcggaannggagnaacanncaganncccggcgaanngcacgacggcaganacaaanncgggaccaaacacgagaaaaancnngcncngacagaagaggaaaagacggaggcgaccagaaacagaggcacnccngcngacgccccngcaaagcgagcncangaaccngaaaaacaagnngcccangaaagccncaaggancaa

SEQ ID NO: 19423 - DNA, 603 bp, Glycine max
  Clone ID: PAT_MRT3847_117542C.1
ggctcgagtctatacttaaaaaccactcacattttagtcctgcataaacactttcagatcctttttgttaccattacgcaaaatttaccttttagtcttgacattttgtagcgagtagccagaactattagagatccgaaaatacttatccaaaaaggataattttgaagtgtaaggaccaaatgagtaatttttcttttgtttttatctacatgtggaatttaagattttacatttgtttcaaatatcaactgcaaattcaatatgtacttaattttcctcagttatcctaccttgaataagtttaaaaaaatggtagaagtgttaaagtgagtttcagatgttaaacaggttgagaaaatgttagctcactttttcatagattatctggtctggtatactaaaccgcccctcaatgcactttaggtgtttcttgtagggaaagattttggagctcgccctgcacattttttttccattctacaccctgaaagggtcttaggagttgtcacgttgggagttccatatgttcccccaggcccctctctgtatcacaaattcttcctgagggctctacattctgagatggaaggaccgggaggg

SEQ ID NO: 19424 - DNA, 1271 bp, Glycine max
  Clone ID: PAT_MRT3847_117543C.1
tttttttttttttttttttttttttttttttttaggaacaaataaagaatattcattcactagatgcatttgacttctcgagtctgtaacaatacaaaatccccatgacaagggggtatgccttgacttgacaaagcataatgaatcccacaaaacaattgtttctgtacacgcactaaatctatctttttatacagatggacatagttacaaaacaattggcctagttcccaaatcaatcatcttgcatgttaccggacagcaaagccatcaaacgtgttcttcccaatttcatgtcccacatatgctggccataccatatgtcatgatggaaaagctctatacaggttggtgaatactcttcacaacattccgaatctcggggaagatggagacaagtgcaagttccaaaattgcataagcaagttgcttcacacatacattagactgactaaagtagtatatatcccgggcgcaacgtctgtactgcttatggccgattaagctgactaaagttgttggagctccatcaaacagcagtttcttgatgtcacttgctctacgagcagcctcgagctcttgctcaaaagaccctgactcagatttcgtgatgttgcttccaccagatctgctcattgttggagaagatttttttatcactgtcactaattatctggggagtcccaactcttaaaaaaaatgtaccaccgggccataggacatcttggacccaccgaatcccttgggaaacagtttcctctctccggagccaatgaatctgtctcaggagccaatcatcaattgcatcttccatcaccaactgtaatatctgttttgaaatccaatagacctgccttcttatccagcctcttttattaagctgaaatatgttgtcaaccaaatccaaaatggggacactaacattaggcggggcccactcaggtggcactccaactggatcctccaaattaccatgaatcagaatgaaatttgtagcaggaataccattgccagccctagcttcaaccaccatatcatgctttctatcaaaatccaagttcctggactcttcatcccaattgcttattcgtgatgagtaaccctttgagatcaatgcattgtaagaatgcaatccactatcttgtgctgcttctctatcaatattctcacggtcaaaattgttcctttcaccttcctcattatcagagctaacactttctgcagtactttgccttggaatgcttttgtcgatttcatcagcattccaggac

SEQ ID NO: 19425 - DNA, 641 bp, Glycine max
  Clone ID: PAT_MRT3847_117544C.1
agttcgatatctagactggcatgaatgaataaaggagaaaataatgcattcttaacttcaactatactcactctctccattgctacccttcttcaaatgcctatttttaataagaaaaaggtgtgttggggtagggggaaaagccttacagaaacttcttcatatgactgataacaatttgttgaaacaacaaaaataggattgtgtgaaatctattgtcaagaacagtacaaagttatgagaaatcatcttgcttctccttagccttaggagttacataatgttacattacttcttgaaaaatagagcaatgatacaacaaattaaggtccatatagagtaagcaggtgattgctaaagcttctatttcagaagaatgagaatggagcaatagaacaaccatatagggtgcatataataagtgaatgagtgaccatatgaagtccctatttctaaagtataaataacagagaattggaacgaaaattttcttttcatttgacaatttgagcttctttgaatttaaagtttctcatgaatattggaatgaaaaataaaaaataaatgaacaaattattgaatcttttgtctcatgtctatgatatagaattacatcaattcaagcatgcatcacacaattc

SEQ ID NO: 19426 - DNA, 577 bp, Glycine max
  Clone ID: PAT_MRT3847_117545C.1
tttgtctcgtgggcggacgcgtgggatacaaataaaaaacaatggcgccaaaacgaaaaccttcgtctccaatctccattggtaactgcgagattacggtcgaggctaaccgcttcacctgcaactccgattcaaacggcgtcgtaatctctcttccccgaagcgggaagatcaaagtgtcagcagtggctccaaaccgtggaagcgcttctgaggatttgaggtctggcgataaagaacacgagttcgtgctagttaatcctaaagatgttgatgctattagcaaatcttaccttcaggaagtattacagatgtatacgacagagctacctggaatgaattatgccgcgaatacaggaaagcaatcaaagtttcttgagagatgtgtgactaatgggaaatatcgtacactacttatcaaatccacttttgttggaaattcaggaaaggttatagctgcaattacataccaaatcatccctgcagatacagaatatgcagagatcccacttgcagctgtaaatcaatctattaacggatggttttggccattaatgttttagagctaaggagagac

SEQ ID NO: 19427 - DNA, 299 bp, Glycine max
  Clone ID: PAT_MRT3847_117546C.1
tatatacgagctccgacgtagcatgcatctcgtgcgtagagcagcgaactaggctggaggcgccctgtttcatatcaatttttttacgacaccctcactcacatacatatctctcgtgcagcaccatcctacctagctcctcactctgaaacaccaagaggcgttagagcggccgccgcagacgtcaccatcagtgtcgacggatacaagactcaagcaacttctctggactctacttctattccagttgatgcatgaccaacctcaccctacattccagaggtggggctacaaatcct

SEQ ID NO: 19428 - DNA, 310 bp, Glycine max
  Clone ID: PAT_MRT3847_117547C.1
gtgtatttttttcatgacaaacctatggtgcttgcagagctttccctagaaacgttaacactgctgagggatgcttcgagctcaccagtcctagagtccttcatagcgagcacaccctgtagatccttcaagtggctgcccacattgttgatattgtgtggcatgctcaagacctgctgatctaaggaaatggacgcacattgactaactctttggggaacagactgaccagatagcgtggactgattaagttcaggatcaatcgttgtaccagcgcattcacggttacactgacctgacgaatagctct

SEQ ID NO: 19429 - DNA, 548 bp, Glycine max
  unsure (1)..(548): unsure at all n locations
  Clone ID: PAT_MRT3847_117548C.1
cacgcgtccgagagacttgaacctgtaagcatggctcagcagcaaagaaatgttgcttgcggcaaacaaagttcttgcggttgactggaaccagacggtgtctgggacaacattgtcccttctcttgtggacaagacgtcagctgagcaagagttttgaaaaaatgacaaagagctttagctgtcctaagaaacaaaattgcaaagaatttttacgtgtgcctgagtcaaattaaacattaagcgaggttatgaaaccttggagtccaaaacatcaatgcttgaatgagaataagaaattctaaggaatcctaaaatgtacgtgattggggtgcattggatgggtggcgtgggtaaaaccacttcttgtgaatgaattacttggcaagtaaagaaaatggatatttggtgctgtagccattgccgatataacgaattttaagatgtgaaaaaaattcaaggccaaattgctgatgcgttngatttggaacttgaaaaagagtcagaaagaggaagaacaacagaacttgcgtcaaaggataaaaagga

SEQ ID NO: 19430 - DNA, 442 bp, Glycine max
  Clone ID: PAT_MRT3847_117549C.1
gaagttacatacacgctccaattgacaacctgaacttagtgctctcttgaacatatatatatatatatatagatatgtctatacatatatatgacaaaggctggaattataatacaggcgagctgcgtctataaaacatgatatatttagatttggggaaaatatggcttcacggaaaatgattgactattccgtctgcacctgactgcacatacactatggtggaacatacatcactggatgaactacctggtctctcctcaccaacgggatcgaaatgtgtatcataggcgtcagcagcctaaacaaaagcgactgcacccgttgcataatgtcaaatcttggaaaatattgagtgtgacacctttgtgtcctctgccaatttttaaatgaatcactgtgccgccataagagcacgtgctgcgagcccctccgatgacca

SEQ ID NO: 19431 - DNA, 750 bp, Glycine max
  unsure (1)..(750): unsure at all n locations
  Clone ID: PAT_MRT3847_11754C.1
cggaattccccggtcgacccacgcgtccgcggacgcgtgggtgaaaatcgaaagtaatgttctattagttcagacaatgtttttattttccatggaagtgaagaaaaagttcactaatgtagagaccttatcctccttaatgtattatcatgaggcataccgttgatgacaacttagcttaccttttctgttgaagtattcttcatgtctaattgtgggcaccctatgctaatcctagcatcaaggacaaatacatatgcaacgtgtgttttagcattttagtattataagaatttacactatttctcaaataaatgcaggggtggatttttttaagcaattttgtttcctatacttgatattttttaatagttttagttcatgtggtcactaataatgtttttatgacataacgatcacattaaccgtctattaacttgcaatatcatcaaatagtttaacaagataatcacatataatttatttttggtaaattatattttaaatttttcattaactaatttaaatccatcaataaatatgagtaaatgatggactaaaaatacagtttataaaaaaaaattatacatgacaatcattgtcagagtttttggtgatagtgattggtacgtagaaaaaaatgtggttatgattagattaaaacgattaacaaangaaggtataagaaataaaacactaaatttattttagaactanaaagaattcatactaaaatttaggaaaaaaata

SEQ ID NO: 19432 - DNA, 449 bp, Glycine max
  Clone ID: PAT_MRT3847_117550C.1
ctttgggctgggttgggtgcttaaatggtcgtcagaagatgatcgaagggggcgcctgctgccatgtgagtaagtactttaaaatgtctatccctccatcgtccctgggccccataccacgacggagctctaggcgaagtatgtatccgccgctaaagccacgggctgcatcggacttacaggatacgcaattcacgtcagagcgaaacccccggacgactagacttgctatactacgacgaacgcgaaaggattcgcatcagaaggacatacctctatttcatctcagctcgacagggaagcacgaacaacgtatccgactgccctcaccggtccgttcataaacctcaatcacatcacgcgacccacgtcgacaccacacggcacacggcggacgctcaacgccccagtctttcaccccaacggccgctccccggcccacatccacc

SEQ ID NO: 19433 - DNA, 439 bp, Glycine max
  unsure (1)..(439): unsure at all n locations
  Clone ID: PAT_MRT3847_117551C.1
gtattcataatgcatgtctaacctataagcttatagcatctacagaataagaaatacatatacgagattctttataacccattgtccatgaatctagtaatattaacgaagggttcattgagttgtagataggttgtttttataatcattgtttcacttaaacttattcagtggtaccagtaacttagttttattgtgttgcctgtttaacaaacatgtcatgttttggctaggaactagacacaaacaaggtcttactgttggtataactggaaatggaaattacacaaagtatgatcattaatatcaaagggtagtatatgtgcatggattttttatttaagttaaattgttatatttcaataggattacaattatattattcagaagtttgtgtttctgtatgaatggcgttcacttagttntctaattcaattta

SEQ ID NO: 19434 - DNA, 336 bp, Glycine max
  Clone ID: PAT_MRT3847_117552C.1
caggaaatttggtctttggtgtcaaattgacacccttaaacaatatgtgtgcatatgggctcaatcctggtatttcaagttctcgtctcttgggcacacattcctaagtccatttcacagcaaactagatcggaatcaaatggcaacagtgagaacaccattgaatcttgattctagcacgcagagcttttgtcagttttctattgaccttatcggtggaggaatcttagcggacaaaactggagatcgtatcacacttatacaaaattcttcaattagtaacttattgagagttgcttcttggaagaaacgctgtttaatgctcaacattgtgat

SEQ ID NO: 19435 - DNA, 504 bp, Glycine max
  Clone ID: PAT_MRT3847_117553C.1
gtgcaactggttgttttatataggtcgttgtttttagtaaatcttggatttcatcccaacttttatttgtactgtaatttgtgttttacaattaataatgaaattagtatttatctaaaatggaagcgaagcatgcaatgagaaaaataggtgtgtattttagcaaagtcctgttttgagaattttctgtttaatatattatagacaatcaatgcatttctgttctttttttatttttcctttttctttgttgcctttagcatgttatagagctcaaacccaatgctcagacaggttccaatgcctaatccaatctgacaaaaggaacaaaaccaaggggagtctgattttataataaagaagatgcaaaaatatgagttatatgattaggctttgatgaatctcagagaatttgagggttaacttcatatacaataatcaagaaattattttgctccttgttttagagatcagaataagctatccattcttagcatatctgca

SEQ ID NO: 19436 - DNA, 600 bp, Glycine max
  Clone ID: PAT_MRT3847_117554C.1
ccacgcgtccggcggacttaagctgcgggaaggtgtacttgatctagtttacgccctttgttcacatgtctgtaaatgtggcgttagtcttatcttacgtgtggaatgcgaggtgtgtagaggtgaggactctgggtcatgcgactcgcctcggaatctcttgcattgctttgacgaggcagatggtatacattttcatgactctgatgctgaggtggtacgttttctcacaatttcttatttaaatgctaatctttttagagattctcatactatgcggattcaacttcactgtttgtgacaagcgggacgtttacttttttgctgggactgtggtggaattgatagactgctccctcatgtcagtccggatgcactaattaatcatggtgagggttaagactttattcttatggctgaaaccagctactcaatcgacagactacgaaatctctatgatcttatcatgaagggttgatttgcttataaacatgcaacattatatttctatgttgagtcattacattttgtagaagcttatgatgctcagagaagtgtacaagtgtatgagtatttttcattatacaagtgttgttttgc

SEQ ID NO: 19437 - DNA, 278 bp, Glycine max
  Clone ID: PAT_MRT3847_117555C.1
cagcaatactacacaacttgctactttcagaaaacttttttttagcttcaccgatgacaacagaggaagaagggaactgggatttgggtaagttctcctccactgtttgaccaaattctcagtgataaatatgtgtgcagatccctagaagagaaaacgctgactttctttttaagtgtggcacataaggatctgcagaattttccgtagacaaagaaaggatcttgtgtctttttgtccatatccaatgttatatgaaccaattgtattgttttata

SEQ ID NO: 19438 - DNA, 851 bp, Glycine max
  Clone ID: PAT_MRT3847_117556C.1
cccacgcgtccggaaaagcgaaaagggttttgcgttgaagagaagtagggtttaggtaataggtgaaacggtgggagagaagcagcctcaacctgaatctaaggtactgcaatctcttatggtttctattggttcaaaaacattggtgtcaagaagctcaatgggcgagcacgactatgaacccctcaaacaaggcaaaactaagaggaggaagcataagaaaggaggatccactcatgcattcgattccaactccttcacttctccgcctcaactatcccgtgttaggaaacagcttgaccctgaaacaacccaatacttctctgaaatttctaatctttttgaaagtgacggggttgaattggaggatcgatcacttatatgtgctaatgctctcgaagaaaccaaggggaaagaattcgaaattgcaactgattatattcttagccacactctcgagaccattctccagggctgtgatgtacaccatctttgtgatttccttcacacttctgctaaccacttcccctatattgcaatggatagatctggttctcatgtcgctgagacctccatcaagtctttagctgttcatctccaggacgacgatgacgtcgttcgccctctcgttgaggaggcgttaaccatgatatgcaaggtgattgcagcaaattctgttgatgtcatgtgcaactgctatggttctcacgtgcttcggactcttctttgcctttgtagaggagtaccattagataagtccggatactatttatcaaaatcaactacagtattagcagaccggttgaattcgaaggagttttcttcaaaaaaatatgatgcaacaaattttc

SEQ ID NO: 19439 - DNA, 326 bp, Glycine max
  Clone ID: PAT_MRT3847_117557C.1
cagaaaacggatcgtttcgttggactgatcagatgcagggctaggagcgtagcgtagagataacggcgccatttttaacggtaattggtagaaattccaacttggtctcttgcttactaaatataggacctaataacgattcgctcttagcacttgggtatgtctcgattctgatgtcacacagtcatgaattcatgtaaccgtgacacgaattggtgatatttaacactgctatgcatatatattctatggagtaaaatttgtctattatgaaggcaacattctgaagacgaattattgctggtacaaaaggcactgagacatat

SEQ ID NO: 19440 - DNA, 219 bp, Glycine max
  Clone ID: PAT_MRT3847_117558C.1
ttggaaattcatttgtgttagtggttattgatttttgaaaaaacaagttactgcttaggaatgctgccagggctcaatgaggggttgaagtcatgacattaaccgtgagatgaacctcatttttgcatacaaaaaccctgtcagaaaaggcttatttgtcctttgatagtgattttgattttgcaatcttatttattcaaattatgtacggataattgg

SEQ ID NO: 19441 - DNA, 447 bp, Glycine max
  Clone ID: PAT_MRT3847_117559C.1
ggtgaaaccggggcaaacaaaaccaaaaataattaaaccccccgaaaaaaccacaggccgagccctgggtcaaaacgggagcccaaataataccaaaaagaccggtttttttttatgcaagttttcccccacaattggggatttctagccttaaaccgggttaccccggggaaaaagaccccaaaagggatggccgaaataccacctttgcattttacccttgacccttcaagaacacaagagcccccaggacccacttttggtattccccacatttgaaaaccattggaggattatgcaaccccccacccccctgggggggggtgggtaaccaaacaaaaaaccccggaccttcccctgaaagggggccagaaaattgggaagcccttcccttcaccctttttggcggggcctaaggtcccacaaagcaagtagcttcttctgggg

SEQ ID NO: 19442 - DNA, 286 bp, Glycine max
  Clone ID: PAT_MRT3847_11755C.1
gacccacgcgttcgggctctgggaagaggcagtgcagcagggactagctactttgcttcttgctgcttcactctgacatggctcgagctgccacctacacagcttggagattttagggggtttggaactggaacactagttgcctaggaccggaggaaagctcgtttcagagctggagacacactgggctttgaatcatagctcatgagactcacagtgtggtgagcggcgaacaaggctggatatgatagctgccagacttcatgaggagccgaagtgtataagt

SEQ ID NO: 19443 - DNA, 181 bp, Glycine max
  Clone ID: PAT_MRT3847_117560C.1
ggagtccttgccttggaccatattccaaaggggcggggggaaaataatttggaatcctgattaatggcttggcccaaatccttccagcttaaaccttgccttccaagggggggttgttgtccaaaccggaaaaaacctgtcatagaaaaaccctgaggaagcctttttgggtaaagggccc

SEQ ID NO: 19444 - DNA, 467 bp, Glycine max
  unsure (1)..(467): unsure at all n locations
  Clone ID: PAT_MRT3847_117561C.1
gggggaaaccaaaagggggaaaatttttattaaaccaaaaaaatggggaaaacgggtgaagaggggggcagtatttttcaaaaacattaaaaacccctacaatttttggggggggggaagaaaaaaaaagggtgcccacgggcaccccaaaaaaggtttaaatggaaaaaatacaggttttttaagaggggggggggggtaaaaaaaaataacccccccttccccccaaaaaagggaacaaaaaaagccggcataaagggggttttagtatggtttgttaaacaagggggtttactccttaagggggttttaacctgggggggggaagagggggcttattttttttaaaaatttttttttccgtccttctngaaatttgtttaataaagaagtttgggaagtttttccggaataaaaatttttaaaaacgccttttaaggaggggaaaccatataaaattggttaag

SEQ ID NO: 19445 - DNA, 397 bp, Glycine max
  Clone ID: PAT_MRT3847_117562C.1
gcccccggccttttggttaaaaattttattaaacccctttggtaaatggtttaaagggggttccggagtcccctgggaaaaaagagcccccctaaaacgttttttttggtttttacaagggggggatccgtttccgaaaatttccaagggggctgggttaaacccctccccggggaaggaagggggggttcccacaacaccccccggggggaattaaaatgggggggggggggtccccgttccttccccccccatttgaatttttttaaagaaaacccaaaaaggggtgggaaaaataaaagggccctaatatttttggggaaatccatttagggggggggggggcatatacatttggtttaggggggcctaccctatttttaatcaaagggggggg

SEQ ID NO: 19446 - DNA, 330 bp, Glycine max
  unsure (1)..(330): unsure at all n locations
  Clone ID: PAT_MRT3847_117563C.1
acgtaagctcggaattnggctcgagctcgagngntgctanctcacttcttagtncnntgtggcnctntnccatganggcctcancctacatctccaagagttctnttctngagtnctcttngtaactactntccangattntacatttganttcagncaggaagtngtctgagtncaganncccaattgcagntccaatgaccacanaggccnncttccntcagaggcannnttcntccgtnaacctnanttggnacnnnaagttcngacctcttcagaaagccatgttgctganttcatcacctctctctctctccaaacccctcaccg

SEQ ID NO: 19447 - DNA, 442 bp, Glycine max
  Clone ID: PAT_MRT3847_117564C.1
atcttctaactcgggttcatgtgtttctcatgggagacatttctgttcatcatcaattcatgccattttgttacccaaaatttcaattacgtgcaacttttacattttctcccatctctttttcacttacttcttttttcccactgcttgattaattcacctcatatatgttttttattttatgtttatctcatgctcacaatgctttttatcctttgtcctctagctgaatttgatgagataagataaacccaggagaaaactctcctctctctctctctccttattttttttttcattttttgtcttctccttgtgtatcaggaaaatggcagagcttgggtatcacagaagctccaagaagtgcaaagaaaaattcgagaacgtgtacaagtaccacaagagaaccaaagaaggtcgaagtgggaaacaagatggaaaa

SEQ ID NO: 19448 - DNA, 300 bp, Glycine max
  Clone ID: PAT_MRT3847_117565C.1
cccacgcgttcgactagctagtgttctataagttcacgggcagttctgaaaagggggttgcacggttttgcttgttgtagttatcttcatagcggctatacttctgatctctactgaggctgcacccaatgaatacgaaaattctaacaatatacatgggaagcatgcttcaaatgggttatatgatagccaatggggttacagttgttggggtggaccttgcaatcgccgctatgctgggccttattatggtggcggcttgagtgggccatattacggcagtcgttggggcctgccctt

SEQ ID NO: 19449 - DNA, 2931 bp, Glycine max
  Clone ID: PAT_MRT3847_117566C.1
atcttctaactcgggttcatgtgtttctcatgggagacatttctgttcatcatcaattcatgccattttgttacccaaaatttcaattacgtgcaacttttacattgtctcccatctctttttcacttacttcttttttcccactgcttgattaattcacctcatatatgttttttattttatgtttatctcatgctcacaatgctttttatcctttgtcctctagctgaatttgatgagataagataaacccaggagaaaactctcctctctctctctctccttattttttttttcattttttggctaaaaaatttgaaagaatacacaccctttttgctctcgcgacctttttaatttttctcttggtctcaactgctgtaagtaattgctgcggcgctgtttcggaaaagagagagacccaaaagagactatgctcggggactcagctgtgctgggagcaggaggaggaggaggtggtggccgcggaggaggagtagaaagtggtgcctccgccgatgcagtggcggcgacggtgaccgtgacacatgatgtggcgacgacaaccggaggaggcggtggtggatcaaataattcgggggacgatgagaggggtagaatcgaagaaggtgaacgtagcttcggcggtaaccggtggccacgacaagagactttggccttgttaaggatacgctccgatatggacgtggcgtttcgagatgcaagtgtcaagggtcccttgtgggaagaagtatccaggaagatggcagagcttgggtatcacagaagctccaagaagtgcaaagagaaattcgagaacgtgtacaagtaccacaagagaaccaaagaaggccgaagtgggaaacaagatggcaaaacctatcgtttctttgatcaactacaagcccttgagaaccactctccaacaccccattctcccaacccttcaccaaaacccccacaatcagcaccatcaagagtagtagcatcatcggtgtcactaccaattgcaacaacaacaacagtgtcactaccaattccaacaccaacaacagtgccaatgcagcctatattgtccaacaacgctatactcactagtagtgtccccaatatcactgttccatcaacaacaccactccctataaccattcctcaacccattctcacctccccatcaataaacctcacaatcccttcttaccctccaacaaaccctaccaatttcccaccaccaccaaaccctaccctaccatcctctttccccaccgacaccttctccaattccagctcctcctccacctcctccgaggaaacattggaagggagacgcaagaggaagcgcaagtggaaagatttcttcgagagactaatgaaagaagtgagcgaggggcaagaggagctacaaaagaagttcctggaagccatagagaaacgcgaggacgacagaatagcaagagaagaagcatggagagtacaagagatgaaaagaatcaatagggaaagagaaatcttagcacaagaaagatccatagccgcagccaaagacgcagccgttatgtcattccttcaaaaaatagccgaacaacaaaacctcggtcaagtatcgaccaacatcaacctcgtacaacaaccacaacctcaattacaaccgcagccaccactacaacaacaagtgacacaacctagtattgcagcagcacaacctcccgtacaacagccaccgcccgtggttgttacacagcccgtggtgctgccagtggtgtcacaagtgacgaatatggagatagtgaaagccgatataatagtaacaacaataataacggcgagaatttcttggcaccaagttcttctcggtggccaaaagtggaggttcaggcattgataaagcttcggacgagcatggatgagaagtatcaagagaatggaccaaagggtcctctctgggaggagatctcagcctcaatgaagaagctcgggtacaaccgaaacgcgaaaaggtgcaaagagaaatgggagaacatcaacaagtacttcaagaaagtgaaggaaagcaacaagcggagaccggaagattccaagacgtgcccttatttccaccagctggacgcgctgtacaggcagaagcacaggggcgaagagagccccgcggcggtggaggcgaagccggagagcgcggtggcgccgttgatggtgcagccggagcagcaatggccacctcagcagcagcagcaggatagggacatcacaatggaagacatggagaacgaagatgatgaatatgaagaagagagggaaggagaggaagaattagaggatgatgaagatgaagaggatgaagaaggtggtggtggtggtgggaactatgagatagtggcaaacaaaacaagtggtggtggtggtgcttctgctgcttcagtgggggcttcaacggagtagtagtgtgaagaaaccaggtttagcgtgggggtgggtcagagagagtgcaggggttgtcggaggtggccattgtggtggagaaattaagaatttgaatattcacgtacggtgaagttacacatggcaatggttatggtatcgacctgtggtggaaggaggatgatgaggttcttggttggtactttgttgtagcatatagtcagtaagattatatgtttttttttcttttctgttttataaaaaatttgtttattttttgggagaataaataaagtccgatgagagagggaatttaagatacagaccaataaagaagagagggaccttaattaaggttgtattttttttttttttatcttcatcttatttttttttaatgttcgttcttggtgctgtaaatgggaggagagattaattcgggttttgtccttttcttatctctttaagttttgacatcttgttactcttcaaatgactgacattgacttctctttc

SEQ ID NO: 19450 - DNA, 434 bp, Glycine max
  Clone ID: PAT_MRT3847_117567C.1
cgacccagcgtccgaccacttttcgaaccgactgcaaggggggactgcaggggatcgcactaacacctgtgatagtgtctactatttaacaatccacacccaaaatctgggcgctcgaaataggacatctggcaggacgatcaagaagggcgccggaggtagaaagggcggaggcccaaataagaggccggttaaaacgttcgggggggcgggctccaataacccgtcggaagaattggacaggattggaagaaaggaaggtacgctcaggggctccggaccgctgctcccgtatacttggctgcctatctggaatacctctctgccgaggtgctagagtcggctgtgactgccgcacgagcacggctagaagaacaagactatctcaagacacgtgcttacgacaaagaggaacgataatgagttgcggaaat

SEQ ID NO: 19451 - DNA, 301 bp, Glycine max
  Clone ID: PAT_MRT3847_117568C.1
acttaactcgtgggtggttctagaggatatccatggattgtttggtgatgccagtttcattgatccggcgtcgttcgacgggttgacgggtgggttacatggcacttccgaagagagtgtttctggtggagcctttcatttttagtggatcacatgttgtggctcatgcacaacgatgcttcttctttgttccagctcaatttgaaggagattatataaaagtaatcgcagctactctgttttataaattcccgatacggaaacaacacttactattatatataacatggtttatttaccg

SEQ ID NO: 19452 - DNA, 225 bp, Glycine max
  Clone ID: PAT_MRT3847_117569C.1
ggcgaaaggccactgttttcagacaacatgtcatccaagaagatgccgcattggtgattcaatgctatattagggggcatttaactcaaaattggaatttaggtggtacttctaacctaagtgaagtcattcctgctggctacatttcaagaccatttggctgtcgtagttttcaactggaactatttttgctttcagttgtgaaattgcaacgatggtggaagg

SEQ ID NO: 19453 - DNA, 430 bp, Glycine max
  unsure (1)..(430): unsure at all n locations
  Clone ID: PAT_MRT3847_11756C.1
gattcctgcacctgaggctgggagtattgtggtatgggacttgactgtactgggttgggaggtgaactacaaagaggaatttgtaccgagtgacgagggttcgtacacgatcatcattcagaaggggaagaagatggggtctcaggaggaggctgtgcggaattcgtttacaaacaatgagcctgggaagattgtcctgtcgatagagaacaaggcgctgaagaagaagaaggtcttgtacaggtacaagacgaagagttgttgagagatgtggagaagcagttcatttcttagtttcaactatgggaagggcggggtttatttgctccttagatagtnattgtgtgcccgatggatgggatagtatagaaaatgggatgggtcattcctttaggaccatattggcatttgtttcttgggttaatttctc

SEQ ID NO: 19454 - DNA, 760 bp, Glycine max
  unsure (1)..(760): unsure at all n locations
  Clone ID: PAT_MRT3847_117570C.1
gcaagataaannnnngtcaagtaaaaannnattcttatttctaatgtagaaagaatagannnagatganacatatgtaagnnngattgggaaantgtacacgtataagttgacatatatgaaaataagattaaaaaaactnnngatagatttttatttttgtaattatatggaaccacaatatttactgccgtgcaaggttcatctatcacatgctaaaatgcatttaatgttcatcaacattggtgtctaggatgttgtatcacttattataatcctagggaataatctctagtcgccactggcaccaagtctaacaagaggctataatatatggatgatatgctgaacctatgaactatgtctactaaattatgagtttttcaatctctaaattctctctaaaagattctgctactatatctgtcttccttcccctcaaataacagtgtgcagagaaacctaatgaactggagtactgggcaacacctaaaaccaaatgaaactgcatctaaaataaccagaccattttaaagtggtttttatgtggaaagagatgtacactaatacttctattttttatgaaatattcaagtagaataggaattcaatacttgaaaatgtaaagttaggggtacaattgggcagggtttgaggtgttctgaactccaaaccaaattcaatcaaacaaaaccaggttgggttggattcggtatcctttttttggctagtcaacctgatgtgtattgggtgggnnnagg

SEQ ID NO: 19455 - DNA, 219 bp, Glycine max
  Clone ID: PAT_MRT3847_117571C.1
attgtcaaatgggccctgtgcctcaaaattttataggaggacgggccaatactaaaaatattctttgagattgttaaatttacttggtcctctttgcacctacaaactcttgaatgttaaaattgatccacgcactgaccatctctacttttcggttttggcttcaaccatcagcctgggggggcctaactgtttacttgccctggttggtttgcctcc

SEQ ID NO: 19456 - DNA, 293 bp, Glycine max
  Clone ID: PAT_MRT3847_117572C.1
tctacagttgttataacacgacaccgtgtgccacttttcgatataaggcgatctaacagtggaactgctggtatatgacaactaattggactgatatggcttcctcaaaatcatcataccttgttgttgccactcttgacaatactgacatcggcataatttctctattcaccatccttaaattcatggcgtagcagcccactaattcttcctctgatcacattacccaatacgctagtacttgaagaatattacactctatacgcgtttttacaccacttggtaggataaaa

SEQ ID NO: 19457 - DNA, 366 bp, Glycine max
  Clone ID: PAT_MRT3847_117573C.1
gttgtgtgattattgtgtagtttttgtggcctaaaatggaaggccatttgagggtgttcccgaaacaaaaaaccagaagacacagctccccattttttgtgaaaaagaaaaaataggtgtcccgggttaaaaaaacctttggccccctatttttccggggccccggtgtaataagggggggaacaaaaaaacatggtccaaaagccctgccctggaaaaaaaacccaaacccccgtgtttttgggggggtaaaaagggggggggggggaaaattcccccttcccccttttttttcccgcagaggttgtttgaaaaaaagaacgagccccggcggcaacacgaaaaacccgccttgtaaaaccccgg

SEQ ID NO: 19458 - DNA, 322 bp, Glycine max
  unsure (1)..(322): unsure at all n locations
  Clone ID: PAT_MRT3847_117574C.1
cgcangcacgcgtacgtaagctcggaattcggctcgagcgagaagacgacagaagggggnggntngananncganaangnntanaatgngtcaacgtannctaancgncatagacttcgtccagatgngcaaatatgtagctnatanggangggctggngttgnttggcnacaaggaataaggcttngctggagangattntgtngtggctnatctnggngangtttntccgtgtggaantngtctnncnnacnagacnggattcgatcnctgcagntanacactaaagtccaacaccagattcnannggatctanctgaga

SEQ ID NO: 19459 - DNA, 497 bp, Glycine max
  Clone ID: PAT_MRT3847_117575C.1
ggggggccacccaaaaaagggacaggcccaaaccggaggggggggtaaaaggggaaaaaaggcaaaagagaggggggacaccccccccttaaggccccaaaaaggacagggccccaaattgggaaaacccaaaaaaaggtttccgggaattttccagaaaaaggttacaaattttaataaaagggatctaattttcaacggaaaaagcgggatggggggttccaaaaaaccccttaaaaattttaaacccttctttttctgggacccctccccctttccttgggaaaccagggggagggatattaaagccctcccttttgggggggcaaaccaggggggccccccaaaaaaggggggttaacccccccctaaaaaccgccgggggggtctctttttgtgcggaaaatttggggggggtctgggggggtaccggggggggggcggttgtcggggggggtgggggggggcggggggggaggctgggtgggggggggggg

SEQ ID NO: 19460 - DNA, 1520 bp, Glycine max
  Clone ID: PAT_MRT3847_117576C.1
agtgcacttttcgcccgattctgtgggatcacttttgtcgaatattatttttgttccatacatgtacaaccatgaataagtgttttaaccaatcgctgcaaaatgaaactcacgtgtacacggaagaaagtgctagatttattcctggacatggcatggcttttcatctctaagatttcaagccattgatagagagaaattgttccaacctctagctgattacattgttaggcttattgcatttaagaaattgtccacttttagtcttgtgagccttcacaattttgtttttaatggatgccttaataggttaaggaaagaaaatatttataaattatctttagtcttgattaagtaatgtgagactttttttatgtattagaagagtaaccccaagttgaggacaagaaattagaggacctaatagtcttcactgtgaggttcaagtctttgttttaatgtcaatgtttcaatattaaagaggttggaacaattgagacattgacattagaaggagaacttaaatcacatatccctcaatttcaattgggattattattcaaatatactaaaaaaatcctacatttcttaggaaacaagaccaatgataatttatagatatttttctcccttaacataccaaaacatcttttaaacacaaaatcttcacgccaaattggacaatactttgaatatggtgagcttaacaatactgcagattgaaattggaaatagaaactcctgcatactctgactctcacctcaaattattgaatcgtatagttcaaatttaacatcaaacttaattatcaaagggcacattcaattattgtaatccatgcatgctttcatttgtaaattggtgttatagttatggcttcggaccaaccactatcgatttgcgctgatgaaatggacagaagaatcgcagcaagaatagatggggaacttctctatctaaatggtgcttggttccattcatctacaactatgaacaaaactaaaggccaatcgctgcaaggagaaattcaggtgtacacagaagaaaatgctagatttattcctggacatggcattgcttttcatctctaagatttcaagccactgatggagagaaaccgttccatgtattaggtctaattaaataatgtagatatgagaattcgtaccaagacttcgtgactctcatgagtcttcacaattttgtttttcataaatgccttaataggttaaggaaataaaatatttataaactatctctagtctctcagactcattaataatgcgagacttttcttttttatgtattggaagagtagccctccttctagtgtcaaaattccatcaatctgaaccgagagctattgttccaatacattaaaaatcctacatttcttagcaaacaattccaatgatagtttataaatatttttctccctcaagatatgaagacatcttttaagatcaaaggacaatacttcaaatgtggcgagtttaacaatataatagacttgatatcg

SEQ ID NO: 19461 - DNA, 456 bp, Glycine max
  unsure (1)..(456): unsure at all n locations
  Clone ID: PAT_MRT3847_117577C.1
gaagtaggcgtttccccaacaaatcttacgcctcggcccacccgggttttcccggaccggaacccggaggcccaccaacaccccggatacgcctgtggaaaaaccagcaccggggccggaggggcaacaaggnnccccaattttaanngggggtggccacgaatgttggacaccccacaaaaaaaacgcggaaaaaaaaacccccctggggggggggggggggggaaaaaaaattattcaaatcgggcccacgggggggggcccaagggggaaaccgaggaacccatcggataaacgaacaaggcaacgcgcgaaggagagaaacagagcggaccgggggcaagaaagaatcgccgacccaccagggaaaaggggaacaggggatggcccgccagcggcgggtcccgagacaccgggagaacggggaccacgggggggcgcgccgcacgggcgaaa

SEQ ID NO: 19462 - DNA, 323 bp, Glycine max
  Clone ID: PAT_MRT3847_117578C.1
tgacgacctgtactcctttaaatattatcttattcttatttatattatcatataaagatagtctataatcactagaatttctatatatatatacttacaatataataattctagtgattatagctaagccaatatatatcataatataatatacccttttattattcaaagaattaatggctatgccatataaatttatagtcaaagaaaagaaattatggaattgaaataactcactcataacgccatttaaaagatttacacggtacgcatcgaatcaaataagcccatatggaataaataatccatttgcttgagaacct

SEQ ID NO: 19463 - DNA, 454 bp, Glycine max
  unsure (1)..(454): unsure at all n locations
  Clone ID: PAT_MRT3847_117579C.1
aaacaaaagataagtccatagaatagataaaactaattacacatgtttttcatttttctcatatgtgcacactacactaaaatgccaaacccaataactttatatataacaacatataagtcactcaataacaattaggattacatgcaaaatcaaactagtacatggggataatatgcaaattaacatcaacaaaacgttgacaactccatcaagcagccttttcgcatatcacgaaactccccaattgacaatattctatgctggaaaaatgttggagtttgatgccttttcgccggagaaagcgacggaagtcatggagatggccaccaagttggcctcggacaactccggcaccgaagaaagtccccctagtgctccagttgccactgaaaaattggctgtgtncaaagtgcccccaacaacacattctcagaaacccctaaagcaggaa

SEQ ID NO: 19464 - DNA, 496 bp, Glycine max
  unsure (1)..(496): unsure at all n locations
  Clone ID: PAT_MRT3847_11757C.1
ggattttgtctcataaatatttttaatttatattattttaaaattttacnttaaactaaaatatttgttacgtacaatctacgagaaacttgttaattttcacatatatacaaactgcaattcatgtgatgtacacataattgtacgaccaaaattgatattctctctattttaatccctccggttatacatttccctatggttggaatagtactcttaggactttcctggagagcggtttatctggccctctctctttattgggtgatcaatttatttcattcatatttagtattttttagttaataatataacttttttaagtaatatatactaaacgatattatttttgcaacataaggataagctcatgttaattaaaatatattagataaatacattaacaagttataatatataaaaaagtttattaattataaaattaatatctgtataggcacctaagactaagctaatttttcatgtagatctttca

SEQ ID NO: 19465 - DNA, 450 bp, Glycine max
  unsure (1)..(450): unsure at all n locations
  Clone ID: PAT_MRT3847_117580C.1
agnaaaattacgtaaaaggaaattactaggggaaaattctccacctttactgggatcgcatacacttacagaaaaaacctggccaaaaattgacacctaaaagaaggttttatattactggaaaataaaactggaaataacaaaaaaaagagagggaatcatnntaactacatacaactcagggcaacagctttaaaatacagaatttatgaacatgaacgcaacccttacgctttgacgcgaatcagtactttggagaactcaaccccaaagttggcttggaataaaaacctctaattcttcacacattgggcctgaaagtcttaaaaaaaaaaacaaggcttgggctcaccggttgctgcaacatacctatccttcagatcattacgaattctctcttttttttgaaagcctacataaaccctttttagcttcggtagactccccttg

SEQ ID NO: 19466 - DNA, 345 bp, Glycine max
  unsure (1)..(345): unsure at all n locations
  Clone ID: PAT_MRT3847_117581C.1
caggttagtttaacctactgatgacntgtcgcaatagtaattcaacctagtacgagaggnaccgttgattcgcacaattggtcatcgcgcttngttgaaaagncagtggcgcgaantaccgtgcgttngattatgactgaacgcctctaaatcagaatccgggtannanggacggtgcggccgccgtccntttgccgaccaacagtaagggggcctcggnccccccaaaggcacgtgccgtttggtancctngtaaggcggattaaccctaaganaggcnttaaancgnatttccatggaanggggggnaatcttttcaanggnttaaancggacgggggnttta

SEQ ID NO: 19467 - DNA, 141 bp, Glycine max
  Clone ID: PAT_MRT3847_117582C.1
cccacgcgtccgcccacgcgtccgaaacagaaactcataggcggggcacattctcaacccagaaccctaagagcagagcgaaagtgacaacaaacttcgcgaccgtcgcaagactcggcggcgcattagctgcatccacct

SEQ ID NO: 19468 - DNA, 510 bp, Glycine max
  Clone ID: PAT_MRT3847_117583C.1
aaacaaactatcttactctagaattaaacatcttgtatattaggtacattcattattgtgaaccatttattgttttgtttgcacactccatacgatgataatgttttagcatgttttgtagttactcttatttgtgttgcttataaaaagaagcttttacgcctttatagtcttcggttgtgcacaaaaattccaaaagttcttttttcataggaattggtttgattttctcaatcaaaattccttctttattttcatgttctatgatccatttactcttgcttgtaggtaagaagaggggtagatagagctgaaatcaacagtatagctttgtctccaaatgtccagtggttagcagcatcaagtgacaaaggcactgttcatgtattcagcttgagagtgagagtgtttggggaggatagtgtgactcagccaaatgctgttcaagggcctgcactgtttcatcagaattcttcatcttctttagatcccttgatttctccaaatact

SEQ ID NO: 19469 - DNA, 459 bp, Glycine max
  Clone ID: PAT_MRT3847_117584C.1
aaacaaacaaacgtttcatttccatttctaattattttacgttaccctacccaggtgggggggcatgtaaatacaatatagttaaatttttttttaaaaaaaataagggatctccacaataaattgatttaaggaatcctttttaagcacaaaagggaaaaaaaacccttttgtttttttggggcatcacaatccttttaggtttaaactaacaacgttggcacgttctcagttttcagccttgggtgggggtttttttttattggtttaaggctttgcatcctttgcctgggcttttttttttttggggggttaagccttcacctccttggcctaaaaagggttttttttttttttttcattcccaatgagcaaggggacaaaaaagttgtcaacaaaggcaacaggggttttctttgttttggcctcgacgacattttcctcagccttggttttttg

SEQ ID NO: 19470 - DNA, 307 bp, Glycine max
  Clone ID: PAT_MRT3847_117586C.1
gttaccgcccgcatactgttcttcatccgttgcgaccgacgccgagctcaacgagattctggacgttggcttcgaatattccgctgccagaagagttcgaacgcaacgcaccgcgaccaggtttcttttccgattgctgcgaacgacagaacatactgcacgcttccgaagcctgcaaacacgcgctggacaagaaaatcgggctgcaccttgaagaagccccgcttgacaaccttctcgcgccgagctactcatacctgaacgaaacgctttacgacgtcgatcgcgtggagaggatcttgagtca

SEQ ID NO: 19471 - DNA, 487 bp, Glycine max
  unsure (1)..(487): unsure at all n locations
  Clone ID: PAT_MRT3847_117587C.1
ngatacggccgcgagaagacgacagaagggctatgtatatcgggagtaaaatttattgttttctcatttagggagtaaaacttaaaatggagacacctagaatccaagtgaataatttaactttattttattttcggaacgtcattatattctaaacaccccggactctccttttcttatcgaaaaaaccctggactcttagaaatgagggaagcagatactataaatgataaattataatgagataaaaaatgtaattatgatgcacaaggatgcaaaaaatgacctgcttaattgtgtgggtgcatctataactatatgatttaactaaatttatcagaaaaaaaatctatctaaaatgaccctccatgaaaaacgctaactaaattaactacgccacgcctatgccagaatccttaatctaactctcccagttggatttttcctgccaataaacgagcagaattgaatgcgagatagctaactt

SEQ ID NO: 19472 - DNA, 291 bp, Glycine max
  Clone ID: PAT_MRT3847_117588C.1
tcggctcgagtttccagatactaattcccaaaatttgttgtacaacagaggctattttcattttccaagccacaactattgcaaaacaaattctttttcctgttaatcattttccattaccctcaaaatttattcaacatatcattttcatcttattctttatcatcataatcactctttacctaaccattaccttcttatacttttctcaccctaattttcacttattacatcatatactactacttataattactttaaaaaaaccacctcaaccaacatattacttta

SEQ ID NO: 19473 - DNA, 250 bp, Glycine max
  Clone ID: PAT_MRT3847_117589C.1
gtcagggatcattcacaagattggggagacccttcatgtgggagggcacaagaaggaggaggagcataagggtgagcaccatgctggagaatacagaggggagcaccatggtgaccacagtagtgaagtcaaaggaaaccatcgatgtggaccacaaacctggaagtcccgtggcaaggacagaccggagcacacacagggatcccgagacaaacggaggaacacgatgaatgacgaggacagaaagcga

SEQ ID NO: 19474 - DNA, 130 bp, Glycine max
  Clone ID: PAT_MRT3847_11758C.1
ctcagttcatagtttactatctgacggatccggtttgagaattggcaatcactgatcctaaggcgctgctggccatgattcctttgtggtctccctcagaaggtgcgcatccgcgagattcgaaaagagg

SEQ ID NO: 19475 - DNA, 1145 bp, Glycine max
  Clone ID: PAT_MRT3847_117590C.1
aattcggctcgaggtttttttttttaattattattatcacgtgggttccaacagaaaccgcgagaaaattccccagaaatctcaacacaggagaagaagaaaaaccaaacacagtttatcaatcaaatatttttggaacatagcacaacaattttcagctctgtacaacgttggatttggttcagttatcgtgtgaggaatattagagcatagaaacatggtggctgaagcagaggttgtgtgtcaacaaaacgtgggtgtgttggatgtgaagcattttccaaataagggaagcgatgttcacgagatcggagacgcagatgctaattcgcctccgagttttgaccgagttcgtgccactgagtcggtctccgccgagttactcacttcacaagaagatgttaagtctgcagacaggatctcagatgctgctctagaatctgcggttctgcaatttatcccatgcatccgttctggtagttttgctgacattgggccacggagatacatggaagatgaacatataaggatagatgatttgtcgtctcatctgggatctctatacaactttccaaaaccaagtgccttctatggggtgtttgatggtcatggaggacctgaagctgcggcttatataagaaaacacgtgataaaattcttcttcgaggatgtcagtttcccacagacatccgaagtcgataatgtatttttggaagaggtagaggattccctcagaaaggcatttcttttggctgattcagctttggccgatgattgcagcgtgaatagttcatcaggcactacggcccttactgctttgatatttggaaagtatgtccatattcatacttcacattcttggttttcctttatttgcacacttttagcagcttacaatcatttatctactttacgcttgatgtagtatgtgcagtttcttttaatcaaatccagtttctcgtgcatgattgagggtttctttatcattagtttaagatttatggtctttctgtattttatttcatatttcttgaaccagcaaatactgggacagattctgcacttgttagtctctaatgcatgaacaactgttatctcgtaaagaggtatgacttgctttctatatttgctttcaggcttctaat

SEQ ID NO: 19476 - DNA, 1860 bp, Glycine max
  unsure (1)..(1860): unsure at all n locations
  Clone ID: PAT_MRT3847_117591C.1
tgctgcttcccatataaaaaatatattggctttcttctagaccttagtgaagagtgtagagaatagtgaacaaatccgcattgaaattttgctcaaataacagaacaataaaggaaagttgcagctggttgggcattatatgcaattggtttgcccatactttggttcaaaataccactttaaccttgtgctgtcatttgcattctgctgatattaaatgtttgtagagcttctttggatcttgcttttgttagtctccaaatgaaatgccaaagtgttctaacaaaagaatccattaaattatttgattgctggtgcagagatatttttgcaacattgctttcatacttaaaaccatgtggaatcatgggaaggcatgcccttccttcgtttgatggcaactatagctttagggccatgcattatgtattttgattggttttgctatcctcgtattggaagcaagttaactaatttgtttggattttttcctttacaaatgaaggttgtctcaaatgaaaaaaactcatgatgatgaattagttgcagatgtccatgccctttcggcaggtctaaaggcttatgtaacatcatacactgcaaagtcactcagcatctgtagggaagcctgtggaggccatggttatgctgctgttaatcggtttggtattttgagaaacgatcatgacatttttcaaacatttgaaggagacaacacagttctgcttcaacaggttgcaggtgatcttttgaaacaatacaagggaaagttcaaaggtggaactttcgcagtgacatggaactacttgagagaatccatgaatacttatctgtcacagccaaatccggttactgctcggtgggaaggcgaagaccatttacgagatcctaaatttcaattggatgcgttcagataccgaacatctagattacttcaaagtgttgctgtacgacttcgaaagcattctaaatctcttggggattttggtgcatggaatagatgtttgaatcaccttttgacacttgcagagtcacatattgagtcagtcatccttgctaaatttattgaagccgtgcagagctgtcccgatccaagctcccaagctgctctgaagctcgtctgtgatctttatgctctggatagaatatggaatgacattggaacctaccgaaatgttgactatgtggctcccaacaaagccaaggcaatccacaagctcgcggagtatcttagtttccaagtgaggaatattgcaagggaacttgttgatgcatttgatcttccggatcacgttacacgggcccccattgccaagcggtcaggggcctactcgcagtacacacaatatgtgggattttaaaaaaaggaacgcaaagaagattgatgtatttgcgggaattaacatgagaaaatattttcttggctcattgttgaaatttatatgctagtggttgctcctgaccaagaaactactacacacgaccagaaccataaatgaatgaaatgaagtttcagtcgaagatatcagtggaaagtgaaaattattttgtgaaaagatatacaaggttttttcttcaatatttttggaagccaaaagttaccttttgaattttaacattgattgattgcgaactatttgctcagcttctgcatgtaatggagcaatggtattaatcttgtggcatgggtaaaaattgtaaatttcttataatatctaaatcacacgaaaagtaccaagaatttagtccaaaaagtgagttttatcttgattgcatgactaatgatttaatatagtttatactgacataaatattaaatcaacntagttatttgtattttcaatctgcagggcatgcaag

SEQ ID NO: 19477 - DNA, 192 bp, Glycine max
  Clone ID: PAT_MRT3847_117592C.1
gggccaatcaattccttcttgcaactaatattggctgtcaaaagaactccttgctttggaaagttctcaccaaagcatcaatttatgagcttgtgctcatgtatttggggtgttgatccaatatgcacatttatggttgaaacgagctcattctggacattttttaatagcagttcatcaaatgatccgtaa

SEQ ID NO: 19478 - DNA, 265 bp, Glycine max
  Clone ID: PAT_MRT3847_117593C.1
gttattcatgttgaaaatagtaatgtttttgcaagccaaaaagcacaagattgagttatggacataaatatggaacgaaatcatgtgaagataggtaacaatggggacttttgctgttcacaaccaggagcgtgagatgggagaaagtggggacgccgggttacttaatcacccactcagcaactctatgagaaactagaggggaccttcgaagtaaatatttgtactatgggtgactatttatagaagaactccctaagcaaga

SEQ ID NO: 19479 - DNA, 138 bp, Glycine max
  Clone ID: PAT_MRT3847_117594C.1
tgtctttctagaagaggtttacgtatgaataagcaagatggatttggaagcataaaaagagcatgaagctgcataatgtggggcctcactcttcctgtatctacccaccattttcccctttgttcaacccaatgaata

SEQ ID NO: 19480 - DNA, 259 bp, Glycine max
  Clone ID: PAT_MRT3847_117595C.1
acgcgcaggactttacgttgcatcagcattattctaacgatgcgacataggcgggtttacgaccctgggatatggtcgcgataatggcactgactgaagacaccattcaacaatcttagaaatctggattcgcaatcatactcaacatgctcctgacagtagtcactagatacttgtggctcacacggctgatatcgcttaaatgtaaaggactacgcctacctgcaaaggtcgagcccttactgatgagtctcgtatc

SEQ ID NO: 19481 - DNA, 482 bp, Glycine max
  unsure (1)..(482): unsure at all n locations
  Clone ID: PAT_MRT3847_117596C.1
tgttcggcttgcgttattattttttttggctaccaaactatggggagcgcactccgatcctctcataggaacagaaactggtttctcgcgaaaaatgctttggtccccttctggagcatacacaaatatcctttccaaccacttccgaattttttgggttggaatcaggacccttatgcagcattgggatagactggggaatgtacttttccgacatcatcccttacctaccacaaggttcggtcctgatgaatccgccccacctactagttggggctagagtacgaagaaaataccgtcgatttctcataccaactgtactgtgagaaatccttcggtttttcctctttctctatccctattgatgaagtggggcgtatgctatcaagacaaaaccctgtgcgatgtatcggttggaatncgtattgttacattccaaatttccttcccgtgccctcctagagacccgattcggatcccaa

SEQ ID NO: 19482 - DNA, 177 bp, Glycine max
  Clone ID: PAT_MRT3847_117597C.1
gagaagatgacatagtgtgtatggattctactggtgcatgtgacttatgcagggatgtctatgcaaagtatgcaagagggatcgactaccagtccatgaaagctgcgttatacgtacaaatactctcaactgtggaccagctattttgggacttaccgtagactgacgataggaact

SEQ ID NO: 19483 - DNA, 218 bp, Glycine max
  Clone ID: PAT_MRT3847_117598C.1
gccaatcgttcttaagcctgcatatgagattcttgtcattctgaatcaaacgtctctgacgacggaccggtttcgcgattacgaagggcatgctgtataatacgtgaatcaagcatctgatttacactataaggcatcctatgcgataaagttacatctctacctgtacgcataggagcatttcacaccgcatctgacataccaggagacccctcaga

SEQ ID NO: 19484 - DNA, 407 bp, Glycine max
  Clone ID: PAT_MRT3847_117599C.1
ggctcgaggattcagcaagtgcgttttggaagcattagaccgaaatacttcgagatggcccgtacaaagcaaactgttcgtaagtcaactggaggaaaagctcccaagaagcatcttgcaaccaaggctgcacgtcagactgtaccaacaactggtggtgtgaagaagcctaattcctatcgccctggaactgttgctcttcgtgagattaggaaataccagaagagcactgcgcttctttttaagaagcttactttccatgaggttggaaacgtgaaattgcccaggattaaaggactgaactgcgtcaacagagccatgctgtgcttgcattgcaagaggctgttgaggcttacctcgtcgggctttttgaggacactaacttgggtgccattaacgacaagcgt

SEQ ID NO: 19485 - DNA, 209 bp, Glycine max
  Clone ID: PAT_MRT3847_11759C.1
ttgatttaagcacacatgggcattgcgatgaactagctgaaccttgctaaactgtgatctaaaatgctgaattgacaggagtggaaattatcatgggctgagcatgagcttatatccaaaagcctctaggcgaaaagatcgaaactgccagggttgtgggcctgatgctctccgccagcgaaaaggcctgggggtgaaacagccagctt

SEQ ID NO: 19486 - DNA, 430 bp, Glycine max
  Clone ID: PAT_MRT3847_1175C.1
tacggctgcaagaagacaacagatggggcttcttcttaacaattgctctcttttcattcatagtaaatccttttgtaagggtgtggtttgcctaaactcaaagcataattatatgctatttttcaaatgagaactatgacctatagatgttatggctcatgaggagacgacatgctacagaggttgatgttgtaccttattctgattacctcgccctaacctatgcagtgcaaacacagatacgccaatgagtatcacatgtataggttgccaaagccataacagcacctttaatctgattccttgaacataaaaatcacctacccttctgatctaccatgtgtttttattggagagtttcttcaaggatgtgaaattcgttctttggcgaaatactatcttttgaaatcacccatttttttttttgcgc

SEQ ID NO: 19487 - DNA, 488 bp, Glycine max
  Clone ID: PAT_MRT3847_117600C.1
ggcaaagtcaaagaccgttcattactttgcaaacataataaggagccccatcgctgggggccgaacatttttattacccttacattagccccatcctttagaatgcccccccaggaatttttccccggaggaaaaggggagaaaaaaaaagatttaggaccaattttttttagacggggaaacacaaacaggcaaaaaaaggcatagtaccattgttggcacccattgtatggggcctttttttttccaaactgagcccaaaaattgggccggaaaatggtcaaaccggcaaataacagaattcttttattccccggatttattcgggccgaaagctaaaaaaatttggaaaaacagtcgacagacgttttttaatttaaaaaccatgaacctggcaagactcactgggagaagggggtaaatttttaagaggcttaaaatacgcgctctcttgattggtgtatcaagaatttgaaacatttagcgcc

SEQ ID NO: 19488 - DNA, 705 bp, Glycine max
  Clone ID: PAT_MRT3847_117601C.1
ctcccttttttcgtgcgcaaactgttcccgttggtctctttccctctgcacttcacaatcctaccctctcactgtgctatctctcagcatcttcgcaatcacacccttcccagatggccttgcaaacagctactcctccaacaactcccagtgcccaagttgttggtaatgcatttgttgagcagtattaccatattcttcaccattcaccaggttcggtctatcggttttaccaggactctagtgtgataagccgtcctgattccagtggtgtgatgacatcagttacaaccatgaaaggcattaatgagaagattctttcactaaatttcaaggaatttaaagcagagataaagactgcagatgctcaaaaatcatacaaggaaggagtgactgtgctggtgactggatgcttgactggcaaggataacttaagaagaaaatttgcgcagtcattctttcttgctccacaagacaatggctatttttgaatgatgtttttaggtatgtagaagaccatgaaccatcagaactgcctccagttactggagatggtgatgcagctgctgttacagtaacaccagaaccagaacccagtcattttgctgattcttctgcacctgaccccacaaattctcatgtgaacaaaggtcaagctgttgctgagaatgcttatgagccatctaatcaccatgagagacagat

SEQ ID NO: 19489 - DNA, 218 bp, Glycine max
  Clone ID: PAT_MRT3847_117602C.1
cacggcacgagacatagccaaaactttttataagagcaagacccaaaacgacatgggggaggaacaggcaaagcgagcaaaggacaacaaaaacttgaaagccagacagaacccacacaaggaagaaaacccatgaaaaacacaactagcaggaacgaagacactgaccaacagaaagggatacacaggaaaatggaagccaaagaaaactcaaacaa

SEQ ID NO: 19490 - DNA, 237 bp, Glycine max
  Clone ID: PAT_MRT3847_117603C.1
tgccagtcccacgctgtgtttttatattgaacagctgctctagctggtcgtaaagatcaccattactgaaggtattgatgaaaggtagtgcaaaactgcaaactgaaaagatggcagatgggggttagctcaagagagattctaagcagatggctaatgattagggggtggctccagaggcacaagcgagacaaggggcacaacttgattatgttgcgagtaataatctagcaatgc

SEQ ID NO: 19491 - DNA, 182 bp, Glycine max
  Clone ID: PAT_MRT3847_117604C.1
gcacgagagtttgagtgattattgatacgggaaaaagatcgtaatagtctagacatgattataatattctctaatatctttgccctcacttggttccatagaaatatccctgtaagtaaatatgtcacaaaatttttctggatctgaattatttttaagaaaaactcttttttttttataaa

SEQ ID NO: 19492 - DNA, 208 bp, Glycine max
  Clone ID: PAT_MRT3847_117605C.1
tatgtgtctccagcacgaactatatttcataatgtttttcattgctcattatttaatggccaccacaatatctttatcctgtaccatgtctctcacttcttttatgatgaagcaactctttactaccaatatcctaaatactttctctatctcttttattttattataaaattttacaatttttttcttttattttttatctcttata

SEQ ID NO: 19493 - DNA, 469 bp, Glycine max
  Clone ID: PAT_MRT3847_117606C.1
ttcttctttttttttttttttttttttttttttttttttttttttttttttttttttttttttttttttaaaagaaaaatccgatagatatatgcggggggctttatatctaaccattaaaaaaaacatgggaatcccggcagacatctttagccctaaaaggctcatagcgctcatactcttccaagggatatcacaaagcatgcttgttaacactctcccggggggggggcttgcaaaccaaatacattacaggttgggtaccccgcgtccgctaaaacaaatgggaccctagcgagaaacccccaatcccaaacccttttctttccccccaccccaaaccgaacacctttttttggtttaccacccccgttgaaaacaaaaactgggttaaaaaaaacaaaaagtttggcttcaaaaaaattttgaggggcgggcccgttttcccctttaacaaccccccggtttt

SEQ ID NO: 19494 - DNA, 724 bp, Glycine max
  Clone ID: PAT_MRT3847_117607C.1
aaaatgtcttattcttcttcagcttttccttctgtggtctcaaaatgcaccgttgtccctcaccggaactgaactatgggagacctcaagctctctatctccgaccttaacatgctcttatctcactacatccaaaagggatgtctcttcaccactccttcacttccctcttccgctctcatccctcacctcaaaaacgctctttcccaaaccctctctctcttccctcccctcgccggccgtctcaaaaccgacgccgacggatacgtctacatcacatgcaacgacaccggcgtcgacttcatccacgtcaccgccgccgatatctccgtcgcagacctcctctccccgtcgtcgtcgtcgtcgtcgtccgatgtccctccaatcttcaaacaactcttccccttccaccacaaaatcagttacaccgctcattcctccccaatcatggccttccaggtcaccgacctcgccgacggcatcttcctcggctgcgccgtctgccacgccgtcaccgacggcgcctccttctggaacttcttcaacaccttcgccggaatctcaagaggagccaccacctctccctccaccctcccggattttcgccgcgaatccatcctcaactccaacgtcgtgctccgcctgccagaagaaatcaaggtgacctttaatgtagaggagctctttcgcgagagaatcttcagcttcagccgctaatcaattc

SEQ ID NO: 19495 - DNA, 454 bp, Glycine max
  Clone ID: PAT_MRT3847_117608C.1
atctctagccaacctctctaacactcaatctaacctttttattacctttaatcatagggtcaattggacatttttctaaatgccaacggaaaaaccattttcatccttttccaactatttctttttcaccttcctcatactaacacaccccaacccttccctgttgacattccacattctctctcgaatttcatataatacccacaatcctcttcaatacacacagattcttttttgcacccttccaatatctaacttaatctcaacaactttttatactctttttttgccacacaatcaatcataaattcatcactccatatataattcttattttctcataattatcatcattcaataatacccattcttaaatctttttttcttccctacacacctaaactctatttttttcaaataaataaaaaatcctatccaccttttttaaaactat

SEQ ID NO: 19496 - DNA, 630 bp, Glycine max
  Clone ID: PAT_MRT3847_117609C.1
tatttgtgcgggtgatactgtaaagttcaacatgggacttatactcttgcccgtgtgcagaaacaccataacttggctcaggttggccaagctgggctattctgtaccttttgatgacaacatcaactttcataagacaattgctggggccatcgttattggtattatacttcatgccggggatcaccttgcttgtgattttccaagacttgtaagtacgtctgaagaaagttatgaaaagtatttgaaaggcgtatttggtgatcgtaaacccagttatgtagacctagttaaaggcgtcgagggtgtgactggagttttgatggtggttcttatgataatagcatttacacttgctaccaaatggttccggagaaatctcattaagctgcctaaaccatttagtaggctcactggcttcaatgccttctggtattcacaccatttgtttgtcattgtctatgtcctcctaatcatccacggaataaagctttacctcgtgcataaatggtacctcaaaacgacatggatgtatgttgcggttccagttttactttatgcgtcagagagaatactcagattatttagcactttttggcatagccagattattggattatattcaagtat

SEQ ID NO: 19497 - DNA, 115 bp, Glycine max
  Clone ID: PAT_MRT3847_11760C.1
gctacacgaacagtcagaactctatcgatcatgaaacctgagcacgagactgaagctgacgggcgatgagaagtaactgtacaacggctcgcacagacgatgcatatctacctga

SEQ ID NO: 19498 - DNA, 286 bp, Glycine max
  Clone ID: PAT_MRT3847_117610C.1
attgaaacaaaattttttaacgttttacacaacccgaaaacaacaaatttttggggatgggggcaattcccgtcaaaaccttgtggttaatccttccaacaaaattccttcccaatttaaccaaaacttttttgggaaaaaacttgggggggccccttccacctgttttcttttcccccttttaaaaatttaaaattccccatttttatttccaggccattaaattgggcccacttcttttttccccacgggttacaaaaaattttacaagcgggttttttttttt

SEQ ID NO: 19499 - DNA, 483 bp, Glycine max
  Clone ID: PAT_MRT3847_117611C.1
ctcccatctgtctctgatgcggtggggagtggggacagggagggtttgccatttataaggcatacaacccttccttttctactagcctgtgtgctgacccgtccttttcttctccatgcattaccacaacgttgtagatatggaagacatgacataaagtcatatgagttcagctgcggcctatgttgaaggggggaatcaagaatcctgtgatgacgcttgcagcatatgcctcgaggagtttgatgcaagtgatcctctctcggtgactacctgcgagcatgagtttcatctgcagtgcattctccaatggtgtcagagaagctcctacagtcctatgtgctggcatcctattagcttgaaggaccctactaagtaggaagttgatgagggagtccagcagagaagaagcttgacggctaccccatcaagaaatgctgctgttcttcatcaccctgcctttggagatattgagatgcagca

SEQ ID NO: 19500 - DNA, 283 bp, Glycine max
  unsure (1)..(283): unsure at all n locations
  Clone ID: PAT_MRT3847_117612C.1
ttctcttcagttttaagttacatagtttttcattgttttacttaatctacaatggctgcttcaacaatggctctctcttcatcatcattgggctggccnagtatcaaagtttccccctccaaccctgaagcttggggtnggangggttagcntgaggnaaacagcctccaaaactgtttcctcaggaagcccatggtacggcccagaccgtgtcaagtacttgggcccattctcaggtgagccccnatcctatntnannggngaattccnaggngactatggt

SEQ ID NO: 19501 - DNA, 524 bp, Glycine max
  Clone ID: PAT_MRT3847_117613C.1
gttctacctacgatacttaatgaattatgattaaattgaaaacccatgttttggtaaaaaaaaaaaaaaaaaaaaaaaaaaaaaaaaaaaaaaaaaaaaaaaaaaaaaggcgaaaaatataggaggatccaaaattaaatacccatgcaatgaaaggtgacaaatcttgtatataggtacctaaattcaaaccactggccaactctttacaaccttttgactaggaaaacccttgggtaacccaacttattccccttgtaaaacatctcccttttgccagttgtggtaaaagcgaaaagaaccgcaacgatggcccttcccatcagtttcccaaactgaatggcaaatggaacgcgccctgtaacacgccatttatcgccgcattagtggtggttactcgcaaatttacccccacactttaccaatgactaacgcccgctcctttgggtgtttttttttttttttttcccacattttgcggcttttccccccaagttctaaaaaaagggctaaatttagggttc

SEQ ID NO: 19502 - DNA, 250 bp, Glycine max
  Clone ID: PAT_MRT3847_117615C.1
ggctcgaggaaagttagacatggtgtctgaataatttccgagcaggtcaccatataaacagttgcggtgcctatggttggaaatggttcatagttgcatgatcctggtctgcttactattcctgtgacaactcatgaatagaatgcctcttgatattgatccttgctatcgaaacttaagaatgagccttccactgaaatacgaggcaatggtgaatgcctctgtcagcgatgaaaaaaagattacccta

SEQ ID NO: 19503 - DNA, 668 bp, Glycine max
  unsure (1)..(668): unsure at all n locations
  Clone ID: PAT_MRT3847_117616C.1
ccctaaagcagcatttatttactcttttaagtccaaaacatttattttagcagtctggcatttcataaccacccatcataattgacacaggttgacacacatgatgctgtcagggtacacaagaacaatagccaaagagttacaaaaaataaatccatgattcttaatcacaatcaaaaaaaagttacacatatcaaaaacttctgatgcattgcattgaaaggaaggtgtgtgcacatcataatttaaagaggcacagcaagggctgctgaaagctcacaagaaacagtttataaagctgatggtgaaggaatgagttgtcgctgtgtcagtttccattagctgaagggaggggtgagagggtcaaattcatttttgcatgcacaagatgtactgcttaacaaaacactatcagcttgttttaaatagcagccatagcctgtgttggctaattctcctttctacactcaattaccatcacctggatttgctagagatcaacagacataataaaatgccttgttcagaacacacttctctgcacaattcaaaaaggaagcgccctgtgactcaaagcaaccatcagtccagcaaatgcccatgaaggtttatctgaaactgcttcccaagggacaggnaggcagatctgaatagctgtgctgccaata

SEQ ID NO: 19504 - DNA, 525 bp, Glycine max
  Clone ID: PAT_MRT3847_117617C.1
ccacgcgtccgcccacgcgtccggctttcttttacctattccaaccctctgggctctggcacacagctactccgcctcctcgcccttttctcctcatccctcgctttcgcttcgccgttccaacgcggagcccccacggaaaataaaggccaagaagtgatggtagtggagtaaaaccacgcgttggagggcagagggacaggttggtggaggacgcgcacccagcgtggagagcagcaggagctacgcgaattcgggccgcgagtgcgccggttcaggttgccgccgccggtggaattgtggcagacgaggtggcctgttggtagccgcgggagtttgcgagtaggtcggttccggttggtgtgcgagcgaaggtgctgttggaggcgtggatctggccggcggcgggcgatgggaaggagggactagggctcgattggagggaaaggcgcgatcttggaggttcccatgggcggatgcctctcgcaggaggagcacctgctccagagcaggccagctgaagct

SEQ ID NO: 19505 - DNA, 410 bp, Glycine max
  Clone ID: PAT_MRT3847_117618C.1
acctgctccatcaaacgtaggttcacggcaacgcattcccactgagtcactcactaggttacgaatcaaaaccgatgctaatgttgttcctttttccgcttcctcgtctcagtaacatgtaaatttatcgagcaagcactgattattgggaagttccatcgaaaagaccaacattgctttgattctctcagtaacgaggagtttgcagtgaagagggaaatgtctttccacaatcaagcattttggatggggaagagtcctggggggttgaatgacggtgacatgacaaatgacaattcttctagaatagagtccaagcgtgctcatcagtggttcatggatgaccctgaagtggatatgtttcccaataagaaacaagccgtagaggctccaaacaatttgttatctgg

SEQ ID NO: 19506 - DNA, 425 bp, Glycine max
  Clone ID: PAT_MRT3847_117619C.1
aaaagcaaaaaaaagcgcgtttgttttttggttttaacgggtttttacctaacgggccctttttttttttttcacaaaaggggcaacaacaattcccggcctttggggccccccttctcacccttaggggggggtccctttccggaaaatttttttttttgggggggcttttttccacaaaaaaaggggtggtgggggtccccggtgcttaaaaaaggggtcccaaaaaaattgggggaaacccatttttcttttttgaataaggccccctccggggggggggggccctttaggtcaaaatcaaggggcccccggggggtgttattggaatcggggtcctttcgggggaaattagggggggggggttcaaagccccacatttttgggggggggaagggaattttggggttccccccccccaaccc

SEQ ID NO: 19507 - DNA, 292 bp, Glycine max
  Clone ID: PAT_MRT3847_11761C.1
cgggttcccgggtcgacccacgcgtccgtcagattgctcgtgttacatcatggccatgggagattctataactcagtgattaacaaagtgaggagaggacactactcggggcataccattcctgttgtgccacatattacagatgaaatctaatattggattgaacgtgtagctatgaatccggtcgatggtaaacatggaccttctgatgttagtgtcatacaacttggtggctccatacgggatatagaatgaatgccctgcattgaagcattcagggagtgctcctacc

SEQ ID NO: 19508 - DNA, 460 bp, Glycine max
  Clone ID: PAT_MRT3847_117620C.1
ggaaatttgaaggggcttagtggtgtacaaactaaaaagtttttggtcgcgactaattctccatctgtctttgctctgtctgtctaattcaaattgcgtgtgactgtgtcgtgtatgcgcaagcttataaggttacagttggaaagcaagttcaacacttttaagttttcctttccatcagattcattttcaaacgcttctcttctcttctcatggctttctgctaacatcaccaaacacagatctgaaacaaacaaaagaggatattataatcagccttagtcgtcaaatattgcatcaaagttggttaaaggcaagccgatcatctatatcatcgtcatctgatgcacctgatgaccagaagccacctttacctccaagtgtacaatttggccggaagaccttcctcggtcgctatgtcagttactccagagatgatcttgatagggagctaaggagt

SEQ ID NO: 19509 - DNA, 1275 bp, Glycine max
  unsure (1)..(1275): unsure at all n locations
  Clone ID: PAT_MRT3847_117621C.1
ggataattaaagtgaagaaagaattaaagtagcaacaaatactcttccctacacttggcagaaaaaaaatggttcaacaagaaatccgaaggggtccctggacagaacaggaggactacaaattagtgtattttgttaacatgtttggagatcgtagatgggactttatagcaaaggtatcaggtttgaaggtggagggagactgtaaataggtatgaatatttggacatgctaagttatacatgaagcacccctttaaccacctcactttgttgtaggtttgaatagaacaggtaagagttgcaggttacggtgggttaattacctccaccccgatctcaaacgagggaagctcacaccccaagaagaacacctcgtcatggaccttcagtgaaaatgagttattggaggactcacatgagcaaaaagaatgctaatgagaaaaagcatgcatcagcagcatcgcctgtttcttctatgttgtcaatcttcactgtcctcaaacaaccatgttgtggattcacatgcttccaaagaggttggagaagagagttgttatgacacaggtggatatgatgatggcatgatgatgggtttaattggtggtgaaaaggggtactccatggatgatatatggaaagatattatgtcagaagaagagaacaacatttataataataatcttcaacctgtctatgaagggcatagtgaagagggatgcaacttctcttgtccaccaccaccaatgattatgccttctccaccatcatgggatcagtacaacatttcttctcaacccttatgggtgatggatgaagaagaaagtaataagatgttattccctacactaagtgaccaatattttccttactatgaacaagggaacgcatttctaactggctaatcaggagattctttttttcttttgtccttaaaaaaattatcaatattttgttcttatgtgtgtgccatctgtcacaataagaaggcttaagtgttaacctgtacagcatagtatctttgagctttcggcatggtcctccatagtgtgacacagctgtaatcgatctcaaatgtaactgtagtctatgtcaaaatgtgtttgtggttttactttaaagaaaaatccaatggggaaagtggttatgttatgaattatgtaaaatatacatcaagcacttatgcaaattcaagttttaatctaatttgaaaaatgcctagcaattatagcatttcatttttattaaaaaaanaaaaaaaaaaaaaaaagagggc

SEQ ID NO: 19510 - DNA, 1641 bp, Glycine max
  Clone ID: PAT_MRT3847_117622C.1
ggctcgagtaaagttagaataatattccctacaattagcagaaaaaatggttcagcaagaaatccgaaggggtccctggacagaacaggaggactacaaattggtgtattttgttggcatgttcggagatcgtagatgggactttatagcaaaggtatcaggtttgaaggtggagggagactgtaaataaaataggtatgaatatttggacatgctaagttatactatgaagcaccctttaaccacctcactttgttgtaggtttgaatagaacaggtaagagttgcagattacggtgggttaattacctccaccccgatctcaaacgagggaagctcacaccccaagaacaacacctcgtcatggaccttcattccaaatattacctccaccccgatctcaaacgagggaagctcacaccccaagaagaacacctcgtcatggaccttcattccaaatggggaaataggtttgagaaccatgcagaaataattaaactataagctacctaccttccaatcatcatcactcataattttaaattaattttttcctaccatacaagactattagtattaattagttctttggcttatgtaattttttttttttagatagaataggatatcaaaagatttataataatttatatacattgagctagatcgtttgacaccttattttgttaattagttactttgaatttttttccttaattactttgatgattcctttgcagatggtcaagaattgctcgcaggctaccagggcgaactgacaatgagattaagaattattggaggactcacatgaggaaaaagaaggctcaagagaaaaagcatgcatcagcatcagcatcatcacctgtttcttctagttgtcaatcttcactatcttcaaacaaccatgttgtggattcacatgcttccaaagaggttggagaagagagttgttatgacacaggtggatatgatgatggcatgatgatgggtttaattggtggtgaaaaggggtactccatggatgatatatggaaagatattgttttgtcaggagaagagaacagcatttataacaacaataatctgcaacctgtgtatgaagaagggcatagtgaagagggattcaacttctcttgtcctccaccaatgatgattatgccttctccaccatcatgggatcagtacaacatttcttctcaacccctctgggtgatggatgaagaagaaagtaacaagatgttattccctacactaagtgaccaatatttttctcactatgaacaagggaacgaatttctgaccggctaattaggagattctttttttcttttgtccttaaaaaaattatcaatattttgttcttatgtgtgtgccatctgtcacaataagaaggcttaagtgttaacctgtacagcatagtatctttgagctttcggcatggtgcttcttcatagtgtgacacagctgtaatcgatctcaaatgtcactgtagtctatgtcaaaatgtgtttgtggttttactttaaagaaacatccaatagggaaagtggttatgttctgaattatgtaaaatatacatcaagcacttatgcaaattcaagttttaatctaatttgaatggatgcctatcaattatagc

SEQ ID NO: 19511 - DNA, 388 bp, Glycine max
  Clone ID: PAT_MRT3847_117623C.1
atcattatagtttatggtaggatttcataacgattgactaaaccaccaaaaccaaatgaaaaacactatgcggcatataccggggcgagagtttacaatctttacatgaatagaagccttggttaaaaaatagcttcttgattagcatggaagcctttatacttatatggttcacaaactaacctaatgattttgtttggttggggagagcctaatgttcccaaccaactacgaagacactgaatgtacaggcgatctccggcacgctggataataaagtcagcagtagacatacaataccccttccaaatattaatgctcaaacgcgaccccagagaattggtcagaattgtaatcaaataatgaagaatgtaacggtcgaattaac

SEQ ID NO: 19512 - DNA, 513 bp, Glycine max
  unsure (1)..(513): unsure at all n locations
  Clone ID: PAT_MRT3847_117624C.1
gctcgagggccggcnncgggccgggnatacaaaaaaaaggggaaaaaaaaaaaaaaaaaataaaaaaaaaaaaaaaaaaaaaaaaaaaagaaaaaaaaaaaaaaaaaaacgccccgaaggaacaaaaaacggaccaaaaaaaaagaaccaccaacccaaaaaagatctttaggggggagacggaaaaaaagaaatagaacccaacccataaagggggcccccgatataaagatgggcggccccaggggccgaagggggcgacaaagggaggaacgcacccgaaaggggcggtagggagggggccggaaaaagaaccacccacgctgtgactaaccccccccccccccgtaatgaatggcccccgaaatttgtctttcccccccccccccccggggaaaagggcgctcaccccctgtttgggggggcccctcaaaagaaacaagcatggagcccccgaatgaaaaaaaacgcccgaggaagggttcaaatagatagcggaagggggggaatatt

SEQ ID NO: 19513 - DNA, 420 bp, Glycine max
  Clone ID: PAT_MRT3847_117625C.1
gcaaaaaaaaaaattttttttttttaaaaaagggccttttttgttcacatggggggcccaaacgggggaacaaaggaaagaatttacctccgggtcctccaaaaataaaactaatccggggggggggatgaccttcgggccataaaaaatttgggggaggcgcgggaaggtttttttttaaaaaaaagttccttttgggaggaaaaccctgggggaagcccttaggggccgggcaataattgaaaaacaggttttttttgggcccccacttaaacctttggggggggggggcgcccaattcctgggaaagccatgaacccctgcccggggggggggaaaaaaaatttttaagcaaaaaaaaggccccaaaaaaccatttgcgggcccaagaattgaagtttctggaggaagcggggaacg

SEQ ID NO: 19514 - DNA, 395 bp, Glycine max
  Clone ID: PAT_MRT3847_117626C.1
aagccaccagcctgccgtatgatgggattcggcgtcgtccacaatttgattcttaccaatagtgctacccggcatgggatgggcatattccgctttaaaaaagtctcctgatgcggcaaacgaatctcccactatatctgtgataatgtcatatccctctctgtgaatctcattcaatttcactggttatgcacacaccaaccttctgtaaatcaaatatcaagttatacgggcctttgtacatttctatattctgaatcggcgacttcgaaataaaacactacacttcgggtgtttgttaataaaagccgccgactctcttgccatataaaacaaattatttatcaaaacaatggactagatgcgacctgatgattactgaggcgcctaactag

SEQ ID NO: 19515 - DNA, 506 bp, Glycine max
  unsure (1)..(506): unsure at all n locations
  Clone ID: PAT_MRT3847_117627C.1
acgaggtagatccagcctctttgacatcaccaccgacacggtaattccaccttcctctcacgcgcctcctttgttacttttttaaaatattcgctttacgttaattttctcaaacagtttctattatagaaaatattgagatgcttttagtgttaattcgtgttcgattagttatattcctaatcaatagagcgttacggtcttatgaaatgacatggattttctcagctctagtcaatagtcaagccttgaatatcattactctgtctcttaccattttagagatttgaaaaataaaaataaaagaaaaggacatgaagcttctgctatcttgttatgaaattcctttggttgttgaagtgtgtgtttgagtcagcgattgcaaaaaaatagatataaggattttgttcccttcaattggaaaagttgacttgacaagagttgttaaagctttntaaaatttggattggaatttggagtaacagagttttcatgattttatcaat

SEQ ID NO: 19516 - DNA, 1322 bp, Glycine max
  Clone ID: PAT_MRT3847_117628C.1
taccggtcttatcatcccgctcccacgcgtccggttaagatttggcataatacattgatttgtttcttaaaaacaacactgcaatgtctgccatatttctgcttgttggaatgctatcgtccattacagttgcacaatccataggagtttgctatggagtgattggtgataatctaccatcaaggcaagaagttgtggacttatataaaacaaatggcattggtagaatgcgtatatactacccagatgaagaagcactccaagcccttagaggttcaggcattgagttgattatggacgtggctaaggaaacccttcaatcattgacagactccaatgctgctacagattgggtcaataaatatgttacaccttactcgcaagacgtcaatttcaagtacatcgctgttggaaatgaaattcatcccaataccaatgaggcacaatatattctatctgccatgaccaacattcagaatgcaatttcatcagcaaatttacaaattaaggtgtcaacagctatagactctactttgattactaactcttaccctcccaatgatggcgttttcactagcgatgcggagccatacataaaacccataatcaacttcctagtgagcaatggggccccacttcttgccaacgtgtacccttactttgcttatgcaaatgatcaaagcattcctcttgcctatgctctttttacccaacaaggaaacaacgacgttgggtaccaaaacctctttgatgctatgttggattcaatatatgctgctttggagaaagtgggagcgtccaatttgcagatagtggtttctgagagtgggtggccatctgaaggtggagctggagcctcaattgataatgcaggcacttactatgctaatttgattcgtcatgcctcgagtgggaatggaactccaaagaggcctggtgagtctatagagacttacttgttcgccatgtttgacgaaaaccagaagcaaggtgctgatactgagcgtcattttggtctcttcaatcctgataaatcacctaaataccaacttagtttcaactaattgaaactaacagaaatatatatatatatatatatgctcctatatctatttactttgaataagtgtgtcaagtatatatgcacatctgtaaaacgcttatttatgccctaaatgacaaatatataagaagtgtcataatttagtttgtgatatttttttttacttactttgtttaaataaatacaaaccaaatttctgttggatgattgttatcataaggagaaaagaataagaatcactgtttaatatcattagtag

SEQ ID NO: 19517 - DNA, 1824 bp, Glycine max
  Clone ID: PAT_MRT3847_117629C.1
agtccatgagctgtggactaatcaccattcaaaatttaaaattttggcctattggaattgtggtgggcatgggatctcacagacaatccaagtcctttgtctgttaattaggcaaaaagatcccaacaaagtggtatttgtagatcataaccagaaatcttaagaccaaaatgaaccggtgaatattcaaaatatacagtaaacaagataggaggatcacagcagttcctttctgtctctatacaccaactgtcttgttaagtagccaaaggcaaagagccaattgaatgccaaaaatggagtgaagccaagttctgtcaagcatgaatccgaacactgtgattcctgctctattgttctccaagtatgtcactgcatcaatagctagataactcatgacgaaacaaaaatggactaattatttgacaagtaaaataccactaaaaaaattcccatttacctagagcctgcctcttatggaatgagatagtttgggtgtaaattggcagtaacagtttggtattgtccaactcatcctcctcatctcctacctcatcatcatccgatccccaactaatattggcagcaatagcttgggctgaaattgcatttgcagttgttggtgtctctccttcaatgttgtcaaacgagtttatggtagcacatatgtgccacttagcagcaaggcctgtaatggagtgtgctttatgtgtgatcttggttgcgcctcgcaagagtattaaaagtccactcaccagggtgatggagactaacgcaagctctccagccttgaggatatcaacatcagcataaggttttgtaaccataagcagaaaaatgagttggcttgctgtcaccaaaagcagagaagctagaatgaaacctcggaaacgatggcttatgatccgaagattccttctcattcttaggtactccaacaagattgaccccacctcagtttctcgctgaaaaactcgagcaaactcatctagtctaagtatttgcaagtagcagataagtcgaaagagaacacacaccaggaagaaaatggaggttctatacagccaagaacataggtccaatgtgcacagaatgatgctgctcacgtatatattaccataatgtggtatttgtgatgctcccgagacgtaccaccatatcttgtagccacattctgctatgaaacagggaagcccccaacgcatgataagcttcatggttccctgcatctgttctgagtaccctcgttgaatcttgaggctttcatcacctaatttatcaaggaagagaaactttctgaagccatacctacgatcccacgaagaaatactgatgaaagagagagcggcaaagacggagagagaaatctgcacgggtatgtggtatggtcgactatgatcacggtcgcaggtgggacaatcaagtagaaagtgcgagagtgttggcacaacaaaggctaaagtgaagaacacggaccaagaaagaccagctttgcacacgttggagtgatccacgtaaacccatctcaggtatgatctgaagttcctcagttctgttgttccacgatcatgtgctgggttgtgctcctccatgttctttggtagtaggagactccctctttcatcttccatggccttggaaatctaggcatggacttttctaggggccagaatattcagataggaacacacgaaactatacaatccaagaagagggtgtgaatgtgaattgtgttggcaattagaatctggaagtgtgatggatttggatgtgaatgaatgaatgttgctgttgctgtcgctgtctcagcactctttgcctggt

SEQ ID NO: 19518 - DNA, 1169 bp, Glycine max
  Clone ID: PAT_MRT3847_11762C.1
cagagaatgacaggatcttctttggggtacccattttctcctacaaggaacttcaagaagcatcaaacaattttgaccccactagaaaactaggagatggaggctttggcactgtttactatggaacactaagagatggaagggaagttgcaatcaagcatctatttgagcacaattacaagagagtggagcagtttatgaatgaaattgagatccttactcgcctacgccacagaaatcttgtgtccctctatggctgcacttcacgtcacggccaagagctactgcttgtatatgaatacgttcctaatggcacagttgctagccatctccatggtgatttagcaagggttggtttgttgacatggcctattcgaatgcaaattgccatagacactgctgctgcattgacctatctccatgcttcaaacatcatccaccgtgatgtcaaaaccaacaacattttacttgacattagtttttcggctaaggtagcagattttgggctttcaagattgctccccaatgatgtaagccatgtctccacagctccacaagggtctccggggtatcttgaccctgaatatttccaattctacaggctcacggacaagagtgatgtgtatagctttggggttgtgcttattgagctgatatcatccatgccagcagttgatgcagccagggaaagagatgaagttaacttggcaaatcttgccatgaaaaagattcaaaaaggaaagcttagtgagcttgtagacccatccttggggtttgagtcagaccaagtagttaaaaggatgctaacttcagtagcagggttggcctttcggtgtgtgcaaggagacaatgaattaaggccttctatggatgaagttctggaagcactcaagaaatttcaaaatgggaattatgagtctgagaatctagagaaaggagatgatgatggtgttatctcttccacttcatccagcgaagtacatccacctgtttacactggaatttggtaaacaaccgctagtctaagttaattgcttgcgagaccaactagtgaatctcaggagcatgtcaattatgtgtttgctttaaaatgtcaagttttttgatgttcatcattgcaacaaacgtttactggttcgaaatttacagaaagaaaaattgtttaacag

SEQ ID NO: 19519 - DNA, 272 bp, Glycine max
  unsure (1)..(272): unsure at all n locations
  Clone ID: PAT_MRT3847_117630C.1
gcggggttagctacagtgaatccatngccatgncggctgcatttgcanctacaactgcaacactgagactgcnaaatnntggaganagcaaaagtttncagctccgtaagtntaaccctaatcccaataagcttaaggttatgcgggggtttggcggttnttctggagtggcagttnagtgtgagattggaattggaagggttcgggcganttcgaattctnctncttccgaggaggagcagaggcatnantntnnattcaaaantgncncc

SEQ ID NO: 19520 - DNA, 599 bp, Glycine max
  unsure (1)..(599): unsure at all n locations
  Clone ID: PAT_MRT3847_117631C.1
atgaaacgtacgcatgccacgacgtnacccgtaagcctatggnatnccctctagaagcggcacgccccttnnttttttttatttatttttatttttattttatttttttattttttttatttttttttttttttattttttttttttatttttttttttntttttttaaaaaaaaacgggggggggaaattaaagccccattataaaggggacacaattgggttaaacaaaaacccaactttttttaaagggacatttttacaacccccaaaaaaaaaaaagtttttaaaagggggggggaacccatccaaaattacccaaaggggttaaaaccccccccggaaaccggggaaaaggggaaggggtgatcccctcgggaggggggaaaaaaggaggggccctccatccccaagcgggggggcaaaaaaaaaaaacccttgcggggccggggggaagccctccttggcccgaaattgggccctcaaaatggaaaagggggcaaaacccccccccccgaggggaaaagtgttaccccgaaaaagcttcacaaaaatttgggtcccccccccaaaaccccaccccaagggggggggggcccc

SEQ ID NO: 19521 - DNA, 148 bp, Glycine max
  unsure (1)..(148): unsure at all n locations
  Clone ID: PAT_MRT3847_117632C.1
gtgntnctcatcatgatcnaccttctacaacgccaccactgtnnacangttgcnncctttgnggccccaacagnnaccgcaagttccttngggttgtggcccanggcncagaggcacagaagccccttnnattgaccgaggtncttct

SEQ ID NO: 19522 - DNA, 595 bp, Glycine max
  Clone ID: PAT_MRT3847_117633C.1
cacgcgtccggcccaactatactggaatcctacgggaaatcttccccaacattcaacaaatagattctgatatattttcttataagtttcttggcttcagcctttttgaaaacagttgcttcgaagctttgtcttttcaaatctatttgtaagttttatatagttctgtgtatgctttttgtcattcttataggttgcatttttattaatttctgggaagtctgtcatgcatgcagattctggtttgtaagaatgaagatttggctccatccacctaatgaagagaatatgcttatcaaccattggacgatactgtggcctgaccattggttacctgtcaaatgaatatgcttgttttatgtttctttgttttgcagaccacatttcgttgtgtgtgtttttggcatccaatttttgagtatcactgtaacactttctttctactgtgtcaattatatttctagctaccgactgtggcgtacagaggctgtgggtgtagtagattaatgatcatccagattcattgaaatttgttttagtgatttcttatccataataacaagttaatatttattggtcggaacatccatattac

SEQ ID NO: 19523 - DNA, 1443 bp, Glycine max
  Clone ID: PAT_MRT3847_117634C.1
ggcgttgttgcagggcaatgtgattgaggcagatagtgaaatcctaagattgtttagttggaagatggaggcagtggaatcaatagcggttccggaaccggacgaagacgatccttcatcgacgcttctggatctctcgagttaccagctccacgaccttgactcggtcgagttgccacccagcctcaccgagttggacctcaccgcgaatcgcttgtccacgctggacccgcgcatagggaacctctcccatctcaagaagctctccctccgccaaaacctcatcaccgacgccgccgttctccctctctcttcctggaacgccatttcctctctcgaggagcttgtgctgcgcgataatcaattgaagaacattcctgatgtcaccgtatttaagaaacttctggttttcgatgttgcgttcaacgagattagttcgctacatggcttgtccagggtctccgataccctcaaggaactctacgtgtccaacaacgaagttgcgaagattgaggagatcgagcacttccatcagctccagattcttgaactcggctccaataaattacgggtgatggagaatttacagagcctcgagaatttgcaggagctgtggcttgggcagaatcgaattaaagttgtgaatctgtgtggtctcaaatgcattaaaaagattagtttccaaagcaatcgcctcacttcaatgacgggatttgagggttgtgtagctctagaagaactgtacttgagccataatggtattgcaaaaatggaagggttgtcatcgttggtcaatcttcgggttttagatgtatcatcaaataagataacttcagtggatgacattgtgaacctgacaaaattggaagatttgtggcttaatgataaccaaatagcatcacttgaaggaattgctgaggcagtctctggttcaaaagagaagcttaccaccatctacctaaaaaataacccatgtggtaagacgcccaactatactggaatcctacggaaaatcttccccaacattcaacaaattgattctgatatattttcttagaagtttcttggcttcagcctttttgaaaacagttgctttgaagctttctcttttcaaatctatttattctggtttgaaagactgatgattggctccatcaacttaatgaagagaatatgcttatcaaccattggacgatactgtggcctaacaaatgaatatgcttattttatgtttctttcttttgcagaccacatttcgttttgttttttggcatccaatttttgagtagtactgtaacactttctttctactgtgtcaattatatttctagctaccgactgtggtatacagaggctgtgggtgtagattcatgatcatctagattcatatgaatttgttttactgatttcttatccataataacaagttactatttattgtcc

SEQ ID NO: 19524 - DNA, 3662 bp, Glycine max
  Clone ID: PAT_MRT3847_117635C.1
cccacgcgtccgtacggctgcgagaagacgacagaagggggaggcggatagtgaaatcgtaagttggaaaatggaggaggaggaaacaatagcggttccggttaatgacgaagacgatccttcatcgacgcttctggatctcacgagttaccagctccacgacctcgactcggtcgagttgccacccagcctcaccgagttggacctcaccgcgaatcgcttgtccacgctggacccgcgcatagggaacctctcccatctccagaggctctcccttcgccaaaacctattcagcgacgccgccgttctccctctctcttcctggaacgccctctcctctctcgaggagcttgtgctgcgggataatcaattcaagaacattcctgacgtcagcgtatttaagaagcttctggttttcgatgttgctttcaacgagattagttcgctacacggcttgtccagggtctccgataccctcaaggaactctacgtgtccaaaaacgaagttgccatgattgaggagatcgagcacttccatcagctgcagcttcttgaactcggctccaataaattacgggtgatggagaatttgcagagcctcgagttgattctgttattttcttctgcttagaggctggttaactctatcaaccccaaatgctattgattccaccatttccatttactcacccaaatgagctacacagaatccttgtttctctgttctatgacggtcgcggaatcagtagtcgacgaaagaattctgggagtatttacatcttcaaccttttaagcctccacgtgtcccccatacaactaccttcactccctcaatttgaagcctggcttcggcgatattcaccatagcctgtttcgcttctccaatttttacaccttcttattctacaaatacccaaagcgagtataccgccgtacgccgaaatctgacctgtgatgcccctgggataccttgttatacactgatgtgtgatcaccaaaacgagtttgttgctggcttcaacatatctggtggacttcttgttaagttttctgcgtttaacgagactgttagtctatatgattgccgtatcgcctctattactataaatgaatttttggtgatcgaaaaagcagttgctaagattgcagtgaacaacaacttagatcagaggttggttgggggtgcacatgtaactttaaaatataggtcaagagaagtttcctataacctagggaaattgcaggagctgtggcttggacggaatcggtttaaaggagtgaatcggaggagtctaaagtgaattaatgaagattagtttgcgaagaattcttcacaaatattagtttctattagattgctcccacattctagaagagctttgagtgttgtataactgtattccaaatgtgcttgagccatcatcatatttcaaaactggatgagttctccttattgacaaatctgatgggtttagtggaaacaccagataacataactaaagtggaagacattgtgaacatggtagaggtggaattttcgttgctggatgataacctagtggtagcacttgaaagaaatagggaagctggctcttgtttatagtaaccacccttttctagttcgcaagaacataatcgatttattcagacgcaaaaaaatattatagtcttaagagataatgttgccaggtttaaaataattctttatgacatatttttaacggcagtttcttaacctacccctttttgtgaagcattcaatctgggtgatgatattcttagacatggttttcgtggcatatctgatattattacagataccaggattggtgaatgtagattttgctgatgttcgggctataatggccaatgcaggttcttcactaatggggataggaactgcaactggaaaatcaagggcaagagatgctgcattaaatgccatccagtcacctttactggatattggtatagagagggctactggaattgtttggaacataactggtgggactgatctgaccttgtttgaggtaaacacggcagcagaggttatttatgacctcgtggaccctactgctaatttaatatttggagcagtaatagatccatcactcagtggtcaagtgagcataacattaattgctactggattcaagcgtcaagaggagagtgaagggaggcctctgcaggccagtcaactcactcaagcagacacaaccttcggcaccaattggcggtcttcctctttcactgatggtggtttgtttgagataccagaattcctaaagaagagaggaggttcacgctatccgagggcgtaatctttttcatcctaatttctttgatcccttgcatttcttcacccttggatatacatagcattggtctagttcttaggtccctgtcttgccctttttcggattttagtcagagttgtgtatacagtttgttcatgaaagtttattacttcccactgtccagacttatgggtctaaccggaggtattgcagcatggatgcttttcttggcatatttgaattagtttattagcttgtacagagatttcagtaatgctgagagcttgttatagttctttggcatgttatagaaaattcattattattaaaaatcaagtaattatattttggtatattttctttgttaataatacctaatctcacacaaggagataccgttggtatcaatcggcgatcttctactttcactgatggtagctttgttgagatccctgaattcttaaagaagaaggggcgctcacgttatccaagagtttaatactcttttccccaactccttaatccctccttgcatctctttaccaagcaatttttagggatacaaatctcatcagtctaggtattagatcacgttttgccccttttttcatttttaggttcgcattgtgcatacagttgttcatgaaagcgaagtactttccaaaaccgttgttttttgagttgaggcttgttggcatgttttaataagtttattagcttgtatttttgtacagagaataatatatcagtaatggtcagtgcttgttataaaaaaacaaaaaaaaaaaaacttgatttctttaaaaagtaatttttagggatacaaatttcttcagtttaggtattagatcccgttttgccccttttttttttcatttttaggttcgcattgggcatactgttgttcaagaaagcaaagtactttcaaaaccgttgtttaataagtcaaggcttgttggcaggttttaataagtttcttagcttgtattcagcctttttgaaaacagttgctttgaagctttctcttttcaaatctatttattctggtttgaaagactgatgattggctccatcaacttaatgaagagaatatgcttatcaaccattggacgatactgtggcctaacaaatgaatatgcttattttatgtttctttcttttgcagaccacatttcgttttgttttttggcatccaatttttgagtagtactgtaacactttctttctactgtgtcaattatatttctagctaccgactgtggtatacagaggctgtgggtgtagattcatgatcatctagattcatatgcatttgttttactgatttcttacccataataacaagttactatttattgtccc

SEQ ID NO: 19525 - DNA, 1127 bp, Glycine max
  Clone ID: PAT_MRT3847_117636C.1
tctcgctcgagcaactccccaaaggggactttacaacaagaagaagaatacaaaaagtcctttttgccctttccttctctctctctctctctctctctctcagttttcctcttcgtaatggcgagttcttcaagaacgaaatctagtggaccagtgcttcgttcttcttcttcttcttcttctctctcacattctaacagcttctgttcgtactcaacatcaaacgcaccgtttcactcaccttcgtcgagtttcttcagaaaacctcactcgcacgtgcctccccgctccacttccccgacacgtgtgaacctattcagcgccgcgccgcttccctcgcactcggtccggttcgctctcgaccggtccatctccccgaaccggaccgtctcgagccacgtcatcgcgaagcaccgccacgtcacggctcagaagaaatcgtgcatgtgttcccctacgacgcatcccggttcgttccgatgcagcctccacaaaaacagccacagcgcgcaaaccggttcgtttccgtcgaaccggctcaacatgcgccggtccgcaatgaagaactcgctcgtgagaatcggtggcgtcgaaggcgagtgggtgaaacgtgctctcaccgcgctgattcgtccttcatcgcatcaacagcggagaagaacggcgtttgaaccgcgacagagtcgtctttcaatcatgtcaaaagctgatgatgaagaagaagaaaaataagatctatgaattattattatttgtttctctctcacaggttgtttttgaatcgccggaatattcggatctccgccgccggtgacggattctctccgattgcgtcgccggagaatttggaagattttgttggcgtagacctaagaggctggaccctggactcggagaattctttttgtacataacatttgctatggaaggaaattttttttggaaaattttagtttttaattaaaattcaattaaaaaaaaataaaaccctagaaaattaaagtataatctttattcacaatttgattttgtgaaatttttatcttcagaattcgagttagcgagtatgcattcatgagtttgttgttcttgccgttagcgttccgtcattcgttcgtcacgttgtg

SEQ ID NO: 19526 - DNA, 761 bp, Glycine max
  Clone ID: PAT_MRT3847_117637C.1
ctctttacccggggatcctctacagtcgacctgcagattgactactaagaaacaaagggaatcaaattcaaaaccaatcttaaaacagattcaggttgttttagaggagtttctggaggtttttcaagaaccctgaggtctgccactgtttggtcctcttaattttgaaatccccttctaccactgtttggtaaactgtaaaccttgggctcttgataccatttagaaagtaagagaaaaaattcatatattattcagcagtgaaagtactgcttcaatagaaagattacattaaagtcttccttgaatcaaggaatgataggatagtaaaaggaaataaataaaaacaaataatgatggagatcttatttcaaaaataaaacaaatcaaattgctgattcctctagtatggagatttgcgacatctcttaattgatacacttaaaattcacctactgtgtgtctgccctgtggcttctgctatgtcccttcacctaggacttctactgtgtctttaccttaaatcttctggcccgtgtcttctacctgtccccatgttctattccagtttcatgtagcaccatgctttttagcttctactttggtgaactgtcaaggcttatcctttagtgattcaaaacttctgttttatttcattattggtctccctttcctgtatgaaatcccagcatggcagctttggataaatcgatttgattgaagccttgcatggtgtgctaaattatctttactgatgcttg

SEQ ID NO: 19527 - DNA, 389 bp, Glycine max
  Clone ID: PAT_MRT3847_117638C.1
gggatcttaaatgaaacagggcgtttcattctccccccccccaaacaaaatcgtccttgaatttgatctatgactaaccttgagtctcaaacaaatgagggtacttctcacgcataatggtttttggctcctaggtcatctcctcaccaactggtcctctccaagccactttcactgatacaacatccttagaatgtaaacatttcacacgtttgtccattatatccactggttgttctgtgtaactgagattctcatcaagttgcactgactgaagttgaataatgtgagaagggtcatgaacatactttcgaagcattcacacatgaaaaactgggtgaacactcgatagatttggcgtaagggctaaacaataagccacttgcccc

SEQ ID NO: 19528 - DNA, 362 bp, Glycine max
  Clone ID: PAT_MRT3847_117639C.1
ccccccccaaaaagggttttttttttgaccaaaaaaaaaaatacctcccttccaaaatgcaaaagcttttaagaaaaaaaaccctttttttaaagggggtttttaaaaaagggccctccaaactaaaaaaaacccccaaaaatgttaacttaaaaaccatttttggcccaatttttatacttggccccctttaaacccagtaacatgagggaactttgctgaaacgggaatcacttggggctttaaaaacaaaaaccacaggggtagctttttaagaaagggttttttcaaaccccaccgaaataacaatgaaataaaaagggttctttgtacccccaaacaaaaatgcataatttttgatt

SEQ ID NO: 19529 - DNA, 145 bp, Glycine max
  Clone ID: PAT_MRT3847_11763C.1
cccattctttcgttgaggcctaccatttcttaatgtaagggactggtttgataattaaatgactccgtctagcttgcgattttatattatgaaattagtctatttttggccgtacagattccaatctagccctgagcatgatggg

SEQ ID NO: 19530 - DNA, 499 bp, Glycine max
  unsure (1)..(499): unsure at all n locations
  Clone ID: PAT_MRT3847_117640C.1
catccaactactttgaaaaagctcaccatctgcggatacatcatggaagcatcaatgctggaaaggataggacacatcacatttgttacttctctggagtacttgtatatttataattgcctgaatatgaatattccaatgactggttgctacaatttccttgtatcattgagtatcatcaatggctggactctctaacaacctttccactagatttcttcccaaagctagagtacctttttctccgggggtgtcgtaatctacatgtgatttcacagggacttgctcataatcatctcaaggatcttgtaatcagtgagtgcgctcaatttgaagcattacttgaacgcatgcacgccctccttccatatcttgatgtgatacagatagatgattgtccaaaatttgagtcgtttcctaaccgaggtttgccatcaaatctaanaaagatgtatattgataagtgctccaaacttatcatgtctctaaaagaagcttt

SEQ ID NO: 19531 - DNA, 481 bp, Glycine max
  Clone ID: PAT_MRT3847_117641C.1
gctccacccttcaaggttttgtgaaagagtcttgctcgggggtggtgatggggagcacactttcgtatactttggtgacccctgcagtggcacatccccttttgtgcaagatctagcgcgagcgcttgtgctctatgttttgccctgtggagagcacgagaagaacacacacacctctctcttccaagatagtgccacttttggagaagatttgaacacccttttccctagagaagtggagtgcgcaagatttgtatatgaaagtgacctgtgcgcttttccacacgatatcggagtgtgcgtgtcttaccccgtgcacaattttgagagagaagatttggacaccatatttctctctggagaaaggtatctctccccgtgtgaagagtgagacaaagtgctctctgctgtgtgccaggggaatatcattgctcctcttgtggagtcccttggagagtgatatggcgcatctcttccaata

SEQ ID NO: 19532 - DNA, 172 bp, Glycine max
  Clone ID: PAT_MRT3847_117642C.1
acggtcaaaaatgaccttaaccgaggggaatagaacaccccgcaaaattggatggtgaacgtttctctatgcctcccaaaaacctccatgtccttataaaacaaatttcagtgacggatcgccagtcttacatactgtgttcataaactctgtaatcgtgttaaacaacaat

SEQ ID NO: 19533 - DNA, 140 bp, Glycine max
  Clone ID: PAT_MRT3847_117643C.1
ggattctttaaaacgggcggcgacttatgaacttggtgacccgggaattaaatcccggccggtacctggaaggcttccaacttttccttatatgaagcggattaaaagcttggccggaattcatgggtcataagttggtt

SEQ ID NO: 19534 - DNA, 520 bp, Glycine max
  unsure (1)..(520): unsure at all n locations
  Clone ID: PAT_MRT3847_117644C.1
catccacctcgtatctgctatccagtgatacttatacaggctaagggattttaaaaccaagagcccataaagtatgcaaaacctttcttcctcactctaagccaattccaagacttgatttttacagattctacaatacccataatctgcatatccgtgttctcaaacacaataccattttgagcttcccacaaagccaacaccacagcaaaacatatcaccctgccaccatcctccaccaatgcctgggtcacctaacaattccataaattgtagaaattatagtaacacttcatttcgtagcagtgtaatatcccaaccacctttgaaattctacccacacttgccaaaaaaataagcatttatgaaacaaattatttgctaattccacttcctagtgacatcctacacgcaatccctcatcatcaaccagtatccctatgctntaaattatctntcgtagaaactctattctaatcaatttccatgcaacatagacaccttcgatgggaccacctta

SEQ ID NO: 19535 - DNA, 570 bp, Glycine max
  Clone ID: PAT_MRT3847_117645C.1
ggaggataaaggtttcttcccagttgtaaccatcaaagttttggatggctgggatgaaagcttgttgctgatctgaatcagggggcaaactttccagtattgaggtatctacaaatctccagtcctccttttgatcatcaaccccagcaaactgaaatgttggcaatagatggacatgagtgataccagcccttgataatttcttcaaatgaagtacacccgcaaaatcctgcaatgtaaaggccagataaccaccacgaaattcaggttgcacagagaggtcactggcactgaaatcccttatatgcatttcatatatgcttatatcaaagaaagaatgtatagtaggttttttatttgccaaattatcccatccatcaggttttaacttaacagagtcaagattaagcagaaaactccgcctgccatctgatgaaagtcctcttgcatatggatcacttgtatagcatttttcaatccgcatagtgctagggtggtaaacacatacttcataaacatagtaacaaccttcccaactttttgggcctttagttctccaaacaccatttt

SEQ ID NO: 19536 - DNA, 532 bp, Glycine max
  Clone ID: PAT_MRT3847_117646C.1
tgctttagtcattgaagaacttgacattgacaaagaccgcacaattaatgagaaggaatttgttgctgggtttgagaaatggcttagctcaacttcagctcctgctcctgtgtcagattctgagtctcaagaagatatgtttcagtcctgggttccggccgctccgcagggcatgtgtgccagctccctgcgccacttgtgctagcgatgcggcctcggctttcggccatgccagccgttaggcgccgagatcctcctctcttgccatttctgagatttatggaggggtgttcatgaataacattctcggtttctttgcaatctcggttctgatctttgtgcgagaagtcacttggcaattctcagctgaattgctggttgttgcaattgtttgtgcaataacgggcattactgcaagttttcactccattttccctatatggtcatccttcattgcaattctcttatacccattgtctttggttctggtttttatacttgaccatgttctcaattataattaacaacccta

SEQ ID NO: 19537 - DNA, 437 bp, Glycine max
  Clone ID: PAT_MRT3847_117647C.1
ttcagactgttttggacgttattaactcataccgcaagcatcatcagtgtagcaatgtcatctacatgaaggctgttaactagtgagtgagtacatgcaccgttgacaacatgaatcccaatcttctcagctacggtgatggcctctcaaagaccagcatcactgtgacgcatcaactttcacgatggtaccaataccatgagaagggccaccttcacgactgttgctgaacatttcatggccaaatcagttgcattcgagaacaccgctggtgcggttcgacaccgatcaatgacactccgcatgcaaggtgatcgttcactgttctttgattgccctatgcgtggttatgagtacacattggaatcccacgcctatcgtcaattctaccgcaactgcgaaatctctggaacaattgtcttcagcctcggctactc

SEQ ID NO: 19538 - DNA, 350 bp, Glycine max
  Clone ID: PAT_MRT3847_117648C.1
ctactccgctttttgttttcaattttcactctttgttttttttaaattttttattctctttcatgataaagatgatgcccaatgatgcacaactaaaaactgcattgagcagtttctcaatggtttatgatttgtcattgacttttccctaaccaccaccgttgctgccacctccaccaccactaccaccacctccaccacctcctcctcctttatttatttatttattattgacatatgtggtggtttgtgaaggctattgatgaacgccattgtctttaaaactgcgtgatttgttctaagctatgagatctgagggcattttctcgctaaaaaaaaaaagaaaaaaa

SEQ ID NO: 19539 - DNA, 267 bp, Glycine max
  Clone ID: PAT_MRT3847_117649C.1
acaaattgccatgaatgtatgctaatgattgatatccctataagctaacttccatgtgcttccatataagccaacttccatgtacttcctttaactaagttatgaccaataatctgcagcttcttgtacctaaattcataccttagataacaatctgcaacttcttgtacctaaattagaggagaacaacaatgaataacaatgtgcagcttcttgtacctaaatccaaattagaggagaacaacaattaataacaatctgcagctt

SEQ ID NO: 19540 - DNA, 379 bp, Glycine max
  unsure (1)..(379): unsure at all n locations
  Clone ID: PAT_MRT3847_11764C.1
aggctattgcactaggcatggttgctgggatggctacaggatggcttgtcttatgctcaagggctaggagctggcagcgaccattcgacccgctgggatagatagctgacaccacacccactctcgctgtgagtggactataccagcaaatccacaccaagatggccttcttctgggaattgccaagtactatcaagcgggtcgacgcgtaggctcgttaaggctagagcgacgctccaagcgactctagcctcacctcgaggatntggcacgagctatactgttgaagactggagaggaccgaaagctacacataggatgataacgcatggtgactatcacgctgtacgaagggatgatacattggcatggactcact

SEQ ID NO: 19541 - DNA, 195 bp, Glycine max
  unsure (1)..(195): unsure at all n locations
  Clone ID: PAT_MRT3847_117650C.1
tnnnttgcgaaccaaggtggcaatttatttaatattaatttgggtataaattaattaggggagccttgaaccccaattttaaaaggggtttcaatcctccctaaaacattatttttaaccaaagtccaaccaaatttggaggcgcggtaccccaattcctcaatttccccttatcacaaaggcaaatccggaggt

SEQ ID NO: 19542 - DNA, 284 bp, Glycine max
  Clone ID: PAT_MRT3847_117651C.1
agaattattaaattatcatttttccattgaagtatagaatgggaatttattctggacccttattaaatattttaatagaacgaaactttttaattttaatttattccattcaatttctggcccccttccattcattttttttctattaccctttaattttccaaccttaccctaattggttgggaaccttccagaattttttttggacctccacccaaagccagtttgaaaataaaaatgggaatttattgccgttccaccaaaggttttataaaatgggttaa

SEQ ID NO: 19543 - DNA, 1912 bp, Glycine max
  unsure (1)..(1912): unsure at all n locations
  Clone ID: PAT_MRT3847_117652C.1
gcgggagaaggttattgattcaggtggaattagacaaaatcattccggtcaaagtgcatctgctagtttcctgccagggatgaggtttatgcagcatcgtctgactactacagcaccctcctttacaattaagaggatggctgctgatggagcctggatgcctgctgttggcaatgttgccacagtattgtgctttgccatatgtctagtcctgaatgttaaccttactggtggctcaaaccgctctatatttttcctggctcctattctgctgctgcttaatcaagattcggattttgttactggttttggggacaaacatagatattttcctgttactgttgtcatctcggcctacttcgttataactgccctctacagaacatgggaagatgtttggcaaggaaatagtggatggggtcttcaaatcggtgggccagactggatttatgtggtgaagaatttggccctcctcattcttaccttccccagtcatatacttttcaacaggtacgtgtggagccatacgaagcagagtgactcatccccgtggataactttgcctcttaatctgcttcctattgcttgtacagatgtactcaagattaagatcttgggtatattaggagttatatattccctggcccagtatctaattactaggcaacaatatatctctggtttaaagtacatctaaaccatcatatatactgtacgatatgtttgtcaatttaggtattcatgcacgtgcttgtcttcctaaatttgtatgaggaatatgtgaatgcatttttgttattacctataacccattcggataaatttaaatcaatctttcttgatgcaatgcttttgccctgggtatttgctctacttgtagctctctttcctgttacttatcttttggagggccagctgagaattnaaaaatattcttgaagatagtgagataggaattttgggtgaggaggagaagaagcttacaacattgctggcaatagagggtgcccggacatcccttcttggtctatatgcagcaatcttcatgcttatagccttggagataaagtataaacttgcttcaattttgcgggagaaggttattgattcaggtggaattaggcaaaatcattccagtcaaagtgcatctgctagtttcctgccaagaatgaggtttatgcagcatcgtcgggctactacagcaccctcctttacagttaagaggatggctgctgatggagcctggatgcctgctgttggcaacgttgccacagtaatgtgctttgctatatgtctagtcctgaatgttaaccttactggtggctcaaaccgctccatatttttcctggctcctattctgctgctgcttaaccaagattcggattttgttgctggttttggggacaaacatagatattttccagtgactgtaatcatctcggcctactttgttataactgccctctacagcatatgggaagatgtttggcaaggaaatagtggatggggtcttcaaatcggtgggccagactggatttttgtggtgaagaatttggccctcctcattcttaccttccccagtcatatacttttcaacaggtacgtgtggagccataccaagcagagtgactcacccccgtggataactttgcctcttaatctgcttcctattgcatgtacagatgtactcaagattaagatcttgggtatattgggagttatatattccctggcccaatatctaattactaggcaacaatatatctctggtctaaagtacatctaaaagatcatatatactgtacgatatgtttgtcaatttaggtattcatgcacgtgcttgtcttgcctaaatttgtatgaggaatatggtgaaatgcatttttgttaaaaactttaacccatccatcta

SEQ ID NO: 19544 - DNA, 423 bp, Glycine max
  Clone ID: PAT_MRT3847_117653C.1
acgaggttaaagggccatcatggaccttaagtgtatatgcttaaacttagaaatgttgtggttgcagtttttgtgtaggcagggtatttattctgtaaacggatgaaagtacctcaaacactaaaattaaaacagtggccagtggttctgaaataggaaaaaagtcttagtttaggtgagaaaaaattgaaatgttgatgagggattgggcccaacaataatacttgcacttgaaccaatattgaggttatatctatcatggtgaatgattgacaaaatatttcaccctagctaacaaagtgagtctctaacacaggtcaacaattaggataatcacaagccataggagagaagggtggtagattttaacaactgtcaaggaaaagagacagagtgagatagagagagagagagagagagaga

SEQ ID NO: 19545 - DNA, 948 bp, Glycine max
  unsure (1)..(948): unsure at all n locations
  Clone ID: PAT_MRT3847_117654C.1
gggagtgccgccacgcgtncgacagaagcaagaggcagactttcctcaacactctttgctggcctctcctctcaaccttctctctcttacatacttttcttcatagtgctaaattttctattcatctcacattctcactctcctcaattctttttcttttctcttctctcttcttcaacttcattcaaaactttcacctttctctctcttcacaaacggtgccggaaaagtccattctttttctcaattccccggcaaaacaaatgcgacccactttctagaacctcgccgtgtgccggaaagttcactcctttctcacttttccgcagcaatgtcaatcttcgacggagctttcatgaacacgcaactctccaagcacacttcgatcttcggcctccgtctctgggtcgtgatcggaattctcatcggagtcttcatcgtcttcacgctcttcctcctctccctctgccttgtctctcgccggaaccgccgccgctccggcgcaggcaccggctacaaggtcgccggaggcgccgacgcggcgaaggacatccacacgatcgtgcaccttcccgggccccacatgctccggcctccggcgccggagatccacgtggagatggggaagaagacggagcaccgggtggtggtgcagtgcgatagggtttcaagtgaggagagtaaggtcacggtgggggagtgggtgtgaaacgacgtcgtcttttggaagtgggagtgttggtgggcctgggcctgggcttgggcctgaggtttcacatctcggatgggggagatggtacactctctgagggagcttgaggatgccactggaggattgagtcctgaaaatgtggttggtgaaaggtggctatggaattgtctatcatggaggactcaatgatggtaccaaaaatgctgtcaaaacctcttgaatacaagggacagctg

SEQ ID NO: 19546 - DNA, 721 bp, Glycine max
  Clone ID: PAT_MRT3847_117655C.1
cttcggacgaaacaggatacagaagcaagaggcagactttcctcaacactctttgctggcctctctctctctcttacatagtgctcaatttcccattgttctcactctccacaattctcttctctttcttcttcaactccattcacaaacggtgccgggaaagtccattccttttctcaattccccggcgaaacaaatgcgacccactttctagaacctcgccgcgtgccggaaagttcactcctttctcacttttccggcgtaccattaccctcttttttttcccgcagcaatgtcaatcttcgacggagctttcatgaacacgcaactctccaagcacacttcgatcttcggcctccgtctctgggtcgtgatcggaatcctcattggagtcttcatcgtcttcacgctcttcctcctctccctctgcctcgtctctcgccggaaccgccgccgctccgtcgccgtccccggctacaaggtcaccggagacgccgacgcggcgaaggacatccacacgatcgtgcaccttcccgggccccacatgctccggccggtggcgccggagatccacgtggagatggggaagaagacggagcaccgggtggtggtgcagtgcgatggggtttcgagcgaggagagtaaggtgacggtggggagtgggtgtgaaacgacgtccgtcttttgggagtgggagtgttggtgggcttgggcttgggtc

SEQ ID NO: 19547 - DNA, 561 bp, Glycine max
  Clone ID: PAT_MRT3847_117656C.1
cttctttatttctacattaattaattattctcttgcaaattccattaatcaaatgatgcatgaactatgatactacccatcttcttctaactgcccaccattgacttgttttgaagcacatttctcatcaatggagagacagagaagtttctccttcaaacccactaggcttttggtcttctctttcactattttttcctccatcctcttcctctctaccttcaccacctggctcaccaattacacaccttcaattcaccaacagattcatctttacttcaacacttctacttcttcttcttctgtcggtgacggtgaaagtgacagtgtggctcttccacctttaactgttcattccttgaccaaaaacttaactgtaaatgtcgtgaaagttccaactttgatcgataaccgtcttgctaggacccagaaaagcctctctggatccaaatctgaacctgtacgacaccatgtcggtgcctcaaatgttaatttcacgtcaatggaagagtatggaacttcacctgagagggtacccagcaaggaagagaagaaggtagt

SEQ ID NO: 19548 - DNA, 616 bp, Glycine max
  Clone ID: PAT_MRT3847_117657C.1
ctaacgacaattgctcagagggttttccaagttcgccttcaagcattcaggacgcggcgttgttgtccgccgtcgcaacacttaggcctccgcagaaggggcctccgcaatcggctagcgtagccgccaatgccggcgctctcaatgcccgcctcgtctatgctacccaccccgtgcctcgaccgtccccccgctgcccgaggcaaacggccttcttctcccaatctcttcgtcaatcggcttcctctctctaccccccccggtcctcccccccaggtgttttcggagtttggtgaagctactctagccctgcttccattagtgtcagtgcccgggcactcttccgctgtcgccttcttgtggctcggcggcggcgtggctgcccgttgggccgtccctcagggctccggatagggttcctctggcagcggcctgtggggctccatggcagggccgggccaacactcaagaagaatagaagattcacacgttgaagcaagggtcttctcaaagactgaaatataaaagcatatatgcctggaaggagtcatagagttggttggagcttgaagagcttattgtgttgctatgatgaaacttgccaccctttaccctt

SEQ ID NO: 19549 - DNA, 678 bp, Glycine max
  unsure (1)..(678): unsure at all n locations
  Clone ID: PAT_MRT3847_117658C.1
cccgcgtccgccttcagcgcgctctctctctctctctctctcctgagtgctgaattcgccgccccttttttccaacctctctttcttcgaagcttctctctctctctctcaaatcccttcccttcccttcatcctcctctttcagatctccctttatttttcttccttttggttttttcttcgattttgagatctagggccttttaatttccgcaattactcgcaccgcttctcttttcttcgttctagggttccgatctgtcgttcaattctgttttccattgtgggccgtgtctgaattctcgatccgttccttttttcttttcctttctccttaaaatttgttttcttggtgtcggtttgtttgaggctgttctttttagatttttttaaaaatatctttctttttcggatatttgtgcgttgagatcatggggggctcggaaggggtgggagcatcgtcgaagcaattcggtgtcacgaagcccatatcaatggctggcccaacggttactgatttgcagaggactcgtgagttagagaagtttctcgctgtttcggngctttacgagagcaaggaggaagctgccaaagggaagaggttcttcaccgacttggagagatagtgaaaaaatgggtgaagcaacttacccgccttaggggatacactgatcaaat

SEQ ID NO: 19550 - DNA, 384 bp, Glycine max
  Clone ID: PAT_MRT3847_117659C.1
atagtaacactaagagtagttactactatccctaaatataatagccatgcaattagtactattgtgtctactgatactgaagctcactccagcctttgcaaccaccccgaatgatgcctatggtggtgatagtagtggctgtccattagggactgacatataccaatacacttgccctgaagctgaggccatcatattctcttgggtggagcaggcagtgtctcaagactcaagaatggcagcctcacttcttaggctacatttccatgattgctttgttaatggttgtgatgcttcagtcttgctagatgacacacaggactttgttggtgagaaaactgcgggtccaaatttgaattccctgagaggattcgaagtaatcga

SEQ ID NO: 19551 - DNA, 509 bp, Glycine max
  Clone ID: PAT_MRT3847_11765C.1
tctagctatctcgatcgaactgtccaaggtcctgtcaccgcctaacaacacaagctactggaacaatacaacgcaggctaacactagtgttgagtgggatacctaatggtgtaaacgtaatagtggttacgggctgaataatgccagacaatgctaaaccaaaagttaagggtttagtggtacggcgtaaagcaaacggtagggccgtgaagatggtgggtggtgtcgcaaggttgcgaaggggtacagccccgccattgtttgcatccgggggcaactggacgacaacagtgagttaggcgacgccgtgtataagtacgcaacagtaagaagcgcgaattattggggtctatgttagccttgtagtaagcctagccggcgcgagtacgagcacaatggtaaaaacgcatatacggtagacaacgagggtgcaataacgagagtggtacaacagaagcagcgggggcagccagcacacatggagagatattacgtaaaggggggaggag

SEQ ID NO: 19552 - DNA, 199 bp, Glycine max
  unsure (1)..(199): unsure at all n locations
  Clone ID: PAT_MRT3847_117660C.1
ggagagtagtgtgtggttgaaagttaagaagtagcaaagatgtttnnattcgggtataagggtnnaaagataaagngactatggtggttatgtagaagaatgtgttggatatnaatagcatcancagtgnngacgggatcgtcggnancggnttagacttctnaggtagtgcacncgatacagttacntttttagnntc

SEQ ID NO: 19553 - DNA, 543 bp, Glycine max
  Clone ID: PAT_MRT3847_117661C.1
ggacaaaaaacgaccccttgaatttaaagggttttaaattgaagtccagcgatgcccaaaaaaataaagcttggaatgaaaaaacaatccgaagatgcttcctttctttttttcaaagtaaaatgaagttcacgaggaccatcatcatttcatatttcccctccctccaaaaattccaaagatacacaaattcttcaaaatcacagcccggggccctcctttccttaaatttaatttttttccatgggtttcactttttcccattggtggtgccactccctgcccctatccccttattgttaacacaagggttcccccacccaacattctgaaaatgggagaatcaatcacaagaccccatgatcatcgaattggattggatcctcgacgacccttgatcaatcagccccattttgtacactttgacaatgatccggtccaggggaaccccaaaaacaaagttgagatttttagccttttactcaggtcatcaatctctttacaacaactaccatgcttttatcccattgtttacattcttaa

SEQ ID NO: 19554 - DNA, 395 bp, Glycine max
  Clone ID: PAT_MRT3847_117662C.1
gttctgctaaaccaaagtttctttcttaacgtagaatcaacacaaaaacagtcaccattcacattcataaactctccttccacaacatacatacatacataaataataaatacacatcatcaaactgacaattagttaattaattccatagcaccagtaaaattaaaaagaaaccaaatcatcacaaaaaataaaataattaaaaaaggttaattaggaattggtggtgttgttgttgtgagtgggagaatgcaaagggaagagtggcaaaagctcaagaggttgagaagctcgaggggaagggggcaaggagaaccctttctccgctatcgctctttcttctttctcctcggggggcgtgcgtggactttcacgcgccaaaaacttcagtgggg

SEQ ID NO: 19555 - DNA, 878 bp, Glycine max
  Clone ID: PAT_MRT3847_117663C.1
gtgctcgggaatattctttaaggcagttgctccttgatgttccaggacatgttgatatggtcatatttcctaactatgagagcagtatcgagcgagatgatatcaaagaaccttttagtgaggtatcgatgtttaaaaagaattatgaccatcttccaaaggatacatactttggcatgtataaagattctgtacgtggcaatccaaactacttcctgacttacggaaatggaaaatcagctgctcggatacaagatcatcttcggcctaatggtgcacatagatggcataattatatgaaaaccccaaatgaaatcaaattggaagaggctgctgttttgcattacacatatgctaaattctcagacttaacttctagacgtgaccgctgtggttgcaaacctacaaaagaagatgtcaaaagatgcttcatgttggaatttgacagaactgcatttatcattgcttcaactgcaactgaagaagaaatgatgaagtggtataatgaacatgttgtgtggggtgataaagacctgaagatgaaacttttgaggaagggagtattgactcgtatatattctcccatggtcataattcaaagtttaagggaatctggagtctttagttctgtcattgcatctgccccatcactttttaaagaaaactttctgctgtcaattgatagtagtaattcttcaagagtctctgcctctgtaaccctcccttctagaaaggttggaaggaccaaagaatctcaagcagctacacggaaggctctgtctgttgaatctgctgcatttcacgaagtggctgtaccaccactgtctcccccagtagtagatgacaatgacctcatttcacataattgatcttatctc

SEQ ID NO: 19556 - DNA, 2357 bp, Glycine max
  Clone ID: PAT_MRT3847_117664C.1
ctaagttacctttttcggccttttggctacgatcaagtgtagtatctgttcttatcagtttaatatctgatatgtgggtcaggggaggattcttcacagtagcttgctgctggaatcatcatttagtgtcgctcaagtgttgcactacaccttcggcctgccacaccccaccatttcagttctaaccttagtaagaatctattaacagcaaggaaaccatgagtagcgccgcctttaaggtcggtgtgttggggagtggaatttcaggagccgtgcgtgcttcaactcttgccagaaatggggtttctgttactctctttgagtcagctagaggccctggtggacgcatgtcccaaagaagagagagaactgaagatgggacggagctgcattttgaccatggtgctccatttttctcggttagcaagtctgaagttttacatctggttcaagagtgggaatcaaggggtctcgtagctgaatggaaagagaagtttgcctcgtttgattttcacacacttaaatttaacaacatagagcaggaaggatcaagcaagagatatgtgggtgttccgggcatgaattctatatgcaaagcattatgcaatgagagtggtgtggaaagcaagttcggtgtgggtattggaagaattgaatggttgcatgatgagaaactgtggtcattgataggggtggatggacaaaatcttggtcaatttaaggggcttgttgcatcagacaagaatatagtttctcccagggttgcagaagtgacaggaaggacgccaccacttgatataaaattggtgccagagttgtcagaaaagttgcttgatcttcctgttaagccatgtttcattgtaatgctggcatttgcagagcctctatcaacggttccagtcaaagccttttcttttgaaaattctgaagttttaagccaggcttattgtgatagcagcaagccaaaccgttctactacaagtgaaagatgggttcttcattctacagcagaatacgcagaagatataattgctcaaactggactcaagaagccctcagacattacactcaacaaagtggccgaacagcttttgcaagaatttcaaagcacggggcttatcacatctcaaccatttttcaagaaagcccatagatggggggagtgcattttctgctgctagtattgcccaagaggaaaaatgtctttgggacagaaacaagagactagctatctgtggagacttctgtgtcagtcccaatgttgaaggtgccatagacagtgccttcgcagcagcattaaggcttaaagatagtgtcagctctttatagttggagcattacaatctgtagttctccaaaccttgcatgcctttatttcagttttttctcctgggaaaacgtgttcaaaatttcttttaagacatttctgtattactaaacgcgaacaaatttcccttctacgacgaagccttgcacactacaaagtatgagaaagaggtacagggtggttgcactttgccgtgccaagtttgcaggaaaatggtgatgaaaccacctttgaaatcaaacagtgttgagtttagtcttaacaacaaaaaataaggtaaacatatgttaagtgcactagatgatggcctaatgtactgtaattctgaatttgtgatcatgttatttccttttagttataactaaaatacatttcagaaagcaccatggcttgacccaacaaatatcaaaatatcatcatcccacatgtaatggttattttcaaatacagatatgtgcgtgtgtgctaggtttatttatttcattggaataatgttatttgatttaattttatctaaaaacagcttaatttttatatgcttgagaagttggaattttcctacagggtcctgaattatatcataagttggagaagttggttttgctctaatggaggggacagagagactatgttagtatttccaatgccatcccattacaatcaggacaaaacaaccacaccaataaatccttcataagcctgatttgcaaaaactttttgcactcccactattgtttcctgcacttcccataattgcattacaaaatgaacttgccggaaaacaatgagaagcgcagaaagcagcagcctgatagctatcataccttgatcatggattgaactttcagactttgaggatcctctatggcaaggagttaagggacaagcccttttaggttttgttgccgaactaacatgtaatacaaaccatgtcaatcacaagacatcgatggcttttaaagtgtcatcggaagtacagctatgatcgtcttagagtttaacataagtctatatcctatattttagctct

SEQ ID NO: 19557 - DNA, 1271 bp, Glycine max
  Clone ID: PAT_MRT3847_117665C.1
ccgtcccgaaaaacttatgtctagattctcagaaagtttctatcacaagactggaatgtataatttgtttttttgtagcttgtgaacccaagctcaagggcatagtaatgagtgggaagacagtatggaaaaaccctgatgggtatttacctggtaggatggccccattaaagaagttctatgtatttatgacactggcttatgtttgccttagcatcatttggttttttcagtatgtgagattttgggatgatgtactgcaacttcagcactgtatcacagctgtcattgctcttggattgtttgagatgattctctggtattttgagtatgtgaatttcaacaatactggaatgagacctattgtgctcacaacatgggttgtcactgttggggctataagaaaatcaatatcacgacttctcattctctctgtttcaatgggttatggtgttgtgcgacccactctgggtggtcttacatcaaaggttcttttacttggaataacttactttctagcatccgagttactgaatattactgaatatgtggggaccatcaatgatgtgtcaggaagggcaaggctccttctagttcttcctgatgctttcttagatgcatttttgatattatggatttttacatctctttcaagaacactggagcagttacaggcaaaacgaagttctgttaagttggatatatataggaagttctcaaatgcattagcagtaacggtgatctcctcagttgcttggataggatatgaggtatacttaaaagctacagatcctttcaatgagcgttcgcagagtgcttggatcaacactgcattctgggacactctagcatttacattactcaagcatatatgttatctctgggcccccttagttcgccaatacaagaatggtggaactgatgtatcctttgatcaaaaagacgagtcagaagaggaggataaaagggaatgagcgcttaagagctttttattaaccgcacttgcactgtttttacagctgtgttccgcaacccttcacgagaagtgttgtaaaattttgttcatttgtaccagaatagttagaatacgttttattgtgtatggaattactgtataacaagtattgtccatgccgatgatccaatttgctatcctattttttccctcacccttgtggacttcgaaatcttttcgattgttggattagtatgtgtgtataattaaaaaaagaacagtgaagtctctaatgtgtcaaaaatcctgagttagg

SEQ ID NO: 19558 - DNA, 1845 bp, Glycine max
  Clone ID: PAT_MRT3847_117666C.1
gagaggaaaaaaggatgggaaataacatggcaacatacaacaaatacaaaagtttcttgttctttatcagaaagttcaaggtcaccgagccagtttcacctcaggaccttgaggaggcgttttcaaagttcaccggaggaggttcccacatgtctgcggacgagctccaccgtttcctggtggagcaccagggtgaagaagactacacgttattgaattcggagaaagttgttgagaaggttctgaaagagagaaagagatgtcaagaaagtgttaaggttgatcaaaatagagaacatgagatcacccttgatgagctcttccgttttttgcttcatgatgattccaacggtcccttgaaagccgaggtacatcatgatatgggtgctccattgtcacattatttcatatatacaggccataactcctatttgacaggcaatcagctcagcagtgactgcagtgaagaaccaatcataaaggctttgaaaagaggcgtgcgtgttattgaacttgatttatggccaacttacaataagcatgatattaaagtagatcatggatggactcttacaaaccctgcttcagttatcaaatgtctagagtccataaaggaatatggttttgttgcatctcaatacccagtgatcataactatagaagaccatcttacaacagatcttcgagctaaatttgcagaaatggcaactcaaatatttggggaaatgcttttttaccctgggacagattgctcttgcttaacagaattcccttccccggaatcactaaaaaatcgagttattatatcaacgaaacctccgaaagaacgttttaagtccaaccgtatcaaggacaatcctatgctgaatgaaagtgattcatctgaagaagaaacatggggaaatgaatctccagactccaacaagaacgaagtggagactgaggacacgaatggaagcgatcgtgatgagggaaatgtaagtgcatgtgaatgtgaccataaaccatatcaggagtgttcacctgattacaaacacataattactatccataatacgaagctcaagggatgcatgaaggataaattgaaaacagacggtgaagttagacgcctaagttggagtgagaagacccttgaaaaggcttcagaatctcatggaacagatattcttaggttcacacagaaaaatatcctcagggtttacccaagtgcaatgcgtgtcaaatcctcaaatttcaagccacatattgggtggatgtacggggctcaaatggttgcatgcaatatgcaggggcttggcaaatcgctctggttgatgcagggtatgttcagggcaaatggaggctgtggctatgtaaagaagcctcaatttctaatgcagaagcatcaatgtgacaatgagtttgatcctacaaggatacagtcagtgaagaagaagacattaaaggtaaaagtatacatgggacacggttggagctcagatttcagtcctacacactttgacaaatgctccccgccggacttttacactaaggtccgtattgttggaatgccagctgatgttgcaaagaagaaaacaaaggttatgatggatgattggtttcctgtttgggatgaagaatttgaattctctttaactgttccagagcttgcattgcttctgatacaagtaaaggacaaagatcctggaaaggatgactttgctggacagacatgtttgccagtgtcagagctaaaacatggatttcgttcagtccctttatataacaaaaagggtgagaaatttaaatctgtaaagctgttgatgcggtttcagtttgaatgaattgtagcatgctgtctcc

SEQ ID NO: 19559 - DNA, 875 bp, Glycine max
  Clone ID: PAT_MRT3847_117667C.1
aaaaaaactgattcatatttcactgtttggacactgcactgttgcaaaaccagtgaagaaaaagaaaaattcctggttttaattgtgtttggcactttggcttccatttagttgttgtagaaattttttaacactatttaactataaattgttacgaaatgttggtttctcgagccgtgacaggcaaaacgaagtttctgtcaagttggatatatataggaagttctcaaatgcgttagcagtaactgtgatctcctcagttgcttggattggatatgaggtatacttcaaggctacagatcctttcaatgagcgctggcaaagtgcttggatcatcactgcattctgggacattctagcatttgcattactctgtgttatatgctatctctgggccccatcccaaagctctcaaaggtatgcatattcggaggaagtgggagaagattctgatgacgaagaagctcaatctctcactaagggaaagcaggaaggtcagggtgaactaagtttagttcggcaagagaagaatggtggaactgatggatcctttgatcaagaagacgagtcagaagaggaagataaaagggaatgagcgcttaacagctttaattaaccgcacttgctctgtttttatagctgtgtttctaagtcttgtatcacaacccttcacgagaagtgttgtaaaattttgttcatttgtagcagagtagttagaatacgttttattgtgtatggaattaatgtataacaagtattgcacatgccgatgatcaatttgctatccaattttttccctcacgcttgtggacttcgaaatctcttcgattgttggattagtgtgtgtgtataattaaaagaacagacaagtctct

SEQ ID NO: 19560 - DNA, 410 bp, Glycine max
  Clone ID: PAT_MRT3847_117668C.1
cctttgtgtgtttcggatccgacgcaaaagtcgatctccttcctctacgcaggtgctatatagtactatgcacatcgcatatggctatgcaccagtggacctacctagacacatgtacatggctgcaaaggtagatacagacatgtcccacctatgacatgagggattaaatacgctctatgccaccagttatataggcatagtaaatagtctggtaggcataatattaaacgagtattgaaccatggtagacatggatcactgttgatccaagaattcatcgatgagcacacctacaaggaaaggaacggcgagaagaagcccaacgtctggctagctgaggtttgcacatcgtgagacgccatcgatgatacgttaccgctgaattaggatgccaaaaaatctgatgt

SEQ ID NO: 19561 - DNA, 394 bp, Glycine max
  Clone ID: PAT_MRT3847_117669C.1
ggcttggaacctttgggctgatttatgtgcttgtttatgtgcttgcatggtcgtgagaatgatagaaggggataaacaacaacaacagcacgaacgaagggaaaggagagagagagagagagagagagaggcctccatacgagagaagggtgcgcccggacgtagcggcggaagtcgcgggacaaagtaacggactcgagaacagagaaagaagagagaagagaaaagggggcggaacaccgagaatagagacacccggacccgaagcgcgaggagacgagagagcccgccccgcgaagcgccaacaaaaagggaagcgggcatcgaaagctcaagaaagcgttggaaaaggaagggtcttccctaccccaacgcttatcaaatccttatacat

SEQ ID NO: 19562 - DNA, 393 bp, Glycine max
  Clone ID: PAT_MRT3847_11766C.1
ctcaaacatacgtattctttacctaatactttcaacattctttttaccctacctaatatattcatttatggtagtatttatcaacacggtctcctccccttacttaaataattcatcataactcctcctaacacacttccttttttccttccacacatcattcaaatttcttccctatcaactttccatcataatatatattcctaccatatttattacaaatcacctataattactcttccatttccaatattcaaccttaaaaacttttaccacatccaatcaaatcatcaaactctcaaattacccaatccttacacctatctactaattacaataaattacaataccatactcatataaacctattataaaaatcacaacaatttaaat

SEQ ID NO: 19563 - DNA, 268 bp, Glycine max
  Clone ID: PAT_MRT3847_117670C.1
ctcaacatcaacattatcctgttattaagttctgcaataacatatagggctccttcacacacttgtacctcatgacctgctacggctattcaccatagaccgcgctgagcctttctcggaggtgccgcctatacagcctgcacaggccctacttcgatatcgacttattggccacgcacggcttctctccttaacaaagcacgacaggcatgcaaagccaacacaacatcgttctgtgcgagcccagcaaccttaacctacacaaatt

SEQ ID NO: 19564 - DNA, 421 bp, Glycine max
  unsure (1)..(421): unsure at all n locations
  Clone ID: PAT_MRT3847_117671C.1
cgcatgcacccctcntaatctcnnnattgggggggaggagaatggttttcaatggttcaattttttttcctgtgttatgcttcttagcactgtcacttaaggggtttcttgcaaaggataatggacttattattaacttctacaaggaatcatgccctcaggctgaagacatcatcaaaaaacaagtcaaggttctctacaagcgccacaagaacactgcgtttctcctggctcacaaacatcttgcatgactgtgctgttcacagttgttatgcttcactgttgctggactccacaataaagagcttgttttataaggaaacacatacaagcttttgggtgagaaattttaggtacattgagaccatcaaagaatcttttgaaaaggaatgcccatgagttggtttctgggctgatatcc

SEQ ID NO: 19565 - DNA, 350 bp, Glycine max
  Clone ID: PAT_MRT3847_117672C.1
aaaaaaaaatttttagtttatttttgtttttgaaaccccaaaacttatttaaatcaatttcattttatttgataaaatttttaaaattttcttactaacctggaaaacattattaaactgacccttagtcccggattaaattaatgggaattttttcttattggaaccatttttttcaattaccttttatttttgaaaaacaatgggtccataaattcaactgctttctaaataataccgtccattaacaacccttattttggaaaaaaaccaaaatttctttttaaaaccaccctttttaattttttttaaaacccatccatcttttcccccttttgaaagaacctttt

SEQ ID NO: 19566 - DNA, 666 bp, Glycine max
  unsure (1)..(666): unsure at all n locations
  Clone ID: PAT_MRT3847_117673C.1
tcccggngtcgacccacgcgtccgttttttaaagattttgaattattacgtgtggccttggaacctcaataattttttaaggtcttttggcatttttcttttacatttgcaaatttcaaattcaactattaattcggaccgtcatttttttcttcttgttggaagcttagtttttttcctattagtttggacctaccccattttttttgttcttctggtacataaataggaccagctttggtatacataaagctctggcttcatcacaatagtactctgcttttggcttcctcccctggtttgttgagtactctacttacatcacaagattaaatgtattttaatacatatccttttattatctggtttaatacattgcatagcttttactatcttttctaatattgattagcatttattatttgttttaatatttgcatagcattttttatttacttaaatattttcatagcattcattattgggttttaatgttttcattttattattgaataataatttgcaaaatattttgaataattatattgaatgtttttaaaagttgtgaagacaacaaatatatatttgtttaataattttttttaaaaaatattaaaaagatttgtagaatatatttattaaaaagtttttgtctcaaaaaatact

SEQ ID NO: 19567 - DNA, 437 bp, Glycine max
  Clone ID: PAT_MRT3847_117674C.1
gaactctacatattgaatgttgtcttttatttatccaatgcttctcaccgcaacaaaaaaaagaaactgggtgcgtttaaaaaaaaagtaatccaggggcgccgaaatttttatacctgggggcgcaaaaaaaaaaaggcattgggggccccgacaaccacaaccctttttactgggaacaaggacccgtgtttggccccccgggtaaaacaaacaattttggaccaacaccggcgggggggccaactttggttataacagggaaattagagcctgggccttggaggggcacagcttttccctgtgagaaatggttataacgtcgggattacacagggcataagagccggacggataaaaagtaaatcccggggcgcctaccgagagagctaactcccataaattgagttgcgctccctgggggctcttaagggggg

SEQ ID NO: 19568 - DNA, 389 bp, Glycine max
  Clone ID: PAT_MRT3847_117675C.1
cactaggcatgtcggccgccctggataacaggttgtattgtatatctctgtgccgtacttctttctggaccgccttgaaagatcagaaacatgatctgttcatttctgaggctcaaactgcaggatacctcacaggacctggagcagctggccacctttccgccggtacattttcgtcagccatgtttaatctgccgcctcctgctgaccttgatgcaggcgaccttggctctctgacttgaaatatgcgcgcgggacagctttcgctggttggccattgccgagtccacattcctggcgctggtgcgttgcagcaaactcttactggctttgtgctggttgctgcccgtgctattcctttttcttgaatatatttttcgggggggaag

SEQ ID NO: 19569 - DNA, 283 bp, Glycine max
  Clone ID: PAT_MRT3847_117676C.1
gggccgaccggaaacccggaagacccacccccgaataaaaccccccagacaaaggcggcaccggggaccagaagagaacacgcgccccacaccccaccgcgaccaaaacaaaccggaacccgagaaaaccaaacccggcaacaaacgcggcagacacaacacaggacaaacacgagaaaaaccagcccgacgaagaggaaaagcacggaagcgacagaaacaaaggcaccccgccgacgcaccgaaagcgagcccagaaacagaaccaggcgccacgaaagcc

SEQ ID NO: 19570 - DNA, 211 bp, Glycine max
  Clone ID: PAT_MRT3847_117677C.1
gtcgtttgtgcttgatttttttacattttacttgtttgaccaccgacgcagacttttttacttatttccattatgactatactcacttactttaataatattgcgggttactaatttattgctgcgctcttttgttggtagtcaaccctcgatctgaagcttcatcagggtgaacaggttggtgccccccgccataaaacacctttggggg

SEQ ID NO: 19571 - DNA, 571 bp, Glycine max
  unsure (1)..(571): unsure at all n locations
  Clone ID: PAT_MRT3847_117678C.1
ccccacctgtacatttttttattgaaagatgctatgtacaaatgtgtatgttacatgccttctcagaatgatatttgatttaaatataataaaaatgcttgcgaacaactcttgaattgggagaaccacttgaacacttgaaaaagcatttgtagtcaactgcaatcagacaggtggtgactaacattgaactctataagtagaggctggcagcaaatacaatatccctcttgattttggtgattccttcagcaaacttgttctccagctctgtgtttccaatggctttcgctgcttgacacatctgtcgaagcagttcttccaggcgcctcatacaacggattatactgccttcaaagacatctgtcattttgcagatgtgggcaaatgtggccccagttgcccaggtgtacaccacatccatcaggtgaggcttgaatgagcttaagtaagtttcttcatcaatctccagttttgcctctgcagaaacctttgcaatccttttagcacattcctgcatttgtcggagtctcgagccgaattccgagcttacgtacgcgtgcatgcgtnt

SEQ ID NO: 19572 - DNA, 334 bp, Glycine max
  unsure (1)..(334): unsure at all n locations
  Clone ID: PAT_MRT3847_117679C.1
caagaacgccgtgcccaagaccataatgcagctcatgagcgtcgacggcttgacccgcgaaaacgtcgcgagtcacctgcagaagtaccgcctctacttgaagcgcatgcagggtttgtcggccggtggcggagttggtagggtcgcctccgccgaactcaccaacgaacggctcttccccagtcggccgtggcgccgccttactgcagcggcgggatctgaccattattgccagtttgtccattccggctcgcacatcaccaaaagaggcaacagcaccacatttggcagggcatgacagtgtaattggcacngccaattggttncgcagang

SEQ ID NO: 19573 - DNA, 375 bp, Glycine max
  Clone ID: PAT_MRT3847_11767C.1
ggagagacctatcatatcgatgacaatgaaccacgccgtactgaaatgtgcaaatgaggacagtgcacaatcactcatttattgactacaacaaggagggatggggaggatgaactaaaacttacacccttgagccgtgccagacttgacgggttacatatacaacccattatgatggctggagacaatcggatgaagaacggaacttctggctcactgagtcataggtaggaacataagagaacagcttcatacagatgccattgggagaggggaagaaatgagtctgcgcccaattgaagtgcaaacactagaggcatccccatacactgcctgcaagagacactacacaggttatccatcaccatgtgccaa

SEQ ID NO: 19574 - DNA, 432 bp, Glycine max
  Clone ID: PAT_MRT3847_117680C.1
ctctaatctcaacatttccattttccaccttttattggaagtttcataccagaattcactgaacttgcattagatgagggcaaaacatgcgagcaaagcaaaaatctgatccctaatctctgtttttgctctggactctcccaatacccacccaattgaaaaattgaaatcccctttttttgcgttaaacgaaagcaacgtattcacccaaaccctagaaccacttccagatcaaaaccaacgcgattgcgcgatcaaaagaaggccagcatacatgttcaccaatgaccaaaggcaacaagaacgaactgggagatatggaacttccaaagtggaattccttcacaaattggggactcaggttcagaacacatctgaggatgaaacaagagagaaaattttatcaaatttggccaactttgcctatgatcc

SEQ ID NO: 19575 - DNA, 459 bp, Glycine max
  Clone ID: PAT_MRT3847_117681C.1
acgagtttcctccctccaagtagcagatatcttgcgaaaggattttaaaaagtggacaggacaagaaagtgcagattcaaggtcagtgcaaattggcatgagttgtatcggaatttcaatcggacagcttctttctcacgcagaaaatctagctcaagaaataacacgcttccagttatctgagaaacttcgagcacttattgtcgtttcggggtattataacgatgaaaataacttcaagagagaagttttaatatctacggaatctgcaaagctattggagagtttgctcttcttcttcgatttcaatgcttcccggctgccactcaagagcttacactttccaggtctgaaaaatgggatgaaagcgtatgagatcgataagattacatcaaggaaaatagtagagcatctcatagaagagttcgttgggataccaaaagcctaatagggtttata

SEQ ID NO: 19576 - DNA, 147 bp, Glycine max
  Clone ID: PAT_MRT3847_117682C.1
gcatgggcgatgccacgtttataggggttataaaagcaaaaactgctctcaatagctccttccagtgaacagatcatcaatgagggggagtgcgatcgctaactcatatgtctaggacgctgacagccacagagaaactgcctgtta

SEQ ID NO: 19577 - DNA, 1952 bp, Glycine max
  Clone ID: PAT_MRT3847_117683C.1
ggcactgttgtttagttatttcagtgttgctggtagttgtattgtagtattatatccgttttgtaaagcataaagctttaagctgataggaaattggaggagcgattggggtgagatgatgatgatggtaaggatagggatgttttatggggaactgggttcttctactctttgtttatcccatcgctgcaataactctacactttcacatatacacaaacatccctctcctctaatatctccaaactatgctgctactcacactcacaacaaacgattagttgcttctgcttcttcagctccatcagttagcggttcaggtgctgaatattccgagcagatggtggatgtgggagcaaaaaaagaaaaagaagagtatagcaggcatagatcaggacgaattagtggatccaaagcttttagctgatctagacagttgtttttgtgagttcaaaggagtgcatatacaccacaagatatgtgatgccgaatcaaaagcacaaagcacaccccagagtcggactgtttctcatcaaatcaagaagctaggttatcctatgattttgttacatggatttggtgcctcagttttctcatggaaacaggttatgaagccgttggccgaggttgctggttcaaaagttcttgcttttgataggccagcctttggattgacatcaagggtaaatttatctaggcatccttcttcagaaacagaagacgcaaaacctctaaatgcatactcaatggcattttccgtgcttgctaccctgcacttcattaaattactaaatgctcagaaggtgattttagtggggcactcagctggttcacttgtagcagttaatacttattttgaagctccagaacgtgttgctgctctgattctagttgccccagcaatttttgccccacttactacacggaaagttgttaaagaaaatcaatcaggacatgataaccaaacggaagaagacaacagttccatcagaaaaaatccaattttggggctttacaagatgttgtccaagactaccaagtacattgcagaggcaatatcacagatgatgaagtggacaatagatatcctcaacttttggtacagaaaattgttatcagctatcctgcgttcttcccttgctataatgctggtaagaatggcaattgataagttcggtactactgcagttcgaaatgcatggtatgacccaaagcaggttgctgagcatgtccttagtggttatataaagcgcttaaggattaagaattgggatagggcactggtggaatacactgcagcaatgcttctggatgaggaatctaaaacaaagccatcactttctaaaaggcttcatgaaatatcatgtcctgttctgattgtaactggtgatactgatcgaatagtcccttcatggaatgctgagagactttcacgagtcataccaggagcatcttttgaagtaattaagcaatgtggtcatctgccccatgaagaaaaagtggaggagttcatttcaattgttgaaaacttcctaaggagattagtgagtgattcaaacgaacaatatctacaagaagcaactgcatagaagatataatataggcagacgctaatgcagtttgataaaatggacaaaattcattgaaggcatattgatgcacacgcgttaaattcatcaagctcgatgatctctatctagaagttggaaaaatgctgataagcaataacctgtaactcattgttacactatattactgctagcttgctatagtacttgaagaaatcctctttatgtttacctgaatgaatgatctgtaactacgttcatatcgtaggccattgaacctagcaaagacgtctctcagatgtaaaaagacttatcatttaacaagtgatctctaaattgtttatttgatgttgggatgtggataactgcaggcattgcagttcc

SEQ ID NO: 19578 - DNA, 333 bp, Glycine max
  Clone ID: PAT_MRT3847_117684C.1
ggctcgagctcaagccgaatttgcaaggacctgaacacgcgagcgatcatgagaggtggtgcgagtatttccgcctgtatgccagcggggcccgacggcggggcgcagcgcgtgaccagaaacatgctgtggccgaataagaggaaacggaagttgaagtcattgctggactatagatttcaaggcagggttacagagcaattacaggatgactcgcaaatcgaggatgtcgactgataggacgatgaaaaggaggaggcgcttatgaagaacaagccctttgggttctttcaatccaacaacaaggctgttaataagcctctaacttgtgga

SEQ ID NO: 19579 - DNA, 255 bp, Glycine max
  unsure (1)..(255): unsure at all n locations
  Clone ID: PAT_MRT3847_117685C.1
cgagccgaganaaggttattttganaanatatttggattgggtaggaacctttnntatatangtgtgnagncntgnacagatnttgaattgttgtgtntngaaagagagaccaccacaagtgnaggngannagnccaccacaaggganggngaangtggangantgatataagtgtaggttataccgtttnttctccatttttgtatggacattgttaaaaantncattncaccatatcaaggccaggnaattcc

SEQ ID NO: 19580 - DNA, 1087 bp, Glycine max
  Clone ID: PAT_MRT3847_117686C.1
tacggctgcgagaagacgacagaaggggaacgcaaccgtttctgacgaagacaagaacgataacaaaattgaaatcgaattgggtgcgaagtgaaatgttgcaaaccctaggaggcgtaatccctcgcttcgtgagtcgctcatggctccgaaacctgacggtgcgtgcaatggcattctcttcctcctcctccgattatggagaccagtcacgtggtggccttccccgcttctactccgaaactcttcctccttccaagggtagtgttatacgcgtgcaaggtgatgaattctggcatatgacaaaagttttgaggttaaccaccaatgatagggtacagttcttcaatgggaaaggaagtctggtagaaggatgcatacagagcattgatcgaactggacttgattttgttgcattgaatgatttgatatcaatccctccacaaaatacacaattgcatgtatttgctggttttggtactctgaagggtggccgtgctgactggcttgtagagaaatgcacagaatttggagccaatagtgttactcctctattgactgaacattctccgtcaatctcagaaaatcgggtggacagattgaaacgtgtcattttagcagcatccaaacaaagtcaacgactgcatgaaatggtcttgaaacatcctatagagattgatgaccttttgcaccttattgcgcaatcaaagctatctcttgttgcaactgcgaaggcaactcctgttcttagtgcattggcatcgttggaaaaggaaactagtggcttaatcataattggaccagaaggagatttcactgagaaagaagtgagtatgatgatggaagcaggtgctacagctgttagtcttggacctcatcgtcttcgggttgaaactgccacgatagcacttttggcaactgtcatgttatggtctgactcacagcaaatttcagtctgttgattcctcagtgtagctgagagagtacgtggatgacacagaggagtgggaggactacataatcattgccctggattgagaaacaaaaccgtctcctgcaagtgggagtgaagctttgcacagcaagt

SEQ ID NO: 19581 - DNA, 532 bp, Glycine max
  Clone ID: PAT_MRT3847_117687C.1
tggctcgaggagaaaatggtgttgtctgatctggagatctgcaagccaacttcaagttctcacaataaagttggtatttctagatctgggagagatctgccaccagctcattacttgttcaaaattgaatcatattccgaattgatgaacacaggagtggagaagtatgagactaatgttttccaggctgggggatacaaatggaggctgatactctatccaagtggtaatatcaaaagcaatggcaatggttacgtgtccttatacttggcaatagcagataccgagaagctttctagcggttgggaggttgacgtaaacttcaagctgttcgtctttaatcagaaaaataacaattatttaaccatccaagatgcggatggcaccgtaagaaaatttcaagaaatgaaaacagaatggggttttgagcaattaatttcgttggagactctcttagattcatctaatggataccatgttgaagattcttgtttgtttggagctgaggttttcgtgattagtcattctggca

SEQ ID NO: 19582 - DNA, 528 bp, Glycine max
  Clone ID: PAT_MRT3847_117688C.1
agcagttcttattttttcaagcatgtgaccacagtgtgacacccccttctgtaatggttgctgattgtcctctcattgctgcccaaagggaatctactttctatccaactgtcaaaaatggttttcggctcttaagagatacttagctgcatctgcttttctaagcttgtctatgacctgcaggaggaggattgtccaacgcacgctaagcacctttgttttccagtgtgggtttcatctccttgaaaagagagattacgctggggtcaacagggctcgcgtgtgaaaatgcgaagcgattctgtctttttccgtgattaaatgagccctatttgccggatgagtggggagacaaaatttgcctagtgatgggctcgaattgccagggatttctgcctagctcacaagctggattctgtgaacatgcagtcttacaagagactatgtacctcctcatcctatcaaaatggaggtgtatttcctatttgggaagtgggaacatccatagcttataagaagacttatacc

SEQ ID NO: 19583 - DNA, 1045 bp, Glycine max
  Clone ID: PAT_MRT3847_117689C.1
taagctcggaattcggctcgagcacagagtatgtgttcggtggatacgagtactgtattcaaattttgcaaggttttgtaaggaccaggagtatctgatatctctgcatgggaaagcagcaagggagagattcgactatgtggagggtttcgtgatagttgatgaagggctgatcaacaattggaggtcttcgttctttgcagctagtaaccctgttaaaatcacttccctcaacgctgacggaggtgttttgtactgcttggagattaccaaaaactacgaccaagggaacgcagattctgttgatgaggaaatacaagctctattgaaaaagttaaattttataccaacatcggttttcacaacggacttgccttacgtggattttctggatcgtgtacataaggcagagctgaagcttaaatccaagggtttatgggatgtacctcatccatggctcaacctttttgttccaaaatcaaggatagaggacttcgacaagggtgtgttcaagggcattcttggaaataagacaagtgggcctatcctcatataccctatgaacaaaaacaagtgggaccatcgaagctcagtggtgacaccagaagaggatgtgttttacctggtggcatttctaagatcagcattggatactgagacattggagtacctaactaatcagaaccgtcagattctgagattctgccatgattcagagatcaaggtgaaacagtacctaccccattacactacgcagcaggagtggatggaccactttggtgataagtggacccaattcaatgccaggaagatgcaattcgatccccgccgaatcttaggcacagggcaacaaatttttcaatttcatccctccctcactcccaacaaggatgatatgtaatatgtagaaagtagagcaaacatgcaaaatagataaataagggaagtgatgatgggttcaagttgagtagcaagtctagggcttacaaaataaacaagtgttgtattattgtaattaggagtaaattacaaggaggatcatagc

SEQ ID NO: 19584 - DNA, 715 bp, Glycine max
  unsure (1)..(715): unsure at all n locations
  Clone ID: PAT_MRT3847_11768C.1
ccacgcgtccggttgattttttagtgaaacctattcggaggaatgaacttaaaaacctctggcagcacgtttggagaagactgccacagtgtgagttgatttacattttgtctcaggcatgtactgaaacaaattacagtgttttttttatcaaagtgaatcacttcatttcttccacttgaaaagtaaaagaacgtatatatttctgtgtgttttgaatacaaacactaatatcctttttataggctaagaataactaaccctattaaggaatatagggaaataatataaaaaggaaatatgaaaataatgagatatttatctaaatctaataatgccaacacaattacaatttcttttcagtttaaggacccaattaaaaattcccaaaaagtttaggacctactaatgtattaaaactaaaaagatactccctcctgtccttattataaggtctaagttaaaagtatgatttggtcctttttataaggtccaatctaaaatgtctcctacatttattatttttcacaaaaataccctttattaaagtcagttctagaataatgtgacagtgagagaaatataacacattaatgtttttgttagttntggaaataatttaagacaaatgtaatgctgntaactaaatttaccaaattcctttatcttggtgaattagntaattggaccttatataaggaccaaagaaatactt

SEQ ID NO: 19585 - DNA, 1739 bp, Glycine max
  Clone ID: PAT_MRT3847_117690C.1
atgggagctcgttgctctaaattctctctctgctggtggccttcccacctcaagtcaaaccttcacaacttgtctgataatggtgactttccttttcccacttcacaacaacaaaaagatgatgatgggaagagggatgagaatgatcctcggggagggttcagtgagtacagtttggatcagttaagagttgcaacctcaggattttcacctgacaacattgtctcagagcatggagagaaggctccaaacgttgtctacagagggatgcttgaagatgataggttggttgctgtgaagcgcttcaacaagtctgcttggcctgattctcgacaattcctagatgaggcacgtgctgtggggcagctaaggagtgaaagattggctaacttggttgggtgttgctgtgagggagaagagaggttgcttgtggcagagttcatgcccaatgaaactctctcaaaacacctttttcattgggaagcccagcctatgaaatgggcaatgaggctgagggtggccttgtatttagctcaagcattggaatactgcagcagtaaagaaagggcattgtaccatgatcttaatgcatatagaattttgtttgatcaggaagccaaccctagactctcttgttttggactcatgaaaaacagtagggatggcagaagctatagtacaaatttagccttcactcctccagagtacttgaggacaggaaggatcacccctgaaagtgtagtctacagttttggcaccctattgcttggtcttctgagtggaaagcatatcccacccagtcatgcacttgaccttatacgaggcaaaaattttctgttgctgatggactcatgtttggaaagtcatttttcaaatgatgatgggactgagttagtgagattagcttcacgctgtttacagtatgaacctcgtgagagaccaaatgttaagttgcttgtgactgctctaacccctcttcagaaagaaacttcagtaccatcaaatgttttaatgggcataccagataggagtctatcatcaaaggaaacggtttcgttgacgccttttggtgatgcttgttcaagaagagatctgactgcaatacatgaaattttggaaaagataggctacaaggatgatgaagatgtagcaaatgagctgtcctttcaaatgtggacaaatcaaatacaagaaactctaaattctaagaagcaaggcgattctgcttttcatgctagagacttctccacggccattgactgctatacacaattcatcgatggtggaactatggtatcaccaaccgtgtatgccaggcgctgcttttgctacctgatgaacaacatggcacaagaagcacttggagatgccatgcaagctcaatcaatatcccccacttggccaattgcatactatcttcaagcagcggccctcttcagcctcgggatggaccatgatgcagaggaaagccttaaagatgcaacaacactggaaaccaggaagtatagaaattgaaagttgaaactgtatatagtctttttcctttcttctacttcccctcattgatcaagcaaaatttttatatatcacttttagctgtatgtagtaattttatatgtgctttagactcctaattgcgatggctatggcctccccctgcattctctcgtatttttggtccaatgctgtgaatctcaaaatgctcagatccttataaaagatgtcttatttcttgtcaa

SEQ ID NO: 19586 - DNA, 498 bp, Glycine max
  Clone ID: PAT_MRT3847_117691C.1
tggcttggaacctttgggctgatttatgtgcttgcatggtcgtgagaagatgatagaagggcatggtcgtgagaagatgatagaagggggacaagcagaatcggcttaactgaaatcacgcacccgtttccctatcactcttgaagaaatacctctgacgcgggcaccgattacaccccagaccggacccagagtacagtcaccttccggcggcaagaaatgtccgcagttagcgcaagactagcctcaacgcaagaactagcctccaataccaaaacaccgtcccctcataaaaaataacaaaaaagaaaaaatcaaacaaatatatatcaataaataaaataaaaaaaaacaaaccgaaaataataatccacgacctaaaattccaaaaacataaagaagatcaggggaaatcaacagtctcaccaaacggaaaaaagttttctcaccacaaggcttttacccccaggttgatcccccgaatacgaaacccccccc

SEQ ID NO: 19587 - DNA, 595 bp, Glycine max
  Clone ID: PAT_MRT3847_117692C.1
tgaaagcaacaattcttttgttttctctgtttccgtccacaaatcttcaaaaacagtaaacagatcgaaaacatacaacattttctcaaattaaacaaactaacccttaagaaccaccaaactaacaaagacatatgtatacctgcaacgagatgtcaacatcaacgatctcccagatgatgaagtgaggaactgcttgactctatcccatgtttcttgcggaaaatcacaaggatgaccacccatatggttgacacagttccagagcgtgtcatttctagcaagatacaaatgcatgggcccacagactcgtttggctagcctaccttgctgtatggcagcatccaagaccatcctgacatcaattgtctgatacttggggtccccataacgaatgcaatcagttatatttgcttcagagggcagaatcatttcaaccttgagcaagtttagggttctcataataacatcaattagattctccacattgtactcagaattatcttgatgagtagtagcattcataacacgaggaatttcatttagctttttttggtgtgaatcacgacgaggaattaaaatttgattaatctcc

SEQ ID NO: 19588 - DNA, 297 bp, Glycine max
  Clone ID: PAT_MRT3847_117693C.1
gcttttatctgagtttgttttagcatataattttatggttaggagaactaaactggtttccctttagggataagaataaagacttcatgaagaaaaaactttcctggagtgtaattttaaactaaaacacaacatactttgtggggcatcattcttggccctatataaaggaacttcaacgggaaactgaaatctccctcttaattaaaactcgaaggggggaaatttaaatggggaccaaaaaattactccttcttgttcacactttgttgggccccattcatttgaaagggggaa

SEQ ID NO: 19589 - DNA, 330 bp, Glycine max
  unsure (1)..(330): unsure at all n locations
  Clone ID: PAT_MRT3847_117694C.1
cacgcggttaattatcaaaggcaagcacngaatctgacgggggatttttttaaagaaggcctattattgttcccgcaaatggctctatagagacttgttcattcatgagagaaagcctatacactcgtagcaaaagggaagaaaaggaaagtcgcgctgacattggaagagaacactacaaaggcaagggataaggcaaacatgtacgaaatcactcaaggataattcggataagcaagcaaaatagctaaacaggcttgagaataagaagtcatcaaaaaagcctaaacttgcaaatgaaatccttaaggaataccaatcctacaaccc

SEQ ID NO: 19590 - DNA, 414 bp, Glycine max
  unsure (1)..(414): unsure at all n locations
  Clone ID: PAT_MRT3847_117695C.1
tgattattacattacactcatatctatcaccacttttaagaccgatatagtcatagtacaatggccctccccaccaatctcaagttcttctgtgtgtttctcctagtgcttattctctattcctcatccttccttgcatcagctgttgatcctaaggctgaagatgaagaatttaccttcgctgaaggaagtatcaaagggccaaagaattgggggcagatcaacccaaaatggaaagtatgtggagatggaaaactacaatctcccattgatctctctgaccaaatggctcaagagcttcctcaattgggtaaactngacaaagtttataaaccagctcctgttgcctaataaataggggtcatgacatcatgcctgcatggaacgggatgcngccagcttaacataatggac

SEQ ID NO: 19591 - DNA, 337 bp, Glycine max
  Clone ID: PAT_MRT3847_117696C.1
gcttttcttgagcaagcgctgatttgccaagcactcatagtcttaaaggtatgattgagatggagggcacagttggtattccatgagaatacactgtgataggcatcaggcactgtagcgtatgtaatagaacatttcagggggcgtgccattattgatattcacaccatttgctatcaagactgctaattatggtattctgctagcacacaagcaacgactgtgcgattcaatgctatcccgggttatgatgcatggagattggaactccttaaacgaaccggagctcattgagatataatttgggtaactggatgtactgccaccccattgccgg

SEQ ID NO: 19592 - DNA, 652 bp, Glycine max
  Clone ID: PAT_MRT3847_117697C.1
aaaagtaactaatggaattggattaatttaaaaaagatgaaatatacaagaggaacaacctgtaacaaacacaactaatattccatatcaacatgcttgaaaatttcacatcatgaatttcgtagcttagcatcattaaaattacagcatcactcttaccaagaaaaggggaacatcacttttaagtttaagccacgtgcattattgaccttgtcatatgatagatcaaatttaagaaatctatatttcataatagataacaccatagccaagaatccaagatcaacttaacaaataaagagaaacacttccatcttcaaaaatactgcatggtcacaactatacacactccctatattttcaagatttcagccagttaacgaatctactaatattctttgaagatccaccaccttcttcaatgttgttcatgcccgtttctttcaattctagacaccttgctcttatttgtccattactaagaagtgggcccaatttcttcttaatctcccaccttgacacaagtccattttcatctgagtttaatcccagtccaaccttcaactcatcacaaaggtaagttttgttgaaaaatgggccagtaaaataaggccaacacaagaaaggtcccccattagacaaaccttccatg

SEQ ID NO: 19593 - DNA, 507 bp, Glycine max
  Clone ID: PAT_MRT3847_117698C.1
caaaaattactatttgttgactcgaacacttaagttgtcatctttacacaattaatacagtggaaaaaaacatagaagattggttcaaaaatatgaatatatcatgatttaaatattacattatatgtgactcatacttgatttagttagaatgtctttgtttgtgtgtgtatgcagagttcctgtgtattttacatgtataattgcattaaagcgtatgaatggtatccgatgttcaagtcaaaaatcatgctgaatagatctataggccctcctaagatctcggccttttcttggagattattacaagacagacttcacacgtgtttgcaactacacagaagaaggggctactttataaacctttgcaacaatcttgcggattatgaaaatataacgcggagacccacattttttttatcatggtcttctccttccatatattggaatgcagttatcaactggctgattttaaactattgttatttccaaaagacatcaattttg

SEQ ID NO: 19594 - DNA, 494 bp, Glycine max
  unsure (1)..(494): unsure at all n locations
  Clone ID: PAT_MRT3847_117699C.1
ttggttcgaacctttgggctgtttatgtgcttgcatggtcgtgagaagatgatagaaggggacccccccactccgaaatatacaccatcagatcgatcttaaaacaatcactcctacctcgtatttcctccgcctcctcgcccagttaaaaaacctcgagcgccaaaccagcgatctacgatcgtcatcacgactaagccacacccccccctttccgttaccccggccactccttccgttaacttaaagggcgcgatcctaagcctaagcattagcgagttcataaccctagtactcttcggcgccccgttccacgcgatcattttagagacccttctacccccctttatcttaagcgtaacctaattaacgagcctcggccccgaagttgaggtattggtattggtatttagcctaagggaagccgagggtaagaggctcctcggcctagtcaggccggaccgcgtangcgttaccggccggcgctcgtctcg

SEQ ID NO: 19595 - DNA, 251 bp, Glycine max
  Clone ID: PAT_MRT3847_11769C.1
gtcttatgggtggctcccgtggacaacgcgagtctatggtcacagctgcattatgtgtcgcgcgatgatctggacatgctagaagctcctccagtgaatcgcgtaaatctgcaacgagcaatcgatcctcagattcagcagaaggacgcgcactgcacttggagagatgtctctcgaatgtaatgcctactagaatcggtcctgttccacttgcttatagatgctggacttccatgcgatgcggatgatgt

SEQ ID NO: 19596 - DNA, 400 bp, Glycine max
  unsure (1)..(400): unsure at all n locations
  Clone ID: PAT_MRT3847_1176C.1
aaggtttcccgtcatcactgtatgacgtcctccttctttgggggggggggggggagacggtagcccccagagagaaggaacgtaaggagcggaagaggttagaagaaagatcaaagcaagcgttagtaaaggggttgacggtataaattagataaccaacagtaaattttacaaaaatccccatgaaatacaggtcgcggttagaggccagcatagtgacagggacggcgtaatttccgaggtaagattcgccggatggtcgagtgccgggaggctgagtaccaattaagtgggcgtagtggcggcagtagagggttagaaaaggcatnttgttgggtgaggaggtgtgggtattggggttggtaaccgttcggatgttaagggcatagtttgcggcgga

SEQ ID NO: 19597 - DNA, 110 bp, Glycine max
  unsure (1)..(110): unsure at all n locations
  Clone ID: PAT_MRT3847_117700C.1
ctctctccggcgccttctctgttacgtcgtcatctcataaccaaccggcanaacccnttcganttcgaaaangctaangccanaatcccctctcacaaattcactctttt

SEQ ID NO: 19598 - DNA, 397 bp, Glycine max
  unsure (1)..(397): unsure at all n locations
  Clone ID: PAT_MRT3847_117701C.1
ggctcgagacgagtctgngatgtgattgtgatgtgatgttattagcattctccatttccattgtgagggttttcaaatggcgcggccatcctatcctccgctcgtcgacaactccgactccgacgccgagggccggcttcccaaagcggaggagcgctttctcgacgccattgaggagctccagcgccggcagcgcgccgccgccggtcacgctcagaagcactgtcgcgtggactcatcgacctgcgatcacggccccaactagtcctgcgtggctcacgccattggcaacctttgccagacctttcttctatactatggcgtcagagtctgcattttgcatacttcatcgcgccttcaagcttgttcaaggccaatcctaatgcttatttcttga

SEQ ID NO: 19599 - DNA, 547 bp, Glycine max
  Clone ID: PAT_MRT3847_117702C.1
gctagtaacatcgccataactggagcggtttcaacatcttcccaaactttctcattttgcctcctccatatggtccttaagatgatggcttatttgttgtaatcctggtctagattcaaggcatccataaggggaaagattagttgttgtatgacttctgcattgtgtacttgttgctgaatttttggccatagacccgaggccatccacactgaaactacatgttcacatccaaagattcaaggttgttgtgacagaaagcacaagttgaagggcattgaactccttttgcatgaagacgaactctggaaggaagacaatcacgttgaatcctccgaataagatgcttgactttgggaggaacttttagggcccatatcttcttccaatttccttgaagacgaacagattcatcaaataaaagagagtccattgtaaaatgataagaggaacaaatcaatagacaccgttgagagcaaatttccaaattctagcatcatcatccattgttgttggaaataggaatgctatgaatttgttgaatgtc

SEQ ID NO: 19600 - DNA, 111 bp, Glycine max
  Clone ID: PAT_MRT3847_117703C.1
gacccatagagaagcccccaaattaatcaatcaaccatggtttgcttcacattacaaatttcacttgttttgctacttttgctatatgcaatgacattccacacaacatac

SEQ ID NO: 19601 - DNA, 465 bp, Glycine max
  Clone ID: PAT_MRT3847_117704C.1
aaacaaaccccagcacaccccccccttaaatcctgaattaagggaaaaagagggccctgtacaaaaaggggggaatggaaaaaaagggaccaaattttttttcccctaaagggaatttgaaagggtcttgcctgaaaaccctatcgggatatacatttggaatattatcagggctgccaaaaagttgaaattgatagctaacaacttttcaggggcttgcccttaagttcaaattttgaacaaccaaaaaggggtcaaatttaccactggcgggaaataaaagggccactgaaataaacaaaaagggggggctttcctgattgctgctaaaagggggcttgaccctgcccaggtttgggactgtccccataatcaaaaagaacaaaagcccccttaattttgggcaaaagcttaagctttttttggaacgattccccaattttatgagccttttgggggggcctt

SEQ ID NO: 19602 - DNA, 615 bp, Glycine max
  Clone ID: PAT_MRT3847_117705C.1
cctcgagccgtttaacacttccttagctcaatatggggaaagcccttcactctatgtctttgttcccttcgctggctactcttgtaaagagcatgctttgctattagctccagcaagctcaccgagtgccaactcaccaaccttaacgcgttggaacccgaccatccgaggggagtccgaaggcggcttgattcaaacatggaactctcaacaccctgagctgaaatgcgccggggtacctggttccaaactcacccccaaccgtaatggcctcctcttgccatcatactcaccttatccccgggtgatcataatggcccaaaggaaaggaggccttggagctgcactcccacgatggcctgaaacgattgaggagccacaggaactttcaaacagaggaggctcatggttgcagaagcggtagctaccggaccgtcaccagatgatgcgccaccttcaaagaaggagacgtactagtgattcctcctgacggtccttactggacctataacactggtgacgaaccattgggcgccattcgccttcttgacacctttaaccttccaaacccccctggggccaaacccctagggtcttttaccttggctcggaacc

SEQ ID NO: 19603 - DNA, 362 bp, Glycine max
  unsure (1)..(362): unsure at all n locations
  Clone ID: PAT_MRT3847_117706C.1
tnatccaatnganatnatannnaatgactnnngatanacttnaganttcacattattgnaattgantaagtaaacaatttaattggattggtcgantggtatcataaaaatggagtactaactcccatttcttatcaatnattgaattnnccgatcnncttgctttgttatcgaacatncttgntgattgcnaaattttccggaaaanatttgaatcattnttatatgngactcantcctactacatctggtcctgaggtttctgcgcttgnaananaaaactgggcgtatcgcccaaatattggccggtnctagtgtagctttccccccaggtaaganctatattnacacgtctgangcng

SEQ ID NO: 19604 - DNA, 109 bp, Glycine max
  Clone ID: PAT_MRT3847_117707C.1
gtttttaggcattttgggcgcaactcccttgtcctggacccaggccctaacaggtatctcggcccgttgcttcatcacccggcccggaatgagagctgcactgcccatt

SEQ ID NO: 19605 - DNA, 260 bp, Glycine max
  unsure (1)..(260): unsure at all n locations
  Clone ID: PAT_MRT3847_117708C.1
gataatattagtcatatgagtntttaaattctagactaaagtgagttacatattaaattttcaagatatttttaaattctggactaatatatatgtactacacatcaatttttttatactaacaaaattatttattgtcatgctagtcacngaanttttnntattgtattgtttatgtattcagcctatgattatgaatganataatgagancnttccttaaaaaaccaaaattatttactaatattgatagtatancct

SEQ ID NO: 19606 - DNA, 376 bp, Glycine max
  Clone ID: PAT_MRT3847_117709C.1
cgtaagctcggaattcggctcgtttctatatcgcgagcggcgttctttcttttttgcatggtttttaccaagggtttttttttaatggtgttccgggaaatccaccccttaaaagagattcaaaaaatggcctaatgcgggttctaaagctgttcataggggaaaaaacactggccatgggaggacttcaacttttacccaagtacaaataaaaaaaaaaaggggcggcccccggctggggtgcttgccaacccagggaataaatgcggaccctgaccaggaggcacaccaggtgtatctatggtgagatctgttagggctgtgcataatcaaggtcatacctgctacctgcgagtaatcgttattcacccccaca

SEQ ID NO: 19607 - DNA, 154 bp, Glycine max
  Clone ID: PAT_MRT3847_11770C.1
gagtagcaaagatgacaaaatttaattggagaaacagttcaattgggttttaccccaaacacctaaacccaagggtttgtttgaattgtcgggaacctcaataagtcgtccttttccattaaattttttggccggccaacaaccgtaataaaag

SEQ ID NO: 19608 - DNA, 202 bp, Glycine max
  Clone ID: PAT_MRT3847_117710C.1
catgacgcaagcctttttcgtgagattggaaatcgtgctggtggaggttgtaatgcccggcctcatgtcctcctgaaccgagttcggcccctcgtaactcttcaagggcgctaggattaccgggttccttcacatgaccatacaaacctgcgtcctcattgagaccctcaccgccctctgcgccgaggtcctgtggtgctcc

SEQ ID NO: 19609 - DNA, 400 bp, Glycine max
  Clone ID: PAT_MRT3847_117711C.1
ggctattgtgatcaagctctctctttctctttgccctcttgcctcaatatcaaatctctgctctgcaactactccaaattgattgaatgctgcaaattccatccacacaacacaccttcaaaaatcttattgattaattacccttacctagcaacctcgtagctccccccttcccttcacaaaaactcaccacacagctctcttcaatccttgaaatttttcatactatatatacacacacacacacacacacaattgcacaagaaaaggcaacttaaactgtacaagaagggaaagggaatcttaccgactgattcctgtacaagagagaacaagaagaataaggctaagctgcataaagagatcaaggcttggttggatggagctattaccagcacaa

SEQ ID NO: 19610 - DNA, 667 bp, Glycine max
  unsure (1)..(667): unsure at all n locations
  Clone ID: PAT_MRT3847_117712C.1
gcagactgaagaataaagataaatatttcttacaacaaagagactgtagtgcctgcaacagtgacaaagagaagagactaaaggctcctaagaggaaagagaggtaaaccttattaacaagaaaatacatacagtacaaagaagacacattttgacaacagattggagaagctcccggaatgactagtgtggctgaatattgtcaattttcccatgtacaaagctttttcataaaggataaaataggtagtggtttcttaattgaccaaaaccttaacaaaaccacagtacataaaagcaaccaggaaatatagcctaatgaaacgagaaaaatatatattcaagtgaccctaaagaagtggagatctatgaattattttttaacttaaaatcattttatttttctttattttttcattttatacacaggatcttactctatctcctgggacagattgcagtggtgcaatcacagctcactgtaacctcaaatttctgaagtaaagcagtcatgcctcctatgtctcctgagtaaatatgaccacagttgggcacactaccacacctgtatagtttctttaaaagaatctgtcaaacagaatgttgttaggttgcctcgctggtctcaaactcctgncctcagcaaatcctactgcctcagtcgcat

SEQ ID NO: 19611 - DNA, 474 bp, Glycine max
  Clone ID: PAT_MRT3847_117713C.1
attaaacctacacactctcttttacagtgaaagtgtgagaaaaacccgtgtctctctctcgggttcgcaacgaggagacaacaccggagctctccgatcttccagaacattctagagtggcaacgggattcattcttcgcttcaaactttaaacacccaaacactaacccatctccatggacttgtacggtcggagccctgccagaaatggacccaacccggtgaaccaacccgaatggagctcaccgggcaccgacactgctctcgaagaatcgatgtggcatttgacgctgggtggtggcgaatcttacccggagcgatccggcgtgccgaattgtgtgtattacatgcgaactggtgtgtgtggatatggtggcaggtgtcgttacaatcaccctcgtgatcgtgctgcggttgctgcagcagtaagagctacaggggactacccagaacgggtgggggaacctccgtgtc

SEQ ID NO: 19612 - DNA, 309 bp, Glycine max
  Clone ID: PAT_MRT3847_117714C.1
gctcaaaaacagagtaccctacacctatcagatagagaaggttttctgtcgtgcgggtgcagaaaatagctcggagctccacatgaatgaaatgggtctctatcttgacactcttattactttcccactcgcccctcacaatattcgcaaaagatgggctagtggcaaacggagattttgaggctaccccaataaacggggtcccacactacgctattgtggagggccccatcacagtcccaaactggaagtcacactgcaacggtgagcttgaggaatcatggcaaaaacaggctgggatgatcctta

SEQ ID NO: 19613 - DNA, 579 bp, Glycine max
  unsure (1)..(579): unsure at all n locations
  Clone ID: PAT_MRT3847_117715C.1
attcccggngtcgacccacgcgtccgataagctaaagtcgtcttgagaactatgcgacttcgactatgagatatagctcggtgcgtgcacactacatagggataacgctgggccacatcatcatgatgtctgttgacctatacggatcgcgagagtacttcgactactgaatgtgattaaaaaatggatattattaaggcacacataacgtatcctagatgctgtgacgatgtgcagattacctcgcttcctttgaccggggaattatgttctacggcatgtaatagcgactggttttagatcaggcacgttctacttgtgatgtgacatgggatgcaagagctcagagctacaaaggaacgagtacggctgcggctagctctggttctaaaaaacccacagaggctgcgtggggatccaaggaggcatacttactcggggaaggtggtttcggaagggttgacagggacctctgtcagcgcaaagagtagagatgcctggttaccaattgactcatgacggttggcaacggtgtcatgaatatgtgacggtggtgcttatatagggcctgctgtacga

SEQ ID NO: 19614 - DNA, 1287 bp, Glycine max
  Clone ID: PAT_MRT3847_117716C.1
aacctatccagttttacagtggagaagagacgtgcatgaatttgattgtatttgttattaaattattgaactaaatttatgaagagagagaggtaggtcggagattgcgaattgcgatttgcgatgcgaaaaggaaaggaaaaaaagggtttcctttcttgaattgctgcttgcttcttcttcttcttgttcacgactgacagataaggtgagttgaattactgtgaaggagtgattgagtgagtggtcaatgaacaacagcagcagcagcagcagcagcagcagcattctcatccaattgttgttttcctcgcctcctgcatgggcaactctaatcgcagctgcatttctcctcctaactctaaccctctccatgtatcttctcttcgagcatctttccgcttacaagaaccccgaggagcaaaagttcctcattggggttatcctaatggttccctgctattcttttgaatcttttgtatcattggtcaatccatcaatcagtgttgattgcgagattctaagggactgctacgaatcctttgccatgtattgctttggaagataccttgttgcctgcctcggtggtgacgaaaggactgttcaatttatggaaagacaggctcgtctctctgttaaagctcctcttctacaactttcttcttctgacaaggccattgtcaaccatccatttcctctcaactacttccttaaaccctggaaacttggtcgcgccttctaccaaattgtaaaatttggcattgttcaatatatgctaaccaaggctttcactgctattctcgctgtaatccttgaagcttttggagtctactgtgaaggagaatttaaagcaggatgtgggtatccttatatggcagtggttctgaatttcagtcagtcatgggctttgtactgcctagttcaattttatacagttacaaaggacgaactggctcatataaagccattggccaaatttttgacatttaaatcaattgtgttcctcacttggtggcaaggtgtggcaattgctctcctatccacctttggtttgttcaagagtcccattgctcaaggcttgcagttcaagtcaagtgtccaagatttcatcatttgcattgagatgggcattgcttccatagttcacctgtatgtgtttccagcaaagccttatgagcgaatgggagaccgcttttctggaaagcgttcagttcttggagatactcagctgactgtcctctggaccctgatgagattagggacagtgagagacccacaaaactgcgt

SEQ ID NO: 19615 - DNA, 430 bp, Glycine max
  Clone ID: PAT_MRT3847_117717C.1
aatccccggggggggaaaagttattacccgtccaggggaaaaaaaaaaaaacccccactctttcaaacgaaaaagccctttcctttaaatacaaaatcctaactttcaaaaagccgaggccggcttacgttattgtccctttacctaaacctccatgcccctgatcaaaaaaacctttgtaacatttaaaaatttttattttttccactttttccttctttgcctttgcctgtccaagccaaacctgaaattttccaaaacccaaccgtttttccctttcccgaactttccatttccctggctggggacgtttccaaaaccataaggttcctgtcccatgaggagaggacccaagggggggggggggggagaaacaacccctggcaaaaaaacccccacccccattgcaaaccctggcagttttgggggt

SEQ ID NO: 19616 - DNA, 1268 bp, Glycine max
  unsure (1)..(1268): unsure at all n locations
  Clone ID: PAT_MRT3847_117718C.1
cgaccacgcgtccgctcagaaggcaccatgaatattggcagtactgatcaccaaactagctccaccactgtcccttctctcttcagcaccaattcccttcaaaacaaccacctttctcacatgtccgcaactgcactgcttcaaaaagcttctcaaattggctctgcaagttcaagcaacagcatcaacatcaacaacaccaccaccaccaacaacaacactagtgcctcctctcttcttagaagcttagcatcaaaatctgatcatcagaggcaactcggtggtggtggtgctgctgcaaactatgcaaccatcttcaacaacagtgttcaggaaatgatgaacatttcagggtttgaagcatatgatcatcatggtggcatgaacaaagaacaaaaactcggtggtgttggaggctctgataggctcacaagggactttctaggagttgcacaacaacaacagcgagaagggtttaacttgatgagttctttggaagcagagacaaacaataacgctgcgccgtcaggtcaatcttttggaagtggtgggaactttcagtgaagtacaaaaaggggtatcaacttgttccattgactaattagatcatctatttcggttttcgggagcaacatggaagcatattggagtttctgtatagacctagctagtctcaacattttcaaacaaaatgaaaattgacttcctttgatgatcatactgttgaaccgtaagcaattggtgttaggatttcaaacaagacttgtttcatatttttcatgttttacttagtagattttgttactagacaatgctttaatttgatatgtaaatggtcaggaataccagccataacgcttcgtagcgccatatatataaatattaattagcatcaaaaaaaaaaaagggcgagagcaaaacaggcagcaacacagaagaggacacaacttgccttggaagctaaagcaaaagaccaacaaagagccaaagagaaaggtttatctgtgtcccgagcccacatgtgttcaccacgacccttcaagggctcttggagacctcactggcattaagaaacactactctcgcaaacatggtgagaagaagtggaagtgtgaaaagtgctccaagaaatatgctgttcaatcagattggaaggcacattctaaaacgtgtggcattagagagtatagatgtgagtatcacccccttcatgtcgtcttcgaccagcctgtcgtatgtngcagttgtatggacgcgtgggtcggccc

SEQ ID NO: 19617 - DNA, 988 bp, Glycine max
  Clone ID: PAT_MRT3847_117719C.1
cggtctcgtgggcggctcgattgtgattcatactaacatatattgcatagctagcatatccatcagggaaagcaaaatcccccatggcctctccctcaatcttcaattcagaatccgatgaagattcctgggtcatccaaatcaaccagttggtgagtgaaaccaacctctcaatcttgaacaaaatgcctgtgtgcatataccaagtccctaaatcattgagttgtgccaagccagaagccttttccccacaacttatagccattggtccttatactcactttcatccagacctctatcccatggaaaggttcaaagtttttgcagccaaaggggtcctagatcacttcaaaaaacatgacttcaaacaactaattgagcaactccgcagcacagggcaattcatccgtgctagttaccacaaatacttggacttcaaggaagataccttattatacatcatagccattgacggtttgttcttattggatttcttccacaattatctcaacgaggaagtgtctggttctttcatgacaggactacaagaccaagttcagctaagtggtgtgaagctaaccaaggatgccatcataagggacatcatcatggtggagaaccaaattccaacctacatcttagtgaggatcttggtgcttgaaagctccaaacctgctgattcagttctagagttcttgggttcaatgctcttgtcattctgcaagaaacactctccactcaaggtaactcacatccccacagattctgaagctgtctctaagcattaccatatcttggatcttatgtaccatttggtggtctctcaccctgaaaagtctgaaacaccaacaacacctgatcaaagcgaaggtatgtctacacttaggagaagctcaaaatctaagttttgcacagcggcatctaatcactttggttgaaatgtattatcaatgacaaaattctgtaagtcaacccacatcatatttag

SEQ ID NO: 19618 - DNA, 1291 bp, Glycine max
  Clone ID: PAT_MRT3847_11771C.1
ggtgtggctcgcggttagaagtgggggaatggaagagaaatactcaagcctggaaattgtggaggagagcccaaactcgggtgtgttctttcttatcttaaatcgtccgtcacgacggaacgctctctcgcgcgaattcttcagcgagttcccgaaagctctgcacgcactggatcacaacccggaggtgaaggtgatcgtgttgtccggcgccggggaccacttctgctccggcatcgacctctccctcctgggatcaaccgccgcgagttcgggttcctccggctccggcgaaaccctccggcgagagataatggcgatgcaagacgcggtcacggccctggaacggtgccggaagccggtgatcgcaagcgtacatggggcgtgcatcggcggcggaattgatatagtgacggcgtgcgacataaggatgtgcagcgaggaggcgtttttctcggtgaaggaagtggatttggcccttgccgctgaccttggcactcttcagaggttgccgcttattgtagggttcggcaacgccatggaattggctttgaccggtcgcactttttccggtaaggaggctaaggagttgggtctcgtttctcgcgttttcctttccaaacatgacctccatcaggccgtccgagatgttgctcaagcaattgcgaccaagtctccccttgcagttgttgggacaaaaacagtgttgcttaaaagtagggacttaactgtggatcaggggttggattatgttgcaaccttgaattctgccagattgctatcccctgacttaactgaagcagtgatggcacagaagcagaaacgaaagccagttttttccaagctctgaatgtttgaagaagggcatgcatttggttgttacatgttactaaataagtagtagtgtgtattttggaattgaagaccactgttattgatatttgtaccacatagtaagaactttgcattcactttaaagtctgtcagggaatagggatttgaggataagattcttcttgttattttcaccttccttccttcacaaggcttctttacaaactcctagttcagctataagacatatttgcctgtattctgccttgcaattagggttggctgaaaagaactgaactgcaccgaactggtatcgaaccgaattgaatgtaaaaaactgaactgttttttccgttcagtcttaaaatgttgaactgctaaaagagcagttcagtgcactgccaaactgtcgcttatgagttaaaaaagaaaaatgcagtttgcaaggaacctgtaa

SEQ ID NO: 19619 - DNA, 2416 bp, Glycine max
  unsure (1)..(2416): unsure at all n locations
  Clone ID: PAT_MRT3847_117720C.1
ccacgcgtccgggaaggtgttagaatattctcttatgctcttatttgttaaacttgacagcaacttctctgtcttttcttcctccttcttagttataacgcctctaccctcaccattcctctcattgcaccataaaacaattctgcttggataaaaagaacacaggaaaaacttatctcatctaacgttaaagcgacaacacatgtttctctcattcggtgctcaattctccttcgtcttctgcactgcaatttgcagccactaacagtttaacaatcattctcaaaccccctcacaggtatgccttcattgaatgttttgcttttgggtagttgaaaggtaaccaggagctgctttattcttgacttctcgagaaggtttctcaggagttcatcttcaatattctccagtgtactttaccaaaaccagggaatgctgaaagatgtggttgaaagtaaagaattccctctctcaggttaatgaggtcgtagctccatctgaggtagccttattaatccttgatgagattggatgtttagatcactgccaacatcaattatatgctcatttgcctgaggtggctggaaatcttagcaattgtttgatttcaaaacgggatgtttgtgaagatggatgagctttgagcatctttggaatagtttactgctttctggtcacataagcacctgtacttagtgtatacttagtatattatcctattggtagtagcattggttgtatcctaaaggagtagttatagtaaatggagcaaaagggaagtgtgcttatgcaaagatatgaacttgggagattattaggccaaggaacctttgctaaggtctaccattgctaggaacatcataactggcatgagtgtggccattaagattattgataaggagaagattctgaaagttgggatgattgatcagattaagcgtgaaatttcagtgatgaggctaatcaggcatccacatgtggttgagctttatgaggtaatggccagtaaaaccaaaatttactttgtcatggaacatgcaaaaggtggtgagctcttcaacaaggtagtcaaaggaaggctcaaggtggatgatgctcggaaatattttcagcaactgatcagtgctgttgactactgccatagcaggggtgtgtgccatcgagatttaaaacccgaaaatctactattggatgaaaatgagaatttgaaggtttcagactttgggttgagtgcacttgctgaatctaagtgccaagatggattgctccatactacatgtggtacccctgcctatgttgctccggaagtgataaacagaaagggctatgatgggattaaagctgatatatggtcatgtggggtaatcttgtatgttctattggctggtcatcttccattccaggatacaaatctgatggagatgtacaggaagattggtagaggggaattcaaatttcctaaatggtttgcaccggatgttcgccggtttttgtccagaatattggatccaaacccaaaggccaggatatcaatggccaagattatggaaagttcttggtttaaaaaggggttggagaagcctgctattactgtgaccgaaaacgaagagctagctccccttgatgctgatggaatatttgaagcatgcgaaaatgatggtcctattgccgagcctaagcaagaacaggccaagccttgtaacttaaatgcttttgatattatctcctactcaacgggttttgatttatctggtttgttcgaggacacttttctcaagaaagagacacggtttatgtcaaaaaagcctgcctcaatcatagtcttgaagttggaagaaatttgtaagcggctttgcttgaaagtaaagaagaaagatggaggcttgctcaagttggaaggttccaaggaaggcaggaaagggactttgggtgttgatgctgagatttttgagattaccccacacttccatatggtggaacttagaaagtccaatggtgacaccatggagtaccagaagctttttaaacaggatataagaccagcgcttaaggacattgtttggacctggcaaggagaaaaaccacagcaagagcaagagcaacatgaagtagtccaggaagagcaccaaccttctcatactgcttagtttcatgatcaatatttcaccccttggtttttgtatgcactgtgcttcttttgtcattatcttagtcaagtgcttaattttaataggactcatagaataatgtggctggttcagcctcctcttgtctgatggatacttgaacaattgtgtacctaaattgcaaatttcaccaatttgggtgttttattccatccttctatatcattcttttaaatttattgatttataatgtttcacaatgtcattagcctttttaaattgnnnnnnng

SEQ ID NO: 19620 - DNA, 519 bp, Glycine max
  Clone ID: PAT_MRT3847_117721C.1
tgtcagaatgctatgcttcacccaccttcttgcccatgttttcgttgctatgacaacaaaagaagaggtccagtgccggcacctgctgcattcggtaacagcagattccctcataccccaaatgattctatgctataccgtcatgagattccaggggcagttggtccacatgttcataatgctagaactgccattcctgctgtgagtttgcatgaaaaacaactgcatacaagatggcccagagactacaattctgagatgggtggatttgttggaagccgtcctcgaaaagtagtgcctggtagtggtggtcgtcattgccttcctatagctggtggttctcctttcatcacatgtcatatttgctatgagttactgcaactgcctaaaaagacactggtcatggtgaaaaattgtcagcaaaaaatgcgatgtggagctttgtcttaaaaataaaatttgctgtcattgataagaagctagttttttctcctcatcacaacagaggaaactacccca

SEQ ID NO: 19621 - DNA, 452 bp, Glycine max
  Clone ID: PAT_MRT3847_117722C.1
ggcaaatgcaactgctcttgataaattgtcacagtaacatgtaaggtgacacacatgaaaacttgggaagctccagtagtggatcttgacgggaggtgtggcgcaacatttagcacaggagcacaggcacttccaatacgttcaacactacatgtcgcgttctatcagtttacacaacacaaccttgcaccatgtaaacctgtgcttacacctgcagctagcattgctacattattattgatgggttcaattgtcattcctgatgaacttgttacacttcgcgcctcaaatagtggggacgaaaccgtggataggaatgacatcgattgcgtacctgaacactttccaattaacaaggtcgcgtgtatttaatatgactcaatcgccaaatactgttcacgatcgttataggtccttaaacctttgtaagcaccaatttacatatattatca

SEQ ID NO: 19622 - DNA, 297 bp, Glycine max
  unsure (1)..(297): unsure at all n locations
  Clone ID: PAT_MRT3847_117723C.1
cggacgcgtggggatacatcagggcaaaggctcttactggctgttcaagctgccatctatctctctctttcttagagcctccttgccagaagatacaatggcccacgaagctttgctatgaacatctgcatcagagtacgaggggcaccctggcttgctttgtgaccatatgatgnatgctgacctacgggcaggctcgcagcatgaccctagaagccagggtggatgagaaacctgcgccaagaccaacgaggccatgtgcttcggtgagaccacaatcaaggactgcgtggacta

SEQ ID NO: 19623 - DNA, 172 bp, Glycine max
  unsure (1)..(172): unsure at all n locations
  Clone ID: PAT_MRT3847_117724C.1
agaatttgaactcaaagtggatcgggtgcaatcacttttatacggatttacacgtnaaagcatttgtgactgttggatgatgatcagagggcacagatttcaaatgtgtgtttnaaggttgatttatctcaagacacgatcttaatctaaggattctgttgtgtaaatactg

SEQ ID NO: 19624 - DNA, 321 bp, Glycine max
  Clone ID: PAT_MRT3847_117725C.1
gctactcatccgcattcggttaagggtctagcggggggtctttccaaattggaacaagttggagacatcttgggagcagaaggtgctcattgcaatccatggtggatcaggccagggcgtgcgaggtgagcggtggacatatggagagagatggattagtgtatacactgaggaattgacaggagatgcaaggagtttaataaagatgcttgcactaatcgagtgtggttgcagtaaccacccaatgtggacaatggaccaaaatgaatactccgataagggggatagccataatggccacttggcaagtagatctacata

SEQ ID NO: 19625 - DNA, 324 bp, Glycine max
  Clone ID: PAT_MRT3847_117726C.1
ggacattgggggcccaaccaaaccatgggtacaatattttatttcaaggaaagattttatttaccaacctaacattcccaaccaaaaaataggttagataacattgtttaaaaagattggaccacttgcaaaaattttttttgacaggtgggtgtttcccttgccaattttgtagttggtgaaggtttaaaaaatgtttttgaacaatccagccaacataaaatgtgtttcctttgaaggcctttttgtttgaccaagtttttattggatccaaaatttctgaagggccacccttcacttgggggggaaattccagcccaaaaa

SEQ ID NO: 19626 - DNA, 489 bp, Glycine max
  Clone ID: PAT_MRT3847_117727C.1
ggactgggtgagctctcaggactatggagctacagcggtctgcgagcacctagtgagttgggagctgaaggctagtgcagattcatgctctctacttggcgatgcccacctcattgagcgagaacgataatctgctctggcagcgatggaggatatgagagctggtggttctgaaccatcaaaagagatgctagaagaggtaatacagcgatgcacacgacacttggacagtgaaagagatgccagatagcagtcactgaatcatgtccagaatatcaatgaggcatcatgaacaccgactggacattgagcctaatcttaattacagattcaggttatgctggaatggaatacctctggctattatgaggatgctgatcaagttggaggataatagatgattcaagatcatgttagcgcaatccttattttagatttatagagttcatgaagcggggaggatgctgctgatggattcagctctcctta

SEQ ID NO: 19627 - DNA, 252 bp, Glycine max
  Clone ID: PAT_MRT3847_117728C.1
gggtcgagggatggggaactactcatattgttctgctcgttcccatgtcatgggcgcttgatcccaatgtttgaaaagaggagagcatttaagtggatgaggtgccctgtcaaccgtagagaccacttctctgctctttgccactataaaaatggaccatggggagtgattcagacactctgtctacactgcctagacagcgaaatttcctagatcctaagcatggtttatctgacggatgcgagccataca

SEQ ID NO: 19628 - DNA, 271 bp, Glycine max
  Clone ID: PAT_MRT3847_117729C.1
tgctatgtgtgcagcggtggttgtagcactacttcttgtggcggaggtggggcccatggctgacgctgtgacatgcaccccaacagatttgagtccttgttttccagcattcactttcggagctaaaccttccaatgcttgttgcacgaagctgaagctgctaaaaccatgcttatgtggctacctcaaaaacgctagcttgaagcagtatgttaactctcctaatgcccgataaaccgatgctttttgtgggattccctttccaacttgc

SEQ ID NO: 19629 - DNA, 539 bp, Glycine max
  Clone ID: PAT_MRT3847_11772C.1
gctcgagcgcaggcggggcatccttgctgtggtgcacggcagggggggatggatgcctgtgtgggtgttccgcggctcgctttcactgggtgatatgttcacgtctcttctctctgatccgctgtgtgggggcccggcttcccggcgggtcagaggtccgcctgggctgcgggttttcaggcttccccgtaatagacttcctggtctagagcttgctgtgtcggtcgcgtagaaatctaaatagttgttcaagacaagagaaggtatatgtgttgatgctatgtttcttttggaaaaaaacgaattcccatatgtgctgtgaagtgtgaacaccatagatgatgaaaaccccctttctgttttagtacataactagcttgcatgatatattgatatacccttttcgtcttcctgcagatggatgtgattgtaaatgtactaatggatgcttagacttggagaaatgttcacgtttcttctcacaaaacctctttgtggttgcccggctaccctatgaattagaaatctgtctgatctga

SEQ ID NO: 19630 - DNA, 216 bp, Glycine max
  Clone ID: PAT_MRT3847_117730C.1
tgaagatagagaatgtcaattgttccctgtaacagtaaacctgtatgccatgtaagctagatgaagatagagaatgtcaattgttccctgtagtagcaaactagcaatcttttgcattcttttaagaaaactattatcaggatgagttgggacattgtttaggatgtaattgatttgatgcatttggattatatatatattgtttggatccttgtc

SEQ ID NO: 19631 - DNA, 389 bp, Glycine max
  Clone ID: PAT_MRT3847_117731C.1
gttttttttttttttttttttttttttttttttttttttttttttttttttttttttttttttttttttttttttttttgaaacatggaaaaaaaaattaaaatggtccccctaaaagaaaaggttggaacaaaaggaaaaattaagggctgatttttgaggggcaaaacccaaacaaaaaataatgggaaaggtaatatttttaaattaaaaaaaaaaaagaaggggaagaatcaaaaaaaaaaacttttttaacaaggtttttggggaaaggaaaacaaggtgtaaaatccttttaaatccaaaattggttggccccttttggaattttgaagaaaccatcctgggatggaaattaaataaataaattacctcacggatgttttaag

SEQ ID NO: 19632 - DNA, 212 bp, Glycine max
  Clone ID: PAT_MRT3847_117732C.1
ggaaaaacatcataatatttttactactgacaacaattttttacaagccggccaaaaaatcacacattcacaccctctttcattggcgaacaaatcagaaataaatacctttatcgcgcggggaaactacgcctacgtgttattattggtcggggtggactataaagttcacccttctaagccacacaaaaggaaggatcatatggaagaca

SEQ ID NO: 19633 - DNA, 319 bp, Glycine max
  Clone ID: PAT_MRT3847_117733C.1
aatgttgaggaacctgctggcttgctactcttcagtatttgtgtctggcggatgaataaggtaaacgcactcttacagaaggtgctgaaattcaatgtcttattaaccgactgaataataaatacatggtacgtgtgtgctgaacaagctaccttttaagataaatttcttttgctcagctacgatagatctatgatatacccatatagatatgtatatatatatatccatatctatgtacatgtaaatatatatatgtagccgttcatcggtggaactaacacccaaacactctcacgtacgtgcaccttcctccatt

SEQ ID NO: 19634 - DNA, 573 bp, Glycine max
  Clone ID: PAT_MRT3847_117734C.1
aaaaaaaaaaaaaaaaaaaaaaaaaaaaaaaaaaaaaaaaaaaaaaaaaaaaaaaaaaaaaaaaaaaaaaaaaaaaaaaaaaaaaaaaaaaaaaaaaaaaaaaaaaaaaaaaaaaaaaaaaaaaaaaaaaaaaaaaataaaaaaaaaataaaaaaaaaaaataaattaaaaaaaacataaaataaggggggctggcctttatttaaaaaagattttcacttgggaaaactcgaggggttatccatttttaataggttcgcaaaaatttacctatattggccagttgttataaaaagggaataggggaaaacccttagcctttccaaaatttttgcctttttaaaagattactgtttcccgccctgtttatatacataaaggcccccggccgaggcctttacaaaaatttgtgtcccttataattggaatttggctaccccccttttatggggttttttgagctgtttttttgggttttctccccagttttcccctttaattttaaaaaaaaaaaaacggcgatgtttttgttttttccccttttttggtcaaaaacccaaaaaattttttaaa

SEQ ID NO: 19635 - DNA, 279 bp, Glycine max
  Clone ID: PAT_MRT3847_117735C.1
cccacgcgtccgcccacgcgttcgcccacgcgtccgaaaaaaaaaaaaaaaaaaaaaaaaaaaaaaaaaaaaaaaaaaaaaaaaaaaaaaaaaaaaaaaaaaaaaaaaaaaaaaaaaaataaaaaaaaaaaaaagggcgaccttataaaagggtgaaagcttaactaaattttattgcaatggcaaacttttttaaataggggagccagataaaatcaaggggttgaaaaaataaaacggggtgaataaaaaaacccttgggtaaccaaacttaattgc

SEQ ID NO: 19636 - DNA, 679 bp, Glycine max
  Clone ID: PAT_MRT3847_117736C.1
gaagacgaccgaaggggaccacaagcaagagcacttgttcaccaattacgagttctgaagaaattgagtatatatctatccatttgttttgaaaatggcttccaagagtattgcatgcattgttcttctctccctcaacctccttttctttaccatggtcagccccaacaccattgccccttcccctgcgatacaaccaccaccaccgccacgtgagtgtcccgagttgggtctttgcctcgatattttgggtttgggtcaagggtctccatcaaaagattgctgccccatcctccgtggacttattgaggttggtgccattgtatgcatttgcgacaaactcaggtccgctacattaggaatcaacatagatgttaatcttgccctggtgctaatgttaaaattttgtggacacaacgagtccaacctcatttgcaattaagagcagaatacccatgatggtttgtatttatagttaaggacgttaccattgcataatgctaatggatatatactacaaataaccgtccatagataataataaataaataatcctatacacttataattgtgctgttgttgttctcgcacgtggatggggacttatcttcctccacgaaatatatctttgtttatcgtcttgttagtgaaaattgttaaataaaagtcctttgttgcc

SEQ ID NO: 19637 - DNA, 421 bp, Glycine max
  Clone ID: PAT_MRT3847_117737C.1
cgacgtagccaaacctattcattaccgtcagcatggccccaaagagagtccaatgctgcatctcagtagacatagacgcggtagccggctggctcggctcctacggcggcgaagacagcacctcagacatctcccgcggcctcttcgccggcaccataggagtccgtcgcctgctaaaactcttctccaaatacaacatcaaaaccacttggtttatacccggccactctctcgaaaccttcccagaggaatgccggatgatcgtcgatgctggccacgagataggactccacgggtactcacatgagaatcctatagccatgacgttcgagcagcagactgctataatggataagtgttataagttgatcaaggagtttaccggcaagccgccgagaggaatcgtggcgccgtggtggga

SEQ ID NO: 19638 - DNA, 565 bp, Glycine max
  Clone ID: PAT_MRT3847_117738C.1
ataataaaaaaaaaaaaattgaaaaaaaaagaaaaaaaaaagggaaaaaaggaaaaaaagggaaaaaaggaaaaaaaaaaaaaaaaacccaaaaaaaaaaaaaaaaaaagaactaaaaaagaaaaaaaaaaaaaaaaaaaaaaccaaaaaaaaaggaaaaaggggaaaaaaaaggaaaaaaaaaaaaatttcagggaggaggggggaaaaaaaagggcaaagcccaaaaccaggagagggacaaggaacccaaaaaccgaaaaaaaaaaatcgggagggaaagggggaaaaaaaggagctaccggggggggaaggggggaacgttaaacggggaggggggaggcaaaaatcccacaaaggaaggattgggagattatatctaaagaaaaagaagggagccccagaggtccaaagccagggggggaatgtttccctgttgcaaaaaagaaaaaaaaaaaacccccgggaagatcctacaagaaaggggggaaaggaaaacttttgccaaaaaggaggagaaagaaaaccggggacggggggtgctgtggccccttcccaaaagggg

SEQ ID NO: 19639 - DNA, 1702 bp, Glycine max
  Clone ID: PAT_MRT3847_117739C.1
tgtcgaagaacaacagcaacagatgactctccagagtcttcgtacaatggtggatgctgagagatcctatcatcagcatgtccttgttattctagagaaactatatactgagataattgaagagagacaaccaaaagaggctacatcatttccactgccaaaagatggatataatcaacctgcagatgagaatgctaattcaaatggcatcgattataaacacaacagtcaaacaggcacatacttttttgcaaaggtcatacatccatttgatgctcaagctgagggggagttaagcctatcagttgatgattttgttgtagttcgtcaggttggccccaatggatggtctgaaggagaatgcaaaggcaatgctggatggtttccctctgcttatgtacagagacaggacatgataccagccagcaagataacagaataacttcacacgataccaacattggtcttttgattaggtgaggcaaaaattgtatattataatcacggaataggtgcagcatttgaaaagccatagcatgtgcttgccattatttttgggtggttctatcatctgtgcagtatgttgtatatgtgagagcataattgcaataggaaatagcagtttgaatatttagattgatatattattggcatctgcttaagcccttaggtcattttctaaggaacttagttttcgagatgaaaagcttagtaaggtgggtaagtgttaattttatgctgtccatattctatagcattgtttgtaattctaaatgaaagatatggcgagaaacattgtatttaagaaatcttcctatgcatcaatatggaaaaagtaatttgtatcttttactatgttgtctgtcgaagaacagcagcaacagatgactctccagagccttcgtacaatggtggatgctgagagatcctatcatcagcatgtccttgttattctagagaaactatatactgagataattgaggacagacaaccaaaagaggctacatcatttacactgccaaaagatggatataatcaacctgcagatgagaatgctaattcaagtggcattgattataaacacaacagtcaaacagccacatacttttttgcaaaggtcgtacatccatttgatgctcaagctgagggggagttaagcctatcagttgatgattttgttgtagttcgtcaggttggacccaatggatggtctgaaggagaatgcaaaggcaatgctggatggtttccctctgcttatgtagagagacaggacatgataccagccagcaagataacagaataacttcacaggataccaacattggtcttttgattaggtgaggcaaaaattgtatattataatcacggaatagatgcagcatttgaaaagccatagcatgtgcttgccattatttttgggtggttctatcatctcatctgtgcaatatgttgtatatgcgagtcataattgaaataggaaatagcactggcagtttgaatatgtaattgatatgtttattattggcatttgctttggccctttggtcaggaacttagttttatgctgttcatattctatagcattgtttgtaattctaaatgaagatatggcgagaaacattgtatttaagaaatcttcctatgcatcaatatgaaaaaagtaatttgtatctaaaaaaaaaaaaaaaaaaagaaaagaaa

SEQ ID NO: 19640 - DNA, 111 bp, Glycine max
  unsure (1)..(111): unsure at all n locations
  Clone ID: PAT_MRT3847_11773C.1
gnnaagnaggatattcatcatctagtttttggtggangagctacattagctgctggaaggctggtggccgagaatggnattcttaaggtgaataacttcatagggtgctga

SEQ ID NO: 19641 - DNA, 684 bp, Glycine max
  Clone ID: PAT_MRT3847_117740C.1
tttttttttttttttttttgtgttaataaagattgagggctggttgaattcaaattcatgcacatcttaacatgacgtgcgtgtgcatggatgacaggaaattaaaccttctactagtattttattttacaaattaaacgaaataaagcagacaaaaatatgaattaatatgacgagaaaaacacattggtgattagaaaagagtgaatgagatcaatcacactatcagtctcagttgttgatataatcatatagatcgaatagcattaattagcaagctttgagtggctttccacaaaggcaatcgttgtaatcaaacgacgacgcatcggcatcactgtagctgctgggaattgggccgcagaggtggttgtggctaaagtccacaaacccaacgtaggaagaggaagacatggatttgggtattgggcccttgaggttattatacgataagtccagtaacgtgaaataagagctacctccaaacgagtcaggtatatttccctccaaataattgtggctcaagttcaactcactgatacccgagcccaaaaggctcgccggtatacttcccgaaagcctgttagagtccaacttcaacgtcgatagtaccttcattgcgcccaaagcttcagggatggacccagataagcgggtattagagaggtccagatccaccagacg

SEQ ID NO: 19642 - DNA, 542 bp, Glycine max
  Clone ID: PAT_MRT3847_117741C.1
gcacgaggattgaacaaagtttgttgacactgtcccttgaggaattttttacgaaccatttccgtccgccaccaactgttgtcatccaacaagctcttctggcagcaacaccatcgtcggaatcgcggttcgctgatctacactacactgttgacgatgtccttttccgatcacgaacatgccctcacgtgtgtttttcctcgagccaaacagccatgctcagacgtgcactattggcacgtgtaggcctcactctggcagtgttttccatgccagtggcactttgcattgcctgcactccctttgtaatctgaacttccgttgtatcgtttttggttgttgcagattctgttcatgtttcctatggtgtctattggagctactaaaaaatctaaacttgaggccctgctttcaaacttcacactttccagggagaagttggacaattccaattactctacatgggcttccaacattctcctttggattagtggtcaagggtacaaagagcacctcacttctattgttgattctgtaccaaa

SEQ ID NO: 19643 - DNA, 334 bp, Glycine max
  Clone ID: PAT_MRT3847_117742C.1
tcgggtttcactagggatacccctcgcgaggccgccatcattgacctatcgccagacatggtgatggataacctttatgagcctgtgttcgcccatgatgagaccatgtggcatttggtgacgaatatgtctgtgtggaaccacccttgtcatcagcaaaccctgtgtgcacctcccagctcactgtgttatcaactgagccatgccgtctgggctacctaggctgcacatgagctggcgcttcgtatctgatagctgaatgaggagctcgatgacaccaagcctgatcatgacactgtgcatgaccctacatcgatttgagtgggcaaacccg

SEQ ID NO: 19644 - DNA, 1388 bp, Glycine max
  Clone ID: PAT_MRT3847_117743C.1
atttctcttaagagaaagcgcagtgtgtttaatgaccaatcttgttatgatgagcatgccagttcttctggattacattgtaataataatgtataccttgatgttgacgaggaaaatatgaccaaagagaatgctagaggcaccgcatattctggtcccaccaatggtgaatatgttaaggagaatcaatcttccttttctgttaagggtgatagtcaagtagatgggatttgttttaataatggggcaaaaaattctttcaaggattctgatgagaaagttgagtgggagacttttaaatcttctttgtttgaatccacagaggaaatgcaatcattgcatcaaagttctgatattgagcatggaaaaagtacaagaaacaaagatttctctccctgcacccagtataataataactacaatttctgtagtgatgttactggtgtttcaaggagccaagaagcatgtagaaggcagcttagcaatactggatctacactgaagagtaaagatggcaatttatttgatttgaattatgaaagtgcctatgttgatgaaggacaagttgattgtgatgggcttgcttcaaatgatcaagattgtggtcttactgcttcaaatgagaaagatataattaatgaaagagaaaagcttaaggagactgatgaatataaacaagcaatggaagaggaatgggcatctaggcagcggcaattgcaaattcaggcagaggaagtacaaagattacgcaaaagaagaaaggctgaaaagcgcttactggatatgcaaagaaggcaaaaagaacgtattgaagaagtgagagagacacagaagaaggatgaagaagttatgaacctgaaggagcaattgcgggttgaaatacagaaggggcttaatcaattggagatgcgatgccatgatatgccctcactgcttcgtggcttaggaatacaagtgggaggaagctttatccctttgccaaatgaggtgcatgcagcctataaacgtgcgttgcttaagtttcatccagaccgtgcatcaaaaactgacgttcgtgctcaggttgaggctgaggagaagttcaagctcatctctcgtttgaaggaaaagtttgggatgacttcatgtcactaaatgctaacaactgataaatttggttgttggtattttgtgttttaactgaagtgcttttacctcataatagctcatttgttggtattcttatcttaactgtatctattagtctcccctccttttctcccaaaatttacagcagataataggttaatggactagaatatgtgaaggattttatttcttataaaaatggattttttggacggacagttaaattgatattactgtcctcaccttgatattttttgggc

SEQ ID NO: 19645 - DNA, 136 bp, Glycine max
  Clone ID: PAT_MRT3847_117744C.1
cattccgctgagtagctgacctgacagctggcatggcctccatcaagcgatctagcacacatagtggcaatagtgggcatgtgtctcgaactaaacccaacgaaccggttggcacaacgtgacccggatagtgagc

SEQ ID NO: 19646 - DNA, 839 bp, Glycine max
  unsure (1)..(839): unsure at all n locations
  Clone ID: PAT_MRT3847_117745C.1
gaaggaagaaggaggcgtaagttactagcaacaccctacgacatcgaaaggttcaagatcatggaagaaaagcgcctctccatgctccgcgcgctaaaaaaagcgatcccattcaaccaaattacgtctctctcgttcccttcccttcctcttggcccccaaaattctgtttcacaatcctaactccgaaaccaaaaatggaacaacccccgaagcccgaaactgtgcccgaatcccacgtcccgaacggccactccaccaccaccaccgccacaaccaccgtcacaaacggatcgggatcggaattggaatcgcaggtcccgaaggaacgcgccgcatcgtcgtccggcagcacgaaaaaatcggtgcactggagccccgaattggttaccgaatccaccttcacctcttctcctcgcgaatcgcgctccaatccatacttttccacttcttcttccttctcccaacctcccccaacgttcatggagacggtggtgaccgttcgcaatgtgctgggaagatggggcaagaaggccgcagaggctactaagaaggctgagagtctcgctggaaacacgtggcagcacttgaaaacaagccctagctttgctgaagctgctatggggagaattgcccagggaacaaaggtcctggcagaaggtggatatgagaagattttcctgaatacatttgagacagttccggaggagcggcttctgaattcttaattcatgtgatctattgaatcatttgaggggattcattaaagtagttaggaaaattgtatggtcacttttttctgcttctcattcccttccatgctctatannacaaggaaa

SEQ ID NO: 19647 - DNA, 329 bp, Glycine max
  Clone ID: PAT_MRT3847_117746C.1
acttagacggtctggccgttaatctgtgattgagtgctcattgattcactttgggaaaagtaacagaggtactaccaatgtacggggagtgccaagactttagacttatggagaatggtatggtggatacatcttgttgaagctcgagtatgaactgcaggtgcgctgcgcactaggaacgttatacttgcagaaatcgtgccaactgccaacgttgagttgagtggatggatcacttttgtacctactagatggtatcctgaataacatggggttacgcctgagtgacccgtactaacctaaggaggctattctgcatggaaggatac

SEQ ID NO: 19648 - DNA, 537 bp, Glycine max
  Clone ID: PAT_MRT3847_117747C.1
ggctcgaggcaccatccaacccatcaaatatgcatgtgaaaggatctagttcagatgtttttcgtgttagtgtctcatgtgcacccagcacatccagtcatggatctgcacctgatgattatgatgctcttggggatgtatacatctggggggaggttatctgtgagaatgttgtgcaagttggtgctgagaaaagtgctagttattctagcccaaggacagatattctgctacccaggccattggagtccaatgtggttttagatgtgcttcaaatagcatgtggtgttaaacatgctgctctattcacaaggcaaggtgaactttttacatggcgcgaagaatctggaggacgccttggccatggtgttgctaagaatgtggatcaacctcgtctagttgaagcaatggcttctacaactgctgattcttgcgcctgtggggagttccatacctgcgctgactcaatggctgctgaactatatacatggggcgatggtactcataatgccgggcgttttggtcatggcactgatg

SEQ ID NO: 19649 - DNA, 410 bp, Glycine max
  Clone ID: PAT_MRT3847_117748C.1
attcttttttttttttttttttttttttttttatttttttttctaccttttttttccccttttttttttttaataatacccaccgggggtccaaccaggaaaacccgacccggacccagaactggcaccaactttccctatgggggggccgtttaaactttggggtacgcatgaaaatccctcctcccggggggaaaataaattccgctgacattactgaagaacctacgggccggtcccctaattgtaaaagccggggggtctaaaggggggaaccatgtcacactatttgcgttgatctaccgtcccaatttccaaaagaaaaaccccgtgtaccggttaaaaaaatgaatcgccaaaggccctataagaggggtaatacgttatgcccccaaaggatttttttcttt

SEQ ID NO: 19650 - DNA, 453 bp, Glycine max
  Clone ID: PAT_MRT3847_117749C.1
acgagatttcttataacttaaaactcgaatggttattcctgtgttatatgaatattctgttactacatatatgaaataaacaaactcatgattgatttacgagttgaaatataaatttaatttagggtcttattttttttttaaaaaaaatctaagttttagaagactgtataagacatgttaagttaaaattctagaagcatgttttagaaaaatcttcttagaaaataatttagtttattaaatattctagaatatgagtaactttacatttataaaaaaagttattgagaatcatttataactattagattaagtgtgttgacaaatcttaaccattgatttgggaggaatcaccagtatagataagaaaaatgtcttagaatttgcaagaagtcaaatcaaagtcacaaatcaagaagtgatcatttatacaaatattttttttctcta

SEQ ID NO: 19651 - DNA, 417 bp, Glycine max
  Clone ID: PAT_MRT3847_11774C.1
cacgcgtccggatggtatgggcgcatcagaccctcggcgaaaggcaagacttgtttttgtgctccttgcatacccggtcgctttggaagcaatattgcctaaaggtcacatgctaaaactggagccattataatcaaatggcacagatgctcacaagactttcatgtcacaaagtcaccgaatcctttccccatcaaacctaatgcttcacaagtgacatttgttagtttgctacaatgaactagaactcatgttatgcatattctgttatgctttaacatgtctacctaacactatcttactacatccagagaggcattattctgtcatgagctagcttctcatgctgttgatcctgtgtcttattagtcattagtattattcaacacttttagtgtgcagatattaggattcatt

SEQ ID NO: 19652 - DNA, 462 bp, Glycine max
  Clone ID: PAT_MRT3847_117750C.1
aaccccaaagggggggggagtttttatttagaacaaggggcactttttaagacagaaaattaaaaaacttcccaagaaagggtggatgcatgtatttttgggggacataaaaagggcatcctggggggaagagggaaacaaaaaaaatgggaaacaaaaaaaagatttaaaatttttttattacctgggtaacataattgggccatggggaaaaaaaattcaaataaaataacaaaaaagttacatccaaaaaaagggaaccctttttttaaaataaaagcagcaaagggcaattttaaaaatgggggaacaatgggaaaacaagagccaataaaaaccaggttcaacgcattttggggtactgaacccttaaaaattgcatggccttccattaaaagaatacttgagcattataataacatcccgagaattttttttatttggagaaaaaggaatgccccc

SEQ ID NO: 19653 - DNA, 1458 bp, Glycine max
  Clone ID: PAT_MRT3847_117751C.1
tacctcgagccgaatcggctcgagataagagaatctaaagaaagaaaaagccaggctcaaaaagttgtgttattgtatgcatgagaattgaaggagagaggtgaagactcattatcatcatcatcatatcatcgtcatgtatagcatggattcatcatcttctggatctcagttttctcagcacccacaactccctccagggtttcgattccaccccacagatgaagagctagtggttcagtacctcaagaaaaaagcagactctgttcctcttcctgtttccatcatcgccgaggttgatctctacaagtttgacccatgggaactcccaagtaaagcaacttttggtgatcaagaatggtactttttcagcccaagggataggaaatacccaaatgggacaaggcctaacagagctgctacttctgggtattggaaagcaaccggaactgacaagcccatacttgcatctcatggtcaccacaacaaagttggagtcaagaaatcacttgttttctatggtggaaagcctccaaaaggtgttaaaaccaattggatcatgcacgagtacaggcttgctgatagctcctcaaactctagctcaaaacctccttcttcggcttcagatcatgcacacagtggcaagaaaaactccttgaggcttgatgattgggttttgtgccgaatatacaagaaaagcaacagtacccacctgccaaggttacctttgatggagcagaataaggagatttctagggagatttctatgctaccaatgatgtcaactttgtcaatggctaatgataacaacactcctcaggattccaaaactgcgtcttctagaagcacaagttatggaccccttggagtagaaaatgatgataatttctttgatggaatctttggagttgatcatcagagcatgcagcaagatgtttctgatcattcccaacaagtgtcttcaaagggaaacttccctatgaaaagggaactttcgtcacagttttggaatggcacagggtcatcctcttcaagcaggagattccattacgatcttaattatgctggaaacagcactactgttgaggaagacaattccttcgtttctctgcttagccaccttccacagaacacaacaacgtttcacccaaatgcgcttcttggccctgttggtaatggtgtattgaggcaacagtttcaacttccaagcatgaattggaatacttagggtggttaatttggcttagggtatatataccgggtaagggttggataatgtagctgccattgtaggtttatattataagttaatttaacttgggttttattagccatatatacataacatactagagagagagagagatcatgaccgtacgcttgtatttttgtgagtttttttttttgaagcttatattaaactgaatacgatataatactgctgttctgtatcaaagg

SEQ ID NO: 19654 - DNA, 877 bp, Glycine max
  Clone ID: PAT_MRT3847_117752C.1
tgttgggtttccagttataagttttcgtgcatattctgccatttcagatgcttccacagcataaacatgttttgcaccagcctgagcagcaaataatgacaaaataccactaccagcaccaacatcaactacaacacgaccaatgaaatcagtacggttctcaagaacagcagcatgataggtccctgtccgcacatagtcctgcaacatattttgctgatgcagaagttgtccataataatgaaaatacatttttgcagatgatgactctatcttttcatcaaatttgcttttagaagttgtaatagttccatttggtacatttccttcttgagcattgacttccttcttccactgttggaatacacaatggaaggcctcactctcctcatcatttctaaactgtatagtgactcccctggaatacaatgtctgtttgtcagcttcagacccttcgaccatgcaaaccgattcaataggacctaatctgaatagctgaatagctgaaagataagcattgagagcaacatggcgagattcgttcagaatttgaagacgatcaccggcgaagagagaaacccccggcgaagcagaagaaggagccgaagacacctcggaaaccgacgctagcgcaaactctcgctgcttcctcttctgcgccgcagaatcctccattatcgttccttcctccaacctcaacaacaacaacaacacttgtcttgctctgtaactctttttatatatatatataaggtgtgtgtgtgtagaatgatgatatgaaactaggtgtctgaagtatgcataaattttgatttaagaaatggaacaaaactagggtttggggatgtgggaattgagagccgccaggagccgaatt

SEQ ID NO: 19655 - DNA, 1419 bp, Glycine max
  Clone ID: PAT_MRT3847_117753C.1
gacagaattcaaatccttgtcatgcgatcatcctttcctcctctcaactttatttcgattgaaatgattcaatcatagtgcctaatcttcatccacccataataaaaagaaagatagagcaaagaaacaagagaatctacagaaaaaagccaggcacaaaaagttgtacataatattgtatgcatgagaattgaaggagggggttgaagactctttatcatcatcgatcgtgtacagcatggattcatcatcttcaggatctcagttatctcagcacccacaactcccaccgggttttcgattctaccccacagatgaggaactagtggttcactacctcaagagaaaagcagactctgttcctcttcctgtttccatcatcgccgaggttgatctctacaagttcgacccatgggaactcccaagtaaagcaacttttggtgatcaagagtggtactttttcagcccaagggataggaaatacccaaatgggtcaaggcctaacagagctgcttcttctgggtattggaaagcaaccggaactgacaagcccatacttgcatctcatggccaccaccacaaagttggagtcaagaaatcacttgttttctatggtggaaagcctccaaaaggggttaaaaccaattggatcatgcacgagtacaggcttgcagatagcaactcaaattctagctcaaaaccaccttctatggcttcagatcatgcacagagttgcaagaaaaattccttgaggcttgatgattgggttttgtgccgaatatacaagaaaagcaacagtaccaacctgccaaggttacctttggtggagcagaataaggagctttctatgctaccaatgaggtccactttgtcaatggctaataataacacctctcaggattccaaacccacgtcttctattagcacaagttatgggccccttggagtagaaaatgatgataacttatttgatggaatcttaggagttgatcatcagagcatgtagcatgatgtttctgattcccaacaagtgtcttcaaagggaaacttccctatgaaaagagaactttcgtcacagtacttttggaatgacacagggtcatcctcttcaagcaggagattccactgtgatcttaattatgctggaagcagcactgttgaggaagacaattccttcgtttctctgcttagccacctttcacagaacacaacatcgtttcacccaaatgcgcttcttggccctattggtaatggagtattgaggcaacagtttcaacttccaagcatgaattggaatacttagggtggttaatttggcttagggtatatactgggttggataataatgtagcggctattgtaggtttatattataagttaatttaacttgagttttatgagccatataaaacaaactag

SEQ ID NO: 19656 - DNA, 651 bp, Glycine max
  Clone ID: PAT_MRT3847_117754C.1
cacaattcttcaataaaccatttatttgcaaataaataacatcaatgccatttctaaataaacatttaagaactaataacacacaaggtactttattgtaaatcgggactgaagctgcccaggctgccgcacccaccgcctcctattcaaatgctgtcacgtgggaggagtgttcttgttcttgtctctgaagctttaacgcaacattaatacaaagctatccttcgcttcctctaccttacagttttatgttttctatacttagacgtgacccttcaatcaaagggaagaggcctattatgaaccaggagattaatctacatggatagacgagtcatcttaaaatgagttcactttatccatgttctgattcagtctttctgaatgggctggtttctaaacctagcctaagtacaggcctgaaacataggcaaccaccaggaaccacggagctgaggcaaaaaggcgcttctaccagcctcaggcttttcaacctgggacaaactgcaacacttgtgccacacccctatgacaaaaagctgaaaatgctggaaaataaggcgtgtgttttcacttacataccaccagatgcaattcatgcctttaaaactgggtgtgtgtgtgtgtgtgtgtgtgtgtgtgtgtgtgtgt

SEQ ID NO: 19657 - DNA, 294 bp, Glycine max
  Clone ID: PAT_MRT3847_117755C.1
gaaggccccccgcacggggcccaactttggtccaaacggaaggccaagttcggttgcgggcaattcaagaagacaaagggtggtccgggtggcctgtccgaatcaggggtcctggggcgccggaatccgcccagttccagtggatgaatgggtatgaagttgaactccattccgatgacgaagacatacacattttgctacatagattggttctcaataccaactcagtgcatgcatcctttgtccctctggaaatgacatcaagtttcataagatcgcatccccaataacaat

SEQ ID NO: 19658 - DNA, 622 bp, Glycine max
  unsure (1)..(622): unsure at all n locations
  Clone ID: PAT_MRT3847_117756C.1
ataaaaaaaaaaagcttcttatttcatcgagtgcctatatattaatcttctcaaaatttacatgttccactctgttctgtttcatggctgcaacaacagcaacctcggcacaggtttccaaagactacaaggacagcaacaatggcaaccctgaaattacgaggcatgaaattcaagccgccatagccaaagctgtggagctaagagctcttcatgcggctttaatgcgaggaaatagccctgccaatgctagattcccatccccttcccctgcttcgcgccctgttgctcacttctctgctcaagattaccctgttttcactcctagctacgaagatgatccactggtggggtacaatcaaaattccatgaaaagcctaacagtatcagaaagttgggatgggagtatgctagaaggaggaaacaacatagataacatcgtagcagattacaaggagagatcaagttcaaggaaggganctatatgctggttttgccaaccttgaatctcacatatgccccacggaagacaccaaatctgtgactggctctagcgcaaatcaaaatacctttcttcaaacatcgccaccaaaagactacttcaagtgtaggaggcgaaaca

SEQ ID NO: 19659 - DNA, 317 bp, Glycine max
  Clone ID: PAT_MRT3847_117757C.1
accaagtcaagttctcactttgaagagaaaataacatcgtaaagatgtctgcatcaggaggcagaaggaagccaagaggaagagaataaccttcttgacaaagggccccttttaatcttaaagtcaagggccaaaatttaactcaaatggtttcctggttgattgaaagagacttccagctgaacagacccctgatgagcttgagatggacgaaggggattagatatgatgcgcatgctggaccaaaacggaggtggacacaagtttctttaaatgtatgatgatcatattcattaaaatgcttgataaaacgcatg

SEQ ID NO: 19660 - DNA, 516 bp, Glycine max
  Clone ID: PAT_MRT3847_117758C.1
ggggccccgggaaaaaaaagggaccaaaaattggaatcttataggggcagggaaaataatatttgacgaacaggcccccccttaaacggggaagggcattgccatggtctaacaaagcccaaaaatgggaaaaagaagaaaagccacccatttttttttttttttttttgggagggggggaaaaaggaccaaacatatcccccccctttcaaagttcccaaatttgggaaaggcccatgggccctggggctttccaccccaaggccccccccaaaaaaatattggaaaagcaaaaaactttttgggcagggatcaacctatatcccgccccgggaagttcaaaaccaaacccaaccggggggcaactttttttgaccggcctatcaaattagcatttaatcaagttgggggaaaccctagggcgggggtccagcaaacgggaccccacttccacagaaaaccctaatggaggccgcttccttcagaacataatcgaaacttactggaacaggacgg

SEQ ID NO: 19661 - DNA, 919 bp, Glycine max
  Clone ID: PAT_MRT3847_117759C.1
cggctcgagcatttgcaagaaagggttccctttcttgcaaatggctttccattcacctcaatctgaaatgaggaacaagaaaataccatggtggatgaggaggacagccacccttttccccatctacaacaattccagtgtcctcttgtcatggtttgtaggggaagaagcactagcacttgagtcaaagatgaagagatcataaacggtgtttcatccacagtctcatgctttctacagcattctcagtggcaaaagggttccaccagttcacataaactgtgcaatgggaatgtgaattctgaggagagatctcaccaccaaaatgaagtgaagttcagtaaagtcatgaagagcaaatggggaactgatcccttgtttttaggctcatacagttatgttgcagtaggatcaagtggtgatgatttagatacaatggcagagccattgccaaaagataacagttgtcaacctcctgcagcttcatctccacttcaaattttgtttgcaggggaagcaactcacagaactcattattccacaactcatggagcttacttcagtggtcttagggaagccaataggcttcttcaacattaccattgtgttgggatttataacaactagtatttttatttttatttttattttttccttccctttttttcccctctcttttaaaatttttgaacattaatctctatgatattattcccatttccattttaaacgtcttcgtttctctttaaggaaagtagtgagtgttggaaaaatcaatattagaagggggcaagatgaatagtgagatggggacatttagatgtactacttgaagtaatttttccccaatatatttctttctcttcatttatgagtgtagtttcttttcatttttaataaatctccttgttaatcttcc

SEQ ID NO: 19662 - DNA, 427 bp, Glycine max
  unsure (1)..(427): unsure at all n locations
  Clone ID: PAT_MRT3847_11775C.1
caaatcaacaactacagtccagtgctactacaacaacgacgactgcgactacgagaagaagatagaagaagagcgcacaccacataacacactaaacacacaaggttacacaccgaagaacgaagtacagtagataataatgaaaaaagcccacgccaataagcaccagttcgctcagagactctgnaagcttctagaagtgccacacatttccataaccacgctcctcagccataacctcaaccctcactcctctctctaccagcagatatcacataccctagatcatagaaaactgatgcctgaaaatattattgtgtatctactatcgaatatattggagaatgtatacgtcgagaacgaaactaatgtcattcttcatagatgcccacgaacaataatccaatctgagattgttaatcacatg

SEQ ID NO: 19663 - DNA, 310 bp, Glycine max
  Clone ID: PAT_MRT3847_117760C.1
gctccatccaaagtttccaccttttctgacttttctcccaaacccagggtgtgtgggtgcttaaaaaaacccaacttgctctgtttctctgaactttttgaatgataaacttggaagcagaaaccttagcgcgacgtgcctaaccgagcctctcactggagcgattcctgaaccgcttcgagaggctaagaactaggagctcgctgttgcaactgctccccacgcctcgatgactcggcagaactacgctgataagtgtgaatttgcgacctaccaccacttaactgcggaatactgagattcctacgtg

SEQ ID NO: 19664 - DNA, 151 bp, Glycine max
  Clone ID: PAT_MRT3847_117761C.1
actgtaacctgagaatatcgtcattatgataattttaaacaagtcactgatgattatactgaagacaattacaatacaatgatatataagtcaacaattagaatttttgttggctagaaaatgaagatcagatatgttaatcattgtgatt

SEQ ID NO: 19665 - DNA, 657 bp, Glycine max
  unsure (1)..(657): unsure at all n locations
  Clone ID: PAT_MRT3847_117762C.1
aggtaaccctaattaaaaaaataatgcaataaaaagaaagaaataaataaataagaataaatgtaaaagaaatatatcatgtgtgtgtataagtccataaaaaagatatatatatatatatataaaagatttgagaaaattaaaatctaataaaaaaatcatgtttgacatcttttaaaatgagaatttaaacctaatttaatcataaaaattaatttatatgatgaaaattatctttcacttatgtattttatatctctagtttatgtaggatttaatttttttatccttacatacttatttcatacccaacactttttagacttatgtctaattctttaatggatttgaaataaactttaatataataataaaattatgaattttgttctaattcaattctaaaagttagtagatgtacttatttaaattgtgatccatttttgtatatgataaattcgngcacccatataaagtacgtagatgcatgtatgtgtacataatacattatctcgtaaagtattcacaaacccaccattttctaaacctcgtgccaacaattacttctacattttttattttctcttaatttaacttattgtaaaaatttatataaacactcaaaaataattatcagtaagggtcgagatccgttga

SEQ ID NO: 19666 - DNA, 297 bp, Glycine max
  Clone ID: PAT_MRT3847_117763C.1
cgagaagacgacagaagggtccttagataaacttaattgtcgatgtcatgttccatccttttatcaaatattgtactttgtccaatgttttttgtatgtgcttgtcctcggaagcttgttttttttatgggtagttattaagttcaaagtatgataaccttataaaattttagatctttgatatgattgtgcattgtatgcataatattttttcagaggagagatccatcaacttatttgatgagtaactcttataatactttttatttttttacttgtttgtcttactttggagca

SEQ ID NO: 19667 - DNA, 445 bp, Glycine max
  Clone ID: PAT_MRT3847_117764C.1
cgtgaagacacacaaaacaaaagcctactagaagaggtatcaagtcaaggtcaagagaagaagagagggaaaaaccgattaccgcgccaagatacggttgcttacctaggacaagaacagatataacacccctaaatatcgctctgttggtcgtttcagcgacaaagacattgcagcacacattatcaccgctagcatcgctggcgatattgttcctgctgcagcataagcacatgagctgccacgatatggtcttgaagtaaggcttacaaatgatgctgcagcttattgcactggactcctgttggcccgaagagtcctcacaacactagaaacggatgaggacgacgaagcgaatgttgaggctactggagaggactactcagaggaacctgctgagagcaggacgacattccgagctatccttgatgttggcctaataaga

SEQ ID NO: 19668 - DNA, 389 bp, Glycine max
  Clone ID: PAT_MRT3847_117765C.1
cccacgcgtactgattacggcgatggtagtggccattcgcccagcaaagaatcctgtttgcgtgaaaggtcatgtctactgtgacccttgccgtgctggttttgagacctcagcttcaacctacattgctggagctgtgattatgtcgcaatgcaagatcactgctagcaacgacgttgtgtacaccaagaatgcgtacactgactcaaccggagcagacacaatagtacgtggatgatgatcacgcagatcagatctgcagtgccaaacttgaaaacagtcctcacagtcaatgcatggaagtcaccctatgccgggacgaagccgttgtgattctgacccggtacaacggaattgcctgcaacgataggttccacaatgccataggc

SEQ ID NO: 19669 - DNA, 377 bp, Glycine max
  Clone ID: PAT_MRT3847_117766C.1
ggtagcgctatctttctcagtgtaacgcctttagctagctcagatactcgagggtggtgattttcagtttcgtgttcgtttcttggtttttctgttcagtcatttgtttgtttgcaccgaaaacccatttcgaaactggtcttacttatttttttgctgatctggtcgaagaatacatagcgacacacacaaacaaaccatggctggtgccacgaattggcttacgttttcgttgactcacatggaaatgcagcagttcggtccatacgacaccaccactcactctcactgcttcaacgacagcaatttttatgggtggacgaattctaagagcgtcatggattcacagagtgagaccaacaactttgcggtgcaaa

SEQ ID NO: 19670 - DNA, 238 bp, Glycine max
  Clone ID: PAT_MRT3847_117767C.1
gtcgcttgtttgcactgtttggtcaccctgctgaaagtgttagagatacagtagcaatgatcatgcgatcaattgcagaagaagatgctattgctgcagagtccatgcgggatgcttctttgcgtgatggtgctttgttgagacatttactgcatgcatttttccttccgtctggtgagcggcgtgaagttagtcgacaacttgttgctctttgggcagattcctatcaaccagcttt

SEQ ID NO: 19671 - DNA, 673 bp, Glycine max
  Clone ID: PAT_MRT3847_117768C.1
atctgatttgatttcggagctgtgggttttattgaaagaaaaaaattagaagcaaaaatgatgcagtcgttgatgagcatgaaggcttacgtgggtacgaggttaccgattttaacgaattccgagacgagtacgaggaagcagcgcgtgaattgtccgaaccgtaggaatgtgatggtttcgtgcggttcggagaggaatgggaacgaaggaataggttcgaactcaggttcgtttatgtctccgagccataattacgcgatcttgaagcaccggatggagaaagcggccaagtccgagtattacgaagaggcttcgaggattcgtgactcgctcaagtgcttcgaagatgagattcctgttctgcgtctgaggagattgttgaaggaagccgttgctgatgagaggtttcaggacgcagctagatatcgtgatgagctaaaagaaattgctccacattctctcttaaaatgctcaagtgatgcgacaaccttgggaatccgggtccaagtgaagagtgcatatatagagggcagaagtcagccttcagaggaggtatattcctttgaatatagaatcaaaattaccaataacacaaacccggcctgttcaacttctcagaaggcattggattatatctgatgctaatgggaaaactgaaatatttggggaa

SEQ ID NO: 19672 - DNA, 1306 bp, Glycine max
  Clone ID: PAT_MRT3847_117769C.1
atcacaatctgatttgatttcggagctgtgggttttattgaaagaaaaaaaattagaagcaaaaatgatgcagtcgttgatgagcatgaaggcttacgtgggtacgaggttaccgattttaacgaattccgagacgagtacgaggaagcagcgcgtgaattgtccgaaccgtaggaatgtgatggtttcgtgcggttcggagaggaatgggaacgaaggaataggttcgaactcaggttcgtttatgtctccgagccataaatacgcgatcttgaagcaccggatggagaaagcggccaagtccgaggttagtgtttttgtttttttttttttttaaggaaggaaaatgttttttttttcttttatattattaatgaggttcgttggtggttcctcgggttttggagaggggcttcttattttatggaatttgaaaaacggtagtattacgaagaggcttcgaggattcgtgactcgctcaagtgcttcgaagatgagattcctgttctgcgtctgaggagattgttgaaggaagccgttgctgatgagaggtttcaggacgcagctagatatcgtgatgagctaaaagaaattgctccacattctctcttaaaatgctcaagtgatgcgacaaccttgggaatccgggtccaagtgaagagtgcatatatagagggcagaagtcagccttcagaggaggtatattcctttgaatatagaatcaaaattaccaataacacaaaccgccctgttcaacttctcagaaggcattggattatatctgatgctaatgggaaaactgaaaatatttggggaattggagttgttggtgaacagccagctatctttcctaggagtagttttgaattctcttctacatgcccattaagcacacaaaatggtagaatggaaggtgactttgagatgatacatgttgatcgagtaggctcaagagcatttaatgtcgccattgcccctttctcgctctctctactaggagatggtgatggtgaaactacttaagatagaacggtagcatcaccttctcagattgttccaaataagcattcagaacatgtcattggaagatgttctcacagccatattaagaaattaaagctggctatttgcatcatctggttgttgtgaattagtgattgtaaatgttttgctgtacaattttctttgtttattttattttcttttcttgttttggggccagaaccttacagatatatgtatgtatgttgttgttgaatggtgggtagagaaccccataaagaaatcaattttcatgtgtgtatat

SEQ ID NO: 19673 - DNA, 343 bp, Glycine max
  unsure (1)..(343): unsure at all n locations
  Clone ID: PAT_MRT3847_11776C.1
gaataaaacaacccagggggaaggcgaagagaggacagggataccgggaaccaccgccgaagaggctcacaacaagcaaagagccgaaccagagaaaagcgccccaacaaaggccggcacagaaagccccaaggangagaaacccacccgacgccaaaacaacgacaaaccaaaaacgcgcagatacacaacaccccccacggagccaaaccacgaggcccgccagaagcctccaaacaacgcgaggcacaccacgaagaaaagggacaagcccagccgccaaggaggaaccaacccaaaccccatggaaaggacaggcccggccaaaaggaaactgagcaag

SEQ ID NO: 19674 - DNA, 546 bp, Glycine max
  Clone ID: PAT_MRT3847_117770C.1
ctgtatagagaactcattaggatgcagtgtagagtctgaagagcaaattcagcagaagataagcatagtgcaactgaaggcagcttcacccttagcccgaccgccatcatgtttcatcactcaagagaacaaacagatccgatagatgcccttttcaccggcatattcgaacatagatgacagaaccatattacatttatcaatactctattgatcgcatcttctcactctgcatcctctatctctgcatcctctggaacgcctcgtagatacatgacgttgttgcacctgatcagaatctctcccaggtttccagagaattgaccatcaatgtactcctcagtgttggcaagctggagattcatatatgagtccgcagaagcaagataacccttgtactccataccccacttgagtttgacaataacaggctttcctgtcaggttgttcagaaaaggttttgggttaactggaacggtcgccatttgttttgaagaatagagcagctcttgtcgtcgctcgtcggcacggttcgagcagtgggag

SEQ ID NO: 19675 - DNA, 300 bp, Glycine max
  Clone ID: PAT_MRT3847_117771C.1
ccacgcgtccggcttgcagcaggagtggatacacatcaaaatggttatgtaccccttcctatggaaaccttcaatacttatgttcacaaggagcccaatggagttgctgcattaattactccatgtaatttacttcgacgaacaatcttcataaactgaacataagtccataagtgaaatattatgcattaattagcttttatatacttaacgtgtatgagacctaataatcaagaagcaccaaaattggaatggtgatgaccgatttgattgataaataaatttttatgttgctttgta

SEQ ID NO: 19676 - DNA, 189 bp, Glycine max
  Clone ID: PAT_MRT3847_117772C.1
aattaccaagtctctgcctcaaaggctcaagagcgagaattgccagcttgtctagacttacttgatgagcagacaccatttttaaggtttccaaagtggccttctgagtgcggatggtgccgacaccttcaaccatatattttgggccgggagagacatttcaggctagaggtggagcgccctgaatat

SEQ ID NO: 19677 - DNA, 474 bp, Glycine max
  Clone ID: PAT_MRT3847_117773C.1
cattataggcgttacatataaagccaaggtgtatacattaacggccacatgcctaaaccccaaggaacttgtcctaccatgggaggggtgagagaataatgctaaggatacaacaattctttgcaatgttaaacttgattgggccattacaaactttataggtttcatacacaatacgttaacctgaaaaagaaattagcgtcctgtgcgcgcattgcacaaactggcaaggtaaaggttttttgaccattttaacttaacatgggtccttggaaattaagatgttccccgagtaatctgggtttaatcaaatggcctgggcctaaaaatgctgagttttacatcagattgatcccctgtagaagaggttgctgccatcctataaccattattgcattgtttgtggctttcctcccttgggtggagaaaccctagttcgggagcctgaacactggttccagaatttggtgactt

SEQ ID NO: 19678 - DNA, 231 bp, Glycine max
  Clone ID: PAT_MRT3847_117774C.1
gtttatacaaactctcatgctgttttccacgtgcaaactttaaatacactctgacagtctctgcacctaattaaaaaaaacttaactgacatataaacatagccatcgttatgtctacacaaccaatgctagttcggtttcctagtattaaagacttactgtatgacacatttaattgtcacaggtactaacacaatcctctgaattccacaaatctcacctagactgcaa

SEQ ID NO: 19679 - DNA, 669 bp, Glycine max
  Clone ID: PAT_MRT3847_117775C.1
ccacgcgtccgttcttctgtccttacaagtggaaacacagttgcggtgatttttttatatatttttacaatttatcttattatataaaataaataaattattctcttactctatgtattttctctcaaattgcatcctatatttctctttaaattgcttttactccctgtgtgttaaagttgttactaaccacagttgaaacaaatagaaaaaatcattctaacatttttcatacacttgtatttttttattttttcttagattacataagatattcttcttcttttttttctgtattacttttactctgttaacgtggttaattaacgtcaattaaaaaatgtgaacaaattaaattgtcttaacattttttttaaatactcaataacaaattatcaattgatcttgtgaatggatctttcttaagacaatcataatttttcctttaatactttacttttattttattgatgataacacttgaaagatgtaattcttgatcaaaacattatatcaaatacttggtcatcaaaaataaatatttcaaaaaaaaagttaaaaatacaaatataaaaacaaaaaccctaaaatttgaaacaaataatcatatttaattaatagtattgtaatcaacagtttattatgttttgttccttaaactttttttta

SEQ ID NO: 19680 - DNA, 374 bp, Glycine max
  Clone ID: PAT_MRT3847_117776C.1
ggctcgaggtctcaacttctagctcttccaactcctacaacgcttttctgtgcactcatgggcatagtcaagttcggtttctacggatttggaagtattggccgtttggttgccagagtcgctctgctgtgagacgttgttgaactcgttgccgttaacgaccctttcattaccaccgattacatgacatacatgttgaaatacgactgagttcacagacactggaagcatcacgaagtcaccgttaaggtcgagaagtcccttctcttcggagacatggctgtcactgatgtaggacactgaaaccctgtagagatcccatgggggtcaactggagctgacatcattgctgagtccaccggagtcttcaccga

SEQ ID NO: 19681 - DNA, 2173 bp, Glycine max
  Clone ID: PAT_MRT3847_117777C.1
ggctcgtttgttctcattttatcttttttctctctctaaaattctagagcgagaaaagggagagagatcaaagtggtgcaacagttcaattgatgaacaagtgattgactattgatatctccttttgactttccaattcatgttctcaatttccctttgatttctccttctgggatttttttcccctccccctcctcaatttgatactcattttttgaaggtttcacactggaacaattgttggaaaaaaaaatctccaatggttgagtttttcttgttctctgtttggtcttaaatgtgccatcatgatcatcaaaagcatatgaacaacaaagtggggtttgcaaggagtaatgttcattggattggtgaaccaatatttttccagaattggcattatctttggaggatttgatattttctggtgatcatgggttgtgcaagttcaaagcaaaagaaatgtcggcgatgcaatgctccttattctcctgctcctagaagctattcaatgcacgttcatcacccacctctagcagaaggtgatagctaccacgttgtggcactcacttccacaacattgggcactctcaaactcaattcccctgctccaactcaaaatttttctgggaattgtaaccatgatttcaagctttccaatggcaagcttggaaacgctgaaagtttcaggtttgatagtgaaagctttgtgcaaaggcttgaggaggagaaggagaagaagagtgaggtattggagaaagacaaaaaagaagagttctcaatgggtttaattgaggccaagacttggtccaacatgattgagcaaaagttgccaaaagtttttcccaagaccccaattagaacaccacctggtgagcctgagacaatcaacacatgggaactcatggaaggccttgaagacaccacgcctttccggtcgccgatccacttccggagcttctcctttgatttcaatggtggtgatgatgttggtgacggtgatcttgatgttgatgttgatccacccaagatgagtgttgttgcttctccaaaacccatgtggcttctcatgactgaggaggagtcaagactcaaccctggaatctcagattttgatcctgaagtgatttccgcattcaggaagtccttgcaacagctctctccggatagccccttccaccttcgaccggagccgggtgaccaagacaagcaagggactaaaaaggggtcctcatttgaggaaaatgactttgttgtggatgatgtcaaggttgatgatccatgtgggaaggacaagttgctgttgtacttcactagcttgcgcggtgtgcgaaagacttacgaggattgctaccaagtgaggatgattctgaagggattgggaataagagtggatgagagggatgtgtcaatgcattcagggttcaaggaagagcttaaagagctattgggtgatggccatggtggtttaggattgccaagggtgtttcttggggggaattacattggtggggctgaggaaattcagaggctgcatgaggatgggaagcttgagaagcttttgggttgctgtgagaagattgaggacagtgttggaggtgatggagtagggggagtgtgtgaggcttgtggggatataaggtttgttccttgtgaaacctgttgtggaagctgtaaaatttactacgaaggtgatgaagatgaaaatgaagaagaatatgttgacggtgaagtaggggagtgtggattccagcgttgccctgattgcaatgaaaatggactaattcgttgccccatgtgttgctgttagttctcaatttccaggtgacatttaacaagaggtactgaaaaaccaaattttgagttttttgttcttcagggcattttgtattttgtgagattttgttgtacagtcaagtttttttaatgtactgatacttactagtgaaagagtcaataacgtgttttaatcactcccctctgcataatcagtgcagttttttacatagtgtatactttttcattttcccttttgtacacaaattgcctttcttgcaaaatcaaggagaaatgcaaaagagaattataaggttagttgctatcatttgcattcttcataatatgtcctcccttttccaatttcaaagatgtaatgtaatgtttgaaagttgttgcc

SEQ ID NO: 19682 - DNA, 711 bp, Glycine max
  Clone ID: PAT_MRT3847_117778C.1
tggtcgggagcaccttgttaaggagagaatatagtatggcacaatctagtggcaaaaaattggttgagtggctggttgcagcattattgttcattgccttgttgagtggtagtgcacatgctgttgcaatatgtaacattgactcaagtcaactgaacttgtgtcgtgctgcagttactggtcaaaaccctccaccacctgatgagaaatgctgtgcagttattcgccaggccaatttgcgttgcctctgcagttacaagtctatcctaccttcatttggaattaaccccaaaaatgctttggccttgcctgctaaatgtggtctacaattgcctcctaattgttgaggataaagtttcatttttgcagtgctgtgaagcagttaacgaaggtcaagttcattacaagcaccttaattagtagtcttcaattgctttcaggtgttttactaacactgaagataaattttaagacaggatttgatgcccctcaaataacggtgcagttggttttaatcagtgtcttgtgtccaaaagtttgtgagtagatgtgtagagtattagtgtttgatgtacaggaatactttgtatctgtactttttttccctccatgtctatgtctacattataatatgtttaataaagtttctggttttggggcaaaaaaaaaaaaaaaaaaaaaaaaaaaaaagcggccgctctacaggatcca

SEQ ID NO: 19683 - DNA, 440 bp, Glycine max
  Clone ID: PAT_MRT3847_117779C.1
cacactggaacaattgttggaaaaaaaaatctccaatggttgagtttttcttgttctctgtttggtcttaaatgtgccatcatgatcatcaaaagcatatgaacaacaaagtggggtttgcaaggagtaatgttcattggattggtgaaccaatatttttccagaattggcattatctttggagggtataagttatcataacacacgcaatcaatgaaacaattccacaccttgtgaatttgttatcttttttgtctcattatatttcagctccaaattcacctaattaaagtctcaaagggtatctttttcttttttttctgtttttttccatcaattcagatttgatattttctggtgatcatgggttgtgcaagttcaaagcaaaagaaatgtcggcgatgcaatgctccttattctcctgctcctagaagctattc

SEQ ID NO: 19684 - DNA, 251 bp, Glycine max
  Clone ID: PAT_MRT3847_11777C.1
tgttgtaaaaacacatacactcattgcacatagtattagcgctgtatgtgagagaattcaaaactgcctactagtccacacaagaaggtggactctcattgaccctatggtagtaacttttacaaccgtcaagaaagacctctagcttaggataaggggggggtggtgctctgaacatcaaagttagcgccacaaccaacaaacagtaaagagagtggtaaaggagtcactattgctctcaaaacattttt

SEQ ID NO: 19685 - DNA, 488 bp, Glycine max
  Clone ID: PAT_MRT3847_117780C.1
cgacctcctcactttctaccactccaactgctcctccctcagcctcctcggtcgtgttcggctttcttcccgcggcgtcaatgtcaccgttggcggcaacttatcctctctcgagatccacatcgaagccctcaaagcctacaactctctgtttcacgacactgatttcaagctcgccaattgtcatcagccattaaacgacaaagtagcccaggaatgtggattcacttctctatctattcggatcgtcgatgaacttgtcactctcagttctcatccgctgttaaagtcaccggatatctcaaatgccggaaagcatctctctgcacttgacttccattcttccctccacaataccaacagggagagtccagaaaatgaccttgttttacttgatgcaaggaatctgtatgaaacaagaattggcaaatttcatgtgcctaatattgaaactttggatccacaagttaggcagtatagtgatttgt

SEQ ID NO: 19686 - DNA, 343 bp, Glycine max
  Clone ID: PAT_MRT3847_117781C.1
taaggaaaaagaagtacataaatgtttaacaagtaaacaatctaatttctagaggcacaaaagcccccatttcacccgatataactctttagggcgcttacggggagggctggggagtataagaccacaatcatggctaaaatgggggaaacactgccagcagcctattgaattatttaaaacgcgattctctcttggccacattggccaaccttgccctttccttttttatcgttttgaatgggggaagggggaaaaaggaaatcttgccattggggcgcctgggctatttgaacaaataaacaatattggaatttttggggataagagcgtgatacccttt

SEQ ID NO: 19687 - DNA, 312 bp, Glycine max
  Clone ID: PAT_MRT3847_117782C.1
gtaccaaaatttaatctcggttttttggggttttatgggggcaggcaaaaagcaacccatttatactttttactggggcttcacacgcaagctgacgttgctgtaccttttttattgagtaaaatagttttgtccaggggaattttcaactaaaaaaattccaaaatcaaaccctaatatttgacactggccctaatacaaccatcaaaggttaaaagttccctgttgggaaaccaacctagtacactaacatgaaacatttttttttttggtgggaagggaggtatcaatggccgggggaaccacataaaa

SEQ ID NO: 19688 - DNA, 337 bp, Glycine max
  unsure (1)..(337): unsure at all n locations
  Clone ID: PAT_MRT3847_117783C.1
ttattaanaaaggattgttttagtgaaaatgtgtgtgtagggntaagagaaagatatgatggttagnagntaaaggaattgatgggttttggaaaatatgaagttgggggggaggataanaatggaaaaaaaggatntttntttagaatttnaggtgatgagagnangaanatgagtgttgaaaattggtttgttgtagaaaggatatgtgaggaganagtggttgtggataagaaatagaatgtgatgaattttgttggatgtgttgggggtgaaaagtggagtgatgttggagaangtggttgaatgggggatgttggagtatgggtggggggtt

SEQ ID NO: 19689 - DNA, 618 bp, Glycine max
  Clone ID: PAT_MRT3847_117784C.1
cccacgcgtcctaattttccctagaaatagaacattttcggcacttaatggcattgcaatagtctgagtaaatgttttccgataacgtattagtaactatcttttgataaaaaaaaaaaaaacaataaactgaccaaaatttaacaactacaaagacaaggaaaaacaaagaaatatacccaaattaataagatatgaaaaacatactaattatcacaagctggcaaaaaaaacaaaaaggcaccaaccggggggggccttttaaaaggttccacgttacctaacgcggattggcacgcgcaaagtttttttttggtgaaccgcaattaaaatgcatgggcccccttttaaaaacctttacactggaaaaccccggcctttccccattttaatcgcttggaagcaaatccccttttccccggtggggtttttaccaaaaaggccctaactaatggcctttccaaagggttcccaaccctgattggaaaggggcaccccccctgatacggcccttaaagcccgggttttttgttgtttccccccaccgtgcccgtttcttttgcaggcccctttagcgccggttcctttttcttttttccccccctttccctttttttc

SEQ ID NO: 19690 - DNA, 824 bp, Glycine max
  unsure (1)..(824): unsure at all n locations
  Clone ID: PAT_MRT3847_117785C.1
ttgcattgcctgcagattattgatggactgaagcattgtttctttgatacagaatgactctgtcgactgtagttgacataaagtttgtgtttggtttcagtaactcttttgttgtgtactctatttgtatttggtgatttaacaggtggtaaggactagaccactgaccctgccgcctgattgtgttttcaatattccagtccgatacaacatgggataactgggatagaaaagtggtgtggcgtttttgtttgtatcaatccccctatgcttgtgtggggtatattacattttaaacttttgtttctagtggtataacaatcctgcattgcttattctattttaaatcattgatgttgaagagtcttctgttcctcttttatgatagtgagatgtgtactttactgtacgtacgtatgcccatttccctgcacttgtatatgtctgatggttctgtttacaggaagaatatgatacacatgatccaaaaggtccttcatctatggtgttgcaatttctgagaaaaagatcaaagattattgagattgtagcagcacgcgatattgtttttgctcttgcacaatcaggtgtttgtgcggcatttagccgaggtagtattagtatctgctaattgtatgcttttttaattccatttgtgactaaaatggacatattgtatatgtgacgtcactgatgtgtttcaactgtttgatgcagagaacaatcaacggatatgctttttgaacgtcagtgctgatgaagttataagaagtctgttttataacaaaaataacgactcacttatcacagnttctgtatatgct

SEQ ID NO: 19691 - DNA, 225 bp, Glycine max
  Clone ID: PAT_MRT3847_117786C.1
caggctaccaactaacctcttatcaagtcttgtccattactgactagtgtgttctccaagttggtctgtcttgctttcatgaatcaaaattcagaagctctgttctgtcacttatctgtacaaaagccatggcacgactatgtgggattgactgatactatggatgtgagatgtagtgatgttctagtatcaaaagatcaagaaaacttgttaggaaaggcatcc

SEQ ID NO: 19692 - DNA, 197 bp, Glycine max
  Clone ID: PAT_MRT3847_117787C.1
cgcgaacattagtaatcagattgttatttacgatgtttttccttcccttacctttttctgaccgacatgtattacaagcacttcagatcttaaaaagtaacaaattggttacaacggtttttgcagaataggagcttgtaacgtaagccatcgaattgattgacttgcaatggatgactatttcatttaattttaca

SEQ ID NO: 19693 - DNA, 621 bp, Glycine max
  Clone ID: PAT_MRT3847_117788C.1
ccacgcgtccgaagaggttgcaaagagcaagaaacaccctctcttcttttttgcatttccacttctttcactacaccatccaagttccaacatcaactaaactccttctatgttctaactctctctcaccctccatattcctcaacttcaaattctttcttttctataccattttctctcaccaaagtcagctttacctgattcctttgtttagtttgatttattgtgatttcattggttcctttcttactttaaggaacaagtgtggctataatataactctggtgtacataatcacatagatgaggtggtgtggagttggtttattttcatttgttctccttttttctaacttcataaatggtgataatgattcaaatgtaagtagcttagggaaataaaagtttgtggaaactgggtattcagcactatttttaaaaaataaaactttagtctaatttttggaatctgcattggtttccataaggatttagtgggaagcatgaagaacttatactggttcaaagagatttctaacaacgtgagatcaaggagaatgctttcactatgggaattcaagagagcagtgtcatgggcaaagtatttgggctcttctggggc

SEQ ID NO: 19694 - DNA, 353 bp, Glycine max
  Clone ID: PAT_MRT3847_117789C.1
acaaacaatgtaaaagggaattttatttggaatatcaatgcccaacaaaaaaaggatcttgttacttcaacagggtagacaataaaacacagtggcgagacttgtttactcctgaatctgaacaggctaaaaacccctctggatagaagccttaacagcatccaataccagctgggttttcctagaaatgggtggccacttattgtcaggcttaaagtttttgaatttgatttttgcgaccaaccgggcaaattttttaattaaaagagcctcctgagggagatcaggggatactggatgcttacttggctggctatcccaccctgggacaagatcattaaagccggattttg

SEQ ID NO: 19695 - DNA, 848 bp, Glycine max
  Clone ID: PAT_MRT3847_11778C.1
cttccttctacatcaccttattcctctttcctcttcattctcttcccaaataaaactataatcagtcttcagtgatcgtcaacacttaagacccaagtgtaaatgaagaaagtggtggtgaagttgaatttgcacgatgacaaagcaaagcaaaaggccatgaagtcggtttctagcctagcaggcatcgattctatctccatggacatgaaggagaagaaactgactgtcgtgggtgaaatagaccctgtcgatgtggtgagcaaattgagaaaaacttggcacccagaaattgtaactgttgggccggcaaaagagccagagaagaagcaagaagacaagaaagacgagggcaaaaaagatgacaagaagaaagatgatgataagaagaaagatccaaatcaacaaattgaggagcttgtcaagctctacaaagcatataacccccacatgaccacatactattatgttcagagtgcggaagagaacccaaatgcttgtgctatttgttgactctgatgtttgagaacaataacaagtcatgttaattattggtgaatttcatggcaccagagacatatatgaacccaagtcatgaatgctttctgtgtaaattatattttgggtggttgattgagacatctagaggattaattaatggtgtatcaaaataggctatgaaggttttgaatgcataataagtaaattcatgtgtgaattgtggaaatatgcacattattgtgctatgtgttgccaatatttctcatttaaaattgtgtcatacttgtcaattgggactttatgtaatgtattcatgagagaaattggactctactttatgtataaaa

SEQ ID NO: 19696 - DNA, 160 bp, Glycine max
  Clone ID: PAT_MRT3847_117790C.1
tcggcggccgccctttttttttttttttttttttaatttaaccccagaccaccttgcccctgccatccattgccactacaagtgaacttgagaaatgattgtattgggtccctaacagcagtgggatgaggacaaacctgaacctttggaataaactgcc

SEQ ID NO: 19697 - DNA, 458 bp, Glycine max
  Clone ID: PAT_MRT3847_117791C.1
tatggcgaacagacgttatacacgaatgatctcaatccactatggaagttggggtttgtgaatattcaacatgcggaaagcagggacaggccttgggtagaagagcgctataacttcaatagcagtggaaaacatgatttagtgggaaaagtgcctagatctttggcagagatggagaacattcatattaatggccagggagaaaatttattattgacttctggtgatggacagaaccatgattacaaggggctgatgagcccactatttgaggataaattgactgataacagccaatacactgtctcggattacttggcagggggatttgaattgaacttcatggagggccggcgactttacagcttcgaatggaaatacaagccttccagataacttgcactatatgggaccttcaggacggccagatgcataccacagggcactcgtggagggtg

SEQ ID NO: 19698 - DNA, 1289 bp, Glycine max
  Clone ID: PAT_MRT3847_117792C.1
ccctgaacaaacccacctcaattgcttttgcaattatttttccttttacctctctaatggcactgtccaaagaccaaagaattccacatgattcaagcttgagcagcaaggttcaaaactgtgttttcagtgagactagtgtggagattacctccatgactgttcatagggtcaatgagtaccacaaatctgtgttagaagaggaagatggctcacaaactactaatggtctcagcaatgattcagctgtaacacgttctcctcctttatgtggcagtcgcaaagattatgcttataagggcacaaactatcagcttgaagaagcagtatctctgattgatttcaaagggtatagcaatatcctgcaagctagtggatctttgcttagctttcagcagaacaagatggtccctctcaactgttacttgaaagataatggtcagaaagagtattgtgtttgggagaataatttgcatcaaggccacaaccattggaatcaaactagtccaagaagcactagagacatgcgcctggtagagaatctcaattgctttcaaacttctagtggctatagccccatagttaataatgcaaaagagaagcaacatggtcaaagttcatctgggtggctctactcagcaccaactatccctaatgatattagtagcctccacaagttaggagcacaagaatcagttttgcaaaagcgcccttcgatgggagagaacatgaaagctgccaagaagcagtgctcaactgagagcaaaacgccaaaacataagtcaagcccatccaaggatcctcaaagtgtggctgccaagaaccgaagagagaggataagcgagcggttaaagatactacaagaactggtgcctaatggctccaaggttgatttggttactatgctggagaaagcaattagttatgtaaagtttcttcaactgcaagtgaaggtgttggcaactgatgaattttggcctgtccaaggtggaaaacctcctgaaatttctcaagtaaaggaagtcatcgatgtcattctttcttcacaaagagagagaagttcatgctcaaagattcaagaagacatcaatcacgcgaatttgtctcaataccaaagaaattatgctgctgctattgctggcaagaacaaaagcgataaaatcataaactgtaatttgacttttctccaaattgacaatagcagaatgagttgttacccaagaagtagccatgatggtccatgcaacagcttgaaggttagagtaggatacttcttagctcgcttttga

SEQ ID NO: 19699 - DNA, 382 bp, Glycine max
  Clone ID: PAT_MRT3847_117793C.1
gctaggaattcggctcgagcggcaaacctggccgccgacgccttttgaacaacaacgttcttggccacgactactttgaccttcccgaatgggttgatgatcaagttggtgtgcgcaaactcctacatatgactggacggaaacgcatggcccatgtggttgttgcaaaggatggcagtggaaatttcaccaccatcaatgaagcattgaatgcacgtgcccaagaaaaacctatggccattggttatctacgtcatggtaggagtttactacgtgttcgtcgaagtttccaaaaatatgacccatgttgttatgattggttatggtagtaagaaggcaatggatcaccgcgtcaataacttggtcgatggggttgggacct

SEQ ID NO: 19700 - DNA, 302 bp, Glycine max
  unsure (1)..(302): unsure at all n locations
  Clone ID: PAT_MRT3847_117794C.1
aactaatattgatattcatagggctttctcaatgatctcttacacaggatgggacaaataaaacacgacctcgtccaacagaaacgcttcattcacatcccttaaaagcatcgctggatatcccaccattaagaccaacaaacacatcaccttcattgctagcaacggcggaagaatgcaatgcatgcacgtctggccacaatttggcaagaagaaataagagaatatttactacctgccagaccttgaggatgcacacntggcaaatgaagtataataccttcttacgaagggatggattc

SEQ ID NO: 19701 - DNA, 959 bp, Glycine max
  Clone ID: PAT_MRT3847_117795C.1
aaatcttcgatcccggccaatcaaaaaaagcttcatcatcatcttcttcttctctgcatcatcacaatggctgaagtacgttcacaacaacaacaaccccagcatgtgcaagtccacgcaaccacaacacacaccccacaacaccatggcggggaaggtggcagcggcattctgaacctcatcccggagatgtccctcacgggttcccaactcctagctctcctcgccggcgttccccttggtgcaatgctgctcctcctctccggcatctcgctcatcgccagcctcttggggctggcggtggcgacgccgctcttcatcttcttcagcccgctgctggtccccgccgccttcgccataggaatggcggtgaccgcggtgctggcggcgggggcgtgcgggctggcggggctcgtgttgttctcgtgggtggtgaactatctccggcagatgccacgggggacgacgatgatgacggtgctgccggagcaggcgaagcggcacgtggcggacatggcagagtacgtggggcagaagacgaaggatgttgggcaagacattcagacaagggcacatcatgcccagggaacaaccgggatggtatagtgcattcagttatcatcagacaagaaaatggtttcaatttatatcgcttatgtatgacttgtgagataaacgtactagtatctatgtgttttgaattatggagagtttcattttgtgttccatgcacggttttaaaattgcatgcggttagctaaaacaaatctttgtgattgctaaaatgtgactgatgcaatcatgggattgccattgcggttgcagatctcagtttaaaaccatgttttcatgttgtgtcatcacttcctctggatctgctcatttacatgagttgttgaatattccatcatgtgtaatcagtaataatattaataatgcatgcatttttctttcggttt

SEQ ID NO: 19702 - DNA, 276 bp, Glycine max
  Clone ID: PAT_MRT3847_117796C.1
gggttttttttatttatttttttttctttttttattttttttttttttgtttttttgggcaacaatatcccttttttttatttataaaaaaataattttatccctaacatccccatttttcccccccaacaaaaatttaatgaactcctttaaaaccgattttttaccaaaaaaccacgttgccccttgtatttaattaattcattgcctgattcttggggtttgaaaaatttttataaactagaggtatgagataatggatcgcgcattggggtg

SEQ ID NO: 19703 - DNA, 307 bp, Glycine max
  unsure (1)..(307): unsure at all n locations
  Clone ID: PAT_MRT3847_117797C.1
nantacgatganccgtacgcnaagcgcggatnggnaaagagnanaannnncngannaanntnnaccantngnngcnannaatacnnnnnangaanagcaagcnnncnannaanaancnngtgacccacaggaaggactagaccngcnnatnccaggatacaagangtcgcggagnntgnnanngtngaaccgancctaannananattgncgcncnattantaaaangcaganncagtngtnctgtaacaagataacgggtnagacacgtccttccacacnacatacgaaangcacaannanannan

SEQ ID NO: 19704 - DNA, 479 bp, Glycine max
  Clone ID: PAT_MRT3847_117798C.1
ctcggaattcggctcgagcatggctcacactgtctcactcacagccacggccatggagctctatcagccactgtccatcgagagtctcggaccccgggcgtacatggactcctctgctaacacgtcaccgggcccatgagcttactctgccgactgcttcaacgaggccttcacagagcacctatactcctccgacgaacgcggcgccctctagtactctctcattatgcttatgatcgacctgcacttacttgtgcccatgcaccgtggctacacctccatgctccgatatcgtcctagatgcgggctcctcaccttcttcctcggataaagctaccgcactgggtgacacgcgtataacatgagcggagaagcatggaaggaaagtggcatggatgccactggggctttaatgggtctgacactcaagggtatctccagtacggcaattacaactatggtacgctgaaagaggatgg

SEQ ID NO: 19705 - DNA, 408 bp, Glycine max
  Clone ID: PAT_MRT3847_117799C.1
gaattaaatgaaggttgttttaggaatgattgcattaaataggacaaaattagttagatttgcttatatttaagtctaaggtacaatacctcttttttgtttatatgagtccagagggagtacatgacataccatattcacattctctacctattgatattatataggccttgtacttatttaatgtctactatgagagacatacatatagtattatcatgttaaaatttgacatgagagttagaggacatattcctgtgtcataacacattaaatttggcctttttggttcttgttgggagggtaaaaggtcattccttggaaatttaactttgcaatttcacattttttatattggttaccaaagccttaacataatttttgggaggatctctatataaggtggtt

SEQ ID NO: 19706 - DNA, 373 bp, Glycine max
  Clone ID: PAT_MRT3847_11779C.1
cacgcctacgtaagctgggtattcggctcgagtctgaagttcattagcaccagaaatgctaggcaaggcgagacttatcaattaggatacagcactcccatgagttcagaaccggcgtgttcccacctgcatgaacctacaactactgggcaaactcctacacactagttcgagtagagatggcactgatggtgattacatagcacataaaattccaagactgtgccaaacgcactctctatgggcaaacagtactgactacgactagacaaggggcttggaagttctggagagccagcttacccaggaggacctttctacaacccacttggctttggtaaggatgagaagtccttgaaggaattaaagctca

SEQ ID NO: 19707 - DNA, 525 bp, Glycine max
  Clone ID: PAT_MRT3847_1177C.1
tatgtttgagcttttctcgacaaaaaattgcgaaggcctgtcgtagcggctgttgacctaattttggagaaccaaatgaattttgttaaaaaacgaagaaaacgaacccacgatgaaactgatggaaaccacgctgacaagaccttattcttcagtgatccgaattcgcaaaatgacgaatcaactgatgaagttttcttgaatgaaattgatctggaaaacccatctatccatgattttttcgttgcattggccgcacatttggataatctccttcaaaaccggaacgagaaaatcagtttccaagctgcgcaaattttcgacttggtttcttgcttttcaaagctttttacaagggtacgacgaccgctttttcaatggcttttaaaaaagaatgtgtcaattgaggaagtgttcatcatttccttcttcatcgaaaacctagcagatgagcacaagtcttttacagagcttgtggaacgtgtggtggcagagagatataagcgtcagtctctttcacagaca

SEQ ID NO: 19708 - DNA, 398 bp, Glycine max
  Clone ID: PAT_MRT3847_117800C.1
ggctcgagagcttccaattgctgttatacaatttgtttaacccttcctctaccaaatttgctcaaaaatcccgcttgggtcttgaaccgttgtaaaaatatggtaccttattgagtggagatattataactgagaacatggtcgaaagctctttggtttctccttcaccaccgaatcctacggagggtgaggggaaacgcaagcccttgcgatctccacttgctgctttatggctgggaagtaacgagaggacgcataagctgactatcttggcttgaggaaaattatctatctggtccaattctgcgcgaaaggtgcaattttataacaggaaggtgtttgtgcagcatgaggagacaataagcagttattaggtcaactttgatatcaagcaatcc

SEQ ID NO: 19709 - DNA, 416 bp, Glycine max
  Clone ID: PAT_MRT3847_117801C.1
ctcgagccgattcggctcgagtacggctgcgagaagacaacagaaggggtattattttcaaaggccctacgggcggttgaacatgactacatggggggtgcatacgagaggacacatatgcatgcttagggggaaacaagagaggctatctattactctgagtgaatgggcgataaaacacacttatggtggatattgggtccagtgaaatgggttagttcctaataacacgatacattattaattaaataatggtggagagaagagtacaaattttttgtattctacccaatcttgtacaacattacttctgatagaagatacccccggtgtaaatattataaaaaaaacactttggtgccgtccaactaatatattatctggtactaactgccgagcagaaaaaagaaaaacaa

SEQ ID NO: 19710 - DNA, 258 bp, Glycine max
  Clone ID: PAT_MRT3847_117802C.1
ccggtaccttccttcaaccacaaaacctctctccctctaccacccattctcttctctctctctctctctcccttcctccatctctcaccttctcaatctcatcaccaccaccatcatcatcattatcttctcctatctctataacctcgatatccctcaaaacctcaccctcataccaaatgatatgaccctcttgtgagaacattttttcccccttaagaataggtcaaaggctgcaactttttctgaaccaatctc

SEQ ID NO: 19711 - DNA, 202 bp, Glycine max
  unsure (1)..(202): unsure at all n locations
  Clone ID: PAT_MRT3847_117803C.1
ggaacagagaggagaggacaanacacacaatcacanggttgagttgagttgaaccgtgagaaaagaanaaattaatngncattgntannaanggcaaggctttnnngggtttcngggtcggttcaacnangaattccnaaatttcaaccttnanatcctnattctctnagtanaccgttcaggagnatngnaagttcccggg

SEQ ID NO: 19712 - DNA, 663 bp, Glycine max
  Clone ID: PAT_MRT3847_117804C.1
atagaagtagtgggaggaacaatttggttcctctagcatctatttttctgatcaactgcaatttgacaaacaagaaaacattagcaagaagccaccatataaacagtttgaaatggttttaagtttaacttacaattaagaacaaagaaagtcatagacagaatgagtttaataacagggtaaacatacagaatgtttgatgaaaacaggataatcatcatccaggtcaaactccagctctggttgccaaactacaatatctgcatggtttccaactgcaatggtcccctttgattctaaccccgccagtgttgcaggtttcttgctccacaataaagacaattgttccagagtaagtccatatttcttcccatatgaccacgtcactggaagattaaactgcaaagatgatatgcccccccaagcttttaagaagtcaccctcctccataagcttgagttcaggcacagttggtgaatgatcagtacttaataggtcaatgtgtccctctaatacagcctcccataatttgtctttgttgtatgcatcacgaatgggtggggaacacttaaaacgagtatccccatttggtatctctttagacgtgaaagctaagtaatgaggacaagtcttaacacttatgctggcaccatgactttttgc

SEQ ID NO: 19713 - DNA, 380 bp, Glycine max
  Clone ID: PAT_MRT3847_117805C.1
cttcgtcctttttttttttttttttttttttttttttttttttttttttctttttatgtttgggtttttttattgtgtcacccaaattcaaccccttgtccgtaaattacaacaaactagactgggacaacccaaaaaaaaaccaaaataagggcccggaaaaaaagcaggcaataacagccggcgaaaaaacaaaaaggcccaaaacgatcgccccccccaacagaagaacagccagaaaggggaatggcaccccccctgtagcagcacaaaaaccgccgctgaagcgggggccacacccagagggacccccaaaaaaagcaacgccccaaagggcggaaccaaaaaaaactccccttacataaaagaaacgggggggg

SEQ ID NO: 19714 - DNA, 3091 bp, Glycine max
  Clone ID: PAT_MRT3847_117806C.1
gttgccctgtctatggcaactgttgttgatatgcataacttatttattttggtttattttattaatatcctttgtattatagattttcataaagaaaaattggctgttcgtgaatcccatattaacaatgcttggtatttagcgtccggttgatatgatatacagtacctttttcttgaggaagatatgatataccatagaagttaaaatcattgtgagtaaccccttagtagctttgctgtttaatcttccagagacgtggacttatgggtagaaatatgcacttactttcagtgtcatctaacagagaggagaagagagtgccttgtaataatcatagcataaattcataaagaagagagagcgttgtagtgtgagtgggagatgtattagcggttgtggagggtgttgttttagctaaaaaaccatgtctccttttgagtgttctactacttgcacgagagcagaatagtgagagtgggagatggatcagtttttgtggagggtgttgcctttgcttacaatccttgtttcctttggagtgttcttctacttgcaggattcttacacagcacagttatttcctctcataaagttaccgcgggataagtgcagccttcttccccatcgccacttctggatatccagcaaacgtattgtgaccccacaagggatcatttctggttcagtggagataaatgatgggaaaataatatctgtcgttgagggacatgctattcaggggaagcctaagcaagaagaagtaattgattatggagatgctgttatcatgcctggcttgattgatgtgcacgtacatcttaatgagcctggaagaactgagtgggaaggatttgatactggtaccagagctgctgctgctggtggtgtaaccacagtggttgacatgcctctaaactgttaccctacaactgtgtctaaggaaaaactgaaacttaagcttgatgctgcagaggataaaatctatgttgatgttggattttggggaggcctaatccctgaaaatgcacttaatacaagtattcttgatggtctcttaagtgctggtgttcttggtgtgaagtcttttatgtgtccttcaggaatagatgacttccccatggctactattgaccatatcaaggcaggattgtctgtgttggcaaaatatagaaggcctatagttgtgcatgctgagattcaacaagattttgaaaatcatttggagcttaatgaggataaccttgatccacgtgcttacttgacctatctcaataccaggccaccttcatgggaggaggcagccattaaacaacttgtaagtgttacgaaggacacaagaaaaggtggccctttagaaggagcacatgttcacatcgtccacttgtctgattcaagtgcttccttagatctgattaaggaagcaaaaagtcatggtgacagcataagtgttgagacttgtcctcattacttagctttcacgtctgaagagataccaaatggggatactcgttttaagtgttccccacccattcgtgatgcatacaacaaagacaaattatgggaggctgtattagagggacacattgacctattaagtactgatcattcaccaactgtgcctgaactcaagcttatggaggagggtgacttcttaaaagcttgggggggcatatcatctttgcagtttaatcttccagtgacgtggtcatatgggaagaaatatggacttactctggaacaattgtctttattgtggagcaagaaacctgcaacactggcggggttagaatcaaaggggaccattgcagttggaaaccatgcagatattgtagtttggcaaccagagctggagtttgacctggatgatgattatcctgttttcatcaaacattctgagctctctgcttacatgggaagaaggttatccggaaaagttttggagacttttgtcagaggaaaccttgtgtttaaggatgggaagcatgctcctgcaccctgtggtgttcaaattttagccaaatgagttagttaaatattgacaggtttctttcagatgctagtttcgttgggacctaaataagagatggaagtagctgctggcgtcgaccattgacctagcattctccttctcatagactagtgcattaccatatgtattattgtcgtttgaatgttaggacaatgacataataatgttcttttcttgaatgtgtatgtaggttacaattgtacaaattctaaagttcctctcttcgcatatcatttcatgaaaagaatatgcatgtttcctaactaagaaacatcatgttgacataatcctgatcaatttgtaagggaatataaagagaagaaaaaaaagacgaaacctctcgtcccctgttattaaactcattctgtctatgactttctttgttcttaattgtaagttaaacttaaaaccatttcaaactgtttatatggtggcttcttgctaatgttttcttgtttgtcaaattgcagttgatcagaaaaatagatgctagaggaaccaaattgttcctcccactacttctattcagtaattgatcctgctagtgcacttaaatttttatcaagtaattgccttgtatgctgtcggtactgaacagatgcatgcatggacgatctacaatccatcaccatctgttcttacaacaagtcttttgcaatgttttgattccattccatctattggcaaagaaattaaaggttaaaatgattatgtttccactaacaaaattgtttctccattgccatcacgcttcctcccaaactcctctgttttagcctcttcataattcatagctatattatataaataaaattgagcagcaattataataatatatgaaattattacacaatgattttctactcacctcaagaattattatactaaaataatttagcatttcatttaattaaaaaccaaagtttgttggtacaggtgattcgacatttgattcttttaccaaggtctggggttcgacccccttcttggatatggactgataactggaggtataactttacctcacaaatggaccgaccgattacacctactagttat

SEQ ID NO: 19715 - DNA, 1245 bp, Glycine max
  Clone ID: PAT_MRT3847_117807C.1
aaaactattaaattttaattattttctattaaaggattgatttaattcggataattcattatctgctatctaagctagcaaatctgaagttgatatgatatacagtacctttttcttgaggaagatatgatataccataaaagttaaaatcatgtgaccccttagtttttgttgtcatctaacagagaagatagtgtcttaagctgacatctgtactcttctgcagtaaccataccataggcataaataatcgaactatcaaagaaaagagagcagaatagtgagagtgagagatggatcagtttttgtggagggtgttgcctttgcttacaatccttgtttcctttggagtgttcttctacttgcaggattcttacacagcacagttatttcctctcataaagttaccgcgggataagtgcagccttcttccccatcgccacttctggatatccagcaaacgtattgtgaccccacaagggatcatttctggttcaggttttgcttttttaaaccttgattattattattattattattattgagtagtgctatctagtaggaatgttgctaacacgaattgttacgaattcaaaaacagacaatcaaattaattgtattaacatccaggtagagagcggataataactatctgcaataaattttagaatccttacattttgtgcagcttggtatgataactgttcgtactaaactactaattatcatcatccttttgttttactcttttcattttgttccgtgaggttgtaaaggttttggtgtaaagtaaggtcttggaagttaggagttaggactcacttgagtggcactagcatcaattcattagtgaagaacatattttcttttgaccatttgttgtttcaattgtacatgtaaaactttcaccaggctatcctatgtacacatgttaattgtttttaacagtggagataaatgatgggaaaataatatctgtcattgagggacatgctaagcaggggaagtctaagcaagaaaaaataattgattatggagatgctgttgtcatgcctggcttgattgatgtgcacgtacatcttgatgagccaggaagaactgcatgggaaggatttgatactggtaccagagctgcttctgctggtggtgtaacaacagtggttgacatgcctctaatcaatcaccctacgactgtgtctaaggaaacactgaaacctaagcttgagctgcagagataaaatctat

SEQ ID NO: 19716 - DNA, 260 bp, Glycine max
  unsure (1)..(260): unsure at all n locations
  Clone ID: PAT_MRT3847_117808C.1
cccatgcgtcctatcggttgaggtgctgacatgataaaaggaatcaaanataaaaaaataaaaaaaaaaaaaaaaaaaaaaaaaaaaaaaaaaaaaaaaaaaaaaaaaaaaaaaaaaaaaaaaaaaaaagggaaaagggtttaaagtataaaagattaaatcttattgactccgacatgaaaattcttatatattgtaaacagaaatccaaaatacatgccagtggctttacaatttaaaaaattggaaaaagccaaaac

SEQ ID NO: 19717 - DNA, 1414 bp, Glycine max
  unsure (1)..(1414): unsure at all n locations
  Clone ID: PAT_MRT3847_117809C.1
tagtggggagggcattggtgcggagaaaggtttggagcagtgggaaaggaagcgtagtaagttggatgtatacgatttcgatgaatacgatggcatggatgtcgggcagattacccgggtccatccccgcggtccggggggaggaaggtttatgggatcagtgcatgctgctacaagtggcattgatagggatttcagaacagggtcaagtggacgtgttcttgataagagaaagaactcctatgctgacaggcctagttgcttctatccggaagattatgtgtgtaacagtaggttcaagatgaacaatgatggagctcaggtacctccaccctcgcagagggagaagtttaattcagacgagtccattagggttcaggggaagaatggtgttttgaaggtaatggttaataagaagaaggtgggtggtacatcagaacagtattatgatcatcacaaacccttggaaagcaggcaaaggttgaagaccgaagaaactgccaagaggttgaagaccgaagagactgccaagaggttgaagactgaggggactgccaagaggaatattccaattcttaaaaaaaatgaaaagaaacctgttgataaaccagcattacttaagaggccagagaagaaaaggacagcatcaagaaaatcgttgtcaagcaaggacagtaagggtgatgagggggattcagataacagtgacacatcattgaatccaagaataagaaatactgaagctcgtaagtctgtgaaaaaaataatctctgaggatgagcagactcctgtgcgcgaaaaaaccccaaccacaagaacgaaagaaggaaaaatcaagcgtggtagtggtacagaaaaacagaaactgcgggaacaaataagggagatgctgctgaattcaggttggacgatagactatcgacctcgaaggaacagagactacctggatgcagtttacattaatccagcaggtacagcctattggtctatcatcaaggcctatgatgctcttcaaaagcaatcaaatgatgatgctgatgaggtcaagcccaaaggggatagttcttcttttgctcctattgcagatgaggttctcagtcagctaacaaggaaaactaggaagaaaatggagaaagaattgaaaaagaagaaaaaatgcatgatagtgaaagtgataatgaaaaagagcctcaaataagatctgccagcaacaagcgtgatttgaatagcacagatggtgataacaatgaggagaaattaagctcctttataaagcaggggaagtaagtcaatgaaaaataaaatggtttgaagatnaccattatgagtgcttcctctaaaatccagaatgctaccaatcactcaggtgatgggaatagaaaaatcattatttgaaatgtgatcctcagataca

SEQ ID NO: 19718 - DNA, 1129 bp, Glycine max
  Clone ID: PAT_MRT3847_11780C.1
cttcaaggatagaaaattaagaaaagcaaattgtcgggtcaacagaaggaagacaatgcggaggatgatggtgttggcatatccaagcctatgaaatcttgtggaatggaagcggaattgggggatgctcctgctgaagttccggaaaagaaagccaaagaaaaatatatagcgcctcacttgagagctcgtgcaggcaatgaacctgaagagcatactcaaattcgaagacgtgtgcgtggccttcttaatagactttctgaatctaatgttgagtcaattactggggaattgtccttgatctttcagtctgttgctcgtagtgttgctacacagatcttgactgaggaagttttggcatcatgttctagtggtcctcgtggaaatcaacagtatgctgctgtttttgctgcatttgttgctgggatggcatgtttggtcggtgttgacttcagtgcaaagtttatggcttcctttgcaaaatgctttgaggatgagtacaataaagaagacaatctctccttgcggaatcttactcttctcttatcctatttatgcatatttggagtctgttctagtgatttaatatatgactttctggtcatgctgagcaagcgtttaactgaggcagatgtatctatcattttggcattgttacaatgttgtgggatgaaaataagggctgatgatccagctgccatgaaagatttcattcttagtgttcagaatacatcaaataagttgaaggcttcctctgaagatgacaatgaaaagaaaaatagtaaaagaatggagttcatgcttgaaatcatatgtgacatcaagaataacaaaaggaagccaaatgaggactctgcacatcacactcggattaagaagtggttacggaagttaagagttgatgacattttgattagagggcttaaatggagcaaattacttgatcctgacaagaagggccaatggtggttgtctggggatgtggcttcttcaacaggtaatggtgaagaagttgccaacagaatagacaaggatgttcttgagacccaaagaatgcttcagcttgccgctgctcaaaagatgaacacagatgctataagggcaatcttttgtataataatgagggggg

SEQ ID NO: 19719 - DNA, 695 bp, Glycine max
  unsure (1)..(695): unsure at all n locations
  Clone ID: PAT_MRT3847_117810C.1
ccacgcgtccgctctggttacaatcaccattttgtagccaagccagcaatagtcgccgactctgtggaaaaagaaaaaatctggaaggaacaaacagatagaaagacgcaccacaacaacgagaaaacagaatgtgaacacatgacatatcgaatgaaataaggttgacttgacgcgcttgtgaagctgctaaacgctaattctttcacaatcctcatcttcaactcaattctcctatttgcacccctcaaacctgctttcaagcatcatactcacacaaccaccatggcccttcctcaatctacgctacaaaatttgggtgtggacttgtgcaagcatcctttgtgacaagctctggtctacttaataaagtttggagtgttatctcttctcgtgataaaggcatagtttcgtactcaggaaataatggactgttctggaaagtttctgaggattcgggtttgacggttgtggcgtttgaggtaacccgggttttgatcttcatctgattntgtttcttcttcttatctcaagaagaataatttcaaccacttgtgagtgttctctgtaccaagaaaaatccagatttctctgttaacaagtctgcagttgatcttttctctgaaaatcttcagaggcttgatgagntgaagtccaagattgatagctcccctcgattgattgntacaggatat

SEQ ID NO: 19720 - DNA, 418 bp, Glycine max
  Clone ID: PAT_MRT3847_117811C.1
cggttattagggaatggtttaaaagtttaatttaacaatttaaggatgaattaaaaattccccggggatctgtaattaatttttaaggagccaggggccatgttttccgtccataaatggatggccgggaggggggaggcttccagggtaaactcctatgtaggtaaattttggattaattttttgggggggacccatttgccaaacaggccaaagaggaaatggggctcaccatggttttttccctgtggggttttatggttaaactaagaattttttttaagccatgaattttgtcccctggcaaattccgggcttggggtaattttggttggctgaatcatttttattaatttaaccatgtggagtgttacctggggcttaaggattgcaatttgaaattggccatattcttatt

SEQ ID NO: 19721 - DNA, 364 bp, Glycine max
  Clone ID: PAT_MRT3847_117812C.1
ccacgcgtccgtacggctgcgagaagacgacagaagggggatatacttttaaaataaccccaaactcaggagtacttgaggttaactgttatgatcctctcaaaatagaagtcccatcaagtggctcctcaaagggtaaagatgagaatgacaatagatctagtttcccaacagagtctgactgccaggctgcaattgtccattctcaaggacaaactgaagatccaatgcagaaagcaaggggactagattttggtaggaatgaaagcagtaagatagattcttcccctgtaaaattaaggagcagggagcacaaaaaaaaaaaaaaaaaaaaaaaaaaaaaagcggcctcttagaggaacca

SEQ ID NO: 19722 - DNA, 280 bp, Glycine max
  Clone ID: PAT_MRT3847_117813C.1
ggtagatccatatgggaataagtttttagatgctaaacttagtgatgatgatagcaacacaatttggaaacttgatttggaaaggactggattatcttctgcagaatttggattgcaattccatgtgatagatagaggagatataataattgcaaagtttaccaatgatgggatgccgagttcaagttcgtatgaagagattagaggcccaatgtacttctggaaaagggggagtttctggtgttcaggctgaaatgcagagcagtgttactccttttga

SEQ ID NO: 19723 - DNA, 373 bp, Glycine max
  Clone ID: PAT_MRT3847_117814C.1
tttttatgttaatgttaccatgctaactaattttcataacaagcataaactatcacaggtctagacctgtcatacacaaaagatgatacaaatattttccatctcaaatatatgttcttactataaatcattatactgagaaacattgcaacctacgggaggatgtggatagagacggagtgactcaataatgcagcgtgtcaagaacttaagaattttaatatcctcataggtaagttcccttccctggtaaactctgtccaactcctcctgtgcctttgccaatgaagaaaaatccttgcctaaaagataaagtgtccaagtcagcactgaaccggtggtctcaagaccaacaactaataatgacaaaaga

SEQ ID NO: 19724 - DNA, 433 bp, Glycine max
  Clone ID: PAT_MRT3847_117815C.1
gccacattcagcaaggcaccttttttgctgggacggggagaaaactttcccaaataggtggtctgtaaaattgctctgttgcaaatcggatactgggactgggcaatgttatcctgagtgggcgcaaatttattgaggagttcatcgccaacgaatgcacataacggcaggaaattatcgttagaaagaacagatgtcaccattgaatatgactgcatgtacacaaacgaaggactggggctcattgtttgttaccaaagttgggaactacatgccacgaggtgtattccaggtcttggcagcaaaggacgactgggatattcttcaatgataccatatgttgagccagatgtgcatgctcaaagtgctgaagtttactttgactgcttacctggggaggttgatagtgaagagggagttgctcacattggtg

SEQ ID NO: 19725 - DNA, 210 bp, Glycine max
  unsure (1)..(210): unsure at all n locations
  Clone ID: PAT_MRT3847_117816C.1
gnanaaaaaaacagnaaaaaagcanntaaatngccntagagnnaataattgaaacacaacaaatggaccanagtctnanagttttaacgggggnattgtgtcaaaagaaaantccnngaagttgcgcagatttgtttctccnngccanaannttngaattacaagtcagttacgtaaccngttccttatgaacattaaantccagtnacc

SEQ ID NO: 19726 - DNA, 193 bp, Glycine max
  Clone ID: PAT_MRT3847_117817C.1
tttcaggggcacgggatgggtaggagacagagaatatgatggtgtcaaaagaacgttcagagaagcagttgagaagaattttggcaaaagcaaagagacggttgaggaaagtgctgaaacagcagctaaactagttgaagaagcaattcataagactacagaaaaggtgaaggagagttctgactctgcatga

SEQ ID NO: 19727 - DNA, 206 bp, Glycine max
  Clone ID: PAT_MRT3847_117818C.1
ataagagcgtctctactataatctatctacttttattacacctactctgatagatcactggtatcatttatcttctcgatactgtcaatgctgtggttctacctctcataggtacattattcacatctcaattacgcaactacatcattcaataccattccacgtaacacacactgtttcatacaatacaccaaatcatactgaac

SEQ ID NO: 19728 - DNA, 401 bp, Glycine max
  Clone ID: PAT_MRT3847_117819C.1
agatgatatggtggtggttgacaaatttaggagagtcacagcatgctcacaaggtacagaacgcctcttcggccacggcataagtttggtggtctaagagaaccttgtttgcttcttccacctttcttcagattcactctttttggttactttaattttatcatattgcagaataaactggttagtttttcggtttattaggatattgatttttattaattcgtgagaatgaaacgtgtcaaagattatatacttgcctttattcatcactctgatggatggatattgtattgctatagttggtctggagactgctcagaaaatgcttgtaatctgtgatttggtattttaagatttgtataagaataccttgttttggtaaaagaaaaaaactcaggggc

SEQ ID NO: 19729 - DNA, 265 bp, Glycine max
  Clone ID: PAT_MRT3847_11781C.1
agagagagagagagagagagagagagagagagagtgagtcttatttactgttttccttattctctttttctgcctgtctctttctctacatgctcctatatttttgctttcgttcatttatttttcttctttattttgtttgagaactatgttttgcttaactgagacatgatttatggtagctgctacattgtattattttctgtcttactagaattgttagttataatcctttttcatgggattataatcctttttcaaggga

SEQ ID NO: 19730 - DNA, 281 bp, Glycine max
  Clone ID: PAT_MRT3847_117820C.1
ttttctcgtgggatagtggtaccacacataactcacggagcatgcatagcccatcttctcgctttactgaccgagctcttactaaagacttgttttaaacagcattttttttaccattattatgtcagcaacggttggtgcccctaggattacaactctattgaagatgcagcggcaggatgatacttattcttagacgtggacgattggagtgatagcatgagaactttcgagcttaccgtacaaaattgaaaaatcggggcaggctttaagcgattaac

SEQ ID NO: 19731 - DNA, 434 bp, Glycine max
  Clone ID: PAT_MRT3847_117821C.1
ccatcccaaaagggggatgggggcccccatttcttatttaaaagcaaatcgcccccccccaaaaagcgaagggaaccccggggttaaaaaccaaagttttccccccccaaaattttaaaccgcccagggaaaacccccagggggaaaaaaaacgtaatctttaaccccaaaagccccctgccaaaaaggggcattaaaagagacccaaaccaaccccccccaggaaggttcccccttgaaaatcccccaccaatttcgatttcaaaggcaaacaatctttggggggtgggggggaacacaaacctccatgaaaggggggtaacaaggcccccaaaagtcaagccccctttgtcgcccaaaaatttttctttaaaggaaacccggcggccctcccagggctaaaggacctttcaaaaaagccccttaagccccaa

SEQ ID NO: 19732 - DNA, 350 bp, Glycine max
  Clone ID: PAT_MRT3847_117822C.1
gtgtgtggatagcattgagaaagcatgaagttgcaaacgcgagctagtgtaatcttcttaagacacatacaccaacacagtactcttgatgcttgaaaggactctatcagcacacatttagatcagatctggattccatccacagcaggtcataacacatccggaggctagcttacactgtgtgggaggatgtgggaaaacatgaatcggacaccttataatcctagcctatctcttatgaacgtcgtatatgctatgattagacaacgaaccgctttcatgattaaccttctgccatgaacaattagaagacatcccactggcatgatcgaactatggtgtgaacctgc

SEQ ID NO: 19733 - DNA, 234 bp, Glycine max
  unsure (1)..(234): unsure at all n locations
  Clone ID: PAT_MRT3847_117823C.1
aaaaaangacagacacggcgcnnaggggagnggaggaangaaggccnacacggcatgcagcgcggcannnaaagcgancgatccaagcagagcggggcaggggataaagggnagactgcaaaanggaggcanngaaagcatgcgangggganggaaccgcagacncagagnccgaagcggcccaggcaaagccaaccncggcgcccncagcaggagncacacccgngccaccac

SEQ ID NO: 19734 - DNA, 133 bp, Glycine max
  unsure (1)..(133): unsure at all n locations
  Clone ID: PAT_MRT3847_117824C.1
cnagaaataaaaccgatannccgaaaacattgagttctctctgcaaattcaacacnttgcantntcnttcntagnttnagtntcattgagtactgtgtggcgaagtttgtntcttggnttttgtggncntggg

SEQ ID NO: 19735 - DNA, 622 bp, Glycine max
  unsure (1)..(622): unsure at all n locations
  Clone ID: PAT_MRT3847_117825C.1
gcttatcagcattttgtcctttcttgtaagtgtatatgcatataaataccctagatcgattactgtttcactcaaaatgcattttgcttacatctagctagcaagcaagaacagaaaaccgaagtagtgggaagcaagaacagtaaccaaaaacagaaaaccaaagtgcaggtcatttcaatattcatagtttttctcgagaagttagggggtttttaggtcacacagagaaaaaaaaaatgatagggtgggaagaagtatacaaagtagtggtagcagtggtaccactctattttgctctactattagggtatggttcactgaagtggtggaacatcttcactagggagcaatgtgaagcaataaacaagctagtttgttacttcactttgccactctttatttttgagttcactgctcacatagaccctttcaagatgaactattcgttcatagcagcagacaccatatcaaagttcatcatcatggtcgtgcttgcactttgggccaagtgcactcccaaagggacctttagctggtccataacgagcttctcattgtgcaatctcaccaacgctcttgntgntggngttccaatggtgaagcccatgtatggagccct

SEQ ID NO: 19736 - DNA, 165 bp, Glycine max
  unsure (1)..(165): unsure at all n locations
  Clone ID: PAT_MRT3847_117826C.1
tcttagtgttgtaatgtaattattattatgaacataagtgacaacaccacgattgttggattctgtgtgtttgttgcacacaatatatgagagagatnnnnntgaanntgtngtnattaaggttaatggtggtgttgtgaaatggggattgggagttgatggtaa

SEQ ID NO: 19737 - DNA, 526 bp, Glycine max
  unsure (1)..(526): unsure at all n locations
  Clone ID: PAT_MRT3847_117827C.1
agatttcgtgttggatatggagcggggagcggcaatcaaccncgatgagaatcaagtatctagaggctgtattgaaccaggacattcaattcttcgacaccgaggttcggacatccgacatagtttttgtcatcaacaccgatgctatcatggtccaggatgccattagtgagaagttggggaatttcattcactacatggccacctttgtttctggctttgttgtgggtttcactgctgtgtggcaattggctttggtgactcttgctgttgtccctatgatagctgtgattggaggcattcacactgtcaccttggctaagctctctggcaagagccaggaagctctttctcaagctggcaacattgtggaacaggggagacttcagagtatattaaagttaagaaactttgttaattgcaacttcagagtatattaaagtcattcgttaaattgcatagcaacttcttacttctaacatttctatatatgaaaaaaaaataacatatatttaccgcttaccat

SEQ ID NO: 19738 - DNA, 439 bp, Glycine max
  Clone ID: PAT_MRT3847_117828C.1
gtggtttcgtaaagtgagaaacggatgtcaaacttccactagagaagcttgagcacttttgatgttttggcttcattgtatggagtgagttctggcaaatcattttgagtctacacaagagcccgggaggtttcaaggattcatcaggactaatgggattgctttggtatatctaaatggcagtcaagtacattcttgcgatgtgaattttttatgtgtttctagttcaaatgaatattctggggaagacactgaagtatctaaacctgagcattttcagtatgcgcccttggtagaatggacaaggacatgctttgttggcccaaacttccaggaatctgaaagaattgaggggtgtttcctttgtggttgtaacaaggaaaagtaaaaaccatcgatcaggaatgtaaaaaaaaaagtaattgatgaattttacatg

SEQ ID NO: 19739 - DNA, 735 bp, Glycine max
  unsure (1)..(735): unsure at all n locations
  Clone ID: PAT_MRT3847_117829C.1
ctcattaaacttgttttaatggtctcaaaattctgtgacagatttttggtcaagttgtttccattaaaaagtactgattttgaaaactaataacttaaaactgccacacacaaaaaaaatggtccacaacattctttccttctgaaggttttacgatgcattgttatcattaaccagtcttttactattaaacttaaatggccaattgagacaaacagttctgagaccgttcttccaccactgattaagactggggtggcaggtgttaggggtaatattcatttagccttctgagctttctgggcagacttggtgactttgccagctccagcagccttcttgtccacagctttgatgacacccacagcaactgtctgcctcatgtcacgaacagcaaagcgaccaagtggagggtagtcagagaagctctcaacacacatgggcttgccagggaccatatcaacaatggcagcatcgccagacttcaggaacttggggccatcttccagcttcttaccagaacgacgatcgatcttttctttaagctcagcaaacttgcatgctatgtgggctgtgtgacaatccagaacaggagcgtagccagcactgatttggcacttcttgagatgggtggttcctgtctctgacactgctgccgncttcgtaaagtgggaaaatcgacgtccccctcaagcctgatcacagcttggctatagcccgagccacttggtcttt

SEQ ID NO: 19740 - DNA, 379 bp, Glycine max
  Clone ID: PAT_MRT3847_11782C.1
agaataaactcggaaagaccaacattgagattgagagaaaaattcaaaaactggtagaatggccaacctgttcacctgaggtggacacgttcgggcacttcccgctcaacaatattccagacgttgcgagaacagctactgttgcagtgggctctaaccaatcggctgagaaaacacaaggctggggtacgagtggtcttatgcaccctccgccctgagacgacaggctttttcccccttggcccgagggagctctcagcgatagaggtcaatggcattaatgccaaaaaaacggacccggaccctctttgggggtgggcgcaggcccaccagcctcggagttttgggataatgggttggactacgagggggaggagag

SEQ ID NO: 19741 - DNA, 1057 bp, Glycine max
  unsure (1)..(1057): unsure at all n locations
  Clone ID: PAT_MRT3847_117830C.1
aaacaaacacgcccctttattactaatataattagattaatacaccacaaaaatttctccttgcgttaaatacaggaagtaggctaagcttttcacaagtatgttcggatctataatagctgaaagcattttgataatatttgttttttaaatttagaaagctatattcacaataatgtccgcaatttagtcagcacaatcgccatgggcacacaagtatgacagtcgtactgtaaaacccgttacaccacgaccataaaatggcaacctaccaatttagcgtcacccttagggttaacaacattgattactaaccttcgtcttccttacattgaagaagaaggatattgatgaacttcgcattaagactgcagaaaaacactattacattaattaaccttgttgccctcaatacatcctgccagtacaatccacagaaccacaatagcaatacttcttttttatattgccatcagaatcacgaacttgatctatttcataattgtaatcataagtcagctcttgcaagggaggaatgttatcagcagcaaagaacattatgtgaggcatcctggtgtcatggtgatcataaaggacattctgagcaataagattaggggagcagctatggttgatgaatctccccaaattaccaaactgagcagcgtcaatggtgaaaccaccatccttcacaacttcacaagaagctgtgtgtgcatcaggcatgagagtcgtgagagtctaaagatcatcccaaagagtactgttgcctcgagcctcgacnctatagttatttccaatatcaaaaagatactcatcattaccggttctttgttcagcttccttgtcctcaagaagctcccctatatattcacagataaaacttcctgaagggattgaattcagggatctcacaccccatccccttgtatcggttttaaatatttcaagttggaactttatgccaagttggctgactctattatgacatgttgaaggacatttacaagtaggtccacactcatagaccagaggttttgcttgtacaatagcccca

SEQ ID NO: 19742 - DNA, 502 bp, Glycine max
  Clone ID: PAT_MRT3847_117831C.1
agagaactagtctcggagtttttactcttttttttcattgagtttttggtccatggaagtgtaacttaaattaaatctgttcgttgtcatttagctgtgagtttatctaactttccttttatgtctttgtttctttctttacctcaagatctttttgtggggtaaattatccagatagatcaatatcttaattactggtaatcttcttgaggcttgtgagttatattttgttggtgggagtgcactaattacaccaatgacacgaaacttatggttattcttaccatcccagggggtgggatagaagagtaattgtatagggtttatcgtacacatgtacattatagttcctattgtttggtgttttatgctttcaaacttccagggttgcttattaaaataagcaagaacaaagtactttactgacatatttccactagtctaaacttcattgctgatagtttcttgaacacaatgcagcttgtttttgcagttttcactg

SEQ ID NO: 19743 - DNA, 698 bp, Glycine max
  Clone ID: PAT_MRT3847_117832C.1
cagggattattgaactatagactacattggtcatagagattttgacaccatgtcatgaacatactattccacaaacttaagtggttatttaaagactcatgattggttttatattaccatctctaacataacatgtcccacacacaagagctctttgttcctgaagcatggacaatacatgagaacacttgtgctgaaattcaacattttgttgaagaatgagggttagaaggattaaactttagatcttatggtcataggccatgagtacgatgttgtgaacatactattgaaataacttaagttgttaggtgaatgacacgaatgattttatattacatctctaacttgtgatataggcttttgtaccaccagcaaggaatagagcttagctttgtgggttgtggcaccatagtccaaagtaaaccaccaacatcccttttctacaatatcaagacagactgaagtttattccattttgagttttagcctgcctaatgattattatacaaaaattccataaaaagaaaagattattaggcaaattggttgattcaggcagatcgtgttcctgtctgtgaaatggtttggtttgtgtgctggttacatatgcaacttactggatttgcttattcattccaaggcctgcataataattttgctttgcttgggagagacttcttcattctttttgctat

SEQ ID NO: 19744 - DNA, 657 bp, Glycine max
  unsure (1)..(657): unsure at all n locations
  Clone ID: PAT_MRT3847_117833C.1
gtcattatccctaccattcctttgttacagactatgttgctgttttggacttccttgtaaataccagtagagatgtggatgtacttgttcgaaagggagtactcgttaactggctaggggatagcgattctgtggctgacatgtttaatggtctttggaaaaatgttacacatataaatttcagttcccattactctgaactctgccaaaagttgaatgctttttgtagaaacccttgccataaattgaagtccactcttaggcgagattattgtaagactccttggcaaattgctgtttccattgctggaattgttctccttgttctctctttggttcaatcagtttgttctgtcttgcaagtaatacaacaatagagtatatgcctcccctcagcccgaaaggccaggtgctgtaacatattaatttactccttcccaaaattactcatcacgacgggatgatgatgggtatgcatgaagtcccctccttccttattcctcctttgtttttttttttttttttttcaattttatgttcgctagctcttctttattgcacaattattaggaactcaactgtccttttttgtttttgtttggtttgctttgttgtagccaattattatcactgnctttgttttatatattatatatt

SEQ ID NO: 19745 - DNA, 485 bp, Glycine max
  unsure (1)..(485): unsure at all n locations
  Clone ID: PAT_MRT3847_117834C.1
cgagtcggtgaacgacgcgcacagctaaaccacaccacaccacacacaccaacaacatttgtctctctctctctttctctcgctgtcgcttccgccaccgtctccgccgcgaatgccaccgtctccggccactgctctccagcatcttcactctccagaagtcaatcagatgttgcaaggatcatgagtcctaccttgggtgatcagatagaggataagctgattgtttctgactcaatgagagctacaaataagaaaataaatggaacacccatcaagatgctcatagaccaagaaatgtccaaagaagttgtttccaagcacaacccaccaccaaatgtagttgcaaaattaatggggcttgaagccctcccacagggtgagctatctgtggagaagagccatagaggagattattctcaacatatgtgtggtcattcagggacaccnnatcaccactggaacctggaagataggtttatgga

SEQ ID NO: 19746 - DNA, 908 bp, Glycine max
  Clone ID: PAT_MRT3847_117835C.1
ctttcagaaaaaaataaaaacagtacaaactacaaaacaacgttagttaagctcgatattcaccccgaaaataaaactttcaggaagaatcttcctttatgggataaaccgaattaaaaaagaaaaggagcatggattggtttattaatgaataatgaattaattaagcagatgaagaggaagatgattctgcgtaatccaaaaagtgatatatattatgagccgtagttccaaagaaagcctttgaagtccgacaaacagagtcggtgaacgacgcgcacagctaaaccacaccacaccacacacaccaacaacatttctctctctctctctttctctcgctgtcgcttccgccaccgtctccgccgcgaatgccaccgtctccggccactgctctccagctgttgaaatgaatggagtgcagaacagaagggttcacaatgttgagaaaccttttccaggatgcctgggaagagtggtgaatctctttgatttgaccgggggtgtaaatggaaacaagctactcacagacaggcctcatcgcgatgcatcttcactctccagaagtcaatcagatgttgcaaggatcatgagtcctaccttgggtgatcagatagaggataagctgattgtttctgactcaatgagagctacaaataagaaaataaatggaacacccatcaagatgctcatagaccaagaaatgtccaaagaagttgtttccaagcacaacccaccaccaaatgtagttgcaaaattaatggagcttgaagccctaccacagggtgagctatctgtggagagaagccatagaggagattattctcaacatatgtgtggtcattcagggacatcattcaaccactggaacctggaagataggtctatggacaaggaaatgcttcatg

SEQ ID NO: 19747 - DNA, 649 bp, Glycine max
  Clone ID: PAT_MRT3847_117836C.1
atatattacggctgcggccgagaaacgttcggggtttagcacagaaacgaacaccgtgattcctctcgccgtagatctgttccatttcgccgttcatccatggccgacgacttcgaattcgccgacaaagtccctccttccttcgatcgcgcgggttcaaaagggttcaacccagctttaattgttctcctgcttgttggtgggttgctgttgacattcctcattggaaactatgtactctacacatatgcacagaagaccctccctcctagaaaaaagaagccagtctcaaagaagaagatgaaaaaggagagactgaagcagggcgtctctgcacctggagagtagaactttttcctcactttatattctgtgatgttaaattttttcttagagagtacaatttaacatcacagaatataaagtgaggaaaaattgtactctctaagaaaaaatttatcgttctgtggtctcttgagttatgttaatgtttatctttgtcctgtgttttactgactgaaatcttgaccacataaattaagtactgcgtttaaaaaaaagaaacaggaattaaccctgcaaggagaactggaccagctgtaaacttcaacaacgactaaagcctgagacgaccaatggatttacgggg

SEQ ID NO: 19748 - DNA, 403 bp, Glycine max
  Clone ID: PAT_MRT3847_117837C.1
ggctcgaggtaactgcgagacctatacgcatctatggggcgggaacctgcgaggtgttataggccaattaagaacaagccataccccaagtcacggttctgccggggcgttactgatcccaagatcaagattgatgatgttggcatgaagaagaagggcgttggtgagctttctttctgcgtgcatctggatagtggggagaaggaaaatgtttggcgcgaggccctggacgccgccgaggatgctggccgcacctacatggtcgacgtccgtggataggatgctctccacttgagagtcaaggtgcactcactccatgtccctacgatcaacatgacgcttacatgagcagcagctgcgtggacgctaactgtgacaggacgagcctgagcagcaccgcgga

SEQ ID NO: 19749 - DNA, 216 bp, Glycine max
  Clone ID: PAT_MRT3847_117838C.1
tagctcttctgctttaacaacgtggcatacctgcatgggcacgcgatcaactgcctgttatcataccctctgctacgatcaaacatcgactgccgacgctgctatcagattcaccaccctcaattgactctatatcaaccgctctcatgccattccaccaaatgctttatgcacttacaatggtgtcaagctacattcacctctctcttcgatcac

SEQ ID NO: 19750 - DNA, 445 bp, Glycine max
  Clone ID: PAT_MRT3847_117839C.1
gactacagagagatatgcttcatctgaacatggttcattcgttgaatgcttcattatgttaaaaattgtcaaaggaatggatgcaattattacatatgttacttttactttatgttttaattcataatttagaaggagaaactgtcggttgtaatgataatgtaatttcattgctatttttacttactctttctgattaatgtacttctgcctttaacgaagatatgtcatgttctggttgttacaccttgtttcatttcttcctctaatacgctgtagttttgggtttaagatattgtttgaagtagatatgtaacactgaaatctactgctaacgtagacttctgtatttctgcttgtgtttattcaaatgccttcgccatcatccaaaatggaaatgtatgttagtgtgatgtcagtgattatggttgcatgtagtatatat

SEQ ID NO: 19751 - DNA, 413 bp, Glycine max
  Clone ID: PAT_MRT3847_11783C.1
gccatatttagtctcttctatgtgtgcttcaaattctgtgcggaaagttgaggacttggagatgttggtttctcaatcgaagcatcttaaagtatctttggaagaaagaggaacgcttgaattagttttgaagaattgcagaatatgggagtatgaagcatgttctgtactagatgatgctcggtgcttattggataattctttgcctgaaataaacagtggtttaacttgtaaagtggaagatttgattgaaagaatccaatctgctatagcatccggtgtatcacttggttttgacttcaatgagatttcaaaactccaagcatcttgttctacactgcaatggtgcaaaagagccttgtctttctgcaactgctctccttctttagaggacgttttggaggttgcagaag

SEQ ID NO: 19752 - DNA, 622 bp, Glycine max
  unsure (1)..(622): unsure at all n locations
  Clone ID: PAT_MRT3847_117840C.1
ccaattcgtccaatgggagcaaaaattttggggagcatcaagtgtacgatgagactatcatttgggagcactctaacaaactaacacatgagtatacttgtgctaattaagtctagaatcttttagggtttagggttagagtgatgatacaaactgtcccctttgtaatgaaggggaagaaacaatttctcaccttttgtttgtttgcagggtggcagcttccatttggtatctgagcgcgcattggtgcgctatccaatcgttgattcatcctatggtggaggacttcttctggcagttctcaaattaggtgcaagggaaagaagctaagttgatgtggtcaaatgtttggccggagacaatatggaaaatttgggagcagcgaaatgatgtggtgtttcaatggtggccagttctgcaggatgaagatattggagttggttaacgtgaggtgatggcactggaatagggggggcgggaaattaaaaggttttcattactcactatatgattaatatgatattccaatgtgcgatcgctgatgaatcagatgctgtgaaaaggctctgcattntatctgaattcattatgctacgacgatttttagataatatacaggcac

SEQ ID NO: 19753 - DNA, 396 bp, Glycine max
  Clone ID: PAT_MRT3847_117841C.1
caccctcaattaactaaagtgaatcagttaatattgaagccgcttgagcatgtgttataggttcaacatgttctaccaactctaaaatgtgttacgagatgtaatataagaagcattcacgtgtctttgcctaacaacttcaacttttaggatagttggttcgtagcattagtatcaaaacttcgattaccaagtggtctagagtttgatcattgttgtttatattcttctaataaaaaattgaatttcagtacaaggtaaaatagacctaagaatcattcgtacttcaaatgcaagggctcttgttaaaactgtaatataaaaatcatacacgtatcttcacctaacaacttaagtttttggaaaaattggtttgtcacaaaatataccaaaaag

SEQ ID NO: 19754 - DNA, 576 bp, Glycine max
  Clone ID: PAT_MRT3847_117842C.1
ccgaatgacataacattccattcatattgctcgaaaggtactgtgaaagcagttttgcacctatcagattcttgtatttggatttgccgaaatccggatttcatgtcaaacttggaaaatatttttgcggaatttagtctgttgagtaaatcttttttgtttggaataggatacctaatccactgtaaggcttggtttagtggtttataatttataactaaacaaggcgtacctcgttcgagctccgattgtttattgacatagaaagcagcgcaagaccatgaactttttctctttctaattaagcctttgtcaagtaaatctttaattttcttttggcaatattgaagaagttcttcattcatttgaatagatctagctttgtgggaatttgttattccctaaaatctttctcataagggagatcgacaatatgttttttgcggttccaaaatgcatgttgaaatcgaaacaaatggttaattggacgtgttgatcacgggttgaatttttattttaattgggcttttccaatataactgatattttaaaagagacttctttttataaattatt

SEQ ID NO: 19755 - DNA, 106 bp, Glycine max
  unsure (1)..(106): unsure at all n locations
  Clone ID: PAT_MRT3847_117843C.1
cgctcacagngaaactgccgccgtttatgtgttggatgtgacacacctatacacanaaaaccgccgttcacaagatgcacacggggcgaggcccatgcgattgtcg

SEQ ID NO: 19756 - DNA, 173 bp, Glycine max
  Clone ID: PAT_MRT3847_117844C.1
gtaaaagttagagagaactacttatagacctttaacagacctacattggaacaaagaacaaagctttcacttaaaagttctgccaaaacacgccttagtacccccaaaattacgctcgttcttgctcaatttttctgcctaagtgaagtttaagctaattaactcgagtttac

SEQ ID NO: 19757 - DNA, 770 bp, Glycine max
  unsure (1)..(770): unsure at all n locations
  Clone ID: PAT_MRT3847_117845C.1
tctaattacagtagccgatcacaacaattagatggccctcaaaaagctggttctaataaggagtggaaaccaaagccaacaaatacgattaatcagggttctggaccagctagtgcatctgaggttcttgtttcagttgactcaactgggcagttacaatctgcatctagtgctcttaactctgaagaagctacttcaaaactgcagaggaagctggaggattttcatcttccacagcgtcaacatgttatacttccaaaccatatcattgtgcctgattctgaaaagaacaagtttagctttggaagtttgggagttgctttgggagttaatacaagctatgtaagtggcccagagagcgaaaagagttctacacctgtttctgaaacatctcagactgttgaagaaactgtggaggagcaggattcaagtcaaaatgctgcggttatttctgaggttggagattatcctgaccatccacaatcacccactaatggagctgagaatttgtcatccagtgaggttgatggctcatccagtgctattcaagagtataacgagtccaagcaagacactgctttgccatctggaggtcatcagtactcaggggtacttacttctccaaactacagttntggattcgtgcccncagtgttgggtactcagctaacacagtttgacaattctgagtctaaacacgtgatgcttcccgcttccaattttattgttcatcaacaattggatcccgctagttactatgcccagtttta

SEQ ID NO: 19758 - DNA, 731 bp, Glycine max
  Clone ID: PAT_MRT3847_117846C.1
gttcaaggaaggtttcccgtcatcactgtatgacgtcctccattctttggggggggggggggggattaaacaggggatgcaataacagaggaaataagggtaaaacaggtaatagatactagtatgtaaaaaccgaaaccaattggttaaagagatggagttgtggggggggggggggggggtgataaataggtggaaggagataatagcaaacagagctggttattagattgggcatgagcagaagaatggggtttttggggcctacactcctagtatctgtgggtgaataaattagttggttattacggtggataaatacaatattggtataaatataggtgtgaggaactagagacactgaatggggggagaacagagttagcagccagaaaaatttaaaagggtgatatttaaaattgtaaatgtgaagttacacctgctgctaggcgtataattaacccatggcgcatacgcgctggtttagtacattaaatgagccacttatgtggtatatgacaattgttaccacaaactggaatactttgaagtgcaatttgaataacaaacggtaatggtgcgtttatttgttgcaaaggtacacgcgtgcctggtatgcgcattattcggttatctcctcctggaagccgcattggcgatatgcaaagacccgttttaataggccgtatacgtttgaagaaaagcgcgacttaggtgtggtgggttagaga

SEQ ID NO: 19759 - DNA, 715 bp, Glycine max
  Clone ID: PAT_MRT3847_117847C.1
cacgcgtccgctcttctccgcttgtccctctatccatcactggaagcagcgatacgctgccatggctaaaaaacgcagcgcatcagacgccaccgatgatgcacaaaacgacaccgtatcgctgcttccctcccaacgcaagaagcccaagcactctgctcctaaccccgacgcctgcttcgtcggaaagcccattccttctgccgaggcccgcgccaaatggccccaccgatacccctccgaggtgaaaaagaaagctccagctagaagctcagaagaggttacgagtgaaaacagtgaggttatgctggctaggtgtcattatcgtcaagctaaagtagatggagttgtttataacctctatgatgatgcttatgttaaggccgaagacggtaaaccagattatattgcacgaatcgttgagatgtttgagactgttgataaggaacaatgttttatggctcagtggttctacagggccgaagacactgtgataaaaaatcacggtgatcttgttgacaagaagcgggtttttatatctgatgtgaaggatgtaaatccccttgactgtattgtttcaaaagtcaaaattttcaaaaaaaacccaagtgtagatttggcttcaaagaaggcaaaattgcctttttgtgattactattatgacatgaagtacactgtgccatatctaacattttccaacctagtcaatgaaaca

SEQ ID NO: 19760 - DNA, 177 bp, Glycine max
  Clone ID: PAT_MRT3847_117848C.1
gttggaggaagccccaattctgtgatgatcgatctagaagagctgataacgtggtagaggaacctgatcaaaggaggaagtggacgatgtacacgttgaaaaaaatgagaagagctataaatttcttttggtccctagagattgatcagatacgagagttggaaacgaacactgaac

SEQ ID NO: 19761 - DNA, 268 bp, Glycine max
  Clone ID: PAT_MRT3847_117849C.1
aacagtttgtattgcaggcaaagctgtgttactccgaaacctatacttcatgagcaggtagcatctttccaaaaagcaatatggtcatcatatgattcatctacagagtgtgtggagtttccaacgttgaaattggagagaacggtcatacgatgtatcaatttgttggaactagatactgtcactgtcatcaaattctaagcacattttggctgttgcaaatccagtgaagttggtcagatttatcatacagtggacaatgccatta

SEQ ID NO: 19762 - DNA, 322 bp, Glycine max
  unsure (1)..(322): unsure at all n locations
  Clone ID: PAT_MRT3847_11784C.1
caagaagtatcatgatcccattgttcaagagagaattaaactgtggaatgatggattaaaggttgatgaanaagagtggcttgatgttctggtctcgttgaaagattccaacaataacccatcattgacattggaggagatcaatgcacaaattatagtaatatattttactcctctcttagtatgtttttcgtacttatattaacacttgcactcaaacacaaaccatattcatgaggatttttttcttctaataatcatatatgcatttattttttcttccaaaaaataaataaatagtaagaaaataatatttaatatt

SEQ ID NO: 19763 - DNA, 343 bp, Glycine max
  Clone ID: PAT_MRT3847_117850C.1
ccaaacccccttttgacatgctttaaccatttatttgagctggtttctcgcctaataaacaataaaatgaatttccacctatcatttgagttggaatatcggttaatccctgctaaaataaaatccaatcgatctttcacgccgtaaccacgtttaaaaccaaaaggggcaaaataataattaaataatcgaaggatttttgaataaaataattaaaaaatcaattggacgtttttctttgggattttccttaattgaattgaccaataaccaaagtgaaactaaggctaaaatcaactcacaaattaagcttttgccattaaaatcacttaaaaaccgtttt

SEQ ID NO: 19764 - DNA, 144 bp, Glycine max
  Clone ID: PAT_MRT3847_117851C.1
acgcgtccggaagttgctagagtgaagaaatggcacatgtacttggcattggatttggaggagcttcgccggcttcacagcatcgccggaagacctctaaccctatctcttctctcctccgaaattcgtaacctctaaaagtta

SEQ ID NO: 19765 - DNA, 474 bp, Glycine max
  Clone ID: PAT_MRT3847_117852C.1
ccacgcgtccgcacactctggactgggattcctcgagactataccaacagcagtgctccacaagcactggctgaagtcagaaagctggctgatgatagaaaattctctgaagctactgcagcagctgtcaagttgtctggagatccttctgaggggtgctcctcacttgaacattaatcttcaaataaattattggccatcccttgcttgcaacctacacgagtgtcaagagcccttatttgatttcatttcctctttgtcagtcattggtaaaaaaactgcaaaggtattttgttcttttccctctttctttgatattattcttggcattctatctaagaaagaaatccatcctttatgcttgtaagttatgaacaactttgtagcctgctgccaatgccagaaaatctatggcaaagcagaaagtcaaaagacaatataggctagcatattatcatttgctggccatgttat

SEQ ID NO: 19766 - DNA, 1171 bp, Glycine max
  Clone ID: PAT_MRT3847_117853C.1
cggacgcgttttcggactcgtgggaaaaaaaaaaaaggaaaaacgtaaagttgagaagggccactcgcttggtagaatttcttgcattttattattttgaagtttgaagctgaaggcaccagtttgaggcagacataacacagatccgtcttgaacttctctgtgttctgaaacagcaacaatggcaaaaaccatgactatgtggtttctgttggtcactctttccttcgtttatgctgctgccactgctaatactcaaatcaaagttactaacaaccctgcggacaagttggtagttgcgattaacgaaaacagaactgctcacaaggtgtcagccttaacggacaacccggggcttgcgtgtattgctctacaatacattaaggcataccagggtgaatgtgatgctgtgggaggatctgatggcaagaaacctcctgaatctcgatttgctgaagtttttgctccaaactgtggtgttgaggcatcaactcttgctcctataacgggtcgtttcctggcgtgccagactaagtatgtccatgcccctgaggcattttctgatatcctcataaggaaccaacagagcttagacatactctacaataataatcacactcaggttggtgctgctgtcacaggtactgatgggggctctccttacttctggtgtgtgttgtttagcagtggcaaacccaacaaaacatttacttttgagagtggtgtggctaaaataacaaaacccggttgctttagtggagctaatgatgagtgcagtggtgctagtgattggtcaccactcaatgagatgtgggtatttgccacttcgcttttgattgcaatggggtttgctttaacattatgatcataaactgagataatttgtatgatctctcccctttggtttggatgcctttgcagtctttgatgtatatgaaaggcttggcctcggctattcttttccccccgcttgattttgtaatttgtcaagagattcacgtcaattgttttcccaactttcttatttacatataaaatttgtggtattggctcttggccaaaaaaaaaatttccttacccaactttatatccttttaaaacatttcccttttttcaaatggtgttaataactaaaaagagcgcaacaaaaaaaaaaggggggcccctttta

SEQ ID NO: 19767 - DNA, 129 bp, Glycine max
  Clone ID: PAT_MRT3847_117854C.1
caacaagaatagggtcttttattaaacttaaaccggtgattaaccaaattaattaaacttcaaaagaaccaattttgaattttaaaattacccaccttccttttaattattaaggctattggatggggg

SEQ ID NO: 19768 - DNA, 221 bp, Glycine max
  Clone ID: PAT_MRT3847_117855C.1
aaaacacaaccactctccccttagtagtttttaaaagggttcatccccccttacttatctccctctcaaataaaaccctaatttgtttactgataataacatcatttgacttgcagttcttgatcatttgactgactttatacaagtgttatgaacacttatatctatgtcatcatgaaaaatcctttaatctaagtttaaaatttattatgccgattcat

SEQ ID NO: 19769 - DNA, 136 bp, Glycine max
  Clone ID: PAT_MRT3847_117856C.1
aaccggtgagaaaacccacagagggagacaacacagcatgctgcgactgacaataggttttagagcgcaaaatcgattcaatacctactcacgagatatggggacatggctctgaccctagctaaggatgatcgag

SEQ ID NO: 19770 - DNA, 388 bp, Glycine max
  unsure (1)..(388): unsure at all n locations
  Clone ID: PAT_MRT3847_117857C.1
agagagaanaggaannacagannaggnnganagnaaaaaaacaangaacgngnanagtagagngnacnnagganaanaannagnagannngggagaaaaagngaggnangagcangcanagangncataaggagagnagnggngaaaaagantgatagtggannagacagngtgnagggnaaangnagnagnaggagngngngngngngnagngnnnnaaanacacngnanaganaaganngggcgngaaannaganggnanagagnaagnagtannaagaganangnnagngnaantggatnaaggtngangaagaganaaaggaaggaaaccnnagtgatangggnaaaaatngggtganatatgagtgacagannggggnagagn

SEQ ID NO: 19771 - DNA, 121 bp, Glycine max
  unsure (1)..(121): unsure at all n locations
  Clone ID: PAT_MRT3847_117858C.1
tggatagtgtcaagttctggttcccggctcatgtctacaaccgngagcatgggcatgttggattcatgatgttatgctacgatgcananctcagctatgattnccacagggataccttccg

SEQ ID NO: 19772 - DNA, 356 bp, Glycine max
  Clone ID: PAT_MRT3847_117859C.1
acgcgtacgaacgcttgcgattttacgacataagggtgtcatggcttagggtgattcatgataagctccactcaaccacaacagctgttctcgttaatactatcacttgcagatgtcttgctacctgtctgactgaatatgctaaagctggtgcaaacacagctatttatctgaaagctttagaacgaaccacaacttgagctactccgatacaaacactacggagatcttgttcacgctagtctcacccattaccgatacattcaagagtgctgcaatggatgttcccactccgaactgttgatggtaatgtgaaaaataatgaacctggcaaccattgactagcagaagatgtt

SEQ ID NO: 19773 - DNA, 743 bp, Glycine max
  unsure (1)..(743): unsure at all n locations
  Clone ID: PAT_MRT3847_11785C.1
cacgcgtccgacaattcattgctgcttccgcggtgaagacacacgcaatagcttcactggttttctttttcaagctcttagtagaaaaggcaccattgatgcattcaaagatggtaaagatctcaagaaaggcgaatccatagcgccagagctgatccaagccattcaagggtctcgccttttcttcattgtggtgttttcaaacaactatgctttctcaactatccgaaaaaagctacaatatgcagagattgaagatcttgaaaagataacaaatatactgggtcacaaattttcaagtcttccaaatgatgatctggttgggatggaatcttgtgttaaagaattagcaaagcttttacgtttggggtccgttaatgacattcaagttgtggggatgagtgggataggtggaataggaaaaacaactcttggtcatggtttttatgtagaaatctctcattaatatgattttggttgtttcattgatgatgtaagcaaaattgatcagaattctagtgtatcaggtttacaaaaacaattaccttgtcaatctcagaatgaanaaagtttagagatttaccatctatttaagggaacatgtttgttattgactaggctatgctagcaagggaattgatagttcttgataatgttgatcaagttggactcctaaagatgtttccaaggagtagagatactttgtacgtgaatgctangtgaaggggcagaatcatcatatt

SEQ ID NO: 19774 - DNA, 258 bp, Glycine max
  unsure (1)..(258): unsure at all n locations
  Clone ID: PAT_MRT3847_117860C.1
ccagaggacgcagcccgagacgggnngaggaggggaccccaggagcaacncccggcgggggcnncagcccgcaaaggccggagcgcgggganncacccgccggacccccaccgccggaggagaaccaccaaacaagcccagaaaacccgcgncacgggccacgccaagagaggccgccgagaagacccgaaccggggcgcccgcgaaggccaccaccaacccggggcaccggcggagccccacccgaaccgaagacgg

SEQ ID NO: 19775 - DNA, 948 bp, Glycine max
  Clone ID: PAT_MRT3847_117861C.1
gcgagaagacgacagaaggggatgggcagcatgaaggtgcatcagttcacacgtggattaatctgggagcacgaacctttcctcacacttggctgcaagagattacgccctcttgctcccaagcttcccaacaccaaaactatcactacccctttcgatctcaagagcttcatcaggcccgaaagtggccccagaaaacccgtttcctctgacgacactaagaaggatccaccttcaccccaaggccagattgaaacgcacccaggagggacacggtggaatcctacgcaagaacagataggcatattggagatgttgtacaaaggagggatgcgaactccgaatgctcaacagatagagcagatcactgtccagcttggaaagtacggcaagatcgaagggaagaacgtgttctattggtttcagaatcacaaagcacgcgagagacaaaagcagaagcgcagcagccttgcatcttctcatagtcctcgaactcccacaattcacagtgttgttactttggagacaacaaggggggaagtggtagagagagatcacgaggaagatagtccgtacaagaagaagtgcaggagatgggtatttgactgcttggaagaacaaaacatgtcatcaccttgtgaacaagaggaacatagaactctggagctttttccattgcacccggaaggcagatgaaggggtttgagtttgattgaccatttatctatcatttttcgctttgctttagttccgaatcgcagctgattattgaatgaatgtggtttaattaatttgctttacttttcttttttctttgtattgggaaagaagaaagacatagttgtctctgatctgtactcttccacttaatgctattcgttcctgttggacccgaagaaaacacaaagtcgtctacaaatgtgtactgttccctctttgagaccaaat

SEQ ID NO: 19776 - DNA, 588 bp, Glycine max
  Clone ID: PAT_MRT3847_117862C.1
gcgagaagacgacagaaggggatgggcagcatgaaggtgcatcagttcacacgtggattctgctgggagcacgaacctttcctcacacttggctgcaagagattacgccctcttgctcccaagcttcccaacacccaaactaatactatccctaccaccccttctgttcctttcgatctcaagagcttcatcaggcctgaaagtggccccagaaaacccgtttcctctgacgacagtaagaaggatccaccttcaccccaaggccaggttgaaacgcatccaggaggaacacggtggaatcctactcaagaacagataggcatattggagatgttgtacaaaggagggatacgaactccaaatgctcaacagatagagcagatcactgtccagcttggaaagtacggtaagatcgaagggaaaaacgtgttctattggtttcagaaccacaaagcacgcgagagacaaaagcagaagcgcaacagccttgccttttctcatagtcctcgaactcacacaattcatagtattgttactttggagacaacaaggggggaagtagtagagagagatcacgaggaagatagt

SEQ ID NO: 19777 - DNA, 1852 bp, Glycine max
  Clone ID: PAT_MRT3847_117863C.1
attatacatcatttctaaatatcgagtgggaccaaatatctaatgttcttgaaaatttgaaggatagggacacatatcatggtgttggcttattaaacttcaatgacagtgagattgaccactggaagaagctgataccagaggcagagcatgtagtccttcacctgaactatgcttcaagtaatattacttggaatgtcctgtatccagaatggatagacgaagaagaagaatatgagttccctacctgtccaacactacctaggattcaggtaccaggaaagcctcggcttgatcttattgctgtcaagcttccctgcaacaagtcagggtgctggttgagagatgtagctcgtttgcacctgcagattgaagctgcaagactggctgcctcatccaaaggaaatcatcctgtgcatgtgcttttggtcactgattgcttcccaatccctaatctctttacttgcaaggaacttatacagcgtgaagggaatacctggctttatgaacccaacctgaatacacttagagagaagctgcagctgcccattggttcatgtgaactgacagttcctttgaaagctaaagaaaatttttattcagaaaggccacaccgagaagcttatgcaaccatcctgcactctgcacagatgtatgtttgtggagccattactgcagctcagagtattcgcatgtcgggttcaacacgagatcttgtgattcttgttgatgaaacaattagtgagtatcatagagggggcttgaaggctgctggatggaagatccatacaatccaaagaatcaggaatccaaaagcagaaccagaggcatataacgagtggaactacagcaaattccgtctctggcagctaacagattatgataaaatcattttcattgatgctgaccttcttatacttagaaacatcgatttcctttttgagatgccagaaatatctgccataggaaacaatgctacgctgttcaactcaggcgtccgggtggttgaaccatcaaattgtacatttcaacttcttatggatcacatcaacgagattgtctcctacaatggtggggaccaggggtatctgaatgaactcttcacatggtggcaccggattccaaaacacatgaacttcttgaagcacttctgggaaggtgatgaggaagagaaaaaagcaatgaaaactcgtctcttcagagctgatccaccaatcctttatgtcatccattatctgggtaataagccatggctttgcttccgagactatgactgcaactggaacgtggacatcctgcaggagtttgcaagcaatgtagctcatgcaagatggtggaaggtgcatgatgcaatgccagaaaacttgcagaagttctgtttgcttaggtccaagcagaaggctgcattagagtgggatcgtcgacaagctgaaaagggaaactacagtgatggtcactggaaaattaagataaaagacccaagattgaacacttgctttgaggatttctgtttctgggagagcatgttatggcattggggtgaaaagaattggacagataattctactgttaacaattcaccacttattgtccaaacccaatctctctcttccttatgaatttacttctctttatggttatacttccatatattactgtaagttctacatgtttgcagtctgtttctctcatattactattgtttgggaggaaaatgatggctaaagtttatttttggtccaaaagtattgtttagttcaaaggaccttataacttcaaagcatgtgcgaatcttagtacctttcatattacttatttttgttaagtgaatgatttccttaatattttgttt

SEQ ID NO: 19778 - DNA, 486 bp, Glycine max
  Clone ID: PAT_MRT3847_117864C.1
ggctcgaggttattccaaggaaaaaccaaatgatgctgatgtttttcgtttgcttggagaagtggagtacgaactccaagattatgaagggagtgttgccgcatataaaagctcagcaagggtgtccaaagatatccaattagaagttctccgcggcctttccaattcattacttgctgccaaaaagcaagaggaggctgttcaattacttttggcctatcgcgagcatctgagttcagaaaacttgagcaaaaattctgatggcaacccaacagactcacaaaagctggatccagtccaagttgaattacttctagggaaagcctactcatattggggccatgtcagtgatgctgtaactggttatgagcagctcatatgtactcacccttatgattttcgtggattcttagctaaaggaatcatgctaagagaaaacaaacataatggtgatgcacaaaggatgttcatacaagcttggttctt

SEQ ID NO: 19779 - DNA, 370 bp, Glycine max
  Clone ID: PAT_MRT3847_117865C.1
cttctagctcgcgagcggccggtcccgaactacgggtcgaggttggaagccaaaaccctaacagcccggcgaaaatgggagaccttgaaggtgatgtggccgtagccgatgcaaaggggggtggccggccccccaagaagagaaccttccaaaagtttatcttcagggggggggatttggacgcgcccctggacattttcactggcgaacttgtgaagatggtcagtgctcgcgcacccagaatgtttcagagaggtgtgaccaaaaagcccatgggctctattaaaaaactccgcaaagcgaaaagggaaacccccgggggtgagaagacagaaccatctctcacccctcttccgcgccatgattatcc

SEQ ID NO: 19780 - DNA, 447 bp, Glycine max
  Clone ID: PAT_MRT3847_117867C.1
ggaaacacacatgacattcctctttgtaaataatacctacgtctcatcatacaagtcccaacgtgtataccattgtaatgtgtaagaaccaccgtttggcaaagacttaaacatattgtggaccattggactaacttatactggggagacaatggatgcctagactctaaagagttgccttttgcctttgatgacctgcctagagcgaaccctagcatggtgaccaaggctagaatatgacgaaacctgcgtttgctttatgctaccgcgcattaatcttgacaatgttctaggctgactaaactcttacccctgctagcggaggtgaaacagccaccatactaagctctacgcttcgctgcgacctccttgaaactatgtgcgagaggatcattgctgacttctgggcctggcagttgctgcacagtggggagatggcgggaaaga

SEQ ID NO: 19781 - DNA, 312 bp, Glycine max
  Clone ID: PAT_MRT3847_117868C.1
gaatgatcacgtacgtatgtatagcttatataataggatgtttagtgcttgacatatgaaatatactttctttgggtgaaatgtctaaccatgcttaccttaactccctagttttcttttttggaagatacctgcccttaacaaattctttcaagatagccgatgatatctgtttgaaatatgaattgtagcttaacattcttgtcctgcatagagtgttgtcttgttctaacattcttgacatgagtgagaaaaaggaaatggggataatgaaatggcttgctacagggtgtggatacactctatcacatt

SEQ ID NO: 19782 - DNA, 390 bp, Glycine max
  Clone ID: PAT_MRT3847_117869C.1
tttattttttttcaatatttttttttctttttttatttgggaaaaaaccaaggattttttcaccccttgcattttcaaaatgcaactataataaggggttaacaaacttatttcagaaaaaaaaaagagacttttttttctaactacaaaattcatcggtcatcaaatattaattgggtccccgtaaaaaagacggataaaaatcaactaggacttaattacggaacttattcatgaatttttcatggaactctggcaagcgggtgacaatggccggaatcttttttttcggaggcaataatggtgcacctaaaaagccatgtgccaagaacctgtccaaaaccagaaccaggaaccacaacttctcctgttgtgttaagcaagcgtttg

SEQ ID NO: 19783 - DNA, 210 bp, Glycine max
  Clone ID: PAT_MRT3847_11786C.1
ccacgcgtccgtacggctgcgagaagacgacagaaggggagcacagaatgagggtcgtgcggtttgcctgtgagatctgttgattaagtgtagggctgcaatgtaatgcctcgctacagctacatcttttctttttcataaatagatctagatctattaactcacttcgttcgctgaacgcggataaggttatgacctatgcatgcgatc

SEQ ID NO: 19784 - DNA, 110 bp, Glycine max
  Clone ID: PAT_MRT3847_117870C.1
cgcgagccacgttatcttggccgtgccatttaagaacatggaagatgaggggattgtcatagctcgataattccatcctaaagcgacatgcgacgcacattggcctcttt

SEQ ID NO: 19785 - DNA, 262 bp, Glycine max
  Clone ID: PAT_MRT3847_117871C.1
agtgaaattaaaagaattccattgtttctttcgggggggggggggcgttttttaatttctttgaacccaccattttgattccatgcactaacaaaatggggccaaaagaaaccaaaccttttttttcttataaagctaacgctataccctttttcgaagcccgaccaaaaagggcaaactctaaatcctatttcttaaaaaaacttttggcacaacctcccccttgaacgtggagaaaatcttaccttccccaggcccaaag

SEQ ID NO: 19786 - DNA, 423 bp, Glycine max
  Clone ID: PAT_MRT3847_117872C.1
cctaatatgtgtccctaataatgcatcactcattaaactcttttctttactagaagaaagatatgtatactccaagatcagagtcagacttcttaacaaaaatgtccccttagtacctaagcatcctaattcctatccatgttgaaaatcataaacttttccttttgctagaaaaataactaaattgacccaactagtcttttgtctagtaccataatacactaaaacatgaatcatccacattatctaaaaacattactatttcaagatcagccatataagttacattataatttatatatacaaaagttagaaagattcctaaaaatactgtcattcgagattattattattattatatcattatgatttttttatatataaaagatagagaattgaatatatgaattatattaaaattta

SEQ ID NO: 19787 - DNA, 469 bp, Glycine max
  Clone ID: PAT_MRT3847_117873C.1
tttttttttttttttttttttttttttttttttttttttttttttttttaaaacccaaaggtttttttttcacattaaaaaaaaccttaatttttaggtttttacaaacccagggggggccccttggttttaaaaaatgggaaaaactagtttcccctccaatttggaaaaacccgggcttgaaaaaaaaaaacaacccttgggggccataaaatagagggggggggaattctttaacccccccaaagggggcttaaaagtccaaggaggaaaaatattggttgggatcttcgttttcgcctttggcttccagggatttggaaacttctttggctttggaaggtttggccccaaaggggaagtccaggcccggccccttacgggggtccctttggctttaaagaaggggggcccaaactcccccggcccttttagggccttccaaaggaagggggggggccccccctgg

SEQ ID NO: 19788 - DNA, 217 bp, Glycine max
  unsure (1)..(217): unsure at all n locations
  Clone ID: PAT_MRT3847_117874C.1
ccacaggaggtggtaccaaaattcctcagcctcccccaacaccactaccaacaacaaggggaattccaaccaacaacaagcatggggagaagaacanaacccatcagaggttaagggatttccagatagtgggtaactgctgagaaggacgagagccaagaagcagcaacaagtttggcaccaaagaggagttccaaacaaggaccaggcaaccacc

SEQ ID NO: 19789 - DNA, 926 bp, Glycine max
  Clone ID: PAT_MRT3847_117875C.1
ggggggggggggggtaaatgacctacttaactcagtggttagagtattgctttcatacggggggagtcattgggtcaaatccaatagtaggtaaaatatagttagaacttattagataccattcactgcggggcctcccacgcgtccgtccacgcgtttttattttttttctatctttttcttactggttcattttccattttttaggtattccgatattcggacgcatcaacttgttatgaaatcacattgatagcctctactcgggtcctagctcgtctaaaagctagatttgcctcaattggttggctcttgccttccgccttattcaaattagcttctgctatttcaagagtttgctgggcttcttggggatcaatggcactacccttttccgcatcatttactaaaacagggatctcattattggttattctagcaaaaccgcccatcagagccatcgttaaccattggtctttaagaagacgtattctcaaaatacctatatctacggctgtggcaataggcgcatgatttggtaatactccaatttgtccgctattagtagataaaatgatttccttcacttccgaatcccaaacaattcgattgggggtcagtacacaaagatttaaagtcatttcttcaaattgctctccatttctaagttcgtagctttcgcagtagcttcatcgatattacctaccaaataaaaggcttgttcaggaagaccatctaattctccagaaagaatcaatttaaaccctctaattgtttctgcgagattactcgcagccgtacccttctgtcgtcttctcgcagccgtacggacgcgtgggagaattagatggtcttcctgaacaagccatttctaagttcgtagctttcgcagtagcttcatcgatattacctaccaaataaaaggc

SEQ ID NO: 19790 - DNA, 181 bp, Glycine max
  Clone ID: PAT_MRT3847_117876C.1
ggtggcgcagcatttgggtgaaggcgtttatcaaaccattgctatggatgccaccgaaggtgttgttagaggctgtcgcgttatcaatactggctcccctattaccgttccacttgttatggctacccttggccgtatcataaatgtgattggagagcctattgattccacaggagaaatc

SEQ ID NO: 19791 - DNA, 495 bp, Glycine max
  Clone ID: PAT_MRT3847_117877C.1
gtttttaggacaccacgtaaactgcggttatggctgatggaccacagcaaccataagaagcgcagatgctagctgaacagatttacctggcgtccaggcttagcgcgcactatcactttagggatagtaaagcactcggtgctctcgccactggctgcaagcactagcctgggttgcatgctgagttcacctgatgtacagtgtcttgtgtggcatacagccgagaaggcagagagaagacattcctaaggagatttttgaatggtgtgagtatacggtggtgcatgctagacaacatgctgctacaattgatcgcactatattgtttattcaaagactggatgagaagactaaaagaggtcggttctttgatccatactatggaattgactggatgctatctccgacaaaagaggatgaaggtgagaacgctctgtggagaggagaaactgctagatgtatcaaatatttccctacacaggatgttcactgtga

SEQ ID NO: 19792 - DNA, 281 bp, Glycine max
  Clone ID: PAT_MRT3847_117878C.1
acttactggactgttgcaagccatctgcgtctaagatcttgctgggttacaaatttaggtgggcaacgtcatcggggagtgaagtgatattcacagatgcattgaggagacagctctgaatattcctctaacatgatcctaatagctatatatattgtctcacttggagcactgagaagcccacagctcttaatgctaagatggactgtgaacagaacactgagcttactatacacaactttgatgtcctgttgaatctacccttgtttgtacatgtaatt

SEQ ID NO: 19793 - DNA, 199 bp, Glycine max
  Clone ID: PAT_MRT3847_117879C.1
ggctgtgaacggtcgcgctctcgacgtcaccaccggaatatacttttacagtcccggcggcccctacgccatgttcttctgtaaatacgccttcagagccctcgcgagaatgaacaagaccgactacgacttctacccctgcctcaacggcctatccgacaaagatatcaccgttctcaactactgcgagaacaaattc

SEQ ID NO: 19794 - DNA, 429 bp, Glycine max
  Clone ID: PAT_MRT3847_11787C.1
tacggctgcgagaagacgacagaagggttccctttcccaatctttagtattctctctctgctgccgtttggcaattgtaaaatcttcacgtgtccgtacaaatcatatgggatctttatcttggtggataatattgtttacttatgactaaatatttttcaacacaattatttggatcatatggctaacactcctaagttttgtccagtcaatgaatctcaactataagttgaaggacaagcctagcttaacgccatattttttgtttacttaccttcaattttgaaagttaataattatctgcaactttaattattagcaaaagcaactttttctattcaaaaaatactaccacgtcgttttattttagtttaagtggaaactgttagctaacgagaggataataagattttatttaatttaacaaaa

SEQ ID NO: 19795 - DNA, 161 bp, Glycine max
  Clone ID: PAT_MRT3847_117880C.1
ctgacaggtgtataggggatcacaaggggggggtccgggggcaaccaacgggggaaaaaacaattcccagggatgttgtttacaagatcattgggatgattctttacatgacaactccgtgttgaatcctgccgggggtgagagacgggaaaacaaaaggg

SEQ ID NO: 19796 - DNA, 322 bp, Glycine max
  Clone ID: PAT_MRT3847_117881C.1
agttaattttgccgtattctttttttctttttttcgaagacaaacagggggggttttttcaatcaaattacgcaagtttcccaattgtccatccccttgctggctaaaggcacaaggggatagagatcattaggtcctaatcctccccctaacaattcaacaatttatttttgtcgattaaaaaaaaaattcccaatctcatgcatctagtacattagtaaccgtcgaatgaagatcaaaccaggcacattctgactgttggttttaaatctcgatttacctccgtgtaggggatttttccccctttcccccaatttgaatt

SEQ ID NO: 19797 - DNA, 693 bp, Glycine max
  unsure (1)..(693): unsure at all n locations
  Clone ID: PAT_MRT3847_117882C.1
gacccacgcgtnccggacgcgtggggttcatttgtcttaattgggtgtgaaaggagtggtatgtacaagtgtaggaataaagaattcgttagaaaagacactgggagtaggaaatgtggttgtcccttcaggcttcatgggaaacctgtgcatggaagggaaggttggatggtgaagttgatctgtgggattcacaatcatgaattggccaagtccttagttggacatccatacgctgggcgattgactaatgataaaaagaaaattattgctgatatgacaaagtcgatggtgaaaccgaaaaacatcttgctaacgttgaaggaacacaatgccgacagttacaccacgataaagcaaatttacaatgcaagaagtgcatatcgttcttcaataagaggagctgataccgaaatgcagcatctgatgaagcttctcgaacgtgatcaatacattcattggcatagattgaaggatgaagttgtggtgcgtgatctgttttggtgtcacccagatgcagtaaagttatgcaatgcatgtcatctagtgttttttatagacagtacctacaaaacaaacaggtacccttcctcgagccgaatttttgctggggtgacaccagcgagaatgacattctctgttgggtttgcatatctggagggtgaacgtgttaataatgttgatgggctttgg

SEQ ID NO: 19798 - DNA, 2050 bp, Glycine max
  Clone ID: PAT_MRT3847_117883C.1
ggctcgaggtgactgcgtcttttctccaaacaccgcgccttcactgacgacggctctgtagccgcctgagccaccgcattcaccgtcatccaccgcttttgttcaaattcctctcacctcttccttccgttcactacccattgcacctgaaagcacgaggcttgctcgcaacacattcgtatacctcctccgtttacttaacgaagggtttgaaccttcggaatcataagcgcactgcgggtgaattcctttttccgtgtgtcccgttgaagttacgtttgttcggtggttttttcgaattctctgaactcatggccgcatggtcttctagaaagttactgagagacgttcttctcaaaagggtagtctcgaatcaacttcccggcgtcagatgtttttcttctgcgccaaaaagtgctcctaagatcggtcactattccaagaaaggaaggttgttgacaggagccaccataggtctacttatagctggtggagcttatgtgagtactgtggatgaagctactttctgtggatggttattctcggcaacaaaacttgtgaatcccttttttgctttgttggaccctgagtttgcacacaacttgggtgtctcggctgcagctcgtggttgggttccaagggagaagaggcccgacccatcaatcttagggctagaagtttggggaagaaaattctccaacccagtaggccttgctgcaggctttgataaaaatgctgaggctgtagatggtttacttgctctgggctttggctttgtggaggttggctctgttactcctgtcccccaggatggcaatccaaaacctcgtatcttcaggttgcaaaaagaaggtgctgtaataaatagatgtggctttaatagtgagggaattgttgccgcttgcaaagcggctaggcgctcagcacggcaagaggaagcttgatgaaacttcaagcgcttcaccttcttccaataatgaggtcaaacatggtggaaaagctggccctggcatccttggtgtcaatcttggaaagaacaagacaagtgaagatgctgcgtagattatgttcaaggagttcatacattgtcccaatatgctgattacttggtgattaatgtttcatcacccaatacccctggtttgcgcatgcttcaaggaagaaagcaattgaaggatcttgtgaagaaggttcaagctgctcgtgatgaaatgcaatggggtgaggagggcccacctccattgctggtaaaaattgctccagatttgtcaaaagaagaccttgaagatattgctgcagttgccttgactcttcacttggatggactgattatatcaaacacaaccatttcaagaccagatcctgccagtaaaaatccattggcttcagaaactggtggcttgagtgggaagcctctcttcaatctctccaccaacatcttgaaggagatgtatatcttgactaggggccggattcctttgattggctgtgggggcattagcagtggggaagatgcatataagaaaatacgagctggagcaactctagttcagctctataccgcattcgcttatgggggacctgcacttattcctcagataaaggctgaattagcttcatgcctggaaagagatggtttcaaatccattgttgatgcagttggtgcagattgtagatgacctttgtccacatcagaatcccgtgctgtaagaaccataatcttattttaggagtagtaatgttccggttttggcaatactgaaattgcaaaatcatttttttaagcttgctttaatctataccagattttatcttattgtttattttatttgggtttcgccacatgttctgaattgtaaaagcaagccaaggatttttgaggcaactcaggcagtgtttattttgagcaattgtttgaacaataaaccgccgcatcatagagaaatacatgtgttggttaaaccccatcaataatcaagcggttttatcgccaaaaaaaaaaaaaaaaaaaaaaaaaaaaaaaaaaagggccgcccgttctagaggatcc

SEQ ID NO: 19799 - DNA, 464 bp, Glycine max
  Clone ID: PAT_MRT3847_117884C.1
cagagaatattttctcaaaccaaaccaagcatcagtctttcctctattgacattatcagcgtctaaatggatgaagtagtcagtacaaagccctccccgcttgacattatatttatatgtacaaaatgacacatatatcattggagaatagaataatttccatgatttgggattctcgaaaatgcataccatgtattattcacatcctttctttgattgagctatggaactgattttgaaatattcacatcctttcctctattgagcttacgcttatccctgctaggtttttgcgtgcttagcgtccctttcacactagttccaataggatgtttggcagtttgagatccaggaccaccccctgcttaacagtgatgagaaataatatttaaaaatggatggttctatcctaacattatccaaccaactggattttcagattccttactatgctttcatcaaca

SEQ ID NO: 19800 - DNA, 539 bp, Glycine max
  unsure (1)..(539): unsure at all n locations
  Clone ID: PAT_MRT3847_117885C.1
aattcggctcgaggaaagaaaagacatccaactttagaggataataacatgtcaaagggtgacaaggttgaggttttggacttctgggctagcccattttgtgcaagagtgaaagttgctttggaagagaagggggtgaactatgtagccagtgaagaggatttgtttggaggcaagagtgagcttctcctgaagtcaaatcctatccatcaaagggttcctgtgctcttgcacaatgacaaacctctagccgagtcttctatcattgttagctacattgatgaagtctggtcttccaacccactgcttccaactcttgcttatgatcgtgcccaagccagattctggactgattacattgacaaaaaagtatttgaaaccgggaggagtatctggggaagcaatggagaagagagagaagtgggcactagggacttcattgaagttntaaagcatcttgaggaagccctaggggagaagaactatnttggtggtgatgcctttgggtatgtggacatcatagccattggtcactcggc

SEQ ID NO: 19801 - DNA, 179 bp, Glycine max
  Clone ID: PAT_MRT3847_117886C.1
cacacaattgatatggttcagaatctcaaattgccatctacaatcgtaattctaaccccaacagttaactcttcacaattgttagcaaaatcaccattatcaataacaaaattacacaatttttaaatcactaacacttaagaaataaacaaaaaataaatctttttttgtataaattt

SEQ ID NO: 19802 - DNA, 170 bp, Glycine max
  Clone ID: PAT_MRT3847_117887C.1
ctggaaccttggttatagtattttacccccccctcaactggaatatccattataggcgtacgagtgtggctctgatagactatcgagggtagtccacggggcatgacgtttaagatcctactcgctctactgggtatcctataagagaccgcagaagaagactttgctaa

SEQ ID NO: 19803 - DNA, 2619 bp, Glycine max
  Clone ID: PAT_MRT3847_117888C.1
cctttttgttttctttctcaagctgctgtaatattgcttacctagctagctaggtagggacatttctctctctttttatctatctatggagattggagacactaccacagtgatggaaacgtcgtccggtgaggctgtggcggagctacggcggtggtgacgggaggatgttggacgagaattcgggtgactatgagactaattctcattattataatggaaaaatagatgagggtagttgagaaggaaaggggtgcccccccagtgaaacttagtctctttcaatgttttgggcttttttggggggatttattcctgattcctgtttctaatgaaagcttggtcaaaatggcggtggcgaggtgattatgatggatgcgaattccggtgaagaagagaataataatcataataataaaggaaaattacaagagggtggtggagagctgtaattgcatagggacacaacatctctatagctatatgcagctaggagactcaagtgtgttggagatctcctcccatacccagcccgagatggcggtggtgttgccaccagaagaagtaccccatgaaggcagcgacaacagtggtggtggtggtggtagtgagatgattgggatggatttggatgcaaattcaggtgaaggaaatgaaggtaacaagatgagctttggagggaaccggtggccccgccaagaaactttggctctcttgaagataaggtcggatatggatgcagtttttcgagattcaagtcttaaaggtccactttgggaagaagtttcaaggaaattggcagaacttggatatcaaagaagcgcaaagaagtgcaaggaaaaatttgagaacgtgtacaagtacaacaagagaaccaaagagaacaaaagtggcaaatcacatggaaaaacctataaattctttgatcaattacaagcccttgagaaccaattcacaagtctcttacccgccaaaaccacaacctacttctactttggcaacaacaaacccattgacattgccaacaaggccaagtgatcatggtaacaaagttatctcttatgtcacaacttttccttccacaaaccctactctcatttcaccttctccacaaaccaacactaccaccaccaccaccacaacaacatccacaaccaaccctagagattcatcacgaccacaaaccaacaacaacaataatagtgtcacacactctttgccaaacatgaacacctctttctctaccaccactgcctccacctcatcctccacagcatcagatgaagacttggaagagaggtataggaggaagagaaagtggaaggactacttcaggaggctcactaggaaggtcttgttgaagcaagaggagatgcaaaagaagttcttggaagccatggaccaaagggagagggaaagggtggcacaacaagacaattggaggatgcaagaaatggcaaggatcaatagggagcatgagattcttgttcaagagagatcaacagcagcagccaaagatgctacagtcattgcattattgcaaaagatgtatggccaacaaaaccccacacaacaagttgaagtagagccaccaccacaacagaagcaaacaattccccaatcgctgcctccaatattaatgccaaacaataatttcgaggtcaagaaaataaataatggtcacagtgttactagtactactactggtactgttgctactgctactactactacttcgccggtgaattcttcttcttctcggtggccgaaggcggaagttcatgctttgataaggataaggacaagtctagaaaccaagtatcaagagaatggaccaaaagctccattgtgggaagatatctcaattgcaatgcaaaggctagggtacaaccggagtgcaaagagatgcaaggaaaaatgggagaacatcaacaagtacttcaagagagtgagggagagtagcaaagaaaggcgtgaagatagcaagacatgtccctatttccacgagcttgaagctctatacaaagaaaagagcaaatcgtccaagaacccctttggcatcttccagaatatgaagcctaatgagatgatgctgatgatgacggagccactgatggtgcaaccggagcaacaatggaggcccccacctcaatcattggaagagggtgtagggatggagaatgcaagtgaagaatatcatgaaaatgaagaaaatggtggtgacgatgatgataacattgaagaagatggagatagtgtggaagatgaaggagcaaacccgtgtgagattgcgacaaataattaaacgtgcttcagtggacaccgttgaagtagacaagataaggaattttctgaatggagaaaaattacgtgtgtggttaaatttacttttacttatttcggaaaaaatagtcctttatttttttttcatttttttagacttcaaattgtgattatttcttaaggaaaacaaatgttgggtatagtatagtcattcaattttctatttttcggatggggttgtaacatgctactgaaaaaaattgtcatagattgttgacattaaagacgaaaaaatttaaaatttcgaactattaaaaagcggcgctctagaggatc

SEQ ID NO: 19804 - DNA, 1701 bp, Glycine max
  Clone ID: PAT_MRT3847_117889C.1
gaagtttcaaggaaattggcagagcttggatatcaaaggagtgcaaagaagtgcaaggaaaaatttgagaacgtgtacaagtacaacaagagaaccaaagagaacaaaagtggcaaatcacatggaaaagcctataaattctttgatcaattacaagccctcgagaaccaattcacagtctcttacccgccaaaaccacaacctacttctactttgactacaacaaacacattgacaagtgatcatggtaacaaagttatctcttatgtcacaccttttccttccacaaaccctactctcattccaccttctccacaaaccaacaccaacaccactaccaccacaacaacaacatccactaccgaccctagagactcatcaccaccacaaaccaacaacaacaacaatagtgtcccacattctttgccaaacatgaacgctcctttcttaaccaccaccacctccacctcttcctccacagcatcagatgaagacttggaagagaggtataggaggaagagaaagtggaaggactacttcaggaggctcactaggaaggtcttgttgaagcaagaggagatgcaaaagaagttcttggaagccatggaccaaagggagagggaaagggtggcacaacaagacaattggaggatgcaagaaatggcaaggatcaatagggaacatgagattcttgttcaagagagatcaacagcatcagccaaagatgctgcagtcattgcattattgcaaaagatgtacggccagcaaaaccccacacaacatgttgaagtagagccaccacagcaacagaagcaaacaatgccacaatcacagcctccaatattaatgccaaacaataattttgaggtcaagaaaatgaataatggtcacagtgctacaagtactactactactactacttctccggtgagttcttcttcttcttctcggtggccaaaggccgaagttcatgatttgataaggttaaggacaagtcttgaaatcaagtatcaagagaatggaccaaaggctccattgtgggaagatatatcaattgcaatgcaaaggcttgggtacaaccggagtgcaaagagatgcaaggaaaaatgggagaacatcaacaagtacttcaagaaagttagggagagtagcaaagaaaggcgtgaagatagcaagacatgtccctatttccacgagcttgaagctctatacaaagaaaagggaaaatctcagaacccctttggcatgtttcagaatatgacgccaaatgagacgatgatgatggagccattgatggtgcaaccggagcaacaatggaggcctccacctcaatcattggaagagggtatagggaaggataatgcaagtgaagaatataatcaagaaaaagaagaagaagtagaagaaaatggtggtgatgatgatgataatattgaagaagatggagatagtgtggaagatgcaggaccaaacccgtgtgagattgcgacaaataattaaacgtgcttcagtggacaccgttgaagtagacaagataaggaattttctgaatggagaaaaatttacgtgtgtgcttaatttacttttacttatttcggaaaaaaatagtcctttattttttttatcattttattaaacttcaaaatgtgattatttcttaaggaaaacaattgttgggtatagtatagtcattcaattttt

SEQ ID NO: 19805 - DNA, 402 bp, Glycine max
  Clone ID: PAT_MRT3847_11788C.1
cacactacgtaatcattggctctcccctcatgccctgtaacggcgttaaaaaccctaccgagcaactttgtctaaatctcaactactagcacataacgatcgtcacggtcaacatcaaagcgctggccgacgtgctcgaacaaaccataaacgacgtcgaccatcttgtggactatgctcagcatatactaaaatgctctcacctccttttactggcctacttatgtgcgaatcaggctattctgctcgtgtctcattctgcattactacatctgcggcctcgctcctgcacccgggcaccgagccgtctcgtgactctcatcaacaccaaataattcccgagccttccttgcccctgctgccgtgtctcgcttgatctgcctcactccatcgatgtgatat

SEQ ID NO: 19806 - DNA, 213 bp, Glycine max
  Clone ID: PAT_MRT3847_117890C.1
ttgggatttttaaaatctctccttactgcgaggaccattattcattgcgacaagattgctgaagacctcaagtggatattctgaaaacactagatcttcgattcgtttggtaaccgtatatataggcctgattattacacaactctgtgctcgaaggatatggaggtttaaaagattgtaagctatcaagcgaatctgggagcgtcggaattg

SEQ ID NO: 19807 - DNA, 362 bp, Glycine max
  Clone ID: PAT_MRT3847_117891C.1
aacgctccaacatgcagctcaccctgactcaacgcttctaccattaactgtccttccagatcaaactcaccttggtggatctcatgccatatggggtgcgaggatcagagtctgatgaacccagtcccgagcgcatgccacctgatcatgcagctggttccaactgagattctgcctaactgctaatagtcagttaagaccaagccctccaagagcatacagcccagagaacgcgtccatcatacctgtgcactctgagctcactatgtgctaacaaaggcagacacagcgccagttactatgcgctcgtctacaagaccttacattcacccttaatgctcacataaatggagcaacccttc

SEQ ID NO: 19808 - DNA, 248 bp, Glycine max
  unsure (1)..(248): unsure at all n locations
  Clone ID: PAT_MRT3847_117892C.1
agcattgaatcgtgagactataggatagtagtttttgtaattaagttgtaacacgttcatgcgtcaaaagtcgccttaaccgcgtggttttgcagaatgaacaccctacaagagttgttaaggcatgtcaatttcatcatgttccaaagacaacaataaaatcgagctttcagagttcaaacctcagcacaattaaaattttgaatgtgacgagttattgaaccanaagggtattgaatagtttctac

SEQ ID NO: 19809 - DNA, 253 bp, Glycine max
  unsure (1)..(253): unsure at all n locations
  Clone ID: PAT_MRT3847_117893C.1
gactcactaacttatcaacagtgtttttagcatttatgtacatgactccaacacttgttgcatgccaatattatactggcgattcgcntattatctgatgaagaaccatataaactccttctacgaatcaacttaagtctacgtttggatcacttgttgttgatttacaattgattctataacgcatccatttctttaaaactttactttgaacttgcgtttcatcatttttcaaattcacaatatgcatcat

SEQ ID NO: 19810 - DNA, 298 bp, Glycine max
  Clone ID: PAT_MRT3847_117894C.1
cccacgcgtccggcagaagaaagagacggttaccaccaccaccagggaagaagccaaagggggactattatatgtttagagaatctctactttttgccccctcttgaattcaacgtcacttttcctttttaacccaaggccattttcaacgacctttttttaagaaacctttcttttttcttaaaaccattccggttcaaacttgcctgcaatgagcttaaccaattccattccataaaagaccgttattaagttaattggcacctgaagccgttaaagagcatatattagtcccaca

SEQ ID NO: 19811 - DNA, 1161 bp, Glycine max
  Clone ID: PAT_MRT3847_117895C.1
ccgagcgtcttccagtgttcaaaacataagcaacttttctcatagttaaagaaagcatcatcttttgttgctaacgtttgacgcgttagtttagctctcacaaacttcgtacagtgacaatatgaagaaagttgtgttgaaggtggaaatacatgatgacaaaatcaagaaaaaagctatgaaggctgtctctggcattttaggggttgagttagtttctgcagacacgaaagacaagaaattgaccataattggggacattgatccagtaaaagtagtagccaagctaaggaagcagctttgtcacgcagacatagtttttgttggaccaacaaaagaggagaagaaggaagaacctaaaaaagattcagcaaaagaaattgttgtaacaataacttatggcaaaccgagaaaattattggctgagtcgcggacaatgttttttttaagacgtttcgtggcactgccaaaaattgtgcaagtagactatctaccacgaagtccccaagataaaacagcccagattactgtataagattcccactgcactgagagaaccttttctagaattacactctcttgtatttgagaagtcactctaaagccacccgaaaatatgacttgaaaaatcactttaacagccaaccaaaaatatgacttgaaaagtcactctaatagccaaccgaaaaatatgacttgaaaagtcactattataaccaatcgaaaatatgacttaaaaagtcactcttatagccaaccaaaaaatatggcttgaaaagtcactattatagccaaccgaaaattttagagcgacaaaaagagggagaagtttgtcgaaaatgcatcgactcaaatatgagagggagaaagaaaagttgaggaaatacttctcaactggagtaaggaaaaaagaagaaagaagctctctatatatagagagtgaaacattattcaagtgtttatcctgagcgatgtgagacttgaagcctttttttctttctttttttcaaactttcatccacattctcctttgttctaacagaaattgtgccatctgatctactcaagttccatcaaccctattatgtctattgttattatccgtcgaaaccacactacaatccatattacagtgccatcagtatggaagaggatcctaat

SEQ ID NO: 19812 - DNA, 344 bp, Glycine max
  Clone ID: PAT_MRT3847_117896C.1
aggttcccgaataccaaagcggacttagatgttttgcatggacttgataaaagaacaattgttgaaacaatgatttgatctgaatgtggaaacagaccctaagctttagtgactacgtaaccacaaaattttatattgagtgtccgcatggatatgttctacgattggttttgcatgaatttctaattgtcataacatatgattcatggaagtgatctaagcattctttatttctaagccattggcaaacagttgtccaatgtcattattttctgcatttgaagcttttgagcagaattgattttacagaacctgactagatgaagttctacctacctagatag

SEQ ID NO: 19813 - DNA, 289 bp, Glycine max
  Clone ID: PAT_MRT3847_117897C.1
tacagaaagagagagtaggggcatttgaaaaattgctaattcccatcatcaaatctttcaaagccaataaaatacctgcaaactttaaagatgacaacgcgaaagaatggcaagcggacaaccagcatcttgaacagaatgattgttcatatcggagttctatcaactaatacatgaattgaaatataatacttgaataaacacaatgctcatactaaccaatacttacattgatggttcaagtacaaccactgattaataactatagcataattttaaacctattaaa

SEQ ID NO: 19814 - DNA, 1572 bp, Glycine max
  Clone ID: PAT_MRT3847_117898C.1
tgaaaacactgatgaggtgttactactgaatacttcttgaatatgattctattcttatttcagttcaagtttatgtaaatatatgctttgtcttattttgtttgcagattcgtgtatgttgaacttctggaaattcgtaaagatgtccaatgcccaatttgccttggcattattaagaagacaagaactgttatggaatgcttgcaccgtttttgcagggaatgcattgataaatcaatgcgactagggaacaatgaatgccctgcttgtcgcacacattgtgccagtcgtcgttccttgagagacgatccaaattatgatgccctcattgccgctttatatccagatattgagaagtactcacaagaggagcttgaatttcgtgaagaggagaagaaccgcaataagcagattcaagcttcaatagcaaaagtagttcaacggcaatctgaagcattggttaagagacgtaaagacacaccaggtgaatttgtaactagaccgcagcgtaatcagcgaaacattcattctaggagacaaactcaagcaattgaaggatctgaagataatgaggaggaaaatgacaataatgaaaaggactcatcttcagctgatgaacgaagtacagaacaccggcagagaaggagaaagagatgggctagagttcgcccctctcaaccctcatcatccatgacaagtcctgatggtggatgcaatgatagtgatatggatataagtaaagaaaatcgtggaatttcaaggcaggtgtcgaaacatggaaagcttacttggggaaggggtggttttagaagtaacactcggcatggtagtggtggtggtagcaatagcaaaagttctcgcagtagtcgattgtctaagtttgttgaccatctccgcaacttggatgaaaacactgatgagtttgatgtccatctcatgcttgtttctcttgaccaactaagtacaccaagtttgcagcaaccttacctttgctgtcgaccaactttgtctgtcaagcacctttatgaacacgttgctcgtcagacacctttgccggttgaaggaattgagatagtggcagtcaaaggatgctgcagtacgaactgtgacaagtcagctgatgagaattcggcccttgcatatgatgagctatcaaagctggttatagatccacacaaagatgaactggaaattttgcaaggacatgagactctggcagggcttagatccaaatgcatatccaagatggggcatttgattattgcatacaagcagaaggaggtatcatagtcttggtttcattggcgatcttgacattggctatgccataaatttctttgttatgtacataaaaagaacaattgccttttgcatcctcaaccccaaaaaaagaaaaaataaaaacctatggtatactagtgttatgcaagcattgtaatatctttatttttagatttaccttctaaaaatactagttaggtttcagttttacttaaaaaaaaaaaaaaaaaaaaaaaaaaaaaaaaaaaaaaaaaaaaaaaaaaaaaaaaaaaaaaaaaaaaaaaaaaaaag

SEQ ID NO: 19815 - DNA, 477 bp, Glycine max
  unsure (1)..(477): unsure at all n locations
  Clone ID: PAT_MRT3847_117899C.1
aacaattccagagttgcttatattttaccagtggcatgtctgtgtgtactgctccgattgcatattgaggcacaagtggcaagctcttattctgtatatattgaaaggtgactagtcaaagggtgccatgtgtgctacagaaaatttccttgactgtagggttcctgtatgatgttaattaagcaagctttgccctcatcagaatgctttacgaacagaaagtggccctttttgctgacttcacttatcttctagctagggtctcttttatatcttagaatcagcaacatgcatgttgccccaccaagcttgccccaatcatgtaatggattacgttggtcacaaaaagaaccttncttcttcttcttcttttttaattaaaaaaaaggcttaattaactaatgaaaaataaaaaaggttaagtccattacgttagaaacgaccacaatttgttttatatttgattttattatgagt

SEQ ID NO: 19816 - DNA, 291 bp, Glycine max
  Clone ID: PAT_MRT3847_11789C.1
gacattcacgttctctttaatgcatcatctcagcgcttcaaacgccaaccattcctcaaactcaaagtcttcacagagccatggggttgttgtgcataccaatatcatctagtgttcttcaaacattgttcctcttttgctctgcattctttgtttctcaagctcttggggccagaatcccacaaccacataagcctcttccgttcatttggcctctgtctgaaaattaatttgctttgctatgctttattattcgttgaacagatggcctgttctctaaaaaaaaaataa

SEQ ID NO: 19817 - DNA, 515 bp, Glycine max
  Clone ID: PAT_MRT3847_1178C.1
caaatcaggtactctatagatccttttggcttggtttggtcatactcttttgcaaatatacgtcgccagtcagcccacgatgaaccaagaacacatgacgctggaattgttgtgaacacagacatcataagagcccaatttacagtcttgggaagataccaacaggcactcctagaacccctctcccaacagctcgcaggtacgtgcattgcttccgattttgtcgatatcgactgtatagaagggtcacaatggggagctctgtaatccagatgaagaagagtgtgagagaaggatgagtaacgagttcgatggagtagacagtgttcgcaatccagaaggcgaaggccaagccaagcgcgcataatgcgttgactataagggcttctgaggctgagattggtggtggcaattccacggttgaggttgtcgacgacttcgttgtctcgttgcttttccggcgatccatggaggaggatctccgcactgtgaaatctcgagccgctcgagccgca

SEQ ID NO: 19818 - DNA, 760 bp, Glycine max
  Clone ID: PAT_MRT3847_117900C.1
cgtttttctctttccaaatctaacttacaccttacaatacatgtcatgtgaactcgtgaagtgtgcagtgtttggtgcttctttttgttctcctctttccttttttggttcacgattccttccctcctcatggagtctctggaacttgttcctcttcttcttcttcatccacgcgcatcaccaccactacaatcaataaggcaacctcgtttcccttctcttctcaatagaaaaactagaaatgccaacttgcgatcattttccgctaaccttcaaggcggcggtggcggcgctacttcacaaggcggtcccttctctttcgaagaccaaacctctcaccacaaagacgatagagctcttgtcattgccagagaaaccgacgattttggctatctcgttggctttcgcttgcttcctaattctggtcttgaagagttgatgagtgtgtcacacactataactgaggaagattctagtagcgatgaggttgaaaaacccaaggttgaggatacagaagaagaggaagctaagactagagtgtcacataacattgttgtcgtgacttctgaagcggcaccgtattcgaagaccggtggccttgctgatgtttgtggctctttgccaatagcactggcaagccgtggacaccgtgtcatggttgtcacgccgagatacattcatggtacttctgaggatctcaagtttgctggggcagttgatcttgatcaaagcaccaaagtgttttgctttggaggtgctc

SEQ ID NO: 19819 - DNA, 143 bp, Glycine max
  Clone ID: PAT_MRT3847_117901C.1
ttgcaaaacctcgcaacctctcatattatagtgcaccggatagatagcagatagcatatagcagcgatggaaatccactcagaggaggagaatggcgtttctttcgagtcacaagcaccttgagctgaaggagaagccgaaaa

SEQ ID NO: 19820 - DNA, 407 bp, Glycine max
  Clone ID: PAT_MRT3847_117902C.1
accaagacgaggatgccatttcgctgtcacctgacatgagcgctggtacagaggaagatagcagaagccagggatctccacgtagagtttactcaatggcccttcacttgcgatcaattgcttcaatcttggaaagcaacctcgaggagaagtccaagttatacaaagaagtctccttgcagcacttgttcttaatgaacaacctgcattatatggctgaaaaggttaaggggtctgaactcaggctcatacatggagatgaatggattcgaaagtgcaattggaagtttcagcagcatgcaatgaaatatgagagagctagttggagtcccattctcaacttgcttaaggatgacggaattcatgttccgggtacaaattcggtctcaaaaagtcttcttaaagag

SEQ ID NO: 19821 - DNA, 127 bp, Glycine max
  Clone ID: PAT_MRT3847_117903C.1
ccattcacaacaactatcccatcaaaatcaactccttaacatttaacatcaactccaacattataatttttaactcaataaacaactcaatccccacaattatttccataaccctaccatctctcaa

SEQ ID NO: 19822 - DNA, 264 bp, Glycine max
  Clone ID: PAT_MRT3847_117904C.1
cccacgccgtccgctctaccctgtctgctgtcttcttgtcgtataactactcactctataaagtgctgctatcacacatctttcaatctctttaattgataaccacaaaaatcttacacatccaacaaagatcgtcacaccgtacatatcgacattcattcaataactaccaatgatatcaactgttatagatgatgatggttctaacattatcaatatatcatatcacctacccttcacagttaccaatgagtatcattacct

SEQ ID NO: 19823 - DNA, 170 bp, Glycine max
  Clone ID: PAT_MRT3847_117905C.1
gccgtaaagcacatcaattcattatattttaaaagggccggcgacatcaattcatgttggaaatttaaatacaaaacattcattttatacctcatatttacatttaaaaagaaatggcatgacaatgtcaccggaataacatgcagaaatacgcactaccattttaaaaa

SEQ ID NO: 19824 - DNA, 414 bp, Glycine max
  Clone ID: PAT_MRT3847_117906C.1
gttttatggggttttttgggatctctggggctgttttggacaaaaggggctaagagaccgcattgacacattggaactcaacaagcctaatcccgtgatcagtgtttactatacgtgaccggtctaagggtcaaccacattcctggtgattgctcttctcacgctgaagaagagactgtaggttggagatacaaatgtgtttgctgaggtggggagatgatattggacatgagatgaacagcatgatcgatcatttacgacagggtagactatattatacgctacacagaattggtgagggacttgaactggcaggagaacacgctaataaatgaccttattgaagggatggttgtggcaaagcatctgaagacggactagactatgcctgattcagatgactgaggagatttg

SEQ ID NO: 19825 - DNA, 331 bp, Glycine max
  Clone ID: PAT_MRT3847_117907C.1
ggaccggaatattctgggggcgaccagctcctagtaagtggccggccttccatttccttgcttccttaaatagtattgcagtctcctcttattttgaacttttattacatttatgcactcccttattcaataagcgccccaactgccgattctttgataaataataaagttactgtgagtgctcaagggtagatatttacagaatgggctcacccttgattttgggaaggctgcttttaatgcattatttcttgattcatggttacgataattctcggctggaaaattagaatggcctagaacgcattagagctacaaatttagcggcgtg

SEQ ID NO: 19826 - DNA, 330 bp, Glycine max
  Clone ID: PAT_MRT3847_117908C.1
agtaaataattatacttgagaagaagataaaattgaaaacgatgacacatatgcagttgaaaaacatattcatcaatctactgaacactggtcgagcaagaaacaaaccatttgggaccctgggagaaagattattcacacaatagtgccgagcctgcaattgccataaactcgatcggaatagcctccacctaagaggctctaacacctagactagaccatacatagatgggccgcttacacacatagtccctatcgatctcttgaggggggtcctgtgggtgattgtaattagtaccaataagctgtcccactggagcctacatcacg

SEQ ID NO: 19827 - DNA, 388 bp, Glycine max
  Clone ID: PAT_MRT3847_117909C.1
acactttcgtttatgctaacatcaccaaacacagcactgaaacaaacacccacaaaacgatattagaagcagtcttatgcgaaacatctggcggaaagaaggaccctggctggccacacatttctataagaatctaccgaagacccggatggtcagaaaccaggtttacctccaagtgtacaaaagactctgacagctaacaccattacctatgtgggggactgtacagatgccatagacagtgagctaggcagtactgaatatatggaagatacaccgccataccaacctacgcttaatacgcagctaacgattcagtaatgtgacaaccgttgaggaactaacagtgagaaagaaactaccctgaacttgattcagcagcttcact

SEQ ID NO: 19828 - DNA, 273 bp, Glycine max
  Clone ID: PAT_MRT3847_11790C.1
acgttcttatttgaggcagacgattccagacatgagtggaatgggcttgttttggtcgcaccaaaggtacacggaactcgtttggaacagacgagcataatgcgttttgagtcttacacgggtgcagccgactgtacattgatgagaattgattgacagcctaggaaacaacctcctcaaaacgattatgtcgcagatgacgtgtgcgatatacaccatgcttcaagtagcatgctttgaaccccattgtgccgttctaaaagtattgatgat

SEQ ID NO: 19829 - DNA, 478 bp, Glycine max
  Clone ID: PAT_MRT3847_117910C.1
accatgctttctgtttttccgagagagcgtttctacacaatcccacgcgtgtaagacaatatgcaccgggcttattctgttatatgataaaaacaatcatgagggccgtgaaaatcatgcattctggtgaaaatcagaatgctgcacatttgcctggctttactgaacagatacatgtgtccgtttggactaatttcaaagatgcgtttaccgtattggacatgcgagatgtgaacagtgccgaagcttgaatagtgtactgcgttctaaaatcatcaaacgtggactctgtggggatggtataaaatgtgacttctacaagtgccttgttgctaaagacggaaccgtgggttatctttattcacccactagttcgtctgtgagcattgcgaaggactctcttaagctggtggatgcctgaatgaatctatgaatgacttgagctgtcaatgactgaattgcgattagaatatggatt

SEQ ID NO: 19830 - DNA, 241 bp, Glycine max
  unsure (1)..(241): unsure at all n locations
  Clone ID: PAT_MRT3847_117911C.1
tggtacgccctgcaggtatccgggtccggnnaattcccgggnnntcgacccacnngcgtccgatacagagagatggtgatgatgaggctgcatggtgatggatcgacagacgatnccagcctttcgtttgttgcctcgcaaaggatactctatctgggacgaggtaagaactgacatgaaccttttcctctgtgaacatggaaactctggcaagaaaggtagcagtgtccattagaccgac

SEQ ID NO: 19831 - DNA, 510 bp, Glycine max
  Clone ID: PAT_MRT3847_117912C.1
ctatcttagttaccacataaaagcttgagcacatattgcatgaccaaattttatacatttccggaaaaacgtacttttgcaaaagaatatacaaagttgctttgagcacagtcatagaaagttaccggtttttgggggcctcaaaaaccctatggtggcatacccataatgaatctaaaaatgcttggttgcttttcctttaagaaattttctcagacaaacaccgagcggacctagttttgttatttttaaaaccataaaattgtgtggatgttagcttgctacgcccctaactgggctaaacgcctttaagtgttcaacgttttttcgagactccccggggggggaatttaaccaaatttgcggcggaggacgtggccctagctgaccttgataagatagaataaccagacgctggggaggccccagacccactattagatgagcagaccaggggccgaaagttggagactgaagacaaccctctcatattattcttgcgcccggggg

SEQ ID NO: 19832 - DNA, 367 bp, Glycine max
  Clone ID: PAT_MRT3847_117913C.1
tggtggcggcggtgctttttctttttcatcaaaggatattcctcctttgtcagcatctgataggattgagcatcagaggaggaaggtcaaacttctaaccatgctttactaggtggataggatatacagtcactactgcgagctgatgcacatggtggtgaacttattagacatggatgatgggagtccgggcagccgtgccatactcggtgctcgctcagaagctatggctgtgctgtttatgtgcctgatggatgcacttacaatacaatagaagcataggggtgaggcgtagggagagaaagatagatccagaaagtcgaggatgacctaaggagagaatcctaagatgtatatgttagagcag

SEQ ID NO: 19833 - DNA, 481 bp, Glycine max
  Clone ID: PAT_MRT3847_117914C.1
gagaattcgttttctctcctctgtgtctgtcgtctaaagcttaattccgatggggactccggaattccctgatctcggcaagcattgctctgtttcttattgcaagcagcttgatttcttgcccttcacatgcgatcgctgtaatcagatatattgtttggagcaccgaggttatattaaacataaatgcacaaaggccaacaaacatgatgtcacagttgccatatgccctctttgtgccaaaggagttcgcctcattccagatcaagacccaaacataacatgggacaaccatgttaacgttgattgtgacccatcaaactacgagaaaatcacaaagaagagaaaatgccctgcccctggatgcaaagaggtcttagtattctccaacacaatcaagtgccgggactgcttgaaagaccattgcttgaagcaccggtttggccctgaccacaaatgttccggtcccaaaaagttggag

SEQ ID NO: 19834 - DNA, 290 bp, Glycine max
  Clone ID: PAT_MRT3847_117915C.1
ggctcgagggacaatgaaagtgcttggtgcctttttagctctagacgtcgacgcacgacaacgcggtggctcataccatgcgcaccatcctgggcacacctaccggatcctacctctacaagcgaaaacaggcactgaggtccactacattgatgacgactcctgcctatgtcgaaggcttgatgaccaagagatcaacggcattgactacaaaaccgttgctcataaatgcgaggtatatatcgtgaactacgtgcttggagaaccatttaggtcgaactctgaaacat

SEQ ID NO: 19835 - DNA, 701 bp, Glycine max
  Clone ID: PAT_MRT3847_117916C.1
tcgtacggctgcgagaagacgacagaaggggacaccagaaagtgccagaattctaatcctttttgcctaacctttatgtgtgtgtgtggcatcattttccaaccccacaattcaaaatccattaaagaaagacttacttatagaaccctctctcactctcacccttaaggattcttctctctaagaagttctgagatatcaagcagaaaaaagaagcaaagaaagatgataatggtggtggttatgacagagatattaggagagtacacagcagtgctcacaagggtcacagaacgcctccttccgcgccacggcataagttttggtggtctaaggaggaaccttcgttttgcttcttccacaacctattcttcagattcaacttcttttctggtttacttttaaatttttaatcatatttgtcagaatagaaactgtgtttagttctttcgtgttttaggttaggatatttgtattttttattaattcgtgagaattgaaaacagtgtcaaaagatttataataacttgcacattttattcaatcaactcttgatggataggatatttgtttattgcataataagttggttctgtgaggagctagcttcagaagaataagctatgttagattctgctgaattttgtgtaattatgtaaaagattttgtaataaagaattagcccttatagttttggttac

SEQ ID NO: 19836 - DNA, 226 bp, Glycine max
  Clone ID: PAT_MRT3847_117917C.1
tactgcatctttgtctgataatgattgcagatattctgtctttgactattatatcttcacttgtgagaactgcttaaagaccacaatctttttcttcgtatggtccgctccatcatctgccatctgccccactatcctctatgccgctactaaatacaccgttatacctgagctcgatcgtgtccattatgacatctcatcacctgatccatcagaggtgcattta

SEQ ID NO: 19837 - DNA, 680 bp, Glycine max
  Clone ID: PAT_MRT3847_117918C.1
tcatatttgaaattccttcgcatttacactttcttacctttacacgtgctctctcaatctctcacgtagctctctcactctcacactgatccaactccaccacaagtcagagaatccgcagatttggccaaagaatctgtagatctgacatccaaagttttaaatacactatcccctcccacctcctcgatcgtgtgtattgtgaacatcactgccacggtcatcgtcactagagtccagtgctagcttttggagcactgtgccaaattatgtcgtgccgctcatcgtcgattcagattcacaatgctaaaaacctgtcataattagattcacagtttttataaatcggtctttgcaatcgacaatctctttcttttcttttcgtgtttagggatttagtctgattcctctgtgtttcttgttattgtgcaggcattacttgcgttttctttgaatctgattttgttactattaccaaatccaaagaggctgcgtgggatttcctcaagcttgaaatatttgtcaccgatatggcttgctatgtttctttattctataatactgtatgtgggggatttggatgcgaatcaataattatggactcctactattaagttgcatcatatactaaattagcgatccgttttctagttcctccttttttatatggataagctata

SEQ ID NO: 19838 - DNA, 440 bp, Glycine max
  Clone ID: PAT_MRT3847_117919C.1
atgaacactacctttagaccgttgacttttaataacaccaaagcctacaccgcagtataggcctgaacctcgctgggctcagcaaaaatgtatgcatggggttccgacgaacacagcacattcaaacccaggtaaaagcaattttgccaccggagcaaaagaacccagttctggaaacaacagttgcgaaatgacggtggacactacaatctttgaccgaaaaacaagctacctacacaagaccaccgatgagccagactagaaaccaacatttattgcaaccaacatcccctgatgaaccagcccgctcgactcacttcttcttctggacagccttggtgaccttggctcagttaggatccttcctctcaacgttctggatgactgccacagcaacaggccgacgcatgttccttccaggaaacctacgaagtggagga

SEQ ID NO: 19839 - DNA, 545 bp, Glycine max
  unsure (1)..(545): unsure at all n locations
  Clone ID: PAT_MRT3847_11791C.1
taactactatggaggtaatcgtttcctcaacaattgttgtggaagttgctgcaatttctctcgcgatggttgtggtggtggtcgcaactatggtcatggtggtagatagtctaacattaagtgtcaaatctatcataaatatggtcatgtggcttcctattgctattacaggcatgatgataactatgtctctactcaaccaatggcctatccaaatcagaatcagtactcaaatcaaaatcacaatcaaaagaaccaacacccaaaccaataccaaaatcagtatcccactaaccaacatccaaaccaatatcccactcaatcttcccattcatatcctaatcagcctccatatcggaatgctccacctcaacgcaaaaatccaccaccacaagctcatctaactcgtgctcagtgctcctctccacanaattggtatccagatttaggtgcatctcaccatgttacaaatgtttctcaaaatattcaacagaccacacccttttgaggaccagatcaaattactattggtaatggtcagggat

SEQ ID NO: 19840 - DNA, 354 bp, Glycine max
  Clone ID: PAT_MRT3847_117920C.1
ttacgtcctaaaacaatacaagattatacaatctaagggataggaaaacacacatgcgagaagaagaagatacatgctctaagtggggaacttcgggcggcgggaaacttccaatagccgacaatcttaaaactcgtcgcctccggggtgagaaaaccctcataaggggatacacagcaccaaatccgtatgagaatgcgtgacaaaaataaaactaatcagcaacttctacttcgctgccttgaggaccttttttcgctactgtgcacgtataggtaaggacctgtaacgttggacctccctaatcatcaatttgaagccacatccaggactctttcgggtgcaaacatatgt

SEQ ID NO: 19841 - DNA, 3259 bp, Glycine max
  Clone ID: PAT_MRT3847_117921C.1
ttgagggggaagcacaagagaagagaagagaagagaggagagggggggagaaggggttgcagagagagagagagagagatgtcatcatcttcagacctggacaggcaaatagagcagttgaagaggtgtgagcctcttaaggagtctgaagtgaaggcgctttgcctcaaagccatggaaatccttgtcgaagagagcaacgttcaaagggtcgacgcccctgtcaccatatgtggtgatattcacggtcagttttatgacatgaaggagcttttcaaagtaggaggggattgccccaaaactaactatttgtttctgggggattttgttgatagagggttttactcggttgaaacgtttctgcttctgctcgctcttaaggtgaggtatccggatcggataacactcattaggggaaaccatgaaagccgtcagatcacccaggtgtatggattctatgatgagtgccttcgaaaatatggttcagtcaatgtctggagatattgtaccgatatattcgactacttaagcttgtccgctctaattgaaaacaagattttcagtgttcatggtggtctttctcctgccatttcaacactggatctcgagcgaactattgatcggaagcaagaagtacctcatgatggtgccatgtgtgaccttctatggtcagatcctgaagatattgtggataactgtggtcttagtccccgcggtgctggttacttatttggtggcagagttgtaactttctttaccacgaggaaaggaagggagtagggagtgagtaattttgaaaataaagaggaaagcttgaagcagaagagagagatgtcatcatcttcagacctggacaggcaaatagagcagttgaagaggtgtgagcctcttaaggagtctgttgtgagacaatgagacatcagtgcctccttctggtctccctggtgttggtctcctacgctgcccggtcggaatcagcgctgggcggctggagccccatcaaggacgtaaacgacagccacgtggcggagatcgccaactacgcgctgagcgagtacgacaagcgttctggggccaagctcacccttgtcaaggtcgtcaagggcgagactcaggtcgtttccggcaccaactaccgtctcgtcctcaaagccaaggatggatccgccacggccagttacgaagccatcgtctgggagaagccttggctccatttcatgaatctcacttccttcaaaccccttcattaatcttagacccatacttttcttcactttctctcttatcatatttcatgtgttagctattctgtttttctcaataaggttcctgtcatgtgctaatgaatctcaaattgtatgttggattatggattcctctattctctcgctctcgggtttttctggaaattttgtttgtggtttctgcttttcaggttttcatatttatttctgtgggcgattcgactttgtaatttcaatgtctaagtgtgtatttagttacccatatcaattggaaatagtaatttaatgttcccatcataacatgggagtctgataacgtgctggttattgcagttcgtgacaaggaccatttctatgatgatatccttggggactgtaccgtgaacatcaatgaatttagggatgggcaaagacatgatatgtggctgtcacttaagaacatgaaaatggggaggttgcgtttggcaataactattcttgaagataatggaaagggagttgatactactacacgtgaccaggaaacaatggactttgaagaacgaaaaatctcctttgaagcaaatgagactactgataatagttccttctcacctgttccacctgaaaaatctgagaagttggcagataactatgagcctatagacatcgacgggcaaaaagagacaggagtttgggttcatcacccaggaagtgaagtttcccaaaggtgggagcctaggaaagggaagagtcggcgccttgatacagaaattcatggggagcctaatgattcagttggcagtggtaattcaactgtatcaggatccttgaacaatgacagcagcagtcctgataataatcctgaagaaaagcatcgaatgagaacggttaggaagggccttcacaagattggttcagtattccaccggagtaaaagaagggagggtttttcaggttctgttgatgaggagattctgtctccacatgataacattaggtcagagaatgctaaggggatgattgctgtgaagtttgtcatggacgagaacatttccggctttcaaactggtaaggttcaggcagaagggggatcaacagaagggagtggtcctgagagccctgccagtgccaagggaaatgtgaaggatatggcgaagaatatttttaaacatgcagaaaaatcggctcgtggcttgaggcacgttctttcttgtaaatcaaggaaattgaaatttaaaggtgagtctccaacagttccagaaagagaacatgaatctgactcttctgacgaggaatctattgcagctcaatctcccatagatgtaataagaactccagttggttctcatgctgtggtctcaggtagcaatggttcccctggttctggggtgaacgtggttcaaatagttccatcaaacactaatttggacaatgaagccacagctaaaatcacgaatgaaaaagatgaccctgaaaatgcatgctcccctgacaggtctagccaagaagttgttaaatctgctgaagtggagcatgataaagaggaaatgggggcacagataaaagagattctatcggtttgtcctactgaagaaagtttcaagtagcatatagcatattttctccagcatttcatacccgtgttcttatatacagtcttccaagtgagtgtttctacagtacttggcagattttgattgtagtaatagtcctgtgatcgtcatagaccgttttacataaacatgttcatgtttcaggtgctgtagtttgtaagcatgtaaataactttatacaaggaataaaaaagaaaaggttttcaatctaattttgggctcctttaccattaagagagccgatattaacccatttttaaatggtttaagcggtctccgttatattcacccttgggtttgcttgtaagaaaagggaaacatccccccttccaaaaggccctttttttagtccctgtaacatgaacttggactcccccatcaattccatcctgaaagttttccgggcggcctttccccttt

SEQ ID NO: 19842 - DNA, 1373 bp, Glycine max
  unsure (1)..(1373): unsure at all n locations
  Clone ID: PAT_MRT3847_117922C.1
gttcatttgcatttgagtttcatttcactctcatttagctctcctcatcgaatataaaaaggcttccttcttcgctgacgctctttcgcgaaacactccccttgctgcggttgctccatcacctaatcacttccccacttcccctgtaaatcacgtttagttcgcacaaggttttaaaaaatggctgatgctgaggacattcaacctcttgttgttgataatggaactggaatggtcaaggcgggttttgcaggtgatgacgctcctagggccgtgttccccagtattattgggcgaccacgccataccggtgtaatggttgggatgggtcagaaggatgcttacgtgggtgatgaagctcaatcaaaaaggggtatactcaccttgaagtatcctatagagcatggcatagtcagcaactgggatgatatggagaagatttggcatcacacattttacaatgagcttcgtgttgcccctgaagaacaccctgtacttcttaccgaggcacccctcaatcccaaggccaacagagagaagatgacccaaattatgtttgagactttcaatgtgcctgccatgtatgttgcaattcaggctgtcttgtctctgtatgccagtggaagaactacaggtattgtgcttgattctggtgatggtgtgagccacacagttcccatatatgaagggtatgctcttcctcatgcaattcttcggttggaccttgctgatcgcatgagcaaggaaattagtgctcttgcacccagtagcatgaaaatcaaggtggttgcacctcctgagagaaagtacagtgtctggattggtggttctatcttggcattacttggcaccttccaacagatgtggatctgcaagggtgaatatgatgaatctgggccagccatcgttcatcggaagtgcttctaaagttgggtcaagtcgagctggatggtgatcaagtttttcatgcacccagtcctgtgccatatttcagtaaagtttgggtgacttatttggtatttgaagctttgggtttttaatacatatctctagtttaatgaatggctttgtaagttgagtatgttctaagtttctccgttaggtccccttggaagccagactttttatgcaattggcggatggtattggaactttgtaggttctgcttggtttggtttttccttttattcgattttcatgttgtggccaagaattaggttcctccccccccccccccccgatagtctaagcctcttttctcccagggatttttgagtcagtttctgtttatatttattatatgcataattggtttttatgtttgcagtacactcagaaatcagaatgtttttattcccccccccncattaatc

SEQ ID NO: 19843 - DNA, 1815 bp, Glycine max
  Clone ID: PAT_MRT3847_117923C.1
gtatggactcattgttggcatcatcctctcttcccgtgctggccaatccagagctgattagtataaaatttccgtggttcagtgcgctacaagcaacaggctcccctttgccgctgttgttgttgctgcaccaccgaacaacttccccctgtaaatcgtgtttcgtttgcgcagggttttaaaagatggctgatgctgaggacattcaacctcttgttgttgataatggaactggaatggtcaaggctggttttgcaggtgatgatgctcctagggccgtgttccccagcattattgggagaccacgccatactggtgtaatggttgggatgggtcagaaggatgcttacgtgggtgatgaagcccaatcaaaaaggggtatactcaccttgaagtatcctatagagcatggcatagtcagcaactgggacgatatggagaagatttggcatcacacattttacaatgagctacgtgttgcccctgaagaacaccccgtacttcttaccgaggcaccactcaatcccaaggccaacagagagaagatgacccaaattatgtttgagactttcaatgtgcctgccatgtatgttgcaattcaggctgtcttgtctctgtatgccagtggacgtactacaggtattgtgcttgattctggtgatggtgtgagccacacggtgcccatatatgaagggtatgctcttcctcatgcaattcttcggttggaccttgctggccgtgatttaacagagtacttggtgaaaatccttaccgagagaggatactccttcagcacctctgccgaaaaggaaattgtccgtgatgtgaaggagaaattggcatacgtggcccttgatttcgaacaagaaatggagactactaagagtagttctgcagtggaaaagagctatgaattgcctgatggacaggtcattacaataggttctgagagattccgttgcccagaagtactgttccagccttctctgattggtatggaagctactggaattcatgaaacgacatacaattccatcatgaaatgtgatgttgatattaggaaggatctgtatggaaacatcgtgcttagtggagggtctactatgtttccgggaattgctgatcgcatgagcaaggaaattagtgctcttgcacccagtagcatgaaaatcaaggtggttgcacctcctgagagaaagtacagtgtctggattggtggttctatcttggcatcacttagcaccttccaacagatgtggatctccaagggtgaatatgatgaatctgggccagccatcgttcatcggaagtgcttctaaagttgggtcaagtcgagctggatggtgatcaagttcttcatgcacccagtcctgtgccatatttcagtaaagtttggttgacttatttggtatttgaagctttgggtttttaatagatatatctagtttaatgaatggatttgtaagttgagtatgttataagtttctccgttaggtcaccttggaagccagactttttatgcaattggcggatggtattggaactttgtaggttctgcttggtttggtttttccttttattcgattttcatgttgtggccaagaattaggtgcctcgagttaggaggacgatagtctaagcatcttttctcacagggatttttgagtcagtttctgtttatatttattatatgcataattggtttttatgtttgcagtacactcagaaatcagaatgtttttattgtttgaggtgattaatcgtttatacaccatatgattaaatttaaaaaaaaaaaaaaaaaaccgagactag

SEQ ID NO: 19844 - DNA, 1717 bp, Glycine max
  Clone ID: PAT_MRT3847_117924C.1
tacggctgcgagaagacgacagaagggggcgaaacactccccttgctgcggttgctccatcacctaatcacttccccacttcccctgtaaatcacgtttagttcgcacaaggttttaaaaaatggctgatgctgaggacattcaacctcttgttgttgataatggaactggaatggtcaaggcgggttttgcaggtgatgacgctcctagggccgtgttccccagtattattgggcgaccacgccataccggtgtaatggttgggatgggtcagaaggatgcttacgtgggtgatgaagctcaatcaaaaaggggtatactcaccttgaagtatcctatagagcatggcatagtcagcaactgggatgatatggagaagatttggcatcacacattttacaatgagcttcgtgttgcccctgaagaacaccctgtacttcttaccgaggcacccctcaatcccaaggccaacagagagaagatgacccaaattatgtttgagactttcaatgtgcctgccatgtatgttgcaattcaggctgtcttgtctctgtatgccagtggaagaactacaggtattgtgcttgattctggtgatggtgtgagccacacagttcccatatatgaagggtatgctcttcctcatgcaattcttcggttggaccttgctggccgtgatttaacggagtacttggtgaaaatccttactgagagaggatactccttcagcacctctgctgaaaaggaaattgtccgtgatgtgaaggagaaattggcatatgtggcccttgattttgaacaagaaatggagactactaagagtagttctgcagtggaaaagagctatgaattgcctgacggacaggtcattacaataggttctgagagattccgttgcccagaagtactgttccagccttctctaattggtatggaagctactggaattcatgaaacgacgtacaactccatcatgaaatgtgatgttgatattagaaaggatctgtatggaaacatcgtacttagtggagggtctactatgtttccgggaattgctgatcgtatgagcaaggaaattggtgctcttgcacccagcagcatgaaaatcaaggtggttgcacctcctgagagaaagtacagtgtctggattggtggctctatcttggcatcacttagcaccatccaacagatgtggatctctaagggcgaatatgatgaatctgggccagctatcgttcatcggaagtgcttctaagttgggtcaagagctggatggtgatcaagttcttcatgcacccagtcctgtgccatatttcagtcaagtttggttgacttatttgatatttgaagctttgggtttttaatagatatatctagtttaatgaatggatttgtaagttgagtatgttataagtttctccgttaggtccccttggaagccagacttttttatgcaattggcggatggtattggaactttgtaggttctgattggtttgatttttttccttttattcgattttcttgttgtggccaagaattaggtgcctcgagttaggagaacgatagtctagtatcttttctcccagagggatttttgagtcagtttctgtttatatttattatatgcttaattggtttttatgtttgcattaaactcagaaatcagaatgtttttgttgtttgaggtgattaatcgtttatacaccatttggtt

SEQ ID NO: 19845 - DNA, 557 bp, Glycine max
  Clone ID: PAT_MRT3847_117925C.1
acgtgcagcacgcgtcgtagctggttcttaagcggcgcctggttttttttttttttttgccccatggaaaccagggctgaacaaatcaggtcaaagggacgaagagcacctagaaatggttaagatggagggagaacagcatattaattgtcgaaaaattggggggggaaaaagagttttataagggggaaaaactgaaccagcactaatggttgtgaaggaaagtgtgggatttacagagaggaaatcttgagttgaaacttcttagctggtctcgacggggtttctggtgcatgtggcttgcagacgaggagagtgctctgcagcagttgaatgggtggtctatagggggtgggcgctttgttgttcccaggatttaggtggaagggcatgtcaagtcgcgggggggccgggccaagtgcttgagtgaggggagccagtttggccggggtgtgggggggcgcgggggggggggggtggggggggagtgggggtgggtggttagtgtgggatgggcttggggggtgggggtgtgggggtggggggggggggggggg

SEQ ID NO: 19846 - DNA, 297 bp, Glycine max
  unsure (1)..(297): unsure at all n locations
  Clone ID: PAT_MRT3847_117926C.1
tctgggtcctccttctccttctggaaaaccccaacttgcactctgttatgccgatgcatgaatgaatctttcctctccgaaaccctaaccaatggtgggacccaaacggcacttcctcccactgatcctcatctccctcgccgccttcatcttctacagcttccacaactnntatctnattgttgaatccnngaatnaaaccctanttccaantttccctaaccnanatngnanccaatnntcncccaatttcanttttgtgatnaaggtcctagggttaaanagnntngaagngnt

SEQ ID NO: 19847 - DNA, 269 bp, Glycine max
  Clone ID: PAT_MRT3847_117927C.1
ctgattcggtacgacaccacccttctgttttgaagacaaccttagtgtctcagcttttggtgcacatgaacgttcagtttgacatctaactttgaattacgaccatgagcttgtatatctttgcagaatttgattttagcagaactgaccccaccatggtcacgctaacatgggcactatctctgctacttaaccatcaaatggaacttaaaagagcccgacatgaactggacactcttattgggaaggacaggaaggtggaagaatct

SEQ ID NO: 19848 - DNA, 287 bp, Glycine max
  unsure (1)..(287): unsure at all n locations
  Clone ID: PAT_MRT3847_117928C.1
ganagtgcccactatcctaaaataatggagaaaacaaggtcctcagaccaagttgttgtcttcctcgaccagcataaccctaaaccaccctccatggaatccgaaaaccatcaggacaaacccaaacatcccttaaaagtcagagctcttaaccgtctcagcttctcaaaacccaaatcccgaatcctagaatacgactataatgtcccccgcaacaaagttgctgaagagagtgaccttattcaacccccctttaagttctcttccaacgatgacgatgacgatga

SEQ ID NO: 19849 - DNA, 430 bp, Glycine max
  Clone ID: PAT_MRT3847_117929C.1
caccccacactttggatgtaacgagtgcgctacataatggaatacacagtcctaccacggagccacttattccagagatgcaaaccctatttcataggaggctctgaacagacgaggcgacatatgagaacacttcataaaaggggttccctttagaaccctctatgaccgagatggactagatgcaaaccggattccttatgaatatggtgaaccggcagggaaccaccatcttcctgttgctttccagaacaagagaccctctgctgatctggatggatacgttctttgtcctgaatcttaactttcacatgtgttatagagtgatagctttccacctccacagaaatggtatatcttgttagagtagtcacagatacctgcatatcttacaaagcctttatcgcaaggcagagtgcactccttctgg

SEQ ID NO: 19850 - DNA, 450 bp, Glycine max
  Clone ID: PAT_MRT3847_11792C.1
gggaaaatattatccctcttcgtatttcatgctatatgttacaaatttttaccaacctataccaaaaaaaccccccccaactttcataggtgggaatccaagctaaagaagggtgcccgtaaccaaaagcccaaccattatttgttttaaaatgtaaaatatgccccataactaaccccccaaataaacctgggaaagggtacttaatggggaacaaaatttgagtaaattgggctgctactagggctggcttgagcaccaagggttaaagttggctgcaaaaactctgcctggggaaaaaaaaggttagatgacacctttagcagcagatcctgatcactacttttctgaacaaagtttaaggaatcccgcaagaaaaaacttgcctcagggggcgaagcaaataggggttttggactttagcaagcaccattttctacaggttttttg

SEQ ID NO: 19851 - DNA, 154 bp, Glycine max
  Clone ID: PAT_MRT3847_117930C.1
aaacaacgggctagaatccgaggagggtattaccccactgacccgcaaaaagctgctgaagctgatgaatggagacgctcactatctaacggaagccgcgccaaccagcttcatcctctctgctgaccttgcccccccccacatcttgaacagc

SEQ ID NO: 19852 - DNA, 370 bp, Glycine max
  Clone ID: PAT_MRT3847_117931C.1
atctatgctagctatctaggatgctgagttttaaataaatcctttttactctccctccttatctcccttcaagaaccatttctatatgcaccgaaactccttcacccctctccaaccttcttttccttcctgccttttacattcatctttacaacattactttcctcccttagctctcatttattttctacctcattcttcataccaaataatcctttcttatctacctcttcttcaatatattgactccttttcacactacttcactttatccattatctcctcattcattaatataaacatctcaacatattaacttttatttcgtttattgtttcagacccccattctttcatttccatcttatatc

SEQ ID NO: 19853 - DNA, 178 bp, Glycine max
  Clone ID: PAT_MRT3847_117932C.1
tgcccttttggatatcagaacctctcaaagcacccaagttacctagcatcctacaagaaattattaaatctttgaattagagtttaattaatgtttctgatgtagcaagaatcaagaatgagtgcttcaagtttcgattgctttttttttttttcttaatctaaaaatctttaatttt

SEQ ID NO: 19854 - DNA, 320 bp, Glycine max
  Clone ID: PAT_MRT3847_117933C.1
aagccaagaggggaaaaaagcaaatagcgctcttgttatttgtaatacatataccaaaacttgttttaatggattttttcgtgcacaaaaaactattgaagagtctttttcgtctgaggattaaactaatatattttagaccctaaaaattatgatcttggatttttgtaacattaaaaccatgattattcattgatctgtattcatgaaaagcgtattaaagatatttttgtcttactttttttataatttggtaattatttaatttaaaaaattggctatttgtcatttttactagattgtaccatattttttttttt

SEQ ID NO: 19855 - DNA, 344 bp, Glycine max
  Clone ID: PAT_MRT3847_117934C.1
ggaaagtagtacatagatagtaaaatctggcttgtttctattgcttgtgatacaatgggatgattaccaagaatctaactatgaacatctcatacaaatggaaaatactggagtcggacactggacaatagaaaaacattgacggggtgttgtgaattcggagatccattcaaaacgcagttgaaccatgtgtccgctactctcggaggaaggccttgcgcgaaatctttaccgataagcgcattaattggagatgaagtccttcttttgtacccaactaaccgtactctagcttaattaatccaacacgtacgcataaccagcgattgcataaagaagagata

SEQ ID NO: 19856 - DNA, 322 bp, Glycine max
  Clone ID: PAT_MRT3847_117935C.1
aaaatgcggatggggctctagccaacagatactttcattccctttttttttcatggactgtccaatctatgggcgtgacattatcaaactggctgcatccccataactcctatctacatctgcccctatctcctttcttatataccttatggctctaaatcatatatttcgtcctctctatgttggatataccaaatgacctctcctcaatcctacatacaaagcatttaatatccactccctaattaacaccattaatatatccatactaaccccatctccaacaacatacatttttgcatttttagctctatttaaaacc

SEQ ID NO: 19857 - DNA, 365 bp, Glycine max
  Clone ID: PAT_MRT3847_117936C.1
catctgatctggtacctatatatgctttctgaatgcaccttaaggatacaagggaagaaaactcccataggtctctaaccagaaacgctaaccataaaattggataactaattgatgcactatactctagcataagaccctagcctgacctgacttgatgaggcatgctaaaacattaccactgtctaccctgacctctaacctttaacttaaactgcaaagactgcacgaacactgctcataactgacctaactatatacacaatggtacctctattaaccggtaataccaaagagacattgatcacacaggatactaattgtgatgcagaatcatctactagaggtctaaattctgcattatc

SEQ ID NO: 19858 - DNA, 446 bp, Glycine max
  Clone ID: PAT_MRT3847_117937C.1
gacgacagaagggataattaaatacataaatgtagctaaactgtaatttttcaacgtaatatttgtaattaaatatttttattttcacaattgaaaaacaattcataagctaaaaattatatttgtataaaacacaatacgtaaattgaacacaaaatatgccaaattcaaaggttcatatacagatctttacataccaaagaagtacagtgtttttttttacataagtagaaatacagtgctatgtgcccctgttaaatcccaagagccaaaactaattaaatacctgagattataggacttgtaacattactctaattaataaacattacgattaacaatgtggaatgattaccactatggcaatggcccaccgcccaagatattaggagaaatatgcatctggtatgaaggatttaagtgtcggcaaaatggttttttatact

SEQ ID NO: 19859 - DNA, 280 bp, Glycine max
  Clone ID: PAT_MRT3847_117938C.1
agcacaacatgacgtgtacgattctatgtccgacacgagcctatttcattcacagtaacttctaacgacgattagctactattcattgctatttccagattctgattcttgacgtcagactatggaatgggaacccatgtgatgtgacatcaagactgcttggtagatcgtattatggatcttacaactgtatcttcctgccgcacgagttccggcacttactgtaattattatgactacgactacgacagctaccatgttgtctcttgctggtggctct

SEQ ID NO: 19860 - DNA, 401 bp, Glycine max
  Clone ID: PAT_MRT3847_117939C.1
ctgttgccaacttctataagacttcggcttcgatggctggaacacctgagcatcttgggatattgattagtgagaaactgaggcacccaagtacatggctcttgttgctgtcattatggctgctgtccacatggtttggcacattcatactgtgtggcatgttgagcctctcaacaaagtttcccttcttccatagctaccctgagttgtctcttcttaaacagcaaaaagtgatgcagtcttggtctctcagttaccttcgacctcttaggatgttgttcagaactatcaagcttctcactctccttgtcttcttcactcagctagatgaagcagaagacaacccatcatggaaggcaattaactattgtggacctgatccagagttcaaatcacagttg

SEQ ID NO: 19861 - DNA, 2829 bp, Glycine max
  Clone ID: PAT_MRT3847_11793C.1
gggcggacgcgtgggcggacgcgtgtttcgtgttgcgaataaagcgaagataggaaaagcgcggcaaaggatgtgtgtgcttgcttcattgtttgcgttgtggagtcggtgatcgaagttgttgaatgctatattcgtttacgaaatgaaggaggacgcggagaaagataaaggcaaagacaacaataagatttggggagctattctcttcggcttcattggcgccaccgtcactacctttgcggtcggtcagctgcggaggagtgctgaatggttctatactcagttatcgaggacacagtcatcgtggaaaggagagaagtggtggttctttccgatcagctattcatgaagaggcatggaggaggcacaataagcgcatgaattcggctcgagaaagatagctagctaggttcaatacaattatatagagtaatctcaagggggtttagtccagttggttgatctgaagagtgtgtaaattgttgtaaatctcctgatacctgtctttgattcttatattttaggaagaaaaaaaaaaaaaactagagcaatgaatattttattttaagcgatgcctagccaagttaatctatttgctaaggaagccggaggagaaaaatatgattcgttttttaagccaaaccaatcaaaactttattacaaacttctttattgtacatccatgtccttctcttcacggaggacagaatcataccataactttatttcaacttaaactagtattaggaattaattgaagtaaaactgtataaaaccgcaatatcaaggttttaatattttacttattaggcaccttaatataccccacatgtgaggaattggcccctctagtaagggtttgaagatcataagctacccaacaccttgaattctccttgtggtagaaataacccacacacttgcaatccttggtgcatttgtttccacaagtactctcactcactctatcccctgtagtgtatttgctcatgtaatgctcaactccttcaattttgtagtagtggaaatcactagccttgcatgatgtcacagccttggcagtgcaattgttgctccaaccaagtagtccattttccaatggacaagccacacattggttatcttcacacaacccaaatttcccacatctctcaggcaattggcactcactctcatcagaatctctatcaaatagagtgtaggtcacttgccatacaccatcatggcagcccatacacgctaaagcttagagtgaaggcatttggggtggtgttgtagaaaccaacttggaatggagagttgaagatgcttatcattctgtaatctgcaccgtactcaacgatgtagggtccaagttcacctgagttctcaaatttgaaggtttcgttttgaggaacaattgcatgcgcaatgatggtgaaggacgagaagaagaataaggttagaagggagatttttggttgaggcacagaagccattgttgttgtaaataaaatggatatgatatcccccactgacgttttcctgctgtgatagcctactaaccaacttggatggcccttttgctctaagatattgaccgaccaaaagggtatctgtggggtgatcaaaactctgccaaacgaacccgccttgtgcatcaagaaggaccatgttaccatttgaaagaagcctgaaggccacaacacccttgttggcagtgttagtttgccatgcaattctgccatcagcatctgccaactatcaagccttgtccctttgaatggcctactctcaacaacaaccttcgtgaagtttggtggtgtttgcacccaagaaaactaaaatatgtgagtccaggaagtgcaacaatggatgagatcaagagggcttataggtcaatggctcttcagtaccaccctgatgtgtgccatgatccttccatgaaggaggagtcaacgaggatgtttgttcagctaaatgcagcttacgagaccttgtccaatccaaggcttagagaacagtatgatagtgaattgggtttgagaagcgaagtgatgagtgttagtagtgatcatgagaggtggagaagtgtgagtgttagtagtgaacatgagagatgggaaagtaggtttcaggagcaagtgattgagttgaagacaaggtctcgtagacgtatgggacaaaagggtggatcatcgggtagcagaatgagggcaccaaacatgagagacaggaattaattttctttgagtcatgtatttttgttgatatagattgattctttcatgtatttaactatataaactctacatagccaattcagtttttctacacaaaaaaaaaaaaaataaataaagaaataccatatttaccatacattacttgaggaactacaagatagctgtgaatcatatcgaagaaaaaaataagtcttgcaaaggatggaagtgtgggtctttcattgttcatattatggcgcggccgatagatggtgcattgcgatatttcaatgagcaatctgaatgtgagcaaaatgaaaggtgtgagctttgacaatcgtatgctgtacgaagctgttatctttgggtgctgaggcccaccctccgtgacttattgaatcagtaagcttactgaggagtggggaatcggatctatagcatgttagcagcggttacctgcggatgcagcgcaggaagagagacgtgcgttatggcccgtctgcgcttttggaggattgtctgtttggctacgcaggtgtcaagggcactgccatcgtggttagaccgacgaggtggcgggcgacgcagataaagataaaggcaatgacaacaataagatttgggg

SEQ ID NO: 19862 - DNA, 444 bp, Glycine max
  Clone ID: PAT_MRT3847_117940C.1
cttcttttgtgtctttgactctctgacacatttggggccttggagagtgcgctcttgcctgagggtatggcgatggacgttgaggttgctgagcgtggctccttctctgggaaggactaccaggaccctccaccagcaccactcattgatgctgaggagctcacaaagtggtcctttgacagggctcttattgctgagtccattgccactttgctcttcctctacattactgcgctcacagttatagggtacaagcaccatacggatcatgctgatgcgtgtggtggggttggcattcttggcattgcatgggcctttggtggcatgatcttcatccttgtctactgcactgctgggatctcaggaagtcacattaagccagcacagacattggggctgagttcctctcacacggtgtctttgatccgagccatcatgtacatg

SEQ ID NO: 19863 - DNA, 412 bp, Glycine max
  Clone ID: PAT_MRT3847_117941C.1
gggagaaaataaccttatttcttggtctgcaaaacatcatggcagaagcgagtttctttgggggagtcatgggtaacatcatctcaattctcatgtttctttctcctgtacctacgttttggaaaataaagaagcacggatccaccgaagatttctcaagccttccttatatttgcacattgcttaattgctccctctggacttactatggaatcataaaagctggagagtaccttgtggccactgttaatggctttggcattctcatggagacaatctacattattctatttctcatatatgcaccaaaagggataaggggtaggactgctattttggctttgattttggatgtggtaatcttgacggcaataataattattactcaattagcattagaaggagagactcg

SEQ ID NO: 19864 - DNA, 468 bp, Glycine max
  Clone ID: PAT_MRT3847_117942C.1
cactgatacactaatgacattcaactcggtcaccaaaatcaacttcaaacttcctcaatcaaccatggttccgagaacggaatccaaaacagactggcatttccatgcacaaatggaaaattactgactccactgacaggaacgctagcacagatacactcgttaacataggaaccatagacgctagacaagctacatatccaatgcgtctctgcaagaccaaagacaggctataactgatagggaggacggcttccaaaccagggggactgttgaacgaactctggagggcacaacttggaaagaggtgaacacgagttatggccacggtgaggtggaaagtatccaacacatggtcgtgactgcccggtctgagaccttcataaaagggattatgacgaggaagtgtctagaaataggcactggcaagcggaagcgcctcgcacatggtacagggaaaatgcgttc

SEQ ID NO: 19865 - DNA, 1269 bp, Glycine max
  unsure (1)..(1269): unsure at all n locations
  Clone ID: PAT_MRT3847_117943C.1
acgaggtttactttgtggggcatattgcaactattgagaatgtaccctggtaaagtgcctgatttggaactattgtttgattgtgatgataggcccgttgtgtcaaaggagagatttaaaggcccaaatgctcccaccccacccttgtttaggtattgctcggatcagtggagcttggatattgtgttccctgattggtccttttggggatgggctgagataaatataaagccatggaaacatgtcctaaaagaaatcaaagaagggaacgaaaagaccaagtggaaggacagagtaccatacgcctattggaagggtaaccctcttgttagtccaactaggaaagaccttatgaagtgcaatgtcacagaaaaagatgactggaacactcacctatacatacaggattgggatcaagaatccagtcaagggtacaagaaatccaacttaggagaccaatgcacccataggtataaaatatacgtagaaggatgggcttggtccgtaagtgaaaagtacattttggcatgcgattctacgactctatatgttaggtctcggttccatgatttttttgtccgaggcatggtgccactagagcactattggccaattagagacaacagcaagtgcaaatctcttaagtttgcagtggaatggggcaacaacaacactgataaggcacaagcaataggggaagctggtagcaaattcattcatgaggacatggacatggactacgtatatgattacatgtttcatctacttaatgagtatgcaaaacttcaaaggttcaaaccaactatacctcaaaatgctgtggagtattgccccgaaacaatggcatgtggtgtagatggtagacaaaacagcagcatggaggactcaatggtgaagtctcctagtgattcaaatccatgcactcttcctcctccatatgagcctataaacctacaagactttctagagaagaaagctagttcaataaggcaggtagaaacttgggaagaccaatactgggagaaagaaaaagggggacaataatagtattgtcctgatgaagattttgtcatgtcttcttttatttcgtgttgtgacaaattaaatggcccttttattcatacatacccctatcccccccaatacacacacatgtggtgttgtctcttacacttacattcatctttatcatcagttcacattcttcttctcttgattccttcctggatctaaagcttgtttaattttgttaattataannnnccccag

SEQ ID NO: 19866 - DNA, 537 bp, Glycine max
  unsure (1)..(537): unsure at all n locations
  Clone ID: PAT_MRT3847_117944C.1
aaattttttttttttttttttttttttttttttttttttttttttttttttttttttttttttttttttttgtttaaaaattaaaatccttgtttattattnaggagtaactganagaaagaaccatgctattgactgtaaaaagaaaaaagatatgcaggttcttttaaccaactccaaccaattaaccaagtaaaccaaccatcaagaatacataggttaactaactaatcaacatcatgaaacctggggccaccttcaatttttcaatacaatcgaagtacgtttctggcgatagaatgtgcctggttcgaccttcctttcccggacccgtttctcctgccacccaagtagagcctcaagagaccattgttatcgatgctgttcggcgaggaatacctggcactacggttcctctccaacccaacaaactcatccctccccttccttccaccaagcccaagtccaagttcattcccttgcacatcactcttcctcatactcacattcccaaaccctccaccaccaccacctatc

SEQ ID NO: 19867 - DNA, 431 bp, Glycine max
  Clone ID: PAT_MRT3847_117945C.1
ctctttctttatttatttgggttgaaagaaagaagaaaaagcgttaatatgaacaagaattttacactgaatccattccaaagctaaaaccctacttggctgtttctctctctgtctctctaacgggaaccaaacatggcttccttccctcctcctggttcactcactctctgcgaagtcaatcgtgacctaatcaccgtcgacgccctgtccgacgatcgagccaaccaaacctacggaaaaatcctcggattggtgttcagtcccgtcccgtttcacaatctggagaacgacgcttccgatcaggaaggtccaacagcgacggagaccgctgccggagaaagcgttcacaggaaatgtccggtggcactcttgcaagggcttgttaacaactatctcggacgcctcttttaccctaacgatgtgcattt

SEQ ID NO: 19868 - DNA, 2579 bp, Glycine max
  Clone ID: PAT_MRT3847_117946C.1
ccattctttgtcttttcttcccccctttttcccccatttcagtccgcccacactgcattcctctgtcaaaaccctagattttcaaatctagggttttgttttcttaacttgttacggttatggttatggttctggttcaggaactgaactcccacccttgctaatttcacttttctcttctcaatcttagcctctggtttttctacattttccctccctcgctaacctctgccatggggttttcaatgctgattctttttcacctctaaaaccacttcctctcttattttcttcaacttttgggcattcacaactcatcttctttgtggtgtttctaggtaaacgagacccttgtacgtgcattcacttgacaaaatctccgagcttgttacttgaatatctggagctagcttctgggctttagatcctcttctttcttctttgcattagggttaaagatctattttttccatcattgtgaaagctatttgcttttgactagtagaagggtacctagctaaacccctgtttttacatcttcactagtttcatagtttaagaagttagtagcaccagtgaaagggtttgaagttgaggaggaaaaattatcacaattgacaaacctgttagtaaatgcatggatgggagagaaggcatggcatttcctggtggctctgctccatattacatgcagcatagagtagggatcggagggtctgcctctgggttcgaaccagcccctgggttcatacctttgtcaaacactggcattcaagctgagtcaaatgctaggggtggtcagggtcagggtggtggttctgtagggtctagttccccattttcagtggagccacctcagggtcataccaattttaaccatggcattgggattggggcaccttcaagtgagcctgtgaagaaaaaaagagggagaccccgtaaatatggtcctgatggagcagtttctttgagactgtctccaatgtctgcccctgcaaactccactccggatgcaagtgaaaccaccccttctcagaaaaaggctagagggcgccctcctggctctggaaggaagcaacagctagctgctttaggtgaatggatgaatagttcagcagggttggccttttcacctcatgttatcactattggagttggggaggacattgtggcaaaattattgtcattatcacagcagagaccaagggctctgtgtatcatgtcgggcactgggacagtttcttcagtcactctgcgccagcctgcttctaccaatgccagtgtaacttttgagggacgattccaaatactatgcttgtctggttcttacttggttgccgaagacggtggaccctccaatagaactggtggcattagtgtttcgctctctagccctgatggtcatgttattggtggtggtgttgctgtgcttattgctggaggccccgtgcaggtgatgttgtgcagttttgtttatggtggctcaaagaccatgtctaaactagcaaccactatcaaagatgaaagttctgagccacctcctcagcataacgataagttagcttctccagccagtgctcctgctccccccggtcaaaacttcctccctctttctgcaacaaacctttggcctggatcacgaccagcagagctgaaaagcacacacatgcatactggcatcgacttaactcatgggtgagatattatttcggaagaaacatttgcaaatttgtaaataactgttgtagtaaatgagcttgagtttgtgagcattgtggctgctttgcactaacatatgttataacaaatgaattattcggggttaagtgatgattcttggcataaccaaaaaatgtctgttgaaatgatcatatgacaaacttcattgggatgcatattgtcccgcgttgaatttagtgctttttgggaccccgcttcttgtgacagcaggtttcaaatattatgcttgtctggttcatacttggttgctgaagaaggtggacctcacaatagaacaggtggcatgagtgtttccctttctagtcctgatggtcatattattggtggtggtgttactaggcttgttgcttcaagcccagtgcaggtggtagcatgcagtttcgtatatgggggctccaagccaaagactaaagaagtgaccactaccactactactacaaaagatagcagttcagagcctcagagtagtgataagttagcgtctccagccagtgctcctccacctaatcaaaactacacctcttcttctccgtccccaggcatttggcctgcatcgtcaaggccagtagaggttaaaagtgcacatccacatactggtattgacttgacgcgtgggtgaagaccatttattattctataagagactttgtagttttgtatagagatctcttgtaaatgaaccgaatttgtgagcattgtgactcttcgtatctatcactgttgatgggtgacaagttcgcgctaacctatgctgtaaccaatggatttcagggttaattaacagtcttgactttgcaaaaaatgtttgatgaaaaaatgaaaggcaaaatgtgaagatt

SEQ ID NO: 19869 - DNA, 657 bp, Glycine max
  Clone ID: PAT_MRT3847_117947C.1
ctggtggcattagtgtttcgctctctagccataatggtcatgttattggtggtggtgttgctgtgcttattgctggaggccccgtgcaggtgatgttgtgcagttttgtttatggtggctccaagaccaagtctaaactaggaaccactatcaaagatgaaagttctgagccacctcctcagcataacgataagttagcttctccagccagtgctcctgctccccccggtcaaaactacctccctctttctgcaacaaacctttggcctggatcacgaccagcagagctgaaaagcacacacatgcatactggcatcgacttgactcgcggttgagagtttatttcggaagagagacattgcagatttgtatataactgttgttgtaaatgaacttgagtttgtgagcattgtggctgcttgttatccccccacgttgctgggtaacaggtttgcactaatacatgctgaaacaaatgaattgtttgattcgggtttaagtgatgattcttggcatatcccaaaaatgtctgttgaaatgatcatatgacaaacttcattgggatgcatattgtcctgcgttgaatttagtgaattctgggatccctctttgcggtccaaaatgtttaacgttgaaacacgctactatttgccttgc

SEQ ID NO: 19870 - DNA, 1183 bp, Glycine max
  Clone ID: PAT_MRT3847_117948C.1
cggacgcgtgggtctctcttgggcattcctccgaacaaatcttccccgctgttatcggtcttcaacaatatgctcctctcgttgcttcttagagttgggtttgcgtcgttgtgaggtttaacgagacgatccagggcgctgtttctggtcttcgttctcttctcatttagctatgtccgctgaacaaatttttccctgctcatatcttgtagcatttccgtgttgtcgccgctcgtggccgctctcgcgagatcgaaatacaagatggagtttcctctcgtagcctcgcttttgacccccaattgatgatcaggactcataaaacaggccagaaatatctgtgtaaaaatcctaaagtggctaaggtaaagagtggaaagcctgttatgcaacacaatttttgcagcatagattgtgagaaactgaggaaaaggattaagcagaagacaccagatgaactgctagaagtattaaagggtccatgctttgtcagacaagaaggttggtggtcatatgaattttgctatcaaaagaagttgaggcaactacatctggaagatgataaggttgtccaggagtttgtcttgggagtgtatgatccggaggctacagctgcatttaacgaaaatctgtccgacatttctacattgaaggatccccggtcaaaagatgcatctcaaaggtatcatgctcatcaatatactaatggcaccgtatgtgatcttacaaataagccacgagagaccgaggtgaggtttgtatgctctgaaccgagagcaatgattagttcaatcacagagatttccacttgcaagtatgcacttacagtgcaatgtccgcagctatgcaagcacccattatttcaagaggagagaccagtatggcacaccatcgactgtaatgtgcttccaaaagatcacgtggatgccaaagtgagacgacaaaacgaaaatacggagattgttatagtgaaagacttcgaaaatagtgacttagagtcagaacaatgatgtaaatatacataatgagaatagctaaagttgccatcatgtaatttctacggtgaaagaaaacatgtatcttctactaatcctctttcctgacagtggttagccacagtgctttttaactttagaaagatcagatttatataattcatcttgaagaagtccttgaagctcac

SEQ ID NO: 19871 - DNA, 531 bp, Glycine max
  Clone ID: PAT_MRT3847_117949C.1
aagatccccggtcaaaagatgcatctcaagggtatcatgctcatcaatatactaacggcaccgtatgtgatcttacaaataagccacgagagaccaaggtgaggtttgtatgctccgaacctagaccaatgattagttcaatcacagagatttccacttgcaagtatgcacttacagtgcaatgtccatcactatgcaagcacccattgtttcaagaggagagaccagtatggcacatcatcgactgtaatgtgcttccaaaggatcacgtgggtgccaaagtgagacaagaaaatgaaaacccggagattgttatggtcccagacttagaaaatagtgacttagtcagaacactgatgtaaatatacataatgacaatgggaaaaaagcaatagcgaaagttgccagcatgtaatttctacagcgaaagaaaacatgtattttctactaatcctctttccagacagtggttaaccacagtgctttttaactttagaaagatcagtttatatagttcatcttgaagaaaaa

SEQ ID NO: 19872 - DNA, 1499 bp, Glycine max
  Clone ID: PAT_MRT3847_11794C.1
aagccaaaccaatcaaaactttattacaaacttctttattgtacatccatgtccttctcttcacggaggacagaatcataccataactttatttcaacttaaactagtattaggaattaattgaagtaaaactgtataaaaccgcaatatcaaggttttaatattttacttattaggcaccttaatataccccacatgtgaggaattggcccctctagtaagggtttgaagatcataagctacccaacacctggtagaaataacccacagcatttgtctccacaagtactctcactcactctatcccctgtagtgtatttgctcatgtaatgctcaactccttcaattttgtagtagtggaaatcactagccttgcatgatgtcacagccttggcagtgcaattgttgctccaaccaagtagtccattttccaatggacaagccacacattggttatcttcacacaacccaaatttcccacatctctcaggcaattggcactcactctcatcagaatctctatcaaatagagtgtaggtcacttgccatacaccatcacgcacatcaaggaagtaagtgtagaacctaatgttgccatcaattccaagcctgagatatgttatggtgctattgttcactggcctgccaaggattctattgccaccagatgaagaattggccacatggtaatcaaatccaagttcaaaagtttctggatcagatgtgaaggtgacattttccaaggaccctcgttgaatggtgaaccaatcagaagaaaaccaatagagaattggcttaggagaattcttgctcttgtagtacaaggctaaccctttaggctccaagaccaaactataaggcccatcaacattttccttctctgagagcctactaaccaacttggatggcccttttgctctaagatattgaccgaccaaaagggtatctgtggggtgatcaaaactctgccaaacgaacccgccttgtgcatcaagaaggaccatgttaccatttgaaagaagcctgaaggccacaacacccttgttggcagtgttagtttgccatgcaattctgccatcagcatctgccaacacaaggttcccatcagtgccaagtgaaaaagtggcattttctccaactgggttggccctgttggcctcccaaacccaacgaaatagctgctccgagcgttggagccctacacgcaaagctagagtgaaggcatttggggtggtgttgtagaaaccaacttggaatggagagttgaagatgcttatcattctgtaatctgcaccgtactcaacgatgtagggtccaagttcacctgagttctcaaatttgaaggtttcgttttgaggaacaattgcatgcgcaatgatggtgaaggaagagaagaagaataaggttagaagggagatttttggttgaggcacagaagccattgttgttgtaaataaaatggacgggttgtccccttgtgtcggcttcttgcagccgta

SEQ ID NO: 19873 - DNA, 247 bp, Glycine max
  Clone ID: PAT_MRT3847_117950C.1
cgtctcgtcatcgagtcttcgtgtgtcctcaactgcgacgtttctgcgctcaaagacaaggactaaattgttgatcctctcttagtacctggtcttcaggagcttcggcaccgtgtcaccattttcgcggatcgcgcgggctatccagagggtcccgagtgatgtagattatcagcatgttgaggtcgaacacgtcccgtcatgctagctcaaacctcccgcagatcgtgtttctcaagacatggga

SEQ ID NO: 19874 - DNA, 448 bp, Glycine max
  Clone ID: PAT_MRT3847_117951C.1
caccgtggaacaggacatggttctctatgttgcctggctgtgccagctgccagcgcctctgcaatgaacatgccctgccactgcgcggaggtgcaagggttgtacttgtctggcaccggcctgacaactatgatgggccacgcggctgaacccctaccttacccctgaggcagaccctggcagcccgctggcggcagaaccctactacccctggtgaggacagaatagggccatgtaccagccgctgtagcctcagtggtgccagtgacaaatgatgatgatggacgtgcagttccacacccagccgctgcatatcatgatgcttcttgaacgtgacgctgccgccagcagtatgatgtactagcctgactgctgctgctactcatgatctgccagctcagcgtgtcatgttggttcggaccttggtgtacactgcaggcttatgttt

SEQ ID NO: 19875 - DNA, 212 bp, Glycine max
  Clone ID: PAT_MRT3847_117952C.1
acgaggccaattagaatgtatctaggtccaatgtaaaaaaaaaaaaaaaaaaaaaaaaaaaaatgagaatctgcaccgacactcacatttatttttatgttttccgccgaggacgatcatgtgatttgaaccgtatccgaggaaaagggaccctcacttgatccaacgtcattttaagggatccggcgcgtttagacttatctccgcataat

SEQ ID NO: 19876 - DNA, 295 bp, Glycine max
  Clone ID: PAT_MRT3847_117953C.1
cttaaaacgtggttaatacacttcaatttttgtgcacaagggcaaaagcgggaaaaatcccaagccaaacaaaaaaaagggggggggggccaaaacccaaaggaaaaaaatccgcggggccatcaaggcaaaggaaaaagtccccatcaccaaacaattggttataagtttggaaaaacctatcacaaaggcgaaaaaaaaaggaaaaccttaaattctttttggggggaaaaaaggaaaagaaacaaaaaagtggcggggggcccacccgcccccccacaaaaaaagggggggg

SEQ ID NO: 19877 - DNA, 610 bp, Glycine max
  Clone ID: PAT_MRT3847_117954C.1
aaaacttaaaaaaatgtcatgcaccaatccttaattatgtacgtctcgtgattcggtgaaagaggctttattgggagtttattttttaaacccgccaaaaatctgagcaacactcaatattttgtaattatttctttttttagcacgctttgtgcttaaattaaagttatattcttcgtgaataaaaatgtttttgcttaaaaaatatgcagtgttgaatttaatttaaaatccatgtgcataaaaaaaaaattatctcctaaattttcttcctgatggctgagcatatcccgacaggaagtaaactaaattataaccaagtttaccctaacatataatatagggtatagtgtaaataaattcaagcagcctttgggaataaaatatttactgtcgaattttatactttcaatcaagtgaaaagttttatagtaagtttgactattaaggaagtaattataaaataaaataaatttactattcattaatttgtgatatattgcacggcaaccgtcaaaattcttatacatctttaattatgggacggcttttctatacccaatttttcagtggatacttcacgattgagtgatgacaatgcttgagttgt

SEQ ID NO: 19878 - DNA, 289 bp, Glycine max
  Clone ID: PAT_MRT3847_117955C.1
ttaaatgcaactgaaccaaataacatcctgacattgctatgcggctaagcagcatatcagacctgcagttcatttccaacaagtctgtctctcataattcgctccattgatctttcacttgaaggccaaacaacgcatgctggaatagcgaattgctaagccgtgcttctatgtgcacatatgctctaccctctactgcgagcagacagtctcattctatagaataccgacacccacaccatggggggaaaagtctatgagtgcgaatatggcatgcgcctgctgaggg

SEQ ID NO: 19879 - DNA, 193 bp, Glycine max
  Clone ID: PAT_MRT3847_117956C.1
ttggatggatttcagcgatggcaagtattgctaccgataggccaaggactgtgctcttctccgggaagactacctcgagtgcttccaccatttcgaggaatataaatgactaaacccactttactaagatgagcaacgcaaactatgggctgcttcccacaaaggacaggaggatggggttaatgaacatcat

SEQ ID NO: 19880 - DNA, 623 bp, Glycine max
  Clone ID: PAT_MRT3847_117957C.1
ggctcgagcaaaattttccctggaagctcagttttgtagatgcaagacttgggttgcttttgcaaactccgtttgccaacttaagtttgcatacttttatccaaacatgcactaagtctatatttgcatttctgtttgggactttgggttactccaaactcagtttggagagtaaactcagtttgacatgtttggttatcctcaaaagtatgtttgcacattaaaattttgcctggaaactcagttctgtagaagcaaaacttgggttgcttttacaaactaagtttgcaaacgttaatccaaacatgcactaacttgtttcttggttgtccaatattgtgatgttacgctgcacttagaagacctttgctcacaatcttaataacatctctgatcagtgtggctacagaatataggtatttctgaaaaaataagcataacttaaatttccgtgctggcaaaattgattctcagatccatttctacttaaagtaggtagcattgaaaacatcttatatatcgattaatacctttgatagtgtagggtgtctacttattaaattataaatgttagagaatttagacgaagatatttattcttgtgagaccattggtttgcaaat

SEQ ID NO: 19881 - DNA, 464 bp, Glycine max
  Clone ID: PAT_MRT3847_117958C.1
cacaagactgctgcaacggtacttgggaacactgccagctgacccgtgattacatcaggatactcttaaactcaagacttatacttgacaccaccactcctagagggtcgctagatgctggacacacctagtttctgcttagcaggataatcatgaagagcagaaagctcatcttgtgatcatcagagagactgaaccactagagttttctcacgtgacatacgatgctgatgctcagataatgaaagatgtttctcaagccgcatggttgcgaaaagcagtgattcctgccctatctcaaactgttaaaatgaatactgtgggtacgtacatggatgctcccgaatcttacgataatatggacggaccgtatgtcgaagagggctggggtgaccaaacatgcagggtgtgcatgacggacactattggagaggctgagcagctggacatggctggcacacatg

SEQ ID NO: 19882 - DNA, 477 bp, Glycine max
  Clone ID: PAT_MRT3847_117959C.1
ctcgagccgaatcggctcgagacggctgcgagaagacgacagaagggcaactaaagtaattagccccataatcagcaagcaaggtagttcacaatgctaaacctcagattttaaaagaaatactaactcagtcaattttgtttagatttcttgtcatttcttatattggagtaaaattatgtaagactttcttatgacggatatgacagtaagagatcacaaaaaaatattaagaaattcatataaaaaacttgcactacatatgttgttaaatgcttcttttagtgcattctttcttaggctcttaaatgcttcttttattgcattcttggttaggtttcaatcaatcaaattgactggtgtgcttgctaagttttggccccatttataccctctgttgtacccttctgtttctcttgctaacttcaacaaaatgatggtttagaattaaactcaagttcttaaataattaatagg

SEQ ID NO: 19883 - DNA, 1021 bp, Glycine max
  Clone ID: PAT_MRT3847_11795C.1
gacgagtggggagagtttgtaaattgcgacttccaatggcgagttgcgaataaagcgaagatagaaaaagtgcggcaaaggatgcgtgtgcttgcttcattgtttgcgttgtgaagtaggtgatcgaagtcgttgaatgctatattcgtttacgaaatgaaggaggacgcggagaaagataaaggcaaagacaacaataggatttggggagctattctcttcggcttaattggcgccaccgtcactaccccagcgtcccccacgcgtccgaatttgttttactcaatcgatcttaggttttgttcgagaagatttcagttatgaatttttttattttatttaaaatttagcgtttagaatattacattgcttccgaatttgtaggtcggtcagctgcggaggagtgttgaatggttctatactcaggtacggaaagtgaatttcaaatttgttacgaactaaaggcattgaaaactgaaatctaatagtgatcgaattagtaattcacgtttttttaatgttattcaatgaaaatatgcgtttcgtcgtgtgttattaggatgatttgcgtgtgtgagatctgaagagtatatgtttttctcttctcggtcttcttgtaacagagagattcaattcatggtgaaactaactgtgtatggttttgattcattgaacacataaatcgttgttgtaactatcgaggacacagtcatcctggaaaggagagagaaatgcatcagtccgatccaactcacaggaagaggcctggaggaggcacaataagcgaatgtttctccagttaggttggccgatgtaagagtccaaagcaaaccgtatggatgctccgagagctggagccgtacacgcaaagctagagtgaaggcatttggggtggtgttgtagaatccaacttggaatggagagttgaatatgcttatcattctgtaatttgccccgtactcaacaatgtaaggtccaagctcacctgagttctcaacccacgcgtccgcgaacgcgtagg

SEQ ID NO: 19884 - DNA, 338 bp, Glycine max
  Clone ID: PAT_MRT3847_117960C.1
cttagagcgtactataatgcaatgtgccaatgtctcaatcctatactcctatgaaggggggggatgattgtacctagtgatatgagtcacaactaagattaagcctagacataatctggctacccatatttaaggaggatgaactttcctgtaggatatcaaagttacgcacgcaatctatataatgttcattctcaatcatactgaattgaaccatcaaacgattcagcagatactacatataacgggtgactctcacgataagcgtccctagcagagagtaacgtctctcaatcacattacacaagctactcaatcacacccattgtacaagactt

SEQ ID NO: 19885 - DNA, 320 bp, Glycine max
  unsure (1)..(320): unsure at all n locations
  Clone ID: PAT_MRT3847_117961C.1
gaaaaaccggggcgacgcacgcgtccgctctctcagaatttctatctatctcttgttttaatttcaacaacggttactccttttgcggggtgagtttcaatcacgccgtcgtcatntctaccgcatcgcaacccaaggccaagaaaacggcgtcgtccaagaagcccctctcccaccctcccttcgccgtgatgatagcacatgccattgcgagtctgaaagagagaaccgtgtcgagccaatactcgaataccaaatacattgaagggtaacacaacgagttgcctgcaacctacaagaatcttgttctcgttcatctt

SEQ ID NO: 19886 - DNA, 256 bp, Glycine max
  Clone ID: PAT_MRT3847_117962C.1
caaccaagccttccgccacggcgtcgctttaatttttgaaaatggaaaagggccaccccctttgaattggccagtttaataatagaccgtctgaatggggacatattttatttaaaaatggggctcttggtttggcttaaactggtggatattgctggtctgggagccctcctctacatttatcagctagagggggatctattgattgcaatcggaattgtggatggggctgatcgcttctacgcatgcattggcg

SEQ ID NO: 19887 - DNA, 550 bp, Glycine max
  Clone ID: PAT_MRT3847_117963C.1
agggaacgctcattctggtgtggagttggaaatatactaacgcgcaagatagtattaccagcaacctcaaaaaaaaactgtttttcatttatttaattaactagcactgtttccaatttctgtcaaggatgaaaaattggaccacctacatttgtttaaaatccatctatgaacctaatgattgcttttcccagattaaggggcttcttaccatcccaatagggtgaaacaagtatccaaactaaagggacggttatcatgccaaaccactagctgaattctagcttgtgctgaaaaagaatctggatgataaccggtatatagggttactttgttattatccatatgaaaaagtgaaggtgcgtgttctaaaaccgggaagcgacccgcttttgaaccaaataacggctaaatatggatgccaaactgtcagaatcccaagatcggggatacttggccgaatgggaaacaaccgagaggtaacgacattaacctttgccatcattagaagggactcttcaccctataactaaaacatccaacaagtttg

SEQ ID NO: 19888 - DNA, 194 bp, Glycine max
  Clone ID: PAT_MRT3847_117964C.1
agcataaatgtgggttattaaccaaaggaagaccgagggcgttataaacaaaaagctgcactcaactcgtctttgactagaataaagatattccgattctaactcctcaagggaataggttacaaaaaacgccactggcattcacataaaaatgcatgaaacgcggcgcccacatttggtccaactcgggagac

SEQ ID NO: 19889 - DNA, 236 bp, Glycine max
  Clone ID: PAT_MRT3847_117965C.1
tcccacccatcctctcatcaaaattacaaatattctacttatctacaacaataatatacatgatcacatatacacaatcatcattcccaacactaactactagatctccaaaattaaataatataataaaaaaaaatgtcaattattaaatttcaccacaatcttcatctgccaattgctttactaccatagacaatactaacctatttaatcaataaccgatcatccaaaaataa

SEQ ID NO: 19890 - DNA, 361 bp, Glycine max
  Clone ID: PAT_MRT3847_117966C.1
accacacttacaaaaactctttctctttgtctttttcctaatctcacacccaaaccgcgtgtaaatctctggcgacgaacgtcttaattatatcaagatcatatattgctgcaatcattactggaaaaaatgcaccattaattcttactactacaactacatttattcatgccatcacttgaataactactactctagcttgttcaacaatccctttaatctccacgaactcattctccaatattaaaaacacattcttttttcaattattaacacttatccatctgttacttaatttttcacaaactctagcttctaaattcaaaaatacttcttcaacatcttcaaatacttccactat

SEQ ID NO: 19891 - DNA, 462 bp, Glycine max
  unsure (1)..(462): unsure at all n locations
  Clone ID: PAT_MRT3847_117967C.1
cttggtccaaattgctgnctatatatgcttttgccttccagaaaaagggaattctaggtccaaaatttgtatactttttggaattgagtaggtcttatttttggtgagtggctgtggagctggagcttcacctcccagatcagccttctttgggaccagttagaataacgttattgcctcaagggtccacatcagcaaggtttccggtggaagcttcaagactgttggtgtagaagagaagaaagagattgaagagacccagcataccgactaggacagatgcaagggtgttgcctatgatatctaagactaccatcaagacaatacacgaggaaagggtatggttgactcccttttccaagctctcaatgatgctggaacttactatgcattcatgagcttctacgagtacctgaccactggacttttgcagttcttggtccacaaaatggatggattcta

SEQ ID NO: 19892 - DNA, 464 bp, Glycine max
  Clone ID: PAT_MRT3847_117968C.1
ttcttgacgcgtgggcggacgcgtgggcggacgcgtgggcggacgcgtgggcggacgcgtgggcgcttcccctgctagccaaacccacgtgctctctctctcctttcttttcttttctgtcttctctcagggagaaaacccaacctacccgaaaacggtgtcgtttctcggaacgttttttagagagaaaaagagagaaagagagaaaagagagagagagagagttgtgttgcggtgatgcggaaacgttgatcccaaatgcacccgtacaaccggctaccaagcagcgggcactcgacgccgtcgccgccgccgtcgccgctccgctcgccgaggctccgccacgcagggaagtccaaggcacgggcggttctctccgagccgggggaaggcggtcggaccgccgcgcaacagctcagctgggatgtttcttttcggtcctccttcgacgacagggcgttttc

SEQ ID NO: 19893 - DNA, 674 bp, Glycine max
  Clone ID: PAT_MRT3847_117969C.1
ggaaagaatgaaatattttaatctgatttatgttgagggggtgatgaacatcgaaatgtatagaaaaccattaaaattcctggaacaagccaataaccatctcaacaatagaagaccgtccgtgctcatcccatcacgcatcctttcattcggaggtgagtttaattttgattaacaatcatgtgtagttacatcaattaaaaaactggatctaaattaactaattaaaaatgccaattatttccctcactcacggacctggaatgcatgaaggcctccttggtgttctttttggtcaatttgagcagcttggaccaaataccccttttcttactacccttgttgtttccattgacttccctatttatggcttggcttctcgaagcaaaggcaatggagttgctcttcttcaacccataattgaagctaaccatggtggaagaagcagaatccattacgagagaactatggcggcggtggccacgagacacgtaaggtcgaggaggaggaggaggacaagggagaggataagttggattgctgctgtcatagagcttcaagagtttgtctcttaagcatgagggacaaacaccgggtagttgcttgttatttgggtggtacttgcaccctcctcctactgcttctaacttcatttctaatggtacttgtttttc

SEQ ID NO: 19894 - DNA, 316 bp, Glycine max
  unsure (1)..(316): unsure at all n locations
  Clone ID: PAT_MRT3847_11796C.1
aaaaaaaaaaaaacatttaattaacaacaaaaaacacaaaaacaactgaaccgtttttatatcaaaancgccccccccacaccaacnnacaacaaaataattttcttcgacaccttaaacaatcaccacaacaatcccctgcacatacaaaactttacataccccaataatgctttcaagctccaccacatcatccattactctctcgacctcatcgacgaccaacttaacaatcctaaaaaatcaaacccgattctctaataaacacactttttactcctttatcctattcaaaactacaaaccatatctatatc

SEQ ID NO: 19895 - DNA, 339 bp, Glycine max
  Clone ID: PAT_MRT3847_117970C.1
ctttctcctaaaacatctccagggggttcttctttttctattacaacaacgtcgtccaaaaccatgaccatggccatggccacaatcctgctccgtgggacggtcttcgcggtttcatcggccctaaacatgtcaatatatttttacaaaaacgcccaccccgccacgtttggcaaagaccaggaacttatgtccatgtacaagcagtggctattaaagaacgcgaaggggtacaacgcgctctgaaaaaaggaaaaaagggtccaaatattcaaggacaacctgggatttattgacaaccacaacttccaaaaggaccgaacctacaagctcggattg

SEQ ID NO: 19896 - DNA, 453 bp, Glycine max
  Clone ID: PAT_MRT3847_117971C.1
tggttggaacctttgggctgatttatgtgcttgcatggtcgtgagaagatgatagaagggggaatcgagtcctcctaaaagcgactagctactgagccacgacgacgacgagcacctaaaattacgtcgcgactctcgtacgcgtatatgtctaacgttcttttaacgtagtcgcgaagacaccaggtcgaacctacgttatctagaccgcaagagtcgcacgcgtatatgtctatagttaggatagcgctgccgctccgatattaatgatcctcgtcataaattccgtaagcttagagacgatcagaaaaatcaacagtctctctaaacggatgaagttttcccaggtcccgcccggcacgccaggggagataaacaaaataagaaacaaaagtctagcggttagcaacccgtccccagtaaaaccgggttaccccaacaacttcaaccctt

SEQ ID NO: 19897 - DNA, 692 bp, Glycine max
  Clone ID: PAT_MRT3847_117972C.1
tggctctggaaccgttgggctgatttatgtgcttgcatggtcgtgagaagatgatggctggggaagctttgggcaagatgataggcttgcatggtcgtgaaaagatgatagaagggcatggtcgtgagaagatgatagaagggcatggttttgagaagatgatagaagggcatggtcgtgagaagatgatagaagggcatggtcgtgagaagatgatagaagggcatggtcgtgagaagatgatagaaggggatagtaaaaataaccaacaaagacgagcccgaagaataatacggcggcgtcaaaggcgcgcccgccgtcctccccttccgcgggggccatagtcgtatgtacggaatcgagtcctcctaaaagcgactagctactaagccacgacgacgacgagcacctaaaattacgtcgcgactctcgtacgcgtatatgtctaacgttcatctaacgtagtcgcgaagacaccacgtcgaacctacgttatctagaccgcaagagtcgcacgcgtatatgtctatagttaggatagcgctgccgctccgatattaatgatccctcgtcataaattccgtaagcctagagacgatcagaaaaatcaacagtccctctaaacggatgaagttttcccaggtcccgcccgccacgccaggggagataaacaaaataagaaacaaaagtct

SEQ ID NO: 19898 - DNA, 711 bp, Glycine max
  unsure (1)..(711): unsure at all n locations
  Clone ID: PAT_MRT3847_117973C.1
cacgcgtccgcgaaaacataatcataacagactaggtgccacctggcttcctttgaacttccacatacaaggatgtatatatcccacttagggcttcaaaacataaattttttggggtaaaaagtggtacacaccaaatgtacgcaaaccaactcaggtcattaattcaaagtaatagacattaatatgtacacgtgaaatgttaaaataaggttaaggttaacctgatcacaaccaccattactctatcgattcctgaagaatcaatagcagtttgtattggtttcccagcggttcctgaaggctcaccgtcatcattggaccggtattgatcccccacctgttataaaagatgaaagggtagtaaaacaagaaaaaataaaaacagaagagcaaatccaatcaacacccttaatggaagacaatatctgttttgtgcatagtgcagacaagtaacanattcattatctgttttatgcataatatgcttcatttatgttttctatcttcacttatgccatgccntcttctctgttccaaatccaaccaacaccctttaatttgtaaataaactagctaatgagcaaagtataatcagccacctttaggctgagactattaactattaattgtcacaatgatagctgaaaccatttcctaacttatacccttctttttgagtggaacattcatataaatctatgaagcacg

SEQ ID NO: 19899 - DNA, 354 bp, Glycine max
  Clone ID: PAT_MRT3847_117974C.1
ttccccacacactcacacttttatacttattaacacaaaaatttcattttcattttcacgacaaacggtttcctaattatatcacataggtttaaaacaaacataatcatcaatacattatgctaatcttctctatcaaaggattttaaaataaccatcattatagataaatcatgccacttcccataaagttttaaaacaaagataattgtttataaataatgcccctcacctataactcatcaaacatactcctaactctctccaaaaaaacccaatatcacatattcaagcaacttcctaatcaatctaatcaaatacattaatccttgcaattaaattaaaccatcccct

SEQ ID NO: 19900 - DNA, 262 bp, Glycine max
  Clone ID: PAT_MRT3847_117975C.1
agaagaattagatctcgatcaccagcgcgccacccgccagacgggctactgtagcggcgagcgggtctggcgtacgccgatgccaatggtgtgattgaatgttcagttccatactacctgcttgccgacatcaacttcagcactcgggttcagcaggcgccatgacacggcacgcggcgccggtgcgtgcgcggacgatgcggcgacgcccgggtcggcccgcatcgagacgcagcagaatgtcgttgtggcacgcggccat

SEQ ID NO: 19901 - DNA, 522 bp, Glycine max
  unsure (1)..(522): unsure at all n locations
  Clone ID: PAT_MRT3847_117976C.1
tttttaagttaccacttgccacctattagacttcatctgtatttagttaaaaaataacctttttaaaatagttacatataataatataaagtatttatattattttttaaatattttcatttcttcattttgataatataactacaatgacagtaatactaagaatatatttatcattacattatatgttaattaatatcacaagttttaaatgttttgttataaaaaatctatatcagacatttgtctaacttttatttatttattttgtgattttttacagtaatatttttaaaattattagaaaaaataaaacaaaaaacatttatttaaactaaataaacaatgagtactacaaaaatcccacgactagatataattttgattgttgggtacttaaatagattaaattttattataaaatggtgaaacgtattaataacnttatagattcttataataggttttttttatacaattcattatttgatttaaaataaataatgagaaattttataattt

SEQ ID NO: 19902 - DNA, 311 bp, Glycine max
  Clone ID: PAT_MRT3847_117977C.1
ccaccggaggaacctctattgtaatacacaataaccaacataccaactatttaccattacacacacccaatagacatagacaaaatccactaccctattgccactaactgcctgaatcactgcccaactaatgcgacctgctatcatataaaaccatccctaacagcaccattaaaatttatattttctacaacaaactctacaacataaatattatccaccccatctcaatatttccctcgactgattaaacacaaccatatactttaataaaacctctaattgaaaacccttactaactcaccaatatc

SEQ ID NO: 19903 - DNA, 273 bp, Glycine max
  Clone ID: PAT_MRT3847_117978C.1
ttcttttcttttctgcctaactgccataaaggaagaccagaaaattagaaaaagctaagaatccaaaattgctcagataagagagagcaaagggagcgccggagctgacgatagcccaaagttcaaacttagacgtgcgcccttattttaaatcaaaaccgtcaacctaggtactctaaataacgaggataaagtctggcccaccaagcaggtgaggagcagggataatgacctcaaccccaccgggggaggcgcgcgaactggaaccttgcc

SEQ ID NO: 19904 - DNA, 381 bp, Glycine max
  Clone ID: PAT_MRT3847_117979C.1
agctggcatagggcgaacccaaaactagagctgcctgtgataataacctaatactcggatgtcctattacaatcacggtattaatatactatagagacagtctaaaaccatggcacacgctatcactatgagaatcggaacgggaatactaggaaaactggacaacaaaaggagtcaactagcactcagtctcaacataggagacagtgcatctgacgacgatcacggaaacccagccatgtcttcactacgctggcgcaacttttacactaacacggcttactgcttaggtctacatagttacgtctgtaagacatttatgactggatgcctaattctttttccagatgctgtcaccttattcattacatggtggtatat

SEQ ID NO: 19905 - DNA, 504 bp, Glycine max
  Clone ID: PAT_MRT3847_11797C.1
aaccaatcaaaccagatgacttgtcacccctttttcctgatgagttaatcagacaagagatcgccagtgacagattcatagacataccagatgaagttcttgatgtttacaagctttggcgcccgacccctctcattagagccaagaggctggaaaagcttcttgatacgccggctaggatttactacaagtatgaaggtgtaagccccgctggatcacacaaaccaaactctgctgttccacaagcctggtataatttacaagcaggtgtcaagaatgttgtgacagaaactggtgctggacagtggggaagtgcattggcctttgcgtgcagcatatttggtcttggctgtgaggtgtggcaagtacgtgcttcttatgattcaaaaccatatcggagattgatgatgcaaacatggggtgcaaaggtacacccatctccatctatgattactgaggcaggtcggagaatgcttcaagaggatccatcaagcccagggagtt

SEQ ID NO: 19906 - DNA, 1247 bp, Glycine max
  Clone ID: PAT_MRT3847_117980C.1
acgcgtccgatcgcgtttgggagaagaagagcaaaatcgctgtgaaaatgagcggaacggtgaagaaagttagcgatgtagcattcaaggtgggaaggaacatcgattgggatggaatggcgaagcttctggtctccgatgaggctcgcagggagttctccaatctccgtcgcgctttcgacgaggttaactcccaactccaaaccaagtttagccaggtaccttttttcctctccaccgatctctctctctctatctttcttataaatttgatttacgatgcgaatttccctctctgttgttcatagatgtcagatcgattcgattttagggctgatttacaccattttccgatttattccgctgttggttttgattataagctgttttcaacgcaataagctgatctaaacacgcgcttagtgtctcttcttatgaatagtcttagaactgattttcggatcacttttggtcaaacgcctctgcgtcatgttgtgaatgagagggatttgcgattcgaagtgatgttggagaaaaaaagttattgttattattcgtttttcacattctgcaggaacctgagcccattgattgggattactatagaaagggaattggcactcgcttggtggatatgtacaaggagcattatgagagtatgttctaaactctgcatcttgatatttctcattgaggtccccaagtttgttgacacagtaactcctcaatacaagactaaatttgatgccctattgattgagcttaaagaagcagaggagaaatctctgaaggagtctgagcgtttggaaaaggaaattgttgaagtacaagagttgaagaaaaagctcagtaccatgacggcagatgagtactttgaaaaacatcctgagctgaggaagaagtttgatgatgagatcagaaatgataactggggctattgatttttcaattagcaaaccatcagaggttgatgttgttcttgctggtttaataataacaactacattgaattctttgtaactcggttctctttttcagttcaaaggtttttatattacagtgttgaaattttgtggtactgtagttaatcacttgagacttatccccaaagtgcagttgtggtcgtcggcgaaactgctgataaggtttccgtccggagacaatttgaagaaaatgttgttttgcgttagtcttaataagaaaaaaaaaaaaaaaaaaaaaaaaaaaaaagcggccgctctagagga

SEQ ID NO: 19907 - DNA, 221 bp, Glycine max
  Clone ID: PAT_MRT3847_117981C.1
gcgataagacgacacaacgggatgggtgctccatacagtgtcgggcgtcactcctttccatactttcttctaagcacacactgatctcacacagcacctaagtttttttctggggatggatctgaacagaatcatgtgtgttgatattgataggaagaccaattaggtgattcaggaagatggtatagaagatttcattgattcagcatccattgggttca

SEQ ID NO: 19908 - DNA, 908 bp, Glycine max
  Clone ID: PAT_MRT3847_117982C.1
tacggctgcgagaagacgacagataggggcagtagcaagcagcgaggagaggaatcagaatcgcgttagggagaagaagagaaaatcgcaggtgaaaatgagcggaacggtgaagaaagtaaccgatgtagcattcaaggtgggaaggaacatcgattgggatggaatggcgaagcttctcgtctccgatgaggctcgcagggagttctccaatctccgtcgcgctttcgacgaggttaactcccaactcgaaaccaagttcagccaggaacctgaacccatagactgggattactatagaaaaggaattggcactcgcttggtggatatgtacaaggagcattatgagagcattgaggtccccaagtttgttgacacagtaactcctcaatacaagactaaatttgatgccctattgattgagcttaaagaagcagaggagaaatctctgaaggagtctgagcgtttggaaaaggaaattgttgaagtacaagagttgaagaaaaagctcagtaccatgacggcagatgagtactttgaaaaacatcctgagctgaggaagaagtttgatgatgagatcagaaatgataactggggctattgatttttcaattagcaaaccatcagaggttgatgttgttcttgctggtttaataataacaactacattgaattctttgtaactcggttctctttttcagttcaaaggttcttatattacagtgttgaaattttgtggtactgtagttaatcacttgagacttatccacaaagtgcggttgtggtcgtcggcgaaactgctgataaggtttccgtccggagacaatttgaagaaaatgttgttttgcgttagtcttaataaattatatgtctgccccctaatggaaaatatcgatttctgtttgttt

SEQ ID NO: 19909 - DNA, 1110 bp, Glycine max
  Clone ID: PAT_MRT3847_117983C.1
tacggctgcgagaagacgagaatcgcgtttgggagaagaagagcaaaatcgctgtgaaaatgcgcgaagcggaagaagagaaaatcgcaggtgaaaatgagcggaacggtgaagaaagtaaccgatgtagcattcaaggtgggaaggaacatcgcgtttgggagaagaagagcaaaatcgctgtgaaaatgagcggaacggtgaagaaagttagcgatgtagcattcaaggtgggaaggaacatcgattgggatggaatggcgaagcttctggtctccgatgaggctcgcagggagttctccaatctccgtcgcgctttcgacgaggttaactcccaactccaaaccaagtttagccaggaacctgagcccattgattgggattactatagaaagggaattggcactcgtttggtggatatgtacaaggagcattatgagagcattgagatccccaagtttgttgatacagtaactcctcaatataagcctaaatttgatgcccttttgattgagcttaaagaagcagaggagaaatctctgaaggagtctgagcgcttggaaaaggaaattgctgaagtacaagagttgaagaaaaagcttagtaccatgacggcagatgagtactttgaaaagcatcctgagctgaggaagaagtttgatgatgagatcaggaatgataactggggttattgatttttcaattagcaaaatgtcaggttgatgttgttctggctggtttaataataactacattgatttctttgtaactcggttctctttttcagttcaaaggatcttatatattacagtgtcgaaattttttgtggtactgtagttaatcacttaagacttaaccacaaaagtgcggttgtggtcgactgatcgtcagagaaactgctgttttgcgtttgtcttaataaattatatgtctgccccgtaatgaaaaaaattgatttctgtttattacccttcctcaccgagaaggcatcaaaattggcctttataacaacctgcattggaggtggactccatgtgacaggttcatttttggtttatcctttgaatggacggacacattctaaagtaattatttggcagaatgacaatt

SEQ ID NO: 19910 - DNA, 588 bp, Glycine max
  unsure (1)..(588): unsure at all n locations
  Clone ID: PAT_MRT3847_117984C.1
gtccggnattccgggtcgacccagcgtccgattcctcatgtggtgttgagttcacgctctaatcccagtaaaggtggaagcaccatggctgctgcagcctctagctttggaactacatgtcgtctaagaagagcagctcaggcttttgcaatctctcattctcatattctccgcagcaatgccaacctttctttgcagaggaacttttgctctcatctcaccgtttctacttcttcaggtctccacctacttcatctaatgtgttttttcctttatgttttttgatgctacctttatccaaatgaatgatacccattatgcttaatcttttaaaactgcaatcttgctggcaaaagaaatcgagggtgctgaaaatgaaggcgagaatacgggaactcggaccagacccgatcatacgaataatacccccttatttttaatttttgaggtgcatgaattagagtatgtctgtaactagacatgattatgaatataactgaatggacaaaaaggcattcatggaattataataaagttgacaaccttgtcgattgtaatttggacacccagagttgccttctttttttt

SEQ ID NO: 19911 - DNA, 837 bp, Glycine max
  Clone ID: PAT_MRT3847_117985C.1
ggtccggaatcccgggtcgacccacgcgtccggtcaattttcttctttgcttccacctattcttcagcaaactcacacaaccacctgaaaactgaatcacaaccctctcttcttctcttactctctctttctctttggtatcatcattcatcaccacacaagagaaaaaaaaaaaagaagaaagaacaaataaaccttttttttttaagagaaagaaagaaagaaaaggaaaaataaagtttttttttttttttttagtttttcgatggacccgaagttcatcggaaagccgctggcgatggtggacctggaccgggaccggatgtcggagcgtgggtcccaccaccggcgttcccactccgacacctccttccgcttccctgccaacttcgacgagcttctcctcttcgacccctccgacctcgacatctccggcctcccgtcgccgctccctctgccgtcgcagggcgccggcggcgtggttccgatgtccgtcgtctccgaggagtctggcggacggccgaggccgtccggggcttccgccggcgggcacctgcggagtctgtcggtggattctgacttcttcgatgggctcgggtccggcgtcggcggcgatgagagaggtgccgggaatggcggcggcgagcggcacagcaactcgatggagggggtcgtcgacgacgtcgtttgaggcggactcggcgacgatgatggatggcatgaagaaagctacggcccctgataaacttgctgagcttgctcttacggatcccaaaagagctaagaggatgcttgctaacaggcaatctgctgcaagatctaaggagaggaagattc

SEQ ID NO: 19912 - DNA, 236 bp, Glycine max
  Clone ID: PAT_MRT3847_117986C.1
gcaagatcggaaatggagagcaggagggacgaggcgcccgccataaacaacaccagcgtattcgcggcgctcggcagctggaagaagaggtagtagcccgagaaggaccaggaccaaggcccgtccaagtccaaggcccaggacaacaggaaagacgtcttatgggcacccgcgactctcacctccaggtcatgcgccgatgtcggcgacatatatgacgacgactactagccacc

SEQ ID NO: 19913 - DNA, 232 bp, Glycine max
  Clone ID: PAT_MRT3847_117987C.1
tctcttccctcgcctccatggctgctcatctatgactacagctcctatctctattagggagataacgaaatctgccctaaaggccctggggaccaatgatgtgagggtggatgtcctctcttacaagtctgcttggatccatcgaatcctgactgtgcctctgtcgatcagagtgagactagctggacccgatactcctgatgaagatgccatcgaagaactgagctctctc

SEQ ID NO: 19914 - DNA, 205 bp, Glycine max
  Clone ID: PAT_MRT3847_117988C.1
aagttatgattaaaaacatgcactccactaagcaaacagtcaaaccaagtcatgatttacaaatccacactcactgaaaacgtcaacaatgagaacaatcgtgtatggactataagaatacatgtagagacatattatttcattttgtttgattttcctgtgtgtggcagcagttgagaatgtaataatatgtctctactttttg

SEQ ID NO: 19915 - DNA, 331 bp, Glycine max
  Clone ID: PAT_MRT3847_117989C.1
aagatttcttaacgcaccaacacatacacacatcttctctttctgtacctatggcatttctgacttagacccaaatcattgattgttgggctatctaatccttgagaaagacgtgaggggagctgatggggtttccacaaaacgacgaacagaaggcaattgttgaatccgccaccgaaggcctaaagggcatggcacacctactacgaatactctctcatcaacattaccaccttcgcactaaccacagctacgccagacggttcaatgacaaaataatgatttatgttttcaaacgacggaccggccatgcccgtttgcgacgagcacc

SEQ ID NO: 19916 - DNA, 591 bp, Glycine max
  Clone ID: PAT_MRT3847_11798C.1
aaagaagggagctaggttcaatacaattatatagagtaatctcaagggggtttagtccagttggttgatctgaagagtgtgtaaattgttgtaaatctcctgatacctgtctttgattcttatattttaggaagaaaaaaaaaaaaaactagagcaatggatgttttatctttaagatcaagttcaagcctaagcatgtccaagccctttgaatctcatggccttccactctcaagtaaacaacatcgaagaccttctagtgtgaagtttggtagtgtttcatgcagagccacaacgttaacccaagaaaacttgtacaaaatattatctgtgagtccaggaagtgcaacaatggatgagatcaagagggcttataggtcaatggctcttcagtaccaccctgatgtgtgccatgatccttccatgaaggaggagtcaacgaggatgtttgttcagctaaatgcagcttacgagaccttgtccaatccaaggcttagagaacagtatgatagtgaattgggtttgagaagcgaatgatgagtgttagtagtgatcatgagagggggagaagtgggagtgttagtagtgaac

SEQ ID NO: 19917 - DNA, 317 bp, Glycine max
  Clone ID: PAT_MRT3847_117990C.1
gaatgcggaacaaaccgacacaaaaaatacagacaagggatataagagggaaaaaaatgactcttaacatgcgaatgggactgtgggattataaagaaagaaaatgtttactaaattttgttcctccagtccctgtggtctaacgagtgccatcagattttgtaaaaagtccacctaaaggagcccagttatctgagggaatggtgagagtgaagaaaaaaggagcttccattgcggttaaatcttttttcattacccgcccccctaaacaagggatttccttacctgacctattctgatgaaggcaggatacacat

SEQ ID NO: 19918 - DNA, 238 bp, Glycine max
  Clone ID: PAT_MRT3847_117991C.1
gattttcgtttccttcacgatcgtgtctctgattactttgctgagtgtctgaggaaggatcacgagtttttgaaatctgggctggtgacaaaagtcagtcttgcggcgaaatggtgtccctctgtcgattcctctttcgatcgtcacacgttgttgtgtgaaactattggcaagagggtttttcctcgtgatgagtataaggagtatgagggggttgaggaggcttattatgcttaca

SEQ ID NO: 19919 - DNA, 260 bp, Glycine max
  unsure (1)..(260): unsure at all n locations
  Clone ID: PAT_MRT3847_117992C.1
cagcatcgncatggctggacttgctgctattgaaattgcacaaaaagtctcaaangcttggcgttccctgcatgctgaatggaaatattcgantaaaggaaattcaaagaatgggagaagggccaggagaagggaaagaattaacatgcccagtcaaaatagaggangtgctggttgtagtacaagcagtacctcagtaacatcttcaaatggaactgtagncgatagattatccncccgtacattttcgtggcacaatg

SEQ ID NO: 19920 - DNA, 310 bp, Glycine max
  Clone ID: PAT_MRT3847_117993C.1
atttcatagaccgactgatcgtcggcagtggttcccacatcgtccgacgcgtgccctaccgggccacatcggttttcttttccctttaggtggagtgcatatgaaggctcggtataggactgcgacgagggcacggtcccttgtggcgattgcggcgggcatgtgcctggctggcgtcgtgatggcacagagcacgacgggtagcgtctacggcacggttcctgccggcaccgtcatcaccatcacgagcaacacgggtatctcccggacgctgacggctggttccgacggccgctacaacgctgcagcg

SEQ ID NO: 19921 - DNA, 790 bp, Glycine max
  Clone ID: PAT_MRT3847_117994C.1
ctgggtttgacgatgatgaagaggagtctcaaagaggtggtcggaaaattgctaatgctagaaggggcagagagtttgggaaagtgttagatgttgacaagcctttgagagattcttcaagggaaacatcgcctttgagaggatctggaagggaaagatcaattgggaaaagcggggagaagaattcgtttgaagtttctaaaagaagacaagtgcgaggtgcacataaaaatgttgagaatacacaagagagatcaaaatcctctaaaagcagtagaaggtcattaaccagcaagaaaacccctgttttgtagagattcaatttgtttctggcaactaacacatattctgattgtccaggacaaaaagctccaccaacatgggcccctatggctgaaaattgcaattgatgtcgcacgtcaccttagctatgtccactttgaccatgctggtcctcgtgggaacctcaaaccagcaaatatgttgttagatacagatgacttgaatgcacgtgtaggactccttccccgatttatgactcacgctcgtactatttattgaacaaattcttggtggtgggatcttgggttatcagcaccagagttcgctgccaacaaatgtctctgttgtgtcttctctgttaatgaatgagaaacatctggcactaacattacattcagtgtgggaagttgacttagtcactactattattgatgggaagaatggagtatatttgaactccccatggcgtgggtattattatgtttgacgaaaatgcccctcatgatga

SEQ ID NO: 19922 - DNA, 1964 bp, Glycine max
  Clone ID: PAT_MRT3847_117995C.1
gccgcgtcccccgcccgcgggcgcacgctctgatcttcatgaatctaggaacctgcgccgcgggtgcaccgtaccgttgggtgcaccttctccctcacgaaggaaagagaagatgtgcgagtgtgagagtgagagcgaatgcgagtgttggaggaggaaaaggagatggcgaaacggcgtcgtatttggacatgtggaagaaggcggtggagagagagaggaagagcgcgagcttcaactcaatagcggaccgcgtggcggcaaatactgatgacaacaacgacgacgatctggagaagaagaccagtgagttccagaagctcctccaagtctccgccgaagagcgcgacagggtgcagcgcatgcaggtcatcgatcgcgccgccgccgccatcgccgccgccaggcaactccttcaggaacgcagtgccgccgattccagccaccacgaagccaccgccgacgaacgacgtgacgaatcaggttcaggaatgggagtgcagagtgagggtattcgtgtgtcagagtcagaaacaaggggaaatggtgtgcctggccctgatttttggtcctggacaccccctgtggagagtgatgttccttcagatgatggcagtgggctgcagttagataccaagtcttctgttcgtccaaccttgcccagtgcggttgtggagaaggagtggacaccacaatttctctccattccatttgagagtttactttctcaaagggagggtagggatactcttccaccctttcagtcatttttagaggttgaggaagctgaaactacctcagacccagagtcactttctgaatcgccttcactgtcactttccttggaagaggaacagatacatggtgaatcgtcttttgattatgcagcagaagcagcacatgccctcagtgaggcaaataaatcatcacctattggagtgaatccggacggatcgagatggtggaaagagacaggaattgagcgaagacctgatggcgtgatctgcagatggacaatgaccagaggtgttagtgctgacaaagctattgagtggcaagagaagtactgggaagcttctgatgattttggctataaggaacttggttcagagaaatctggacgtgatgcaaatggaaatatttggcgtgaattttggagagaatccttgtgtctggaaaatgggcttatgagttttgagaaaactgcagacaagtggggacgaaatgttaatggtaatgagtggcaggaaaaatggggggagcgctacaatgctgctggtcaaacagaaaaatgggcacacaagtggtgcagtattgacccaaacacaccgcttgaacctggacatgctcatgtttggcatgaaaggtggggtggcaaatacgacgggtacggtgggagcataaaatacaccgacaaatgggccgagcggtttgtggatggtggatgggataaatggggtgacaaatgggatgaaaattttgatccaaatgctaatggtgtgaagcagggggagagctggtgggaaggtaggcatggcgaccgctggaaccgaacttggggtgagcaacacaatggctctggttggattcacaagtacggccagagcagttctggggaacactgggacacacacgcaagagaagatacctggtatgagaaattccctcattatggtttcttcaattgcttcgaaaactccgtccagctcagggaagttcccaaaccatctgaaatactggaaatacagcaagttcaggaaccttgatttgctcaaaccttataaaaaatatataggaaccttattacatacctccatcgtctttagtatggtaatacgccaacttgtatgatgatcatttctaagctcttctagtactttaagcctttaaggactgaataatatgttcattgtttcccatacaacagcaaaatatacatatatttcgttcatagaatttgtctt

SEQ ID NO: 19923 - DNA, 626 bp, Glycine max
  Clone ID: PAT_MRT3847_117996C.1
ttcgggacaacgcatcctatctaacatcttaattctagtctcttgtgccttccttccttcttctgctcaataagtgagtgccactctagttaattaccacccccttcaacacatatgtcttctccctctgtgcgctattcgctacactgagaaaccttaatgaagggaacatttgcggctggtctacttatatgccttgtcctgcacctcctccttgtgcgaggagtcaatggctaggtctgctttctgttcctccaagtgctcaaacaggagctctagagctgcaatgaaggcactcgtggatgaagttctgctagatttgctgtggctactgccactgagagccatctgttacttatgagaaccattatgatggaccttgctacttagacatgaataactgcaaggttaacgtctgatgcccttgattatttttttttttcaccatccacacatcaacttcaaaactttgattcccccctaccgtgcgtgtatatctccacctttatagatattccaccatgtacccttgctagctgattatgattactacctatattgatgcgtatgagtattacatacagagaaaaatttgtccactttaggtgtatcagatatgcgtgata

SEQ ID NO: 19924 - DNA, 665 bp, Glycine max
  unsure (1)..(665): unsure at all n locations
  Clone ID: PAT_MRT3847_117997C.1
nnnnnnnnnnnnnnnnnnnnnnnnnnnnnnnnnnnnnnnngtggggcccttaaacttttatttctgagatcaattaaacgagttcaaattcaacaaagcaaaaaaaaaagcaaaagggggttttttgttgccccccttcatttaaccttgttcatgttaaatcagcgattccaaaacaggagcgacgggcaaacttttaaccaaaacccacaacttaacattttttttgttcaaagaaaaaaaagaaaaagatccccaaaatttacccagttctttaaggatattttataggattccccaaataaaattaaactttcatttcatttcatcggatgctgacatgcaatggaaacttttattggggcgattaatgaaatgaaatttaaattttgattggaaaacaaaaggaagtaaagttttgtccaaaatagaaaaaaaaggcctcctaggtggaaagaaattaaaaagaaagggttagggttcttacaggatctctgaccacaagagaaggggtagcattatgggtgcaaagatccaagcagacttccatccctgaattcccacacccaacaaccaacacccttttccctttaaactcttccccactcttatacaaacttgngggctttatgggcccaccaaactcccccattcctttaatacca

SEQ ID NO: 19925 - DNA, 2176 bp, Glycine max
  Clone ID: PAT_MRT3847_117998C.1
gtattttcaaactttgccgagctctccatatttctcactcacacagagaaagtaagatgagtctccttcgaattcaaccctctttgtctttgcacaaccaaaccctctctctctctttctcatcttccctttcctattcctcttcagtcctcttcaagcactctactatcacccacggtcacacgcagagcctgtgcttctaccaccctcgcctctcggtggtcacgacgtgttccatctccaagatacacagctacggcaccgtcgactacgagcgccgccccatcgtgggctggaacgacgtctaccgcaggatatcgctcaatccaaacccccaagtggggtccgcagaggtgctcaaccagtgggagaacgaagggagacacctcaccaagtgggagctttcaagagtcgttaaagagttgaggaagtacaagagatttccaagagccctcgaggtatatgattggatgaacaatagaccagagcggtttagagtttccgagagtgatgcagcaattcagttagatttaatagcaaaagttcgtggactttctagtgcagaagcattctttctgagtctggaagataagttaaaagataagaagacttatggtgccctgttgaatgtatatgtgcattctagatcgaaggaaaaggcagaatctttatttgatacaatgaggagtaaagggtatgtaatacatgcactaccatttaatgtaatgatgactctgtacatgaaccttaatgaatatgctaaagttgatatcttggcttctgaaatgatggaaaaaaacatacagctagatatctatacatataatatctggttatcttcgtgtggatctcaaggatcagtagaaaagatggaacaagtgtttgaacaaatggaaaaggatccttccattatccctaactggtctacattcagcacaatggcttcaatgtacattaggatggatcagaatgaaaaagcagaagagtgcttaagaaaggttgagggtagaattaaaggtcgagatagaataccttttcattatcttctgagtttatatggaagtgttggaaagaaagacgaagtctgtcgtgtgtggaatacttacaaatcaatttttccaagaataccaaacttgggataccatgctattatttcttctctggttaaattggatgatatcgagggtgcagaaaaactatatgaggaatggatttcagtaaagtcaagttatgatcctagaattggaaaccttctcatgggctggtatgttaagaaagatgacacagataaagctttgagtttctttgagcagatatcaaatgatggctgcattccaaattcaaatacatgggagattctttctgagggccacattgcagataagaggatttctgaagccctgtcctgcttgaaagaagcatttatggttgctggtggttcaaagagttggagaccaaagccctcatacttgtctgcattccttgagctttgtcaggagcaaaatgacatggaaagtgctgaggttttaattggactgctgaggcagtcaaaatttagtaaaattaaagtttatgcatctatcattggctcacctgattgtaccattgacaatggtgaattgcaaagcaagattgatataactgatagaactgatgatgctgttgacagtgaaaacatggatgatgactctcaaatgttgttgaaccaactagatagtagattttgatactttatttcttttttcttttgactagtggaaaatgattagttagaacatactggggattttttgtcaaatatgatgtcattagagtttcatggcttctatgtcttcttctcatcataacagttagaaagtggtagctgcttatcggaatatttatgctacaatggtatgtgatttttttcttttcatacgaattgatgttgatatatgtgatctgtggtcatccttgaaagtggtagctgctttggaatatttatgtcacaatggtatgtgatattttgcttttcatacgaattgatgttgatatacgtgatctgtggtcatccttgtgtacgatttgtatgacttgtctttttaaatgtgagtgtgttttgtgtttaaactatagtattttaggttcaatataatgaggacatgaatgatggattgggttttggaccatttactct

SEQ ID NO: 19926 - DNA, 647 bp, Glycine max
  Clone ID: PAT_MRT3847_117999C.1
tgcatccaaccgggaaatactgggagattctttctgagggccacattgcagataagaggatttctgaagccatgtcctgcttgaaagaagcttttatggctgctggtggttcaaagagttggagaccaaagccctcatacttgtctgcattccttgagctttgtcaagagcaagatgacatggaaagtgctgaggttttaattggacttctgaggcagtcaaaatttaataaaagtaaagtttatgcatctctcattggctcatctgatgaattgccaaagattgatacagctgatagaactgatgatgctgttgacagtgaaaacatggataatgacttgttgaaccaactcggtagtagctcttgatacttcatttctttttctttctactagtggaaaatgatttgctagaacatacaggggaattttcgtcaaatatgatctcattagagtttcttggattctatgtctcatcataagagttagaaagtggtagctgctttcggaatatttatgctacaatggtatgtgatttttttcttttcatacgaattgatgttgatatatgtgatctgtggtcatccttgaaagtggtagctgctttggaatatttatgtcacaatggtatgtgatattttgcttttc

SEQ ID NO: 19927 - DNA, 549 bp, Glycine max
  Clone ID: PAT_MRT3847_11799C.1
aaccaatgtgtggcttgtccattggaaaatggactacttggttggaacaacaattgcactgccaagactgtgacatcatgcaaggctagtgatttcctctacttcataattgaaggagttgagcattacataagcaaatacactacaagggataaagtgagtgagagtacttgtggaaacaaatgcaccaaggattgcaagtgtgtgggttatttctaccacaaggagaattcaaggtgttgggtagcttatgatcttcaaacccttactagaggggccaattcctcacatgtggggtatattaaggtgcctaataagtaaaatattaaaaccttgatattgcggttttatacagttttacttcaattaattcctaatactagtttaagttgaaataaagttatggtatgattctgtcctccgtgaagagaaggacatggatgtacaataaagaagtttgtaataaagttttgattggtttggcttaaagtacgattcatgtttttctcaaaaaaaaaaaaaaaaaaaaaaaaaaaaacaccaaatcgg

SEQ ID NO: 19928 - DNA, 1475 bp, Glycine max
  Clone ID: PAT_MRT3847_1179C.1
cccttttctgtgagctatgggaccgtagctggttacctggtggcattggttgcacagtgtgagagcccgctcaatagccatggggagagatttaacagtaaacgccgccctgccagcgacagctcctacatgctctaatggggcggccactagcactgctgctgctcctattattggcggtggtgcctccacgggtgctgtcggcgactcccgagtttcgctgcttagatgccggccattcgtggagtttctcctccacctggagtatagtatggtcaaaataggcgtcacgagttccaagaaaaagcccgtgtccgcaaactaaaaagttaaaggcccgccaagagcaaagcgtcccagcaggataaggaccgcccaagcgcgcattggccgtggccgtcacccggttgaccgcggccacgtcgtcggcgccttatgtcgtttgcatcggccctcggcgatgttgcctcggtggtggtccgtccacccagggaggaggcgtccacgacgaggaatggtcgagtggtcgctgagccatggccccggcgcgccgcactgtgcaagccccacaccatgcgcccgccacgcctccctgtgcggctcgagtgaatataattaggattttaaccgttctccgccgagctcacgctaccctattcatttgggaaaggggggcactgatataatccccttctcctacatacactgtgattaacaccaatactcaatcaatatgtctcatcttggtcctattgtggcgcttgccatggcgacgcatatatgctcaaacaatgccatctggatctatagagtacctgatttgtttaccagctcatggagcagtaattggagcatggtttggggcttggccaatgcctcttgactgggagaggccatggcaggaatggcccatttctgtgagctatgggaccgtagctggttacctggtggcattggttgcatcattgggctttgttcttgcttgtggtagatcacaacatatcaaaagagaatgaagtgctagtagaagcatctgattatactaattgtgggtgagatgtagaagcataatatcttgatgaactagacatggaagctgtcttctttaggacctgtttgtaggcaatggataatgaattatgatgacaaagggaaaattggtgctataaaactccaggctctcgccatgacatggtccagcatggggttgaatccattatggatctattgtagacagtattaccttgcatttgtaagaggctaatttcgtatgcaaatatgtgacctcctagtcacttggctgcaaatctaactgttgtaccaaggttttctttcagtgatttatgatgataacgatttatttctattttgttttagtaatgttcaagaagtatgcttttattttggatttgcaaaatttcaagtatataattattatttttaaattttatatacataccacgtatgtatttgtt

SEQ ID NO: 19929 - DNA, 413 bp, Glycine max
  Clone ID: PAT_MRT3847_117C.1
ctcaaagttcttaacccccgaagctctctcaattgcaatggaccatacatcggatcctaaattatcacatagttatattatctcactgcctctcttttacctatcttctatattcttctttcatgtctcaaaattcctaactggatttaagtgattattgctaatcatcatccttacattagacagatataaaggtctttcctatgatgttacatacttccatcattacatcacattactgaatatttttgtattattacctctttcatagcttcttactatggctggttcttactattcattcattgatcttttattagttcctttatctctttactttaacatttcaatttttatatcatcatttttcttttttactattgttacttcttttatttattttctattttttt

SEQ ID NO: 19930 - DNA, 498 bp, Glycine max
  Clone ID: PAT_MRT3847_118000C.1
gaagactttagttttatgttgctagatgaagaaacctgagaaaacaactgaaagcggaactgatcccctgatctgtgatgaaagggagcccagcagaagcatagatttctgactatgaaaatcagccaacagcagaagagaattgcatctgaaggtacttttacaggaatagaggcaatctttcaggcaaccccttgggcagagaattgcttctccccaatacaacagtctccgactcttattgagcaggatgacaatattgtggatatttcaacagcatgtaatgattatcctaattcaaatgaatactattcatcaaaaaggtttaaatcatcacatgatgctgtccatgggggaatatgttttctaccctctaaccttgaaggcaaccaagagaaaaacgagaggtctgttcaagatagtttctggagagcagagacatcatcttgtgactcgacactagataaacctttggagatcaattatattgatatttct

SEQ ID NO: 19931 - DNA, 1732 bp, Glycine max
  Clone ID: PAT_MRT3847_118001C.1
gaaacacagtgagttaagtgttcacaaaaaacaatggatgatattgtaggatacggttttcgtccaacagatgaagagcttgtgaagttctacctcaaacacaagttgctcgatgatgatccctgtgtccacttcatcctcgacgttgacctttgtgaagtggaaccttgggacttaccattgttattagcagattcagctgtgcgattcaatgaccctgaatggttcttcttcagtcctgtcgattacaagtattcaaatagtaaaaggtttaacaggacaaccaagtgtggattctggaaacccactggaaaagaccgtggcattaggacaggggacactgataacactgtcattgggactaagaagactcttgtttactatcaaggccgtgtttcctgtggtgtcaagtccaactgggttattcacgaatatcatgctgttacctttcatgaaaaccagaggacttttgttttatgttgcttgatgaagaaacctgggaaaacaactgaaggcggaactgatcccctgatctgtgatgaaggggagcccagcagaagcatggtttctgactatgaaaatcagccaacagcagaaggaattgcatctgaaggtacttttacaggaatagaggcaatctttcaggcaaccccttgggcagagaattgcttctccccaatacaacagtctccgactcttattgagcaggaaggagcatcctttccaaactatgcatttaacaatgcctattttagaaatgaagacaacattatgcagactccatttgaaactacaaaggaagatgaattcctaaatttaatcttagccgatgaaagtatagtgatcaatgaagaaaataagcatgattttgtcaatagctctacccaatcagagtcattgaaaagggtatactgtgaaagcagtgatacagatgctgaagtcatctctaaactggatgacaatattgtggatatttcaacagcatgtaatgattatcctaattcagatgaatactattcatcaaaaaggtttaaatcatcacatgatgctgtccatggtggaatatgttttctaccttctaaccttgaagcaaaccaagagaaaaacgagagtatgtttcaagatagtttctggggagcagagacatcatcttgtgactcgacactagataaacctttggagatcaattatattgatatttctagttctcctttcactccatggagatgagaaaattaatatcattgaagaccagtcaatttcgtatgatgggaactaagatctaagttagctccattagattggtagtagctattttggagtatgtcataaaatatgactagttctacaatagcaaatttattagaaaacaattctgtattagaaattgcataatggtagttatgcataaaaaataactatgggcagttatgtattaagatttaggagcttatatcctaacagtaaatctattagaaagtattaaaaactgcatgatagcagttatgcatagaaaacagccactagtagttatgtattaagagcatatatgtgatggtattagtagattgtgtaattaggaagtatgtgtagttgtttgcagtttatggacagagaatactctatgtaggagacttttgtctctaggacaacaagtgtattttgtatcaatgtattttgtgtgattttagtatttcaataatatatttcattagtttttggagggtgaaaa

SEQ ID NO: 19932 - DNA, 1116 bp, Glycine max
  Clone ID: PAT_MRT3847_118002C.1
cacgcgtccgcacactctcttccatatacgccgccgttttcaccctcactctctctgtgcgtctagattgattctctgttaatataaatgggaaagttgggaaagaaggcaaggaagtttgcgaaaaagaatttgcagtctgttttgaggaacaaaaggaagttaaattccaagttcaaaaggaaagcttcaaaaagagataatcaggatattgaagaaaacctagagaatgatgcaacaaatccatcaaatgaaagaatagtcgttgaagagtttcaagacacttctcttgatgctctattcagtgaagatgacagtgaggtgcttggagatgattcagacagtgacggatttctttcagaggactcaagcttttcacatgttattggaagtgacaatgaaaatgaaaactatattgggaacagcaacggtgctagttccttatcagtgcaaaacaaagatatttgtgcagaccttttaaagaaggcaaaaaagttgaacaaattgaaagaaaaggatccagggttttctaaatttctagaaagttataatatgaagattgaacaaaccgaagatgaagaaattagttcagatgatgaaaaaagtttagatcgggtgcagccagtggataacaacagtgcatgttctcatgtgggtaaactgttgacaagtgcatctgttgattcattgtgtaaagtgatcaaagaacagtgtaatgttcctgcccttacatgtctcataaatgcttatagggaagcatgccacaatgattctgaagcaatcagtgtcagtggttgtgtctttactcatggcattcagaagagtgaaactttctgcaagatattaatgttcatgctacatgaggctgatactacatttaggaggttattgggaatatcaagctcaagttccaggaaggaaactgttttggacctaaagaatacaacaaagtggttgtctgttagaccacttattaagtcgtacataaggagtactgtttttctcctgaaccaggtcactgactctgaaatattggccttctcaatttgtcggctcagagcttcaattatttttctctttgcctttccatctttactgcgcaatcttcttaagatt

SEQ ID NO: 19933 - DNA, 351 bp, Glycine max
  Clone ID: PAT_MRT3847_118003C.1
aaaaaaaaaaaaaactaagggcttaaaggggtggtggaaaaaaaattttggcccccggttcattttgttggggggccccccctgcaaaaaagggccccaagacaatttttaaacaaaacaaacccttttaaagggccaaaacggccttttaaacttgtcctaccccagttttataaaaaaggggctcccaaaaagctccccctggggcccagttgaaatacaaaaaacccgtttgggaattgtccaattgaaactaagcgttaaaaccctaaaaactgccctgcgccctttggcggtttttttttttccaattttttccccaaattttgggttaaaccccgggacgttttt

SEQ ID NO: 19934 - DNA, 3243 bp, Glycine max
  Clone ID: PAT_MRT3847_118004C.1
gagtagttgctctgcttcatcatcttctctctatctttgttgcaaacttacaaacacagtactgagtttaagtgttcaccaaaaaaaacaatggatgatgatattgtaggactcggttttcgtccaacagaacaagagcttgtcaacttttacctcaaacacaagttgctcggcgatgatccccgtgtccacgtcatccctgtcattgatctttgcgatgtggaaccttggaatgtaccaggtaactaactcaacacccctttgtcctttttcttcctcttctctttacttcactgttgtttgtttgattctttccttgttttcaaaattagtgatattagcatcgtcatcagctatacgatttggtgacccagattggtttttcttcagccctgttgatttcaagtacttgaaaagcaaaaggtttaacaggacaaccaagtgtggattctggaaagccactgggaaagaccgtgacattaggacaagggacactgataacactgtcattgggactaagaagactcttgtttactatcaaggccgtgtttcctgtggtgtcaagtccaactgggttattcacgaatatcatgctgttacctttcatgaaaaccaggttcgtttcttttattcaataaattttaacactgcttgaaaataatctttctactaaattataggctttgatgttagagggccatatatgttgtactagtttgtactttttaggctttgatattagaggttttttttttttttttttaatgatacaagaatgagaggaataaatctagacatataatgatacttggattataaaggtttaatatcatgtgaccatttaaaaaaagttatgtgattatttttaaatctcatatgacttgtatgttttaattgtggccaatatttattctttttacactcatatcaaaaaggtcatctcactagatatgtctccttatttgcaatcctattggttgttctgagttctgactttagcagattgctgttattggatactttgtttgaatctcatttattttttttgccgtctcatattgctgttcatggcccaattttctacatttagggtcttgcttgatgaatgatgacaaagggggcatgaaagaaatatttagcttataaacgtgactgatgaccttcctataacctctttttaagcttatttcaatgaattttacatgggagcttatcaaaacaagttctttttagtttatcaatgagctcctcgacaaagcttatggataatctcatgtgatttattggataagtgtttaattaaatcttttatctaagcactctcaaaattcatcatcagtgttcatcaaagactgtcaatttcttctgtataaattagtctgaatttccttgttcttttatttgtgtgaattgcatcaaataaatgctgattatactcaaaaaattatgcagaggacttttgttttatgttgcttgatgaagaaacctgagaaaacaactgaaggcggaactgatcccctgatctgtgatgaaggggagcccagcagaagcatgatttctgactatgaaaatcagccaacagcagaaggaattgcatctgtaagatgaagcatcctttgtggacatatttacactctgccatgtgaaacatgctgagaactgatacttgtttcgtatatttttttttctttttcaggaaggtacttttacaggaatagaggcaatctttcaggcaaccccttgggcagagaattgcttctccccaatacaacagtctccgactcttattgagcaggaaggagcatcctttccaaactatgcatttaacaatgcctattttagaaatgaagacaacattatgcagactccatttgaaactacaaaggaagatgaattcctaaatttaatcttagccgatgaaagtatagtgatcaatgaagaaaataagcatgattttgtcaatagctctacccaatcagagtcattgaaaagggtatactgtgtaagcagtgatacagatgctgaagtcatctctaaactggtaaagatttatcaagttcaaataatactggggagagtatctccatttgtttctgaagtggcattggatctataggttaaaattgtagtgtgcattgtggttatgtgaatgttgccacatttttgcattggatctataggttatgtcatgttttgttgtgattcatgatcatgaatgattcacggctgatactttagagcatgcttggatgaagggaatagttaggaaagggaacaaaatggagataaaccaatctatttctgtacccatttttacccttccttgcatctcttccctaacatacatcctaggatttcagaatcacaagtactcttttcttaggtttctgatatttgtttagtttattttgagctcttcaagaattgaattcatctacttactttcttctgaaatcattacaggatgacaatattgtggatatttcaacagcatgtaatgattatcctaattcagatgaatactattcatcaaaaaggtttaaatcatcacatgatgctgtccatggtggaatatgttttctaccttctaaccttgaagcaaaccaagagaaaaacgagagtatgtttcaagatagtttctggggagcagagacatcatcttgtgactcgacactagataaacctttggagatcaattatattgatatttctagttctcctttcactccatggagatgagaaaattaatatcattgaagaccagtcaatttcgtatgatgggaactaagatctaagttagctccattagattggtagtagctattttggagtatgtcataaaatatgactagttctacaatagcaaatttattagaaaacaattctgtattagaaattgcataatggtagttatgcataaaaaataactatgggcagttatgtattaagatttaggagcttatatcctaacagtaaatctattagaaagtattaaaaactgcatgatagcagttatgcatagaaaacagccactagtagttatgtattaagagcatatatgtgatggtattagtagattgtgtaattaggaagtatgtgtagttgtttgcagtttatggacagagaatactctatgtaggagacttttgtctctaggacaacaagtgtattttgtatcaatgtattttgtgtgattttagtatttcaataatatatttcattagtttttggaaggtgagccac

SEQ ID NO: 19935 - DNA, 172 bp, Glycine max
  Clone ID: PAT_MRT3847_118005C.1
aaagaaccaaagggctgcttcttattaggctgctgtttgatattgatatgaggaggaccaatattggaaggggaatggctactgaggtgtaggccttgcggttgttatttttttgtatattatctgtggtggtagacactttatattttttaatggtcggacttgtgattat

SEQ ID NO: 19936 - DNA, 267 bp, Glycine max
  Clone ID: PAT_MRT3847_118006C.1
aaaaataaaaccccaacaattttattaaggaaaatcctttacaatttcagcacatataccccggcatgaatataattttgcccgctttaagaatttttcgccacaaacaagggggtagggctcaacaaagcccaaaccaacaattataacagttttagggggattaatttcccccagaaaggaaattaacgtaataggcaacacatggggggcacgttcatgggggtcattttataaggatttgcaacattgaattaaatattctca

SEQ ID NO: 19937 - DNA, 343 bp, Glycine max
  Clone ID: PAT_MRT3847_118007C.1
agcttattcattagttctcattcattaatttccatggggggccgaaaacagaaaccaaaaattctggatgatgaaatgcttataaagcaaaaacaaatgggaatgtagtttaagtacaacaaacaaagtggggtggctacagatgctttgcaaatttttcaatgacttaaaattctgggggcttgtaggcgatgaacctgatgcactgcacttggtgaacgtttgtcaatccaatgatacggattaagccattggggtatgcaaacttagtctcttgaagcttttttaacacctgagaagcatccctgcagcctagcattggttgttttcacatgggccagtc

SEQ ID NO: 19938 - DNA, 167 bp, Glycine max
  Clone ID: PAT_MRT3847_118008C.1
tttttcctaaagacaacttatactctttatcaatgaatgttattgaaagtgatagcccgtatattctcaatatctacagccattttttccacatattgtgaccctttcttagatagaagccccctccaaaaacattccaagaaccgctttctcatagacaaacttct

SEQ ID NO: 19939 - DNA, 584 bp, Glycine max
  Clone ID: PAT_MRT3847_118009C.1
cgttcctgagtctcggaattgcggcattggcacttgatgagaacgtggataagaacatggtttgggttgggaagatgatgatgatgatgatggtgaggatgaggaattggggcaagagtatatgttgttgtatgatgatgatgatgatgatgaaggagaagaggaagatggcttatatattttttgattctttttgggatgaagattagaccaaggtttttaaaaaacggttagtggtcgcgatttcagctgtaatgtcagggtatggactgcatttgtctgtaatttctcccaatatcaagaaatgcagcaaaactgcccataggagccagaattttaaaagcttggcgaagactgttttcattttggaatcaattgttatactacccaatagagattgaattgaggatatgatgtattattaaatgttatatgtattatcatcttgaaatggattggaatataaagggttgcattcattgctcccatggtggaatgaagtctgctttttaagttgctgcttgcaattcatgtttctttaactccctgttaaagcaatgttcagcttaaggtttttggcgtgc

SEQ ID NO: 19940 - DNA, 157 bp, Glycine max
  Clone ID: PAT_MRT3847_11800C.1
gaccggcccggaaaaccgggtcagacccacgcgccgccgattatcggccgccgcgagcagggacaccagggagaggtgctgacagagggcaacccccgaggacgtgccgaccacagcgcacacaccccgcaaaggaccgcaaaaaaaggcggccaca

SEQ ID NO: 19941 - DNA, 400 bp, Glycine max
  Clone ID: PAT_MRT3847_118010C.1
gcgtgctatgatagttactggtggctcattcaagtctgaaataactcgttgcagattgaaagaggttatcaagggttctctttcaagtgttccgggtagcaaaagcgacaaccgtctggagactcgtaagcatattttatctcttctcaccaatccacagaatttccgagacaggtgtgagcctttggctgcattaagattccaatctcatcatgctgctgtagaaaatatattgcgtggacttcaaaaattgccatgtcaggccttgattgcaatgcgtagaaaacttaaaggagtgaaagcatcagtacctcagttacaacctcgcagacatggatggacacgggaccatctaatcaaggtagtgaagaaaatcagtatggaaatgctttcacaactt

SEQ ID NO: 19942 - DNA, 599 bp, Glycine max
  Clone ID: PAT_MRT3847_118011C.1
aacttggaacggacaagagctcataattcatgaaagcctcgaaaagggaaaacaacattgttcagtgcccctacatgactaagtaataatactcaggatcttatttcatagaaattaaggagcaacttagaggcttgatttgagagcttaatcatagtacaagggattaggcagcttaaaagtcctagtccctttgttgcttcccaggaggtcactccattggtctccaacgtttccgatgattctgtagcttctctctctcagctgaacttaccagagtactcagatggatccctgagaattaacttctcccatgtgttgaatccaacctcctttaagttcttggctgttacatcccttagactcagtggtctttctgataagaatacaatcttgatgccgagagccaacagtttgttgtacattttaagagtctctggcagtgcgaatgcctcgccatcaagaacccagttcttaaacgccgtcgtattgtgtggttccacaccaaatccatggttagcaaaatactggagattagagagagtagtgtcgtcaacgtccaagacaaagacatctttgttgttgagtttgagggattt

SEQ ID NO: 19943 - DNA, 366 bp, Glycine max
  Clone ID: PAT_MRT3847_118012C.1
ggcacaagtttgttgagatagctacaagcaataagatgaaaatgaaagtgcttgttttgtttgttgctacagttttggtagcatatgaatgccatggctcagactaccagaagttccctctccaaatgaaaactgggtttggtgggcaatacagcaatgacgtggcatgtgccagttggaggcttggcgtggaagcatacaacgtaatcaagtggcaaactgttcctgcagcttgcggagagtacatagctgactacgttctatgagaccagtatagatgagattccaatacagttaagcaacaaacttatttctatgcgaaatccctcatactcaccacgcaagatgtccttgtcctggaccttg

SEQ ID NO: 19944 - DNA, 380 bp, Glycine max
  Clone ID: PAT_MRT3847_118013C.1
ggcacacgtttgttgagatagctagaagcaataacatgaatatgaaagtgcttgttttgtttgttgctacagttttggtaacatatgaatgccatggctcagaccaccacaagttccctctccaaatgaaaactgggtttggtgggcaatacagcaattaagtcgcatgtgccagttggatgcttggcgtggaagcagcatcgtagtcacgtcgcaaactgttcctgcagcttgcggagagtacatagctgactacgttccaagagaccaattatacattagattccaaaacagtttaacaacatgcttacttcgatgccaaaaccctcaaactcaccaacaaagatgtctttgtcttggacgtttacgacactactctc

SEQ ID NO: 19945 - DNA, 549 bp, Glycine max
  Clone ID: PAT_MRT3847_118014C.1
aagggacattatgaaaaaataaatatggaattactaaggattaccccggccaatatgaaaaaatattatactaaacttttacaactgggcccaaatttaaatagaaaaaacaaggccaagctacaaagtatcaaccccccaaaaagttggcttcaagttcaaacaaaaaaaagggggggaccagctaaaaacccaagcaagcaattctccccgggggataaaaataaaaaataaaaatttttttctttttcaaaacctgggggccccggaacacaattccaaaaaaaagttttaggggggggccccttccacaaaaaattcctataggggatcattatatttgccccaatcggaatcatggcatcccctgaagggggcaaacggatatttggcaaaaacttcggatggaaaattatattccctcaaaaggatttcaaaacttctcctaggactagcccccattgggcccaaggggggcccccctgacaaaaacaaaaaagggctctttaagagggccctcgcaggaaagctcacttggccccccatcaa

SEQ ID NO: 19946 - DNA, 365 bp, Glycine max
  Clone ID: PAT_MRT3847_118015C.1
aggggcacacgtttgttgagatagcaacaagcaataacatgaaaatgacagtgcttgttttgtctgttgctacagttttggtcacaggggaaggccatggctcagactaccacaagttccctctccacatgaaaactgggtttggtgggcaatacagcaatgaggtggcatgtgccaattggatgcttggcgtggaagcaaacatcgtagtcacgtggcaaactgttcctgcagcttgcggaaagtacatagctgactacgttctaggagaccaatatacatcacattccaagacagttaaccaacatgcttatttctatgctaaatccctcaaactcaccaacaaagatgtccttgtcttggac

SEQ ID NO: 19947 - DNA, 354 bp, Glycine max
  Clone ID: PAT_MRT3847_118016C.1
ggcacaagtttgttgacatagctataagcaatatgatgaaaataaatgtgcttgttttgtttgttgctacagttttggtagcatatgaatgccatggctcagactaccataagttccctctccaaatgaaaactgggtttggtgggcaatacagcactgaagtggcatgtgccaattggtggcatggtgtggaaccaaacaacgtagtcaagtggcaaactgttcctgcagcttgccgatagtacataactgactacgttctatgataccaatatacatcagattctaaaacagttaaccatgaagcttatttctatgctaaattcctcaaactcactaacacagatgtctttg

SEQ ID NO: 19948 - DNA, 648 bp, Glycine max
  Clone ID: PAT_MRT3847_118017C.1
atccctttggaggtttagggttttggtcctcgcggctctctcctaattaaaggatatttctttctttttttcaataaccgcccatgtctaagaggtttctttgcaagttctttgctcatggagcttgtctgaaaggggagcattgtgaattttctcatgactggaaagatcctccaaataatgtatgcacattttatcagaaaggagtctgtgcttatggtagtcgctgcagatatgatcatgtcaaagcttctcgagagcaatcttctgctccatcttcttcagtaatcgaaccccagaccctggtttcagatactgttgcttttggaaatactagagctgcatcaaatggtgttgctacaggggcagagttttctctttccagtagtccttaccttcttcctagtgaaccggcttggaatcgagaactggtttggaatcaagaatttgggtatcatgaacctttatgggaagacaatgttggtcaatcaataatcacttcaccttctgagctttcaatttgttcatttgctggagctggaaactgtccacgaggcgaaaaatgccctcatattcatggggatctatgtcccacctgtggaaaacattgcttgcatcctttccgacctgaggaaagagaagaacata

SEQ ID NO: 19949 - DNA, 1441 bp, Glycine max
  Clone ID: PAT_MRT3847_118018C.1
cgcgttcgcccacgcgttctacggctgcgagaagactacacaagggggatgcacaagggggttgcgatggcttgaaccaatacagatgaaaatgaaagtgcttgttttgtttgttgctacagttttggtagcatatgaatgccatggctcagactaccagaagttccctctccaaatgaaaactgggtttggtgggcaatacagcaatgaggtggcatgtgccagttggaggcttggcgtggaagcaaacaacgtagtcaagtggcaaactgttcctgcagcttgcggagagtacatagctgactacgttctaggagaccaatatagatcagattccaaaacagttaaccaacaagcttatttctatgctaaatccctcaaactcaccaacaaagatgtctttgtcttggacgttgacgacactactctctctaatctccagtattttgctaaccatggatttggtgtggaaccacacaatacgacggcgtttaagaactgggttcttgatggcgaggcattcgcactgccagagactcttaaaatgtacaacaaactgttggctctcggcatcaagattgtattcttatcagaaagaccactgagtctaggggatgtaacagccaagaacttaaaggaggttggattcaacacatgggagaagttaattctcaggtgactttccttcttcttttaaaacctcttaatttacattgtaaatgtaaaacattttagaatttggtttagatgtgacattaaaataattgttaatcatgtgatgaacaatatgacactagttgaggttagtacaacaccaagtaactctgaatgaacactttgtcatagaagtttcattttcattaaaaaaaatcaaggtttgagtatggtccttaattttaaaaggctaaaaaaaagtgctgctttaatttggttgttgttgcagggatccatctgagtactctggtaagttatcatttgaatacaaatcagctgagagagagaagctggagaaggagggatacagaatcattggaaacgttggagaccaatggagtgacctcctgggaagcaacaaagggactaggacttttaagctgcctaatcccttgtactatgattaagctctcaaatcaagcctctaagttgctccttaatttctatgaaataagatcctgagtattattacttagtcatgtaggggcactgaacaatgttgttttcccttttcgaggctttcatgaattatgagctcttgttccattaagaaattgtccgttccaagttaaaccagtttagtattattattaagtaagtcttaaaaaatggaaggatataagtttttaaaacgaaattgtctactaatgtcttggaaggatattcataaacctatcccatccaatttgaacattaaagataaaagaaaccattatttttttgcttt

SEQ ID NO: 19950 - DNA, 1801 bp, Glycine max
  Clone ID: PAT_MRT3847_118019C.1
gatcctccaaataatatatgcacattttatcagaaaggagtctgtgcttatggtagtcgctgcagatatgatcatgtcaaagcttctcgagagcaatcttctgctccatcttcttcagtaaccgaaccccagaccccagtttcagatactgttgcttttggaaatactagagctacatttaatggtgttgctacagctgcagagttttctctttccaggagtccttactttcttcctagtgaaccagcttggaatcaagaaccggtttggaatcaagagtttgggtataatgaacctttatcggctcctaacctcatattgaccggcgggcgccatatagcatatatttaacgctataaatggctatcctgatactttcccacgcgttcggagaggacaatgttggtcaaaccataatcacttcaccttctgagctttcaatttgttcatttgctgctgctggaaactgtccacgaggggaaaaatgccctcatattcatggggatctatgtcccacctgtggaaagcattgcttgcatcctttccgacctgaggaaagagaagaacatatgaagagttgtgaaaataagcataagcatcttgatgcattgaaacgaagtcaagaaattgaatgcagtgtttgcctggagcttgttctgtcaaagcctacagcagctgaatgtaagtttgggctgctgtctgaatgtgatcatccgttctgcatatcctgtattaggaattggcgtagtagtaacccaacattggggatggatgttaacagcacattgagggcctgccctatttgtcgtaagctatcatactttgtcattccaagtgtcatttggtactcaacaactgaagaaaaacaagaaatcatcgacaactacaaggcaaagctcaagtcaattgattgcaagcactttgactttggggaagggaactgcccttttggaactagttgtttctacaagcatgcatatcgagatggccgtctggagcaggtagttttgcgacatctaggggctgcagatggtgataccgtaattgcaaaagacatcaggttgtcggatttcctttctaacatgcatttaagatgaatggtgttgttcgtatgttccagtgctttttcagtaaaccatatgcacttgataaccccaagttttctgaaatgggtacctgagaaagaacctgcactgtgcattctgtcgttgttgtaataaagtgcatgtgttaaatggtagatggacatgctatgagggtataaacttaaaataagttcaatttttaaagcagataaatccaagtatggattgatggtggtatactctatttgaagcatggtggaaagcactcttttagccatcagtgagacttttagaagcatttcttttgtctggtggatttcaatgttaatatgcaaatattgatattggggtgatgaagtttttctgttcacattattgagatcttaagatatacctttttattgtatactgggattcccttgctgtgggtggcactgcaccaagagtcttgggaaagggttcaacatatgtatcggttttgttatctcttataggactttgtcatggccctttaggggcttatattgttgacccgtttccttttgatgaatatactagtataatcgaagtttcacccattgaatatacgattcctggtgaaatttcattcaatttaagaagcctgtttgtttaagggaaaaaaaaaaaaaaaaaaaaaaaaaaaaaaaaaaaaaaaaaaaaaaaaaaaaaaaaaaaaaaaaaaaaaaaaaaaaaaa

SEQ ID NO: 19951 - DNA, 793 bp, Glycine max
  Clone ID: PAT_MRT3847_11801C.1
ccatttttcatgctgttaacaatctggagaggctgtgatattgacatacatgtgccgaaaataacttgaaatttgtgatttagtttgattcctgtgtcttttttacccttctcactaattgattctttttcctaaatcatttgcaagtttgcaactgttcctaaggtcaaggtcttacggtcaaggactgaatcatatgtcatatgtgctaagcatgtgctgagaaattgtgaaggaataaactgaatgagacatgccacctttttgctacgttgactccttgatttgaagcaaatttacctgagtatgctaaacaccaccagaagaatcacaatgaaatacactttattcatatcttactgaatttatttgagttgggtaggagtacaattcaaacaatttgcagaataactttacattgctaaaatttgttttgttttctgtatgtttaattacaaattattcttcctttttgaacagccttgtaatagtacttttacatagcatgattggttaggctgaaattgctacacaactcattcccgggaatacaattgatgaagtcacttccatccacttgatttgttgactttagttgtgaattgtagacctcagtggttgaactgtgaattagactattatgatactcttcaccaaagttttcttctaacatatgcattatagcttcttggaaagttgaattttgatcaaattcattccccaagaccaaggaatcatcagaattcactgagcttccacctcgtgccgacctcgtgccgaattcggcacgagg

SEQ ID NO: 19952 - DNA, 1458 bp, Glycine max
  Clone ID: PAT_MRT3847_118020C.1
ggtaccctccggttcggccgggggcacaagtttgttgagatagctagaagcaataagatgaaaatgaaagtgcttgttttgtttgttgctacagttttggtagcatatgaatgccatggctcagactaccaaaagttccctctccaaatgaaaactgggtttggtgggcaatacagcaatgaggtggcatgtgccagttggaggcttggcgtggaagcaaacaacgtagtcaagtggcaaactgttcctgcagcttgcggagagtacatagctgactacgttctaggagaccaatatagatcagattccaaaacagttaaccaacaagcttatttctatgctaaatccctcaaactcaccaacaaagatgtctttgtcttggacgttgacgacactactctctctaatctccagtatttttgctaaccatggatttggtgtggaaccacacaatacaacggcgtttaagaactgggttcttgatggcgaggcattcgcactgccagagactcttaaaatgtacaacaaactgttggctctcggcatcaagattgtattcttatcagaaagaccactgagtctaagggatgtaacagccaagaacttaaaggaggttggattcaacacatgggagaagttaattctcagggatccatctgagtactctggtaagttatcatttgaatacaaatcagctgagagagagaagctggagaaggagggatacagaatcattggaaacgttggagaccaatggagtgacctcctgggaagcaacaaagggactaggacttttaagctgcctaatcccttgtactatgattaagctctcaaatcaagcctctaagttgctccttaatttctatgaaataagatcctgagtattattacttagtcatgtaggggcactgaacaatgttgttttcccttttcgaggctttcatgaattatgagctcttgtccgttccaagttaaaaaaaaaaaaaaaaaaaaaaaaaaaaaaaaaaaaaaaaaaaaaaaaaaaaaaaaaataaaattaaaataaaaaaaaaaaaaaaaaaaaaaaaaaaaaaaaaaaaaaaaaattttaaaaaaaaaaaggggggggggccttttaagggaaccaattttttttcccggggggggggaagttaaattttttttttgggggccccaaaaaaaaattcgggggccggggtttaaaaacgggggggggggaaaaacccgggggtcccccaatttaaggccttgggaaaaaaacccctttttcccggggggggaaaaaaaaaaagggccccccccaatccccttttcaaaaattggcccccctcaaaggggaaaggggcccccccctttaggggccttttaggggggggggggggggggggtccccccggggggccctttaattttgcgggggcccaaggcccggcctttttgggtttttccccttttttt

SEQ ID NO: 19953 - DNA, 388 bp, Glycine max
  unsure (1)..(388): unsure at all n locations
  Clone ID: PAT_MRT3847_118021C.1
atagaaaatcatgcacaatttactttgnnnttntnaaaaaaaaaacacataccaaattaccaatatattggtatttaataacttgatgcattatgcacctttaacgtaaaattttaactgaagctattttcggaaaaattctgttccgcacacttatactttaatagagtttatcatggcacaacaaacagattttacatgttcagagtagactatgcagaccaaacggggagaaatgaacacaagaaaggagaaaactcaataaagaaggaaaacaacaacaaaaaaaaagattctcgtaggatatgcagatttggttgccaactgtacgtatctgtagaccaaaggctcacatggaattaacatgcaggagaaatgtcttccaaac

SEQ ID NO: 19954 - DNA, 1085 bp, Glycine max
  Clone ID: PAT_MRT3847_118022C.1
ctcgagccgaatcggctcgaggagaagacgacagaaggggatgcacaagtttgttgagatagctagaagcaataagatgaaaatgaaagtgcttgttttgtttgttgctacagttttggtagcatatgaatgccatggctcagactaccagaagttccctctccaaatgaaaactgggtttggtgggcaatacagcaatgaggtggcatgtgccagttggaggcttggcgtggaagcaaacaacgtagtcaagtggcaaactgttcctgcagcttgcggagagtacatagctgactacgttctaggagaccaatatagatcagattccaaaacagttaaccaacaagcttatttctatgctaaatccctcaaactcaccaacaaagatgtctttgtcttggacgttgacgacactactctctctaatctccagtattttgctaaccatggatttggtgtggaaccacacaatacgacggcgtttaagaactgggttcttgatggcgaggcattcgcactgccagagactcttaaaatgtacaacaaactgttggctctcggcatcaagattgtattcttatcagaaagaccactgagtctaggggatgtaacagccaagaacttaaaggaggttggattcaacacatgggagaagttaattctcagggatccatctgagtactctggtaagttatcatttgaatacaaatcagctgagagagagaagctggagaaggagggatacagaatcattggaaacgttggagaccaatggagtgacctcctgggaagcaacaaagggactaggacttttaagctgcctaatcccttgtactatgattaagctctcaaatcaagcctctaagttgctccttaatttctatgaaataagatcctgagtattattacttagtcatgtaggggcactgaacaatgttgttttcccttttcgaggctttcatgaattatgagctcttgttccattaagaaattgtccgttccaagttaaaccagtttagtattattattaagtaagtcttaaaaaatggaaggatataagtttccaaaaaaaaaaaaatataaaa

SEQ ID NO: 19955 - DNA, 503 bp, Glycine max
  Clone ID: PAT_MRT3847_118023C.1
gcgtagtagtagtacctcagcggtcaatcaaccgcttccgggggaacaagctatgcctcccgctcttcctgttatgcaggaagctgctaatcgggctctgccctacccctatcaaaataatgagattatagggggggacagtgttgaatccatccaacggaggcttttggggagattcccctctccttcagcccatgagattcaaatggcccggattgaagccgaaaacctattcgaggtcaaggtcgatatttgtcaggtcatggcgggccttcacccaagcggggattggatgggacggggggctagagctctggataatcttcgtaccgccactggagaggagtccttaagtaagctccttcgaatgctggaggacctacagactgcgggtttgcagtccgcaaccttccggcaattggccgacagagtggcattccgggcggatggagatcaacactctgccacctaggacatggatgagatcgcgtgcaagctaagac

SEQ ID NO: 19956 - DNA, 509 bp, Glycine max
  Clone ID: PAT_MRT3847_118024C.1
gaaaaaccgaaaagcaaaaagttttattgggggaattatagagggcccaattttatggaagggggcccaacagggtttttttttttttttaaaaaaaaactccattcactcactttttgaaccccaaccaaccaaccccatgattctggttttgaaaaggaaaggggaagggtttcaaaaagaaatccttaacaccacaatcccctaaacgacgacccgggaaaaaaaagaagaaaaaaaaaggggaaaaccccccccgaaagaaataacccagattcaaaaattaaagccgggggtcaacgtcctttaaaaggggtgaccccagttggggaaaacaacgggcttggagggcccgccggaactggaacccacctttttgaaggccttgaaaacggtaaatcctttgaagacccggccaaaaaaaaaatggtttccggggagccactttgttttttccgggcaaaaaaaaaaatgaaaaccgggggttccgggaccggggttccccatgg

SEQ ID NO: 19957 - DNA, 585 bp, Glycine max
  Clone ID: PAT_MRT3847_118025C.1
ggacaaaaggccaaagcagctttaaggggatttaaaaactgggtccccggaaaccggaaactggggcaggaaaaaaccccaaaaaaaaactgggccaaaaaaaaattatgggggagaaaaaatccccccctttatggaaaacccaattctttaaggaggaacattataatcaaaaaccaaaaggggaaaaaaaaaaaaaaaatcttcaaaaaaaaaaccccccctttgggaaaaaaaaaaggggggggcccagaaaaagcccaggaaaaaggatttcgggaggaaacacccccccccccaaggacaaaaaaaaaaagggattggctgggaaaaaggacaaccccaccctaggcaaaaaaacaacggggatgggcccccgaaaattttaaacccaaaaagcaaaagcggttccataaaccggggccgaaacaagggattggcgattaaaaaacccaaaaagagacgggggggcctcaaagggccccttaaaggtttttacccattaaccaaacgggttggcccacaattttaccttaccatccacacaaccggaagccaaaaaaaacgccccaagccgggccaaaa

SEQ ID NO: 19958 - DNA, 204 bp, Glycine max
  Clone ID: PAT_MRT3847_118026C.1
cccaaagggacaaaaaggttgtggttatggcatacctagagagcttgctgccacagccaagcccctaaaaacaggacttcatttttttgaacttggcaactgctcctcctatattgtctaatgatgttcatacctgcgctttgttctgtgcgttatgaaatgtaatgaaggggggacaattttcagtctcaatggaggcaacac

SEQ ID NO: 19959 - DNA, 437 bp, Glycine max
  Clone ID: PAT_MRT3847_118027C.1
gtcgactgcatcacggttgagtctcttctcactcaccttgtttgttttcaattttcttacatgtatcattcttggagatgttcatacacttaccttaatattttacaaaaatttttttttcctttctcttttccgaaccatcatccatgtcacaaattcttcacaagaatcatcaatgtttaaaggaataatatgcacgattgtttataagattccaaatctgtttcaatactcttataatcatgctcttttaatatcagacacatttaaagatgcttcactatcattataacaatttaaacattatttttaaaattttacatataatcacaaagtttatgcctaacaatgaacatcatatgtcatcaacaaactttttttgctatagaacatatcttctatccccaatatatatttaaaagattcattaacttttc

SEQ ID NO: 19960 - DNA, 340 bp, Glycine max
  Clone ID: PAT_MRT3847_118028C.1
cccacgcgtccgacggctgcgagaagacgacagaaggggacatcacgacatcacattggagagaataacagagagagatccatccattaattccaatggccgatcagcttaccgacgaacagatcttcgagtttaaggaagccttcatccttttcgacaaggacggggatggttttattaccaccaagggacttgggaccgtgattcggtcacttggtctgaacccaacttaggcagaactgctggacatgattaattagtgttatgcttatgggaatggtaccattgattttccagaatttctggattttatggctcgcaagatgaaagacactgattc

SEQ ID NO: 19961 - DNA, 226 bp, Glycine max
  Clone ID: PAT_MRT3847_118029C.1
aaatagtcttcgacaattgattttgctagaatttgttacaagaagcttttaaatcatgtcaagatgtaggttaagtttttaaagccagttcagatagcagtgagtattaagttttatcctccaattatggttcagctatgctattgttatggatgcatgaactaaaaccacttgtgaatttctgtaactactatgatatgaacctaatttctgtttaaaaaaaaaa

SEQ ID NO: 19962 - DNA, 634 bp, Glycine max
  Clone ID: PAT_MRT3847_11802C.1
ccggtccggaattccccgggtcgacccacgcgtccggttgtatagttaagacgtagcaaagatgttgccattcggcctcaggggtcagatgatttgggggctatggtggggtatgacagtaatagtgggttgcttttcacctgcatgacccgtggtgacctgatcggggcctcccgcttggactcgttattcagttcgctctgatacaatcgctcttttaggcgcctgcaccttcctccggctgactatggcttccattggttgcggcgggaatggcatatttgtgaggctacgcttgcgttaggctggataaccttcccgtcaatgctagctatggaggaagcttcctgtgctcgctttgtgtggggcctagacttgctggcttgccggtgccttggataggtggacctggacccaggactgggtcttccgggggggttgaatggttgtcagccgttcccgtgcgtggaaccggtgactggatgcggggcctgtttgttggcgggggctggcgctggctgactggtcgggcggtgtgtgggcgcggggggtggtcgggggatcgtggcggggggcttcgcgtgctggggggcggggggtggcggctggggggtgggggggcggggggggtggg

SEQ ID NO: 19963 - DNA, 251 bp, Glycine max
  Clone ID: PAT_MRT3847_118030C.1
ctactaccttccatttctccttctgtaacatattgctcacgaaatcaaatgatgaaaatctgagtttgatttcatggttaaagaatgctcaaaataatgtatgttgtatttttagtttaatcaaatagtcttttggtctagcaaaatagcctttttcattttagtccttgcagaatttcttgagcacttgttgttcttacatttttagtcccaataaaagcatataagtataatttaaatggttttaaaaa

SEQ ID NO: 19964 - DNA, 495 bp, Glycine max
  Clone ID: PAT_MRT3847_118031C.1
agacgcgtgggaacagcatccctgcctttgctaggtggtgatatcctcagccacatatcaaaaaccctgacgttggtaacagcgaacatttttatttgctctacaaaacctccaacccttacctatttccccctggtacacgacaagacaccggtggttacgacgttggcactaaatttcttcaaggacctcctggttgtatttatgcatgcacgcatgaaccccaaggcactacctgggcactgggtcctcacagaaactggcccctaaatgggaccataggcccttttttctgggactgtgcaccaggacatgggaccttctgacgacgttactttctaacccccgcctcagagagcgcccccggagcgagaactgcatccccaggcccgcttgcataaccggggcaccggtgggtctcataatggaacccacgagggccctgataaccggagccgaactgggttccaattctggaaccagggcccgcgcact

SEQ ID NO: 19965 - DNA, 348 bp, Glycine max
  Clone ID: PAT_MRT3847_118032C.1
gcttagcatgctatactcatgaatatgccaaatgctcggcttacaatggggagatattctggaggacatcacgcctttgaagtctctctaatgacttgtgcctacattaaaagggcagagtctatcactctctgagctggacacaggcttggtgacaccatcaattttgaggctttagcccacaagctggacgctctccgtagagatacaggaacaaagtgtagagaaaaactacaagaggattttcttacagcttggtcaactcaggagcgcactgcggcaactatgtggactggtggtcgcacatatctatctgctataggacatgatgggtcaacgtctacaata

SEQ ID NO: 19966 - DNA, 994 bp, Glycine max
  Clone ID: PAT_MRT3847_118033C.1
ctcgagccgctcccgtgtacagtttgcttacacaaaaagccacctctgacctctctttcttcctttcagttcagaaactcccctccatgaccgtacagtctagtatggttagtaatctacaatgcttcttgtcttaaagccaaagcattaagttaatgttttttcattagaccaaatgggtaaggcttccaaatggtttcgcggccttctcggtctcaaaagaccagactcgccgtctcccaaagaaaaacgccgctggaccttcgtcaagtcctacagagaaaaggaccccacccgcatcgtagccgccaccccccgccgctgccctgccaccaccgccggaggcaatactcctgaagaatgggctgccgtcaagattcaagctgcctttcgaggctctttggcaaggaaagcccttcgagcgttgaaaggattggtgaagctacaggcattagtgagaggtcacattgagaggaagcgcacagcagagtggctgcaaagagtgcaagcactcttacgtgtacaggcccaaatccgtgctggccgggcccaaatccggcaccccccctcttcctctgccctcccccgccgtcccgcggcacctgaccttcttgttgtccccgtctgatccgagtgcgtgaattttggtctggacgcgtccccacgactctagagaaacagctctaaatcccgtgtacagatcaatggcggcaatcaacagagatgcaggagtagatcatcagatagtcgcattgatgaacaaccatggactcaacgaagatcatggaccagaggctgtagtatggatgaagagagaagtgtgaggattctagaaattgattctgtaaaaccacacgtgacatcaaaacgtagaaacctcttctactcccctagccaagctatggttgcttcggatcattacagtgggtgttatttaaccaccacaagtccatcttcttataatagccctctaaaaatcaactagcttgaggag

SEQ ID NO: 19967 - DNA, 290 bp, Glycine max
  Clone ID: PAT_MRT3847_118034C.1
tcatcttcaataactaagtatcgattggtttctaataatccgagatcgggccccccatatagcagtccactaccaaactcatctccatctccaatcttttttctccatcttttcactcagctctcaacatcttcttctaccaattcgacaattccaacatctcttactctaccaccaatcttttatactctgatcctaaatatgcacaactttatcacaaacatcgcatacttcaatctcataactacgcttctcattatctccataattaccattattatatataccac

SEQ ID NO: 19968 - DNA, 2056 bp, Glycine max
  Clone ID: PAT_MRT3847_118035C.1
aacatcattaggctcgaggtaaacaaaaaccactgcaatttttctattaggacgaccaccgcaaatggcagcattgaacctttgccgcatggcacttcgatcctcgaagcttctctctcgcccttatcatcttctttctgttcagttgcagatgcagatgcagccctcttctcctccactcactcgaaagatgagcatggatgcacagagtgttgcttctcagcttaatagttctggattgttgaggactcagggccttattggagggaaatggagtgatgcttatgatggcaaaaccataaaggtttataatccagcaactggtgaatctattgtagatgttgcatgcatgggtggaagagagacaaatgatgcaatttctgcagcctatgatgcatatggatcttggagcaaaaccactgctgctgaacgaagcaaattactgaggaaatggtatgatttgctaatggtacataaagaagaacttgcacagcttataaccttggagcaggggaaacctcttaaagagtctgtgggtgagatagtctatggggctggctttattgagtttgcagctgaggaggcaaaacgtatatatggggatatagttcctgcacctttttctgatcggcgattatttgttctaaagcagcctgtaggggttgtaggtgcaattacaccttggaactttccccttgctatgattactcgaaaggttggtccagcccttgcatgtggctgtacagtggtcataaagccctctgaacttacacctctcactgctttagctgcagtggaactccctattcaagctggaataccaccgggtgtcgtgaacgtggtaatgggaaatgctcctgatattggggacgctttacttgcaagtccacaggtaaggaagatcacattcacaggctcgacagcagttgggaagaaattgatggctggttcagctgaaacagttaaaaaagtatctcttgaactcggtggcaatgcaccttgcatagtttttgatgatgctgacctggatgttgcagtaaaaggaactcttgcagcaaagttccgtaacagtggacaaacatgtgtttgtgcaaatagaattattgtgcaagaaggtatatatgagaagtttgcaaatgctttacgtgatgctgttcagaatatgaaagttggggatggttttagtgaaggtgtgtcacagggtcctctaataaatgaagctgctgtaaaaaaggttgagtccttaattcatgatgctacatcgaagggagcaaaagtaattcttgggggtaaaagacatagccttggacttactttttatgaacccacagtcatcagtgatgtcaacagtgatatgcacatatcaagagaggaagcatttggacctgttgcaccccttttgagattcaaaactgaagaggaagctatcagaattgctaatgacactaacgcaggtttgggttcatatgtatttacaaacagtatccaacgatcatggcgtgttgctgaggctcttgaatatggactagtgggtgttaatgaaggagtaatttcaactgaggtggctccatttggtggttttaaacagtctggccttggaagagaaggctccaaatatgggatggatgaatatttagagatcaagtatgtgtgcttcggaaacatgaacaaagaatgaagtacgagacagtgccaagcaaaatagggaggagtcaccttgcgtttcttagttgaagaatatgcatatagctgcacacgtgttgtatacaaataagtgctggcttgcaaagggcctcctcatttttctgtttggttctttttgctttcctttttcattctctttatttttcacagatttttagaatattaaaaaatgcactgtgaaaggtacgaggttagtaaaaaaaagaaagaaaagcaattagcctttgacccctttggtgtaacgttgtttcattgtgtttttccaaatcaatgaactcaaaaatccaaattggatcggtttgaataaaggtgttagattgtgtctttcttcccaaaaacaatacaaccctgt

SEQ ID NO: 19969 - DNA, 1027 bp, Glycine max
  Clone ID: PAT_MRT3847_118036C.1
aaaaaagtatctcttgaactcggcggcaatgcaccttgcatagtttttgatgatgctgacctggatgttgcagtaaaaggaactcttgcagcaaagttccgtaacagtggacaaacatgtgtttgtgcaaatagaattattgtgcaagaaggtatatatgagaagtttgcaaatgctttacgtgatactgttcagaatatgaaagttggggatggtttcagtgaaggtgtggcacagggtcctctaatcaatgaagctgctgtcaaaaaggttgagtccttaattcatgatgctacatcaaagggggcaaaagtaattcttgggggtaaaagacatagccttggatttactttttatgaacccacggtcatcagtgatgtcaacagtgatatgcgcatatcaagagaggaagcatttggacctgttgcaccccttttgagattcaaaactgaagaggatgctatcagaattgctaacgacactaatgcaggtttgggttcatacatatttacaaacagtatccaacgatcatggcgtgttgctgaggctctagaatatggacttgtgggtgttaacgaaggagtaatttcaactgaggtggctccattcggtggttttaaacagtccggcctcggaagagaaggctccaaatatgggatggatgaatatttagagatcaagtatgtttgcttgggaaacatgcacaaagcttgaacaaaggtatacatgaggcagtggctagctagagggaaaagtacttaccttcagtgagtttgttgaagaatatgcatatagctgcacacgtgttgtatacaaataagggcaggcttgcaaaggacctcctcatttttctttgtttttctttttcttttcattttcattgctttctttttatggtcttttagaatattaaaaaaatgcactatagaaggtaccgcacgaggttaacaaaaactatgaaaatagcctttgacccttcttggtttaaaaaaaaaaaaaaagggcggccaaagacaagtgagctcga

SEQ ID NO: 19970 - DNA, 349 bp, Glycine max
  Clone ID: PAT_MRT3847_118037C.1
ttggtcttgatgttttttttttttctttgatctttttttttttttttttgaaaacaaaatgcagagagcccatataggttatcaaaaacaaaatccatgggccctaaggggattaataaaattttttgatgcctgggggaggccaaaaattttatttggtccccccccgtataaggcgaaaaataaaattgtcctgggactggtttgggatgggagactactttttgataaaaagatgttttttgttgcccaatttgaccttaagggagctttttccctttaacctttagagccaaattgggagtttacctacccgtgttttcgacctaattttttttttttagggccc

SEQ ID NO: 19971 - DNA, 432 bp, Glycine max
  Clone ID: PAT_MRT3847_118038C.1
ccttcgcgtgcgccgagatcacaggatgccgcaccttaaaaccggaaacaaaagcactcgttacttgatttcaagaatctctcaattactacctacttatttgcgtacgacttcttaagggacagaaaatcactctatgggctggccacatacttgctgaatcattaccttttccactcttggtttattcgctgaacactcttctatttgacataggactatgtgacagacttaaacttgtcctgtctatatctcagttgtctgtttaatagcaagttcaagctggtgaaatcttggattagggctcccactctcctatctggcataggactatgtgggtagacacttctatggctgacctttctatcactctcttcttctcactgatccgcattgccgtgcaacgtggtgttattcgaaaaacacttgggc

SEQ ID NO: 19972 - DNA, 222 bp, Glycine max
  Clone ID: PAT_MRT3847_118039C.1
ccggcccgaaatccccgggcggactcaacgcgcccgccatgcggaccggcacgcgaccgaaaacgcgagggggacgtttataacacggtgcggggtttaaaaaccggaaacaaaagagagcccactagacagaaagaatcgggaacaggaggccactcccgtgcgcccaattggataagggacagaacacaactcaccgtgcaggcaacagactgcgaggaa

SEQ ID NO: 19973 - DNA, 418 bp, Glycine max
  Clone ID: PAT_MRT3847_11803C.1
aataatttgtgggatgttttatatctgggctgagttctaaaaaaagtgggaacaaccatgggtgtggggcagtgcaaacataccaaatgtctctaataactcgctggtcatgttatcatcatatcaatttttggaaacaaggaattgatagaattctccttaatcttcttattgaaaatattcaagaccaattgtctcagcctctcttttcattgtaaaaacaaatatccatttcaaaagagggattaaaagccaattatcatcttgttcttattagttatctgtggtacattcttgggtggcttactatatattgttgagaaaatatatacccttatactcattaaatcaaactctacatcaacttactaaatacatattcatgctttaaatttgcgtatacactttaaaaatgttt

SEQ ID NO: 19974 - DNA, 765 bp, Glycine max
  Clone ID: PAT_MRT3847_118040C.1
ctggccatcaccgcccccgccctgccgtgggcagtggcccgagggcgggctgcgagccgcgcaatgtcgcagactgcggctccgggggtgggggcttcacggtgctgcacgagcctcactcgggcctagtcccatgaggcctgcgcaccccggcactgaaaccacgagacggcgcaggaccaccgctcttccggcccgtgacggagaccgagcgtgaggcgcgccggggctcagggcatctgagggccctctccgggcgtcgggctcagggccgccaccaccaccactactaccaccaccacctcggctcctgccggcgccgtcgcctctcccgcccacccctcgccatgtccgaggaactttcggcggccacgtcctacacggaagatgatttctactgccctgtctgtcaggaggtgctcaagacgccggtgcggaccgcggcctgtcagcacgttttctgtagaaaatgtttcctgactgcaatgagagaaagtggaatacattgtcccctatgtcgtggaagtgtgactagaagagaaagagcatgtccggaacgggccttagatcttgaaaatatcatgaggaggttttctggtagctgcagatgctgttcaaaaaagattaaattctatcgcatgagacatcattacaaatcttgtaagaagtatcaggatgaatatgggtgttttcttctgtcattccaaactttaagatttctcaagattcagtaaggagcagtaataggagtgaaacatctgcatc

SEQ ID NO: 19975 - DNA, 332 bp, Glycine max
  Clone ID: PAT_MRT3847_118041C.1
gaaaatcttggcactagtgcatgattggttgcatttggcttttggcttttgcttctttcataggcgctatattatatagcttgtgtattaagaaatcatattttactaactttattgtatatataatgcaattttgttaccccctgcctgaaaatgctttggactgtggtaaataatatatattggtgaatggaaaactatctacgtattctttaaaaaaatgttgggaatggggcaatcatgccttcaaggcatgttcagcaacacatgtataacatgtggtgggtataaccctcatctgtctaaatatatgttgtattttctttgctcat

SEQ ID NO: 19976 - DNA, 309 bp, Glycine max
  Clone ID: PAT_MRT3847_118042C.1
ggggggggaaacacaaaaggccccccccttttaaggggaaattgccttccaaggtttcttttgcaacaatgggggaaaaaataattcaaaaggggggtctcaaaatgggttgcacccccctttttaaccgattttacaacccctttatttccttgtttcaaaaaaatttttattgtcctttattcagcgcccccggatttttaaggggggccttcaacccctttttcttatttgcaaaaaaagggtttttttccctttcccttaggaatttttttcacccctgtcccccccatttttccaagggggggg

SEQ ID NO: 19977 - DNA, 1566 bp, Glycine max
  Clone ID: PAT_MRT3847_118043C.1
ccacgcgtccgaatttttataaagctttgcagtacacttacagtgtgaattggacaagggaaattgactatatatctcccagttgttttatgtacctccttgaccgccttctgctcttaacatcacacgggaagtggaaggggttcatttttgctacaaaatcatcgtttgttgaatggcttattcaccaggatgaaaattcctttccaaatttgagtgtaatggctgatgtacaatcaggtggagagcatatccataggttcattttttctgtcctccgtgagcttcttaatgatcaaaatggtaccataagttggattagaaaatcaaatctcaatgtgaaaaattattttccgttgtttcttctgagattgattgtttcgttatgtttgcttcatttgagctctggaaagtatttagagttacttcacaatttgttgaagaagaaccatgtgttgtctcaactgccactggaatttcgtaatgttcttcagcgaccaaggaatccgctggttttgaaagtctttgctgaggcatttaaactgattggcaatcccttggtagttgccaggtttcataacacatcttcagaaattttgtgtccagatgctgtgtttgtggatttaacaatatgccaaagaaagttcatattagaagtattgtttccaaatagagttgacagtgtggatgaggaaactgcagcagtattagaagcttctgactcaacgtctaaggagttttcttcaacaaactgttccagttttccaaataaaagctctcctattgttactgctcagacatcagatagggagattattggcatgtctaccaatgctgactctttctgggctacgatgaataatttatggtttgcaattgatcataaggtgctacacaattccacaatcacaaaggaacttttgaatatttggattgatggtttgagtcatggaatgcatggaagcttgtcagaaaaccctgttaaccttgatgacaaaaatgaagtggaggaggtggtgaacttgcttgatgaaatgaagcaacttttttctgcattggctacgagtggtgatggagcgattgagaatcacgctcaaattggggaactatgtaagagaattctttcaagacgaccaaaagtagggcacgtcatgaataagctgtatttgctgtccatggagaatagcaatgttgggaatgagtcatcacaagccaaaactgcagtagccaatgatgagcatgggcaaaatgctttagaggaatcaaaagataacttgtccaagaattccgaaggtgcccccaactcaggacatggaaacatcaaggaaaataccaaggggaagaaaaccaaaaaaaagaaaggcaagggtgggagaaggggtaagaagtgaaaatgtacttatgactggttgtttgtatattcagatatataggaatatgtgttcaaactttaaactgtctggttggtctatctttgctatattttctttgctgtggacctgattttggacttttaatcttgatcatctatgaaaagttctttataaatttaagccctcgctcttt

SEQ ID NO: 19978 - DNA, 418 bp, Glycine max
  unsure (1)..(418): unsure at all n locations
  Clone ID: PAT_MRT3847_118044C.1
gttagttcacacactaagttctgaaaaatgagttccaaagtttttcttattctacttatgttcatggccactatacttttgatctcctctgaggttgcacccgatgatgcataccagaattttgacaaaacagatgggaagcgtagtgcaaatggggtagatgaaagcaaatattggcgtggtggctatggtggtgggcgtggtggctacggaggttgggtggtggctttggccctaacgaacataatgaggctgggattgatgctagccctcacaactaagaaggaaacttgctaaagcttatataggatttaagttatcgtaataaataaaacttcattgggagggagttataatagatggtggaatctttttcgctcngtcatataaaggaataatacttttctattaattcctt

SEQ ID NO: 19979 - DNA, 434 bp, Glycine max
  Clone ID: PAT_MRT3847_118045C.1
gttagttcacacactaagttctgaaaaatgagttccaaagtttttcttattctacttgtgttcgtggccactatacttttgatctcctctgaggttgcacccgatgatgcataccagaattttgacaaaacagatgggaagcgtagtgcaaatggggtagatgaaagcaaatattggcgtggtggctatggtggctggcgtggtggctatggtggtgggcgtggtggctacggaagttggggtggtggctttggccctaacgaacataatgaggctgggattgatgctagccctcacaactaagaaggaaacttgctaaagcttatataggatttaagttatcgtaataaataaaacttcattgtaagggtagttataatagatgtggagatctttcttcgctctggtcatataaaggagtaatacttttctat

SEQ ID NO: 19980 - DNA, 423 bp, Glycine max
  Clone ID: PAT_MRT3847_118046C.1
acgatatgtactagtgttttgttagttacacactaagttctgaaaaatgagttccaaagtttttcttattctacttatgttcatggccactatacttttgatctcctctgaggttgcacccgatgatgcataccagaattttgacaaaacagatgggaagcgtagtgcaaatggggtagatgaaagcaaatattggcgtggtggctacggaggttggggtggtggctttggccctaacgaacataatgaggctgggattgatgctagccctcacaactaagaaggaaacttgctaaagcttatataggatttaagttatcgtaataaataaaacttcattggaagggtagttataatagatgtggagatctttcttcgctctggtcatataaaggaataatacttttctattaatttccttaa

SEQ ID NO: 19981 - DNA, 233 bp, Glycine max
  Clone ID: PAT_MRT3847_118047C.1
aaaataagaacaggggtggaggcgagaaatcaacatggaaccctaacaaataaactatagctgaccgccccctaaaccaaacacagcatgagaggataatgcagacccatattttgcgcagcacggaactacgcgggcctatcttcaatgaagactagggtacaccaaaaataaccctggaaagtaatgcataccaacgggggcaatgaccaggtaaggttataactagaccc

SEQ ID NO: 19982 - DNA, 286 bp, Glycine max
  Clone ID: PAT_MRT3847_118048C.1
ttttctctcttttggtaataaatgaatctattctttgttgttttttagtgtgaaaaaatatcattttgcaccccaaagatacatacagttaggataattatatttaaactcactctttctgttaatctattttttcatctaatttttctttttaatttaatccctttacttgtcatgttttcacattctttctctttctctttcttttctttgcttttttctgaatcctttactctacacctatatatccactccaaatttagatggacattaacctttaaccttc

SEQ ID NO: 19983 - DNA, 666 bp, Glycine max
  Clone ID: PAT_MRT3847_118049C.1
cccacgcgtccgttagtgttttgttagttcacacactaagttctgaaaaatgagttccaaagtttttcttattctacttatgttcatggccactatacttttgatctcctctgaggttgcacccgatgatgcataccagaattttgacaaaacagatgggaagcgtagtgcaaatggggtagatgaaagcaaatattggcgtggtggctatggcgactatggtggttggcgtggtggtggttggcgtggtggctatggaggctggcgtggtggctatggtggtgggcgtggtggctatggtggctggcgtggtggctatggtggtgggcgtggtggctacggaggttggggtggtggctttggccctaacgaacataatgaggctgggattgatgctagccctcacaactaagaaggaaacttgctaaagcttatataggatttaagttatcgtaataaataaaacttcattggaagggtagttataatagatgtggagatctttcttcgctctggtcatataaaggaataatacttttctattaaaaaaaaaaactaaaaaaaaaaaaaaaaaaaaaaaaaaaaaaaaaaaaaaaaaaacaaacaaaaaagcaacacaaaggcacaagaagaagaacataaatgaagcgaaaatactaggggaac

SEQ ID NO: 19984 - DNA, 184 bp, Glycine max
  Clone ID: PAT_MRT3847_11804C.1
ggtgcaagcaagtcgtttgagcaggctctcaccatggccgattagggacacagacgaccagacccagatagacgactcggctagttgaggactgtcatgccgactaccagtagtgcgcgaatacgatgtacagccgtacaccgagatcgactccatcgtgctggaacgaggaagacgcggaaga

SEQ ID NO: 19985 - DNA, 1990 bp, Glycine max
  unsure (1)..(1990): unsure at all n locations
  Clone ID: PAT_MRT3847_118050C.1
cccgggtcgacccacgcgtccgcattgacttacagcgacgaaggaggattgatccataattggggatgcgctcaccttgcaaactgttgcaatcctatttcagtttacatgggagacacggtggattattcttacttgagcagcatcccaaaaccaggcagtgtcgtggctaagaataaagcatacaaaaatctgctaattgcatcacttcctaaaagttttgtacagagaaaccatgggcatgtcatttcactgatccgtggccgctttggaagtagagatatgagtggtatcacattttttttacttaaagttgctgctttagagatcattaggaggttctccaagaggagatgcccatgtgtatggcgaggccttcaggctctacaaatcctatgttatccaccatttaaatggattcagagcttgaaaccatcaagggcttagtttaccagaaagaatgatgatgagcttcggagattttatgcagcttctaataatgatttttcatgcttccttacctcaatcaagaagaccatcagcgacgaaggaggacttatcagaattctttcagaagaagaactgaaaatgtcatcaaaaatggtgttctggcatgggtctgatgtggggcagagaccttgcctaatcattaggtttgggttagcctgcagtacattgacatctgaagatagacctcgatttgctcaggcagtcatatcacaggtagaatatggagtcctgcacttggttgatgcagacaacccgcaaattacggtgttggtggactgtgaagggttgtctccagtgagaattcccatgcaaataatcagatcctgttcttcccttctgaaagaccactttcctaatcgtcttggttgcatgtttgtcatacgattgccagccaatgttcatgttattgcccagacttttattcaggatttgaagcctgctacgagaaacaagttgaaaatagaaggggagatgcatcagaaagttctttctgactatatgccaacactgccttcatatcttggaggctgctgcacctgcatgaaatgctccaacattggccagggggatatgctgcaaacttatgcaactgggaccagcaggagagatgggttggaggataccagtgacagtgacaatgacaatgaggattctccaacattgcatccttgcgatgaattagaaggcaacttatatggtaattatgaccagttgttgagaactgctatagtaggcattcttatattttgggtttttatagctcttggtgctgtagtatttgatcccagtaatcgccactagccctgataatgcaagacacgtcaaatttagtttgtatcccttgacgagtaaatctttcttgtgggcggcataatcctcttccaacagtaacactgcatacttttgtagattcttcagataaaaaatatctagttatcttttcaattttataactcttgtaacaaataaaataaaatcatgtcaaatattctaccttagtagatagacctcgatttgctcaggcagtcatatcacaggtagaatatggcgtcttgcacttggttgatgcaggcaacccacaaattacagtgttggtggactgtgaagggttgccaccagtgaggattcccatgcaaataatcagatcttgttcttctcttctgcaagaccactttcctaattgtcttggttgcatgtttgtcattcgactgccggccaatgttcttgttatttcccagacttttattcagactttggagcctgctacgagaaacaagttgaaaatagaaggggagatgtatcagaaagttctttctgactatctgccaaaactgccttcatatcttggaggctgctgtacttgcatgaaatgctccaacattgaccatgggaatatgctgcaaacttatgcaactgggaccagcangagagatgggttggaggacaccactgacagagacaatgacaatgaggattctcc

SEQ ID NO: 19986 - DNA, 1327 bp, Glycine max
  unsure (1)..(1327): unsure at all n locations
  Clone ID: PAT_MRT3847_118051C.1
gagagatttgccaacattctcttcttctcactcaaactttccctctctgcgccgttcctctcaaatggatccaccaatgaagtattatttttttcagcgcattcaacctttctcttcctcctcactcaaacttcccctctctacgccgttcctcccaaatggatgcaccaatggagttttggggtgttgaggttaaggttggtcagaccgtgacagttgacccaatggatcctgtggattcatacatacacatatctcaggttgcgctcggagaggcgaaaaaggagaaacctaatgagtctgtggttttgtatttgaaagttggtgaacagaagattgtcttgggaaccctttctagggatggcattcctcatctatcgttggatttggttctggactccgattccgagctttcccacacttcaaaaagtgccagtgtctttttctgtgggtacagagtactaactggcgacaacaatgcttctgacttttctgatagtagtgaagaggacgaggaacttgcatttttttgacaagataatggtgaaggtgcgaaggttaccaaaccttctaaatctattcccaagattggtgcaccagcaaaaactgctgatcctaagaaagacgaggatgatgattctgatgatgaatcggatgatgatcttgctggtgaagatgaatttggaagttccgatgagatggatgatgacagcaatagtgatgaggagagtgatgaagagacccctgctaagaaggtggatcagggcaagaagagaccaaatgagtctgcagcaaaaactcctatttctgccaagaaagctaaaactgctactcctgaaaagactaatggtaagaaaaagtgtacatgtagcaactccccatccttcgaaaaagggtggaaaaacacccaacagtacaaaaggccagtctcccagttctgctggacaactatcttgcgcaagttgtaaaaagtctttcaccaacgaagtcggtctgcaacaacataagaaggctaagcatggtggtcagtgaatattgatactgccatgtagtaattttcccctgtattacagtgagtaggttcggaaggttggtaattttatcctcactattaggctagtaaacgaaacttcgaaattttgttttgatgtttatgagtccctatatattggaactgctgcatttaaattttgttaatcattcaatgcttagaatattgtgttgatgtttggtgctttgctttttctattgcggcattacaactctttcaaatctaaaaaaaaaaaaaaaaaaaaaaaaaaaatgagaatgggggtattcnntaacc

SEQ ID NO: 19987 - DNA, 291 bp, Glycine max
  Clone ID: PAT_MRT3847_118052C.1
ctgataactctatctgcacaagaaacattttgtttttgatcggagttaaatttcttcgatgtactttctttagcggtggcgttaccaaatgcataattgaagccttcaggcttaatgataaactaagagagccttacaagaaacactaccgtccctttttgaatgatgaggtatggtgtcttaagaatttaaaaagaaaccgttatccttacaaggatcttttgaagaataaaataaaaactgtcaaggatctttttggctcgaacacaattctttcattacgggagaaat

SEQ ID NO: 19988 - DNA, 445 bp, Glycine max
  Clone ID: PAT_MRT3847_118053C.1
aagttcaaaccatcctcacatcggattaaaatttacaaacccctgtcaggtatacagggtcgcatatgcaaaaggacaaaggtagtgctcataatcctcagatcacatgcagaagacactctcttcactacactcatagtccggagactggttgtactgacagcaagactaggacactgcagtccatgcatcatagtccagagaaattcaaacacgagcccggatgctattgaaatatgcgcgagtgctgcactaaagcaaagagttcagacctgtgatctatgagataatcgtcctgccttgcaacacccatattgccttgacctggacacatggcaacgtcctggatgccaatgattatggccgccccggtctaaacgactgtaacatcatctggatgcttgttccctggaatgagtccaccaggctaagcctgaatgactat

SEQ ID NO: 19989 - DNA, 317 bp, Glycine max
  Clone ID: PAT_MRT3847_118054C.1
ctggtcaaggatgtcggtgagccaaacacgactactgcctatatatattacaatgcgggctcatgtctgagacatcacagattatgcattttggcggcgggctacatacaccactcattattacattgttatttcgaagggcatcgatgagaaccctactacataagctagccatgtagctctggttctgttaactataaacgaaccctgtttcagcatgtatccattatatcaccgcgggtaaagggagaccactattacaactgggcccaatatggaacctaaggtaacattcctgtagctatatactatgttgg

SEQ ID NO: 19990 - DNA, 227 bp, Glycine max
  Clone ID: PAT_MRT3847_118055C.1
cggctcgagcggctcgaggggccctagtcaaccattgcagggttgagcaaaattgggcaatggtctgagaaattctgctccaattgggttcaacatctagataattttatgaatatgcagatttctgcccaggcagggtttaagagaagtttgtttgaaaggctggttcttttgggtcatgaaaaacaccgtctcaatggtcaatatagagtgcgtccatccattag

SEQ ID NO: 19991 - DNA, 1536 bp, Glycine max
  Clone ID: PAT_MRT3847_118056C.1
gaaattgctaacattctgtttcttccattgttctttggtcttcttcctccaacccggtctctctctctctgcatttttgctgctttgagtgtgtgttgttctgtgctttttgtggaccgaattgcccctactcaggtaaagagaatgattctcacaaagcagtatcgatgcgtacattcagctagctgtcaatgcaccaagggtcatttaagtgaagatgtgatattcttggtgtttcagcatttgaattggaacccgaagctaattgctgctctgtcatgtgtgtgcaaatggtttgaggatctttcaaagcaagttctatggaaagaattttgcaaaacgagagctccgaagatgatgcttgatctgcaatctagtggaagccacagtgttgatgggaactggagggctctggggaagcttcttatattctgttcaggttgcaggcaaggcagtttgttcaataacgttcaggttcattgccattttgttaacaagactcgattttctagaacatcaggaaagagcagtctcatgccacaatgcataaatgatgttttgtatgtgtctgatccttgtgagcatattggccaaagtgaagagggcgatttaggattcttccgaggaattttcaagtcttttgcatcctcaaatgtcagcaggatgttacttaataaagaggcttaagatcattgatccgattttttatcatactgtaatttatagctgttgagcatgctgcaggctaatatgactccacagaatgcaagttttatatttgggttcctatggtgagcatactgaccaaggtgaggaaggaaatgtaggcttccttggtggctgcttattgttaccattgtccgattcagaagatgtgtctgaggagtaagatattaatgactcaggtattatctaatttcgcccgtattgtaaggttaagttgtggagcatgctgcaagccaaaatgatccctcaaagtgctagttgcaggttgggttcttatgatgattgtattgagtattatgtgtgcctcaacggccacatgcttgggatatgtacactgttaccattgtctgattcagaagaggcatctgaattggagtaatacctaaatgattttcaggttggcagtaaatcttcacaagttggctaaacactgctggtatactccaggctcaattcaactaatcagcacctaaaatatgccattaacttaccctcaagcttgatgctgcaatctcacccaacccaagccacaatttccaaggaaggacggagatgatcaatttttagtatgaatcgttatactgaagtttgttactgtgaactatgtgatatcccatgtagattgatacgcggtgtctctacctgtgacaaatatgcgtgtgtaataattcatacttgttcaatataatcaggattcattctatatcactttactctccaaccccctaccccggttgatgaagcatacaaaataaattggatttaaataagaaacagtattctttcggttctggctcttctcgcagccgt

SEQ ID NO: 19992 - DNA, 486 bp, Glycine max
  Clone ID: PAT_MRT3847_118057C.1
aacccgaaaaaaaaaccatccccccgcgcgacctaaaaggggccaccaaaaaccaaggggaaaaacacaggaacaaaaaaaaccccaaggggcaaacttcccggggaggcccccctaacggaaaagggggggaaaccggaacccggaaaaaaaaaaaaaaaggggggaccccccaaaaggggggggggacccaaaaaaaagcaaggaccccggaaaaaaaacaccgaacccacggaaaaagggctccaaaaaaaaaaaaaaatgcccgtaaaaaaaaaaaaacttcccccgggggggccacttaaggcggcaaccaacaaaaggttttggcccggggggaacaggacggccaaaaaaaacacaacgtaaggcccaaccaaaaggcccgcccggggggggggacattataacgggggcgggaacaatcaaggggcccggaaaaaaccgccgcaagggggcccgggcccccccttaggaaaaagggaa

SEQ ID NO: 19993 - DNA, 188 bp, Glycine max
  unsure (1)..(188): unsure at all n locations
  Clone ID: PAT_MRT3847_118058C.1
taatggggagcaaaaccctaatccctatttggctggctcantagtgtcatttacgcgtctcttctctgcagcgactatgcctaaccctaaggtcttcttcgacatgaccatcggcggtcaatctgctggccgcatcgtgatggatctctactccgacgtcactctccgcaccgcctagaacttccgct

SEQ ID NO: 19994 - DNA, 1640 bp, Glycine max
  Clone ID: PAT_MRT3847_118059C.1
ctcgactatactacggagatggaaacgttgaggccatgttcgccacgcttgatcctttacacgatatgctggagcgcggtccggaaactctgcgagaaatagctttccaacagtcctttggcagagatctgcaagacgcccgcgagtcatgtcgacgcttccagcagtatggcgaactgaacgacctgaatcaagcttgggatctgtactatcagatattcaagcggatagcgcggatattaccgtccttctccatcctcgagctgcagcaagtttcgccgaagctgcttgctgcaagagacctagaactggctgtcccaggcacctatcactctggcaagcccatcatccgaatcagcaagtttgcagagtctctagacgtgctcacatcgaaacaacggccgcggaagctcaaagtagcaggcagcgacggcaaagaccatgccttcttgctcaaaggacacgaagatctacgacaagatgaaagagtcatgcagttgtttggtcttgttaataccttgctgagcaaggatcctgaaacgttcaagcgccatcttatgactataccgtatcctatcattcccttggcgccaaattctggtctgctcggctgggtagacaatacagatacgctccacgtgctggttaagaattatcgagattctcgcaaaatcctgctcaacatagagcacaggatcatgctgcaaatggcgccagattacgatcatatgatgctcatacagaagatggaagtcttcgaatatgcgctagataatacgactgggcaagatttgtaccgtgtgctatggctaaagagtaggaattcggaagcatggcttgatcgtcgaacgcagtatacgagaactttggcagtaatgagtatggtcgggcacatcttaggtctgggagatcgtcatccgtccaatttgctgctcgagcgtatcagtggctctgtagtgcacgtcgatttcggtgattgcttcgaagttgcgatggtccgcgacaaatatcccgaacgagtgcccttccgtctaacaagaatgctgattcaagcgatggaagtcagcggaatagagggcacgttccgtataacatgcgagaatagcatgagggtattgcgagatcacaaggagtctattatggctgtactggaggctttcgtacatgatcctcttatcaattggcgtcttatcaatactggtagaagaggtggagcgggggccaatgagcgtggtacatcgaagcgagtgggcgtggatgaaagtaatcctctggatgacgagacgaatgaggccctcaatcaacgggctctgcaagtcgtagatcgagtacagcaaaaattgacaggaagggacttcaagcctacacaagttctggatgtcagcgaacaagtgcagaagctcattcttcagtcaacgtcggtggagaatctgtgtcagacttttattggatggtgtgctttctggtgacgaacttggtcgtgtcaaatccaaaatcgtgcttgcttgagtaatgtccaaaaacttccaatttccaattataaattgtctgttgttacatcatgcagcacccaaacttgttattagaagccgaagtgtataagtcataaatgccgagaaagctctcggtccttccttcgc

SEQ ID NO: 19995 - DNA, 243 bp, Glycine max
  Clone ID: PAT_MRT3847_11805C.1
tatcacggcgttctatggtgcttaaatgcaagggcgaaggatcggatccggtaattctgggaaacgcttccgatgtcagccactccagctacttccagcgttccaacgttaaagcattcatcgttttcgttggatcgtacaatcgccagttgtactcctcagggccacagcaaatccgtaaaacacgaagagtacaaggtgcacacctacaaccggaatagtctttgcgcattagaattcttg

SEQ ID NO: 19996 - DNA, 153 bp, Glycine max
  unsure (1)..(153): unsure at all n locations
  Clone ID: PAT_MRT3847_118060C.1
tctttccccgaaaaaccttagaccacgancttcatattgcagtntagtctgttattcttcagctatgttttgtcaagnacactggacgaacactccttgtgtgctgcnagatcaaaacatatgccactacagcactgtgtaanagagaagaca

SEQ ID NO: 19997 - DNA, 946 bp, Glycine max
  Clone ID: PAT_MRT3847_118061C.1
gcagacagcacaaccttctatcgcttcacacacaagttcattcacagagagatagaatcactgaagagcttcaatggcggtttctctctctgttactcctctttctctctccaattcttctccttctctatcttccaagccaaagtttccatctttgtgctttctctctggcaacaacaccttgagggtcaaatgcccaaaaccttcgcactcaacaactgttgttcatgttgctccagaagcgttggattcttcacctgatcccttagacccacctccagaaacccttgatgatgactctgacgccaccacctttgaggttggtgacctggggactcctagcacttcggcaattagcattggtggcgatgcagatacaatgggaccaaagcagaagattagaatcaagcttagttcttattgggtgcccttgatagaggattcctgcaagcagatattagatgcagcaaggaataccaatgcaaaaccgatgggccctgtgccattcccacccaagaagggaatctcctgtgttcttaaatccccccacgtacataaggatgctcggttccatttcgagatcagaacaccccagcgtttcattgatattttataccctacagctcaaacaatagattttttgatgcaattagatcttcctgctggtgttgatgtggaggtcaagctctaaaaatatttgcttttcaggttgctaaccattttgaatttgagtgaggttcaacttgttatatcaatggccaaaatatattggcagatatcatgtatttccctgcctaaacttgatttcaatgaacaatgttaaaatccttttgcttgcttcccccttttgtccccaacaaggtttcaattagtgtattcctgatttcctgttcttgcttagatatttgtatatcatataaaatgttaggtaattctgatgtgcccc

SEQ ID NO: 19998 - DNA, 273 bp, Glycine max
  Clone ID: PAT_MRT3847_118062C.1
aaaaaatcaccagataaccttgggcgggggtagagtttgacagaacaataggcacaaaatttcatgaatactaatacaaatggatgggggagtatacataagcccaaaaatttacccaaaacctgatgtaaacataaatactgactaccaagtttgtaattgaaaactatgtaatagacatgcaaacgagaaacaattgttactaaagtaacaaactttatttctgcaaaaactctattggaacattttagagtaagcttttttttttaaatc

SEQ ID NO: 19999 - DNA, 1601 bp, Glycine max
  Clone ID: PAT_MRT3847_118063C.1
actcgagccgaatcggctcgagcagagtccttccttgtctgttatcactgtgtaagcagtgatcgattctgcgaactgcgattcgcatcgccaattcaaaagcgttcgttcgtcggagatggagacgctaccgacgacgacgacaaagcgaggaggagcgagatcgaagcccgttcagacctcgaaatcgtctctcgttatggccttcttctcctgcgtcgcgtggctctacgtcgccggaaggttatggcaagacgcagagaatcgcaatttactcgctagtcttctgaaaaagaattcagctcagaggcctaaggttcttacagtggaagataagttaatggtgcttgggtgcagggatctggagaggaggattgtggaagctgagatggaattgacattggctaagagccaagggtacctaaaggggcaaggccagagaagcggctcttctgatcgtaggcttcttgctgttatcggagtgtatactggatttgggagtaaattgaagagaaatgttttcagggggtcttggatgcccagaggtgatgccttgaaaaaacttgaagaaagaggagtggtcatacgttttgttattggtcggagtgctaatcgaggtgatagcttagatcgcaatattgatgaggaaaaccgcacaacaaaggatttcctgattcttgaaggtcatgaggaagctcaagaagagttgccgaaaaaagtaaaaaccttctttagcactgcagttcagaactgggatgctgacttttatgtaaaagttgatgacggcattgatattgatctggagggtttaattgaacttcttgaccgtcgccgtggtcaggatggggcatatgttggatgcatgaagtcaggagaagtgatatcagaagagggaaagccatggtatgaaccagattggtggaaatttggggatgaaaaatcgtatttccgacatgcggctggttcacttgttataatttcaaagaatttggcacaatacattaatataaacagtgtatctttgaagacctatggctacgatgatacgtcattgggatcatggatgatgggcatccaagcaacttacatagatgacagtcggctttgctgcagtagtatcagacaagacaaggtatgctccttggcttgattggaggatcacaagctcaaccttccctactcttatgcgaactctcataaatttgtttgaagatcagtatcagttgaatattatgttcactcttttcagttgcatactgccttgagagctttgtagacaatagcaatataattcctttatagatctagttattatctgttcattcttttagatgttagcagcgaaattgagggataactactgattaacggagttcagccattggtgctcaattaacattttcgggggtgctatgattgtagtttttctttcttattgtttatacagaacatctgttgatgaccaaatattgaagaggaaaaaaaaactatatacaaaatattgatgtattgaaccgctgacgaactaattgtagactttgttgcactgaaattttgctgcaactcaatttatttatgatgcttttgcctttcgtattaaa

SEQ ID NO: 20000 - DNA, 272 bp, Glycine max
  Clone ID: PAT_MRT3847_118064C.1
gctcttccctgtcctaaagtgttggcctaaggccttcttctaactccttctgtgacactctcctacccctttctttctttccactttttataaactcaagagagagagtgtgtgagaaagcaacttgttagagaaaaccagaaacacaagctttgtttctctctcttctcacttctgcatttggtgcaagaacctgacttgaacaatattaatatcttatagatatgtctggtcactggggcattcttgtgtcagatccatggcttcagaac

SEQ ID NO: 20001 - DNA, 494 bp, Glycine max
  Clone ID: PAT_MRT3847_118065C.1
tacggctgcgagaagacgacagaagggggtgtgtgttctctttgcaacatagactgatactttttgttattccccactatgtgcttcagacagtgtatgtccacagtttgagggtgcaatgattggcgtcactctatggcaataactatttgctgaatttgaggcaaagttgcattgtggttctgcatatttgattcagaacattaaagttgttgacaatcattctacatacaaatgatggtgagatgatcatgaccgtgtaggaggaatgtgcttttcagcttgatgatgctatcgagaaaaatcattttgttagaaagccattggtggttatgttaacacttgttaaaatcaaagatcctaaaggtcattctaatggagttttctatttctttcagatttgcttcaatttattatatgaatgcattttacatgtaactataacattatttgcagacaagtatcccttcaatgtccaaaatatcaagcacggg

SEQ ID NO: 20002 - DNA, 312 bp, Glycine max
  unsure (1)..(312): unsure at all n locations
  Clone ID: PAT_MRT3847_118066C.1
aaaaacnanncacaacaaacggtaaagataggcccacgacaaaaaagcccaaccccaaaaggacagggatcaacatagagaatgatcagatcaccacacacacgcatagatttcaccaaaatacacaggtcatgcacctgaaaaagcgctaagaaaagacgccgcgaacctaatcaaagacgccctaagacaaaaacaaccacggccggaatgacaaaacccaaagggataaccccgaccaacgctccaaacagaagccacaggcaccacacccagcagccatgcgagggaacacaccccccccacaaacca

SEQ ID NO: 20003 - DNA, 2189 bp, Glycine max
  Clone ID: PAT_MRT3847_118067C.1
ttgatgctgtatgccgcatatgaataaactgatgagctctgtcaaccgatgcctggcaaggaaacctggattttagaattcatacccagaaacggggcttggaagatagcaatatgaatcactgatatgtggcacgttaacaagcacaatgggtgctatgattggcgtatctctatggcaataactgtttgctgaatttgaggcaaagttgctttgttgtgccgatttgttgcatcggaatactgatgttggtatggttgccatatgaatctgcctcactatgcattttaacttgaaaactaccagggtgctataaacgtctgttttcatgtgcatggactatatgtccaatttgtggcaaatttgtattgtggttctgcatatttgattcagaacattaaatgtgttgactatttattctacacaaaattgatgataagatgaacgtgaccgtgttgaaggaatctgctttgatgctcgaacgtgcaaccgagcccaatcactccgttagagagccgtttgtccttacctgaccgtttgtgagcttgatgttgtcaccatggagtcaccctggagtgttgcaaggcctctcctctgttctacgccaagtttccccctgtctatgttgtttgaaaacaaactgaggccttttgttttccccattgtttcttcagacattgtatgtccatagtgtattgtgttttataaattattcgttcgtatttataaagaagatactgcatgtaacccgggtcctcgtatcgcaagccaacaatggccctgaaaggtagcagtatgaatcactgatatgtgcatgttaacaagcaccaacatacccttaaagggccctggcagtttgctgcttggatccctgcttgggggcccgtcctcacgctcgttgggtgcaatgattggcgttactctatggcaataactgtttgctgaatttgaggcaaagttgcattgtggttctgcatatttgattcagaacattaaagttgttgacaatcattctacatacaaagcaagtaccccttcattggccgttttctcgggcgtggggtgaactcgtgcgccgacctcgatgccgaaaactccttccaatgccgtagtcgatgtcgctttgtcgttctgcgctttcggatcagaacatgaaggacgtgtacctccattataatttccagacaaatatcccttcaatgtccaaaatatcaagcatgggtcaaagttgtatgtcaacattgatatagcaaaaatccaagaattccataatagatgtagaaatgaccttcttggcagacagaatatcaaacgaaatcagtttttctcaatcacaatataactaatattcccaacgaaactcagttgaaaagttttggattaatgctcaaatggttaggttaggtgaaataagcagactgagaaaggactgttactagttgatcgttggtacggtggatgaagtcatcattgatacacaatggagttatgataattatctctactgtactacgacatttgatccattgaaaattggtgtcaatttttgttcgtgctagaactaaggttactcacaccatttccaaggtataagttagttctaaaaatggaacagaatgaggagaaggctaacttccatttttgggatgcaacatgtatcaaaatttttagcaaaacgatcgatcaatgtctgccaagagtagattgcaagtggcgatgagatcaaggttttccctccctattttgatgaattattgggaaagacttgggctgtcaaattttagtaccatgcacgatgctcaaaaaggcctacaatgtgttgctgaaccttggtaccaatatttgagagacaatgccttcagtgttggagatgagatatgtttctactttaggccttataaaaaagtatgagagttgataataaaaaaatagttggcttgggatgatagtgactccaattgaagatggtagtttagtagcttattttagaattgtttgttggtgaaattattatgtgtcgtctatgctaaagtacttctatgttgtaattcaattacctagcattaccagacaatgtttcctttcggtatttacgactatctgaacaacgttacagaactatatggttatttactatttgttgaaatatataacttccttttggatatattcaaaaaaagagacgaaag

SEQ ID NO: 20004 - DNA, 178 bp, Glycine max
  Clone ID: PAT_MRT3847_118068C.1
ggtatctctctatcagaaaacaccatataccgcctataagtgcgacagtaccccatcccctcgcgatccgctcccaaataatgactatcagtagtgttgttctgcaagagaatgaaacaaccctcacattcaccataacagcacacacaggccttgacaagcttggtagtctacaatc

SEQ ID NO: 20005 - DNA, 1249 bp, Glycine max
  Clone ID: PAT_MRT3847_118069C.1
tcgtttttttattatgctgcgattatgaagtcaaaactgcatgagtacaggttcgtcgtgtcttggtttgtttaatttatggtttttatctaccttttgttctgattcccttacttgaaatagaaccctttacctacattttctttttgctttccaaaacgtctatgattatatatttgtgtcgtagcagtggctcactaggtgtttcatggcatctcctatgttgtttgcaaagtgttctgcctttctatgttgtttggatttatatctacttggtgtatatatacatttgtttttatgtacttggtctatatatacatttggtgataaacgtctattttatttatgtgtgttctctttgcaacatagactgattcggctcgagggatttttttattatgctgcgattatgaagtcaaaactgcatgagtacagcgatgtctcgcaaggaaaacctgatctttgaattgcataccaagaaaggggcttggaagatagcaatatgaatcactgatatgtggcacgttaacaagcacaatgggtgcaatgattggcgttactctatggcaataactgtttgctgaatttgaggcaaagttgcattgtggttctgcatatttgattcagaacattaaagttgttgacaatcattctacatacaaaacaaatatcccttcaatgtccaaaatatcaagcatgggtcaaagttgtatgtcaacattgatatagcaaaaatccaagaattccataatagatgtaggtatgtcgttctatgctggcagagtatcaaatgaaggaagtgtttctcaatcacaatatagctaatattcccaacgaaactcagttgaaaagttcttgcataatgctcaataatttaggactgttactagttgatcgttggtacggtggatgaagtcatcattgatacacaatggagttatgataattatctctactgtactacgacatttgatccattgaaaattggtgtcaatttttgttcgtgctagaactaagttactcacaccgttccaaggtataagttagttctaaaaatggaacagaatgaggagaaggctaacttccatttttgggatgcaacatgtatcaaaatttttggcaaaacgatcgatcaatgtcgccaagagtagattgcaagtggcgatgagatcaaggttttccctccctattttgatgaattattgggaaagacttgggctgtcagattttagtaccatgcacgatgctc

SEQ ID NO: 20006 - DNA, 172 bp, Glycine max
  Clone ID: PAT_MRT3847_11806C.1
aggctggtccgcctgcacggacccgggaacggaatgtgccgagtccgacccacgcgggctttttatgcgtgcgcttattgtcggtctgctctgctattggaagtcgacacacctacttaaatatcctgatgacgtgagaagcgtgcgttatttctgaaaaaaagaaatactt

SEQ ID NO: 20007 - DNA, 643 bp, Glycine max
  Clone ID: PAT_MRT3847_118070C.1
tattttcaaagtgttctgcctctctatgttgttgggatttatatctactgggtgtatatatacatttgtttttatgtccttggtctatatatacatttggtgataattgtctattttatttgtgtgtgttctctttgcaacatagactgatactttttgttattccccactatgtgcttcagacagtgtatgtccacagtttgaggaaaacctgatatctgaatggtagcagtatgaatcactgatatgtggcatgttaacaagcacaatggcagggtgcaatgattggcgtcactctatggcaataactatttgctgaatttgaggcaaagttgcattgtggttctgcatatttgattcagaacattaaagttgttgacaatcattctacatacaaatgatggtgagatgatcatgaccgtgtaggaggaatatgcttttcagcttgatgatgctatcgagaaaaatcattttgttagaaagccattggtggttatgttaacacttgttaaaatcaaagatcctaaagacaagtatcccttcaatgtccaaaatatcaagcacgggtcaaagttgtatgtcaacattgatatagcaaaaatccaagaattccataatagatgtaggtacgttgttctattct

SEQ ID NO: 20008 - DNA, 1432 bp, Glycine max
  unsure (1)..(1432): unsure at all n locations
  Clone ID: PAT_MRT3847_118071C.1
tttaaaacgggcccccccgggttttttttttttttttggtttttttttttttttttttgttttttttttttttttttttttttttttttttggtttttttttttttttttttttttttttttttttttaacaacaactattaattagtaaaccaaaaccagatactacacatcattccttgattagtagatcatcaatcgagttacaatagcggcaacatttggcagtttcatagaggcaaaaaaacttttacattccaattcaacttccaagataaatacaataggatacatgcaaacccgtacagcattgatctcgagacacaggcgtcgccctgtaaatattgtactggatatctcctttcaaattggagtggataacttcataagcataagaaaatatatgcaataaagaagtggtattcagggaacaataagtttttgaagaaaggcttatataggctttaacaaatgaaatttgttttggtataggcctgatcataaaaatggaaaatggctatggaataggtttggaaattggaataggtggaggctttttaacagatgtaaatggctttggtataggtttcatcattggaggaataggtaaaggccttttcacaaatggaaatggctttggaaaaggcttgaatgttgggatcggaattggtttaacggttggaactggctcgggtacaggcttaattgttggagtaggtagaggtttttttagtgaaggaattggctttggtataggcttaattgctggaataggtagaggctttttcactattggaaatggctttgggataggcttgaatactggaacgggaattggcttaataattgggacaggcttgaatactggaatgggaattggcttaataattgggactggcttgggtataggcttagttactggaataggtagaggcttttttactattggaattggtttggggatgggcttgaacactggaataggaatgggcttaacaatgggaattggttttggtataggctttgttacgggaataggtagaggctttttcaccattggtgttggcgttggaactggcgttggtggtggcagcggtgttcttcctttcccttgaaatgatgaacgtgcatgcatgcatgcatatatgctccgtcgcgtttctttggattacactagtctttatttttcgttcgggaaataattgtggtttgtgcttgtacgtgtcgttaatcgttcaagctttgttctagtgtttctctcgcctgtggaaagtaaaaaatagttgtaatgtgtcattctgtgtctttcatttgtttaggtttntgtgtcagccatagtcactcatataccgtggttcttttacatatgngaatatttcatatttagcatggggaagtaatgtactcaatataatgagttccatttatttgcg

SEQ ID NO: 20009 - DNA, 268 bp, Glycine max
  Clone ID: PAT_MRT3847_118072C.1
tactttaatcagtaaactacttttcttctaccctacattcacattctatggaggcgagaggttgaaaaaataacagatgtaaaaccttttcaacaccattgtgtaaacacttactgcgaagcaaaactatggatcattttttgtagaagacaacctaagctcaatgagctaccaattcaatcaaaatgtttggactccagaaacccgtgcaccatctcatatgaggcggataatatgctaatgtcttgttatggaggtacaataagat

SEQ ID NO: 20010 - DNA, 3218 bp, Glycine max
  Clone ID: PAT_MRT3847_118073C.1
cacgcgtccgttcagttccgacttaccgttgatgtctttgctgacttcttgttaaggttgtcggtgatgcaattgttgttggttttgtgctaagagaagaagctgttgggaaggtttctttcgtcttttgatgatgatgtcacacaacttaacggggcagcttgtgggtgcagagatacatggctttcacacgttggatgatttggatgttagtaatactatggaggaagcaaaaagcagatggcttcgtcccaatgagattcatgccatactctgtaatcacaaatatttcaagatcaatgccaagccagtaaatttgcccaaaagtggtactattgtactatttgaccgcaagatgcttaggaacttcagaaaagatgggcacaattggaaaaagaaaaccgatggaaaaactgtcaaagaagcccatgaacacttaaaagttggcaatgaagaaaggatccccgaatattatgcacatggccaagataacccaacctttgttcgtagatgttattggttgcttgataagaatctggagcacatagtccttgttcattatcgtgacacacaagagttacaattgcaaggttctcctgctacacccgtaaattcaaattcaagttctgcctctgatccagctgcatcttggattccatcagaagacttggattctggggtgaacagtgcttatgctgttgagcttaatgacaatttaactgccaaaagtcatgagcagaggcttcatgagattaatacacttgaatgggatgacctagtggttccaaatgtcaacacttctactacatctaatggaggcaacgtcccatattcatttcaagaaaatcaaagtttactgagtggaagatttggcaatgtatccagtaatccttcagcagaaattccttcttttggtaatttaactcagccagtttctgggagcaatagtgccccttacagtttcccagatagtgctattcttctgaaaaatagtcctatatcatcgggaggcgttgacaccttgggcactttggtcaacgaaggcttgcaaagtcaggacagctttggaacgtggatgaacatcatatcggatacaccatgttccatagatgaatcagctcttaaagcatcaatttcttctgttcatgtaccatattcatcactggtggcagataatctgcaatcttctctgccagaacaagtatttaatctcactgaggtgtcccctacatgggcatcttccactgagaaaacaaaggtcctggtaactggatattttcataataactatgaaaaccttgcaaagtccaacctactgtgtgtctgtggtgatgtaagtgttcctgtagaaattgttcaggttggagtttaccggtgctgcgtaccaccacactcgcctggattggtcaatctctatttgagctttgatggccataagcccatcagccaagttgttaattttgagtatcgtactcctattttgcatgagccaactgcttcaatggaagagaaatacaactggaatgagtttcgacttcagatgaggcttgctcatttgctctttgcttcagacacgagccttaacattttctcaagtaaagtatcaactaatgcactgaaagaggctagaagattttccttcaaaacatcatatatctccaaaagttggcaatacttgatgaagtcaattgatgacaatacaattccattttcaaaagtaaaagattccttgtttgaaactgcattgaaaaacaaattaaaggaatggcttttggaacgaattatcttaggcagaaagagtactgaatatgatgcgcaagggcaaggtgtaattcatttgtgtgcaatgctaggatatagttgggcaatctccttattttcttggtcgggcttgtcgctggatttccgtgacaaatttggatggacagctcttcattgggcagcatcttatggaatagagaaaatggttgcaactttgttatcttgtggggcaaggccaaacttggtcacagatccaactcctcaatatccaggtggatgtactgctgctgatcttgcttatgtgaagggatgtgatggcttagctgcttacctttctgagaagtctctggttgagcagttcaatgacatgagcttggctggaaatatcagtggctcactggaaactagctcaactgatccagtaaatgctgcgaaccttaccgaggaccaactttacctaaaggagactttggaagcttaccgtacagctgccgaggcagcagcacgtattcaagctgcatttagggagcattcatttaaattacgatatcaagcagttgaaattatgagcccagaggaagaagcacgtcagatagtagcagcaatgaggattcaacatgcctttcgcaactatgagtcaaagaaaaagatggcagccgctgctcggattcagcttagattccgtacatggaagtaccgtagagaatttctcaatatgcggcgtcaggctattaaaattcaagctgctttcaggggctttcaagcacggaagcaatatcggaaaatcgtatggtctgttggggtgcttgagaaagtgatcctgcgttggcttttaaagagaaaaggcttccgtggtctccaggttaatcctgccgaggaggagacacaggaaagtgatacaattgcagaggaggatttctttcgcaccagccggaaacaagccgaagaacgtgttgagaggtctgtcatacgtgtgcaggccatgttccgttctaagaaagcacaagaagaatatagaaggatgaagctgacacataatcaagcaatgctggatgaattagaagaattcctaaattctgaagatgacatgttacccaagacatagcttggtgccttttccaaaacaaggtttccccatatttgggatgtagccaactcctgtgacaaactagtgtgtagtgatagcttggtgtcttcttttatataggaagcagatcctgtaaattacctagtgtagattttgaacccatgaccctttcatattgctttaatgtcttgaatgggtcgtccgtgtgtaattaagcttccctatgagggatgcttctaatgcaagatcaagtttgtaactttgtttttggtgaaaaatcaagtttgtaacttaaataacaagccttcttagatttgaattgacataattgttgttggaactcttctatgtaataaattaagagtccatt

SEQ ID NO: 20011 - DNA, 555 bp, Glycine max
  Clone ID: PAT_MRT3847_118074C.1
gaagaacgcattgagaggtctgtcatacgtgtgcaggccatgttccgttctaagaaagcccaagaagaatatagaaggatgaagctgacacataatcaagcaaagctggaactggaattagaagaattccttgattctgaagttgacatgttacccaagacatagcttggtgtcttttccagaacaaggtttccccatatttgggatgtagccaactcctgtaacaaactagtgtgtagtgatagcttggtgtcttctttttgtatagaaagtagatcctgtaaattccctagtgtagatttgaacccatgaccctttcatattgctttaatgtcttgaatggatcgtccgtgtgtaattaagctccctatgagggatgtttctgatgcaagatcaagtttgtaacttaaataacaagccttcttagatttatttagttatttcatttagtataaagttttggatttgtctttgtcttaaaaaaaaaaaaaaaaaaaaaagcaacaataactaagctcatattattctcacgctccttttcgttattctcacccc

SEQ ID NO: 20012 - DNA, 426 bp, Glycine max
  unsure (1)..(426): unsure at all n locations
  Clone ID: PAT_MRT3847_118075C.1
ttttttttttttttatcatattattaaaacgtccataatatattataacattgtttgggtgagggagatattcattaattgttcgagaaccataagcgtgctnaatcattacaccatacacacctttatatttttatgtgctccagaaattgcttaaaaatgacaggcataatatgggcttgcccaaccataatcatatcatggcatgggtcacgccgttttttctctttattcttgtttgagaaacagtgagaataaccaaaatacagctaaacaagaaccaaacattggtgaacaaagtcaaggtaaagatcggtgcacttagaagcaccagaactggtgtctcggtggaatatataaaaacaaaaacttgctctggaggcaaagattaatataatataactatttaagcattgatttaatgtg

SEQ ID NO: 20013 - DNA, 294 bp, Glycine max
  Clone ID: PAT_MRT3847_118076C.1
ctaactcttcgtcgcaaaaacaaaagaggcattgaaaaacgagccttatccactacggcgggagcaaagatatgagactgtcttgaaaggctgctactcaaagatttatggaatatgctcagcttgataagatccatgacaaggctaataatggttaaaacgctagtatatatactggcaagctcattgctaagtcaccctgaatgcctaatctgacagaactcgtacatcaaagcttaaccttcgctcactattgtcttactcggactgaataactctgattatgtacaagct

SEQ ID NO: 20014 - DNA, 428 bp, Glycine max
  Clone ID: PAT_MRT3847_118077C.1
aaaaaaaacttttgtggccttacttaaaaacttgtttttgaggggcattggcttatttgaaaaagaaatcaaaaaatatgtgtcaattacctcagaattattgcttgtcccctttaattgctgtcaacagggaaacgaacgttgacaaaaagagaaaagactgaatgctgaacattagacggcttgtttcacaatcttcacactccaaggatgcttcatgttccccacatgaagcacatgctgtactaaggcaagttttctgttgccaagtccgtgcactatactcaaatcttgacaaacatctactttgaaactaaccagcgcttctgatttttctatcaggcgaactctctcaaaacccatcaagagtttctggggcgcactgggcactggaggaggggtcgagaacaaaaacactgtacgagcac

SEQ ID NO: 20015 - DNA, 237 bp, Glycine max
  Clone ID: PAT_MRT3847_118078C.1
gtgatctttccatcagcatctcgacatgctgcttgctgttacttatgctattcttcaggttcacttcctctatgcgggagatgaagggcaccctttaccatggacaagacactagagccctgtgcttacaatggaaacacatactacagctccatacatgatgcacacatagtgaagcagcttcgagcgagcaacgtttcgaatactggctgcgcctgtggtcacaaatcagtactt

SEQ ID NO: 20016 - DNA, 542 bp, Glycine max
  unsure (1)..(542): unsure at all n locations
  Clone ID: PAT_MRT3847_118079C.1
aatatcttcatctttgtcaacattttcatgctctccaaatatcatcacatgccatctcacatttcctcttcaacattgcttgctccatgttttctccactttaatctgtgtgcttttcttctcagtcactaccacagaaatccaacaaccgaacagaaggttcaatctctatgcattcggtactttgtcttatattcctatgttttatattatagcctataaaacaaactctgtgaaattggtcctagattgaagacttttcatgtgattccatttacactagacctccaaaacacatttccagagtcccaaaaaatccaacctttttgccctctttcttctcttcttctctcattggtgatcggtggttcaactcaattcaattcctttttgccacttcacatcctcaaaagccaacaccaactactgtttccctcaagcaaagtttggatcttcctacaccaaccactcagtcactcatntgttaactgtgacacttatctttccataaacaccatacacaccctcttcaaaaatcaagt

SEQ ID NO: 20017 - DNA, 359 bp, Glycine max
  Clone ID: PAT_MRT3847_11807C.1
accagaaatttcttaattattttccattgcgtcaaaactgcaaccttgcataaccaaaaaataaattgggagcaaaaggagaaaagggtaaaataaaaccttttaagctttgatgagatgacctccaacctcttacagaagataaagttgtcatggaacacccttattattcatccacacctaacaagacatccgttgaagggactgactaacttcacaacaatgttaagcttgaggcttctcaaacttgagtggctccacaccttccccggtgaagccagggtcatcccttccaaagtgttcataagccgctgttttgaggaacctatggtctcccctcttaaggcccaacttaatgg

SEQ ID NO: 20018 - DNA, 1164 bp, Glycine max
  Clone ID: PAT_MRT3847_118080C.1
ctcgagccgctcgaaccctttactctagcatctcactctctcgttgccactgcgccgccacctatcaaccaccgtgtcaccgcctgtccgccgccgcctttccatcattgccttcttccgcgtgagccaaattgccctcttttcctcaccttcttctctcgtttcacatcaccgttcagctactggtttctgcgctcgcgcgcatttcaagcgttaagcagctgataagaattggcggctagtcgcagcaacaacaacgataccattaccattaccatgtcgtgcgaacccttaccattaatggcaaccccactccagtttcagaggccagccattgatgatggtgatgctcaaaaccaacacaatcccatggaattccagattctcacttcgtcacattttcggcttcccgatggctgggttgttgaggaaaggccccgtgcctctaacccttctcacgttgacaggtattactatgaaccaggcaccagaaggcagtttcgttctttgttatctgttaagagacatctaacaggagaaacaagagactgtgttatttctaagagaaagaattttattgaatctgggtctggacagcagtggaattccttgagagctgttgagaaattcttatcaagagcaaatgcttgtaccgtaactgtccagtcagcagcgaaagcaagctgggttctgtctggtcccggggggttctggagccctttccttgatgattccattgtaccagaacctgaaaagatgaaatggtccaaagcatttgtactatcaatccatgatgatggagatattaatggacttaatagctgagctttgcagggttcacaatggagatgactggaaatcttggtgagaatgtgctgattccatgtagcttagattgtaggcgggaatgggattatccacgtgccttaattatcttaacctataagcagatattgttctatttcactgattataatcatgtaggttctatcacaaaaatgcacctcgaaacaacttgggaaagattgaactagtgccaactgatctatactaaaagcccgttggcagtaacaacttttgaacaaagagtgatgtgctgattccttgtacatgtggtttgattcaacatttctgaaattaaattttgaaatttttcatattttc

SEQ ID NO: 20019 - DNA, 420 bp, Glycine max
  Clone ID: PAT_MRT3847_118081C.1
tttttattttttttatagtttttttttattaaatttttttttttgaaaacccttttttttttaaaaaaaaggggttcccccccccttaataaaaacttccaaattccccggaaaaaagggagggcccgcgtaaggacccacatcccccaggccgggaaaaaaaaacccacacgcagggtggcagcttgggggcactctaaaacggaaaaccccctgttgggcaacagcctaaagacgccaccgccccaagttgttaaaattctttcaccagggcataaaaagtttctggggcctgaaaaaactcccccttttcgatacctgtacaaacttaccaaaaagagaacgcctttgtgggaaactggaggtaaaatttggggtcccggccagagaagccccttacagcagggggggatggggaaa

SEQ ID NO: 20020 - DNA, 1470 bp, Glycine max
  unsure (1)..(1470): unsure at all n locations
  Clone ID: PAT_MRT3847_118082C.1
acttgaacgcttccccagtgagatatttcatttcccggttctagctcctcaacaacagcanaggcattgtattttcanaatgaataagtacaggagaatatgaatacgggggatgattttcatatggcccgtatttcaactctgtaccagcacgtttagtggggtccatcactgtgaatgattctacccgagtgcttggagtcttaataaaagttgtctgttgcttgacatgatagggagacaataatattgcactatcacggaaataaaccaactgtgactctgattgacttatttctactgggaaaggttccagagaatgtgtcaatatgtaaagcacctctagtgttgtggtttcacctttacttaatggagttaacaaagttatagagaaaaacttagttccatttggtccatcaggtagctcggcagatttgacatctagaggaacataagttttcttcttcctcttcccagaagttgcagcagctctgactattgctagatgttctacttcagtgggtgaaaaggcaatatgtacttctgaagtaggagatgtccccaaattttcaaccttcaacgtcaagtacaccttaataatgtgagaagtcaagtcaatcctgcgttcagcattggcgatctgaaggtgttgggaaggagaggagttgacaattgagagaagggagagaaagaggaaaagggttagcagaggttgaggaaccattgcagttgacagaagcaggggagactcagacccccttctgtcgtcttctcgcagccgggaaatcaacctttgtcattggttatgggctaccattgcaagactttctttttgagtctccagatggcagaagatacctcaattttacttttggttgccctcttgttgagacagtggttgacaagttgattgtaaaagttgtgctgccagagggatccaaagatcccactgttgagattccttttgaagtgaagcaacatctagagatcaagtattcataccttgatgttgtcggcagaactgtggtggttctagaaaaaagaaatgcagttcctgagcataatgctccttttcaggtatactacagttttaaccccatattcatgcttgctgagccattgatgctggtatctgcatttttcttgttttttgtggcttctgtggcatatcttcacattgatctttccatacgcaagtgatgaacacctagctagtttcttgaaaggcagtgactgagcagatccaaggttccttatttttgaaggtcatattgcattttggcaattttgtgtggagttaagaggattaattgcagttatagatatacttgtttgtacattttttcccaggcaatttgatcttgtgccattcatccaactagcttaaaaccatttcttccatttaagaaaacataggatatgttcgttaaaggccatcctaaaggcacgtaatgggaagaaacttgtaag

SEQ ID NO: 20021 - DNA, 1955 bp, Glycine max
  Clone ID: PAT_MRT3847_118083C.1
atatgcaacaagccgaacaaacttggttttaattggtgcactatgctacaagcccaacaaacttggttttaattggtataggcgtgccaaggtcttgttaattttgagcgttaagtgctgcaactaatcagatcccaagaccttggcctaccttgccatacagaaaaaaaaaaagcaaaaaaaaagccaaggtttggagccaacaaaaataaacacaaagcacaagtcatggaaagaataatggttggaagtgcaacaaaggttgctttcaccctcttggccactttcgccattgtcattccatgccttgaggctggcattgctgagtttgacgattttctcaaagcccaagctgatgaagcccataaaattgctcttgattcctatgtcccagagccccacgatgtcgcccatgaactcaatttccatgttcatatggcactggaaaactccacaaggagggaactaaggcagaggaaacttagaggaggaggcaaatgtcaagcctccaaccccattgacgcttgctggagatgcaataaagactgggccaatgaccggttcaggctagccaagtgcggcaaagggttcggaagacgggccaccggcgggctcggtggtcccatctatgtcgtcaccgataattccgatgacgacatggtgaaccctaagccgggaactatccgtcacgctgtcacccaaaaaggccccttgtggatcatcttcggacacagcatgatcatcagtttgaggcaagagctgatgatttcctccgacaagaccatcgatggtcgtggcgcaaacgtgcaatttaggggcggtgctggcctcaccattcagttcgtgaacaacgttattatccacggagttcgcatcaaggacatcgtacctaaggatggtggcatgattagggactccgccgaccattatggattgagaacaaggagtgatggtgatgccatctccatttttggatccaccaacatttggatcgatcatgtttccctctctaactgtgccgatggtcttatcgatatcatccaaggctccactgccatcaccatctcaaattgccacatgaccaaacataatgatgtgtttctctttggtgctagtgactcatacaacggagacaagatcatgcagatcacagtggcattcaaccacttcgggcaaggactggtccagaggatgccaaggtgcagatggggtttcgtgcacgtcctcaacaacgactacacccactggttgatgtatgcaatcggtgggagctcagggccaacaattctgagccaaggaaaccgtttcattgctccgaacaacgacaacgccaaggagatcactcacagggactacgccggacccgatgtgtggaagaattggcagtggcaatcagaaatggaccttttcatgaatggtgcaaagttcgtcacttcaggctcacccatcaagatgacatacaaaaagggtctcatcatgaagccaagagatggaactcatgtcagcaggttgacacgacatgctggtgccctaaactgcttcgttggcaagccttgttagagaacaacaaacattaatgttgttgttgttgttcgctttttcttttttttttttggaaagaaaaaaaaaaccacattgcacagaagatttaagctactcctcttgctaggatgagtttgcgtcttctgcaaaacaagcttgttgttggccttgtaagagctagaaaaagagagaatttgttgcttgggttcaaatgagaagaaataaagttccaacttgtttgtaactttttttttgggggggtttaagttgtttgtaactttgtccccttttgtttttctttaatataatttgtgcctgttgaaaggcatgtttcgaaacaaattcaaaagtaatcacaaatgtgaaaccaaatactctaatttggtttatggaaaaaaaaaaaaaaaaaaaaa

SEQ ID NO: 20022 - DNA, 2159 bp, Glycine max
  Clone ID: PAT_MRT3847_118084C.1
ggctcgagggacatctcctacttcagaagtacatattgccttttcacccactgaagtagaacatctatcaatattcagagctgctgcaacttctgggaagaggaagaagaaaacttatgttcctctagatgtcaaatctgccgagctacctgatggaccaaatggaactaaacactgctgtatacccttggtgactccactaagtaaaggtgaaaccacaacactagaggtgctttacatattgacacattctctggaacctttcccagtccaaataaggcagatgattttcatcgtatttcaactgttgagttagtcccggggtggccagttggttttaaattctatgtagttggaaagcccaatgattaccacaatctactgttgacccctctcttcttgttatcctttctctcaattgccatctcttctctttaccaccatattgatttggctcatcccaaagttcagattgttttaaatcctcaccttaatctgacgataattgcaattgacatataactgattgtgataaacgttggattaagttggaaaaatttacttttagctctgacatttagaaccatttacagataaactattcttttattatttttaaaccataagagaagatgaataagttgtgttaagttttatattcttcgtatttcaattttgtaccagcacgtttagtggggtccttcaaatgtgaatgattctacccgagtaaatggagtcttaataaaagttgtctgtttcttgacatgatagggagacaataatattgcactatcacggaaataaaccaactgtgactctgattgacttatttctactgggaaaggttccagagaatgtgtcaatatgtaaagcacctctagtgttgtggtttcacctttacttaatggagttaacaaagttaatagagaaaaaacttcagttccaatttggttccatcaggtagctcggcagatttgacatctagaggaacataagttttcttcttcctcttcccagaagttgcagcagctctgactattgctagatgttctacttcagtgggtgaaaaggcaatatgtacttctgaagtaggagatgtccccaaattttcaaccttcaacgtcaagtacaccttaataatgtgagaagtcaagtcaatcctgcgttcagcattggcgatctgaaggtgttgggaaggagaggagttgacaattgagagaagggagagaaagaggaaaagggttagcagaggttgaggaaccattgcagttggtactggtatttcacagaaactgggttcactcagtatactaataacgtacagattcttggaagtcagaacttgaaattgaacctcggtatcctctatttggaggctggaaatcaacctttgtcattggttatgggctaccattgcaagactttctttttgagtctccagatggcagaagatacctcaattttacttttggttgccctcttgttgagacagtggttgacaagttgattgtaaaagttgtgctgccagagggatccaaagatcccactgttgagattccttttgaagtgaagcaacatctagagatcaagtattcataccttgatgttgtcggcagaactgtggtggttctagaaaaaagaaatgcagttcctgagcataatactcctttccaggtatactacaggtttaaccccatattcatgcttgctgagccattgatgctggtatctgcatttttcttgttttttgtggcttccgtggcatatcttcacattgatctttccatacgcaagtgatgaacacctagctagtttcttgaaaggtatgcgtttttttttaaaaggcagtgactgagcagatccaagggttccttattttggaaggtcatattgcattgtggcaattttgtgtggagttaagaggactaattgcagttatagatatacttgtttgtacaatttttcccaggcaatttgatcttgtgccattcatccaaactaactttgaaccattccttctatttaagaaacataggatatgttagttaaagaccatcctaaaggcacgtaatgggaacaaacttgtaagatcttgtactaggtattagaaatatttatgtgatacttagcaatcaatatacaaactttaaatgaaattt

SEQ ID NO: 20023 - DNA, 338 bp, Glycine max
  Clone ID: PAT_MRT3847_118085C.1
aattcgaagttcgaaggcttaaaattcgccgaaccaatgagggtttaaattggtggcggggatgtaaggtgcgtttcgggctgttcgacacgacaatggcgtttcggtcccgggtttggggattcaaactaagggtttttgatttgccattcaattcaccgaatttcagttggattgggggattttcggcctcaaagttgggaagttttgttgcggttggacctttagggtttggggggagggaccatatggaattcccctttgcatggggggtccaatttggtggctgaatttgaattttttttaaggggtaagggtaaccttgtttttggccaaaa

SEQ ID NO: 20024 - DNA, 485 bp, Glycine max
  Clone ID: PAT_MRT3847_118086C.1
gcctttcttaggttatgattgacccgttgtcggaatggggtcacgcctacgtttatatctatgcctaacttttgctttaacaaggtggtccttcattagatgccgttaaaggtttaagagtgcaccccttacaccaggttctagaggcctgcccataatggggagctgtaactgactcaatggcccttctccttgagaccatgtatggtgttgctgaacaaaatatggtcctttattgcctctgcaatcaccatgaaggacatccatattatgatgctcttcgcaatggttcaacaaggtaatgactgacaaggtcctttggtgctgctgacgaccatatatactcagggcccagagcctaacctgtcatggcatacacatggacatatactgatgctatacgaacggtagaggaacttgaacgagaagcggtgatcatggacttatctacacacgtgtaccaagcttgacctcagcgagacatt

SEQ ID NO: 20025 - DNA, 568 bp, Glycine max
  Clone ID: PAT_MRT3847_118087C.1
tttgatagggataccacaggtttaaccccaaattcatgcttgctgagccacttatgctgggatccgcatttttcttgttttttgtggcttccgtggcaaatcttcacattgatctttccatacgcaagtgatgaacacctagctagtttcttgaaaggtatgcgtttttttttaaaaggtatgtgttaaatcccctctttcaaccattttttatgattgaaacattctcttctatttaaagtgttttgacttgtttaacaggcagtgactgagcagatccaagggttccttattttggaaggtcatattgcattgtggcaattttgtgtggagttaagaggactaattgcagttatagatatacttgtttgtacaatttttcccaggcaatttgatcttgtgccattcatccaaactaactttgaaccattccttctatttaagaaacataggatatgttagttaaagaccaacatcctaaaggcacgtaatgggaacaaacttgtaagatcttactagctatgagaaatatttatgtgataaaaaaaaaaaaaaaaaaacccccccc

SEQ ID NO: 20026 - DNA, 306 bp, Glycine max
  Clone ID: PAT_MRT3847_118088C.1
cccacgcgtccgggagcaccagcagtagcatggcagtcctgattcagaagaatgccttgatggaaacaccctagggccgaaggatatattatctcaaattgaaagtgaatttttgagggaatttgagcatgctgaagaacttgccaagaccattgagcccggtatggcttcctttattttaatttatgagctgaatggctaattaagttgcttcttttttttttaaaatatcttctgcactgatgctcgtaagatagagttttatatgtctaaactttttaggttttatgacctgatgtggtatca

SEQ ID NO: 20027 - DNA, 470 bp, Glycine max
  Clone ID: PAT_MRT3847_118089C.1
gaaaccttttggttgattccttcgaactctctctctctcacactttccttcactttctcgccatccaaaccctaaataatggcgtcggaatccaccggagacgacaaatcatgggagcacatccttcgccgcatgctccccgccggcgcgccgcttcccgacgaggagcacctcgattactccatcgccgtcgagtacgaaggtcctccggttccttacgacgttccaaaggtcgatccgctcaaaatcggagcctccaccggtggcggcgccgttccgattcgcactgcttcaatcgactccgatcacaacgcggcggcctcgattccggtcgctatgccagtgcatccgcggttctcgcggttcagccgcgtccgcaacggcggcttcgaccgcgcgccgctgcctcggagtccggcagagagccggcggtcgtcgtcggtttccaagacgcagtcgcagttcgattc

SEQ ID NO: 20028 - DNA, 325 bp, Glycine max
  Clone ID: PAT_MRT3847_11808C.1
gaatccaaatatacatgtttggttcgggaagatatcctagacattttgaaatgaatggaaatagagtctactttcattatgtgatttattatataatctaaaactgaaaatcttgtgaactattctaaactcatacgaattacaggatggggccatagaacagctggaaatagctcaagcccgcttaaggaaagttgaaacggaagcaaatcgttattggctgaatggcttttctgagatctaacgagaaagattgaatttaaattatttaatatatatgactatttaacatttagaaaatctcgataacctaactccttcattt

SEQ ID NO: 20029 - DNA, 321 bp, Glycine max
  unsure (1)..(321): unsure at all n locations
  Clone ID: PAT_MRT3847_118090C.1
cgaccgcccacgcgagcgaccacgccggcgggattttaaganaaaccgcgagcacaggccgccgcaccgaaaaaccggaaacaaaagcaancganaccggannncaagaancncncaagnncacccgaccccagagagaacaacgcccgaagggaaagaaaaccactctctgagctggccacagactncgngaatcattttcttttccactcttggtttatttgctgaacactctcctatttgatataggacttcgtgtcagacttaaacttcttctgtctctttctcaagtctctggttaaatataaagctcaagctggt

SEQ ID NO: 20030 - DNA, 247 bp, Glycine max
  unsure (1)..(247): unsure at all n locations
  Clone ID: PAT_MRT3847_118091C.1
ggaggggatttaatctgttgtgatggctgtccatcaacaattcatcagagctgcttggnaatacatatgctnnctcctggngaatggctttgnctaagtttaaaagtataaaatgatgaaaaggtttgatgttctagcttaagacatatataaaaggcagttccaatgggggggggaaatacacaactccattttacataaaacaatcctataaatagctagaaagagagagaataatcatgaaaaa

SEQ ID NO: 20031 - DNA, 268 bp, Glycine max
  unsure (1)..(268): unsure at all n locations
  Clone ID: PAT_MRT3847_118092C.1
atagggagatgttttaaaatttggagtaaaaatggttttaattggtttattgtgaaatagtttttgggtgaaaattgtaaaaatgttttgaggggggtggataatgttgaaagataggggtgtttaatgagtgaggataaatatgattatttgtggtgggataactggngggttttaaatgggaaaaaatttggtgaaaattttattaataaattggataaaaattcgggtaaagggggttttgttttttgggaaaaagggtggtttt

SEQ ID NO: 20032 - DNA, 3883 bp, Glycine max
  Clone ID: PAT_MRT3847_118093C.1
caagttgcgtgtacctgctgtcactactccccaagattaatctgaacaagttgcgtgtccctgctgtcactgctctctgagcaaaaccagaagaacacatcaatccaaccctgccaaaatcaatccccagataccattccccttcccataacaaagacaacccaatcattgtttgttcacatccgaatccacaaaatactgttataattattctgattcacgaaaaacaggaaaacccgaatctctctctttgttcctctcggggtcacgaaaatgggcacagagacctcatcggtggatatttctgaacccttgctcgtggattctcacgggaacgaggaaaaggaggagtatttgcgcgaggaggttccggaatggaaggagcagataacaataagagggttggtggtgagtgctgtgttggggaccttgttctgcatcatcacccacaagctgaacctcaccgttgggatcattccttctcttaatgtggctgctggcttgttggggttcttctttgtcaggacctggaccgggttcttgaccaagatgggttttttcaccaaaccctttactaggcaagagcacgcgtccggaacactgttattcagacctgtgttgttgcttgctatggccttgccttcattggggggggtggttcatccttgattgccatggatcagagaacatatgaactcataggccctgattaccctggtaatagagctgaagatgttaaaaaccctggcttgggttggatgatgggtttcatgtttgttgtcagtttccttggactttttagtcttgtgccacttcgtaaggttatggtcttggattataagcttacatatcccagtgggacagctacagcaatgctaatcaacagtttccatacaaaaactggagcagaacttgctgggaaccaagttcggcagcttgggaagtatctaagcataagtttctgctggagttgctttaagtggttcttcagtggtattggggattcatgtgggtttgacaacttccctagctttggtttgacactatttaagaacacattctattttgacttcagtccaacctatgttggatgtggtcttatctgtcctcacctagtcaattgttctgttctccttggagctattatatcatggggctttctgtggccttttgtctctgagcatgctggcgactggtatccagctgaccttggtagcaatgatttcaaaggtctttatggatacaagccacctagattaatctgaacaagttgcgtgtccctgctggcactgctcactgagcaaaaccagaacaacaacacatgtcacctcttccatacctcgtcacataataaatacatcaacacattccaaacaaaaaatataacacattatctccttaacctgttcatgttaccttgatcaaaaacaaattgataccaatttatcacatgaatctaagattttaaaatgacaagtattgcgatttcagaaatagacccattcaactgtaagaaaaaatgaatcctttggtgaggttcttaacctgaatctctgattttacattgaaaattattacggaacacacttatagacacatcggaaaagagaaactgatcaggcctttgggggagggattgggttgaaacttttttgattctccaagccagccagagcctcttgtcagctcagcctccactttcttcctcccctcagcaatcttttgttccacctcagcctgcgtctccttcttcatcgtgttcagcgccgccgctatctcggcccgagaagccgccatgacagcattggccttctcctccagctgcttcacctcctccgacgtgtccttcacgctgctcagcttctccctgatcgccgcgtccctctcgtccatgaatttcccaagcggggtgaaccatatcttgtccaaggcaaccatcagcagcagaaactccaccattattatgggaagggtgaggttgaagtcaaagagtgctgctttctcaatttcttctgcgagggagggtctggccaagaccagtggtgcctatccctccaaggagggacagcatctggggctttgaaatcggtagtttcagtttcaaggttggggcttgggggagtgcaaagaccagtggtgctatccctcccaggagggactgcatctggggctttgaaattgggagtttcagtttcaaggttggggctttggggagtgaaatttggagaatggggagttttggtgtgggggaacgggaactggtgcagactggaaccagaggttttgtggaagccataatcatgtttgccatggtcaccgcttttgtgattaggatgtgtttgcgtctaagatcagtctgagaggattggatggaagagaagaagaggatttgagagctagactatctaaattctttgccacacaaattgatgaggttgtgtggtattcatatctattgccctgaggggatggcatttacaatctgatcaagattagactcgtgagataaccatgagatgtggagggaggacaagctccaaacagctttcctgttgtgacagaggttcaagatgatgagaattctcaactgcaatcagaagaaaagaagagggaagaagtatttttgaaggacaggatacccacctggtttgcagcttctggatatgtgggcttggctgcgatatccatagcaacaataccaattatcttccctcctctcaaatggtacttggttctgtgctcttacatcctcgcccctgcctgcaactcttacggtactggcctcacagactggagtctggcatccacttatggaaagatcggtcttttcatcattgctgcagcagtaggccaaaatggtggtgtaatagctggggtagcatcttgtgctgtgatgatgtcgattatgtcaatcgttgcaactgctgctcaagatttcaagactggttacctcaccctctcatcggcaaagtccatgtttgtgagccaattgatcggaacagcgatgggttgtgtaattgctcctctcacattctggatgttttggactgcctttgatattggctcacctgatggcccttacaaagcaccatacgctgttatattcagggaaatggccatacttggtgttcagggattctcagagcttccgaagtactgcctggaaatgtgtggtggtttctttttggcagccttagttatcaaccttctaagggatgtcactcctaagaaattctcacagtacatacctatcccaatggcaatggcagttcctttttacattggtgcttactttgcagttgatatgtttgttggaactgtgatattgtttgtatgggagaggttgaatagaaaggatgcagaagactatgctggagcagttgcttctggactgatatgcggtgacgggatatggacaattccttctgcaatcctttctattttgaggattgatcccccaatctgtatgtactttggcccttccacaagtagctgaaaccagcaactttaggttgtctttaaaactgcaatgtttatttatttgccttgtgtctgtaaatatgtggatgtaaacatcacaggcaatatctggcatttcatttcctctgtttgtctttgcaatttgtgtccgtaaatatttagggatatcattcagttccttaactgtctcaggggaaccggaaaacagaagaaaggcataaagagggaagggggtaccttgatcccattttccttttggtgcattaatgttttccacattcttttcttaaagttgtttcagttcaaaaccaaagtaatgtatgtttaagaagttaaattagaatgcattgactgtgtaaaaattatttgtattcatcaaataatgagttatattatgtagggt

SEQ ID NO: 20033 - DNA, 473 bp, Glycine max
  Clone ID: PAT_MRT3847_118094C.1
gataatgcatagcccaagaaaattcttccagggaggtgaactacatgggagctcagaatcaccacggattccaaggctacaaccaaggaggaccaccaggattcaaccaagggaggaattttacacagggctaaagctggaagaatcatccggggaaccagttcaacaaggagcaaagaagtcaacctatccagaattccaaccaagtggtcaatctttatgagaagaccagcaagcttgaggagacactaaatcaattcatgtaaatgttcatgtccaattatatgagcacaaagtcatccatcaagaacttggagatacaaatgggacaattagccaaacaaatggctgaaagacccactaacaactttggagccaacaccgagaagaatcctaaaaaggagtgtaaggtaattttcactaggagggaaaatgttgagaaggaaaagagaattgaggaagatgtgtgtgat

SEQ ID NO: 20034 - DNA, 478 bp, Glycine max
  Clone ID: PAT_MRT3847_118095C.1
gcgcccacgcgtccgcggacgcgtggggcgaatccgcggagtacaaagaacggatttggcaatgccatcaacggggggcagaccgactgctcagtttggcacgaaggaatggcggagtgttcatcaaagttggtcaacacatcgcctcgctgcaataccttttgccggagccgtacacttccacactttccattctccactcgaaagcgccggagagcagtttggacgacatgaagacggtcttctacaggagtttgcacaaaaattttgacgatgttttcgacgagttcgacccccgtccatgtggcgctgcttctttcgcgcaagtgcacagggccaagctgaagtcaagcgacgaatacgtggcagtcaaaatacaacatttgcatgtgaaagaccgcagttttgttgacatggccacgatggagtttttcgtcaacgtcgcctcctttgtgttcccgaactcaaatgaaatggt

SEQ ID NO: 20035 - DNA, 582 bp, Glycine max
  unsure (1)..(582): unsure at all n locations
  Clone ID: PAT_MRT3847_118096C.1
ggctcgagctcctaaaaccaaaatacttaacaaacattctccctctttgccattctcatcatcaccgctgttaacaaccatggttatgcgggagaaaaccaaattggggttttctcaatgggaataacaacagcaaaaacccaagaggaacataagctcttcctgcctccatggttttgtcggcactatttgggtgcaaatcagttcatatcagacagcaatcacaaacatatcaattttgtgcgatagcggtttggtgggtgtgcgatgggatcgtcaggatttggtgggtgcacgacgagggtcgttggggcttgatggggtgtgtgactgaaacaccatttggtgggtgaggtgatgggcttgtcggtgacaaagtcaatgtgaaaagagtgaaaaaaattgaaatgccactgctggcaatcgcctccggcgatgacacatgtgtgtcagcggcgagggaggctgaaatgtcccagatctatataagcatatccacccagatctntcagatgtacacagtagatctagattgaccttgttgattgttgttgcttcatcatggatgggagaaagggtatg

SEQ ID NO: 20036 - DNA, 227 bp, Glycine max
  unsure (1)..(227): unsure at all n locations
  Clone ID: PAT_MRT3847_118097C.1
gttggggggttttgggggtttttttttttttggggngttctcccagccgggcccttctggggtgttctcccagcccgacccttctggggtgttctcccaacccggcccttctggggggttctcccaaccggacccttctggggtgttctcccagccggacccttggtgggggcttctcccagcccgaccgggcccgtgggcggacccctggggcggacccctgggcc

SEQ ID NO: 20037 - DNA, 263 bp, Glycine max
  unsure (1)..(263): unsure at all n locations
  Clone ID: PAT_MRT3847_118098C.1
gcaggcccccacacacnagggagcacagggaacaggcccgccaaaggccggcgggaggaggcagaacggccagaaaggagagcacacggcaggggagcggcnacaagaaaacggggggggggggaccacantgtttgttgaggaaaaaggacgcccggagggaaagggaaacgggagctggcggagtggccccggctgtagcgacagcgaatcccatctcagcgggagccggggcctggagagcatagctgaggccatccagc

SEQ ID NO: 20038 - DNA, 431 bp, Glycine max
  unsure (1)..(431): unsure at all n locations
  Clone ID: PAT_MRT3847_118099C.1
gggaaaaattgtaaggtttttttgatttaaggagggnnnggggggaaaaatggggagggtttaaggattaaaggaaagttcccccccccaccagggaatattccccgggttgccccattaaaaaaggccttttttgttttttttttcaaaaaaattaaatttgtttttttaggggcctttgttgttggaatggaaaaattttttttttttttgcccaaaaggccaaaaaggaccaattttgcctttttttcctaaaattggggggggaaggggctccaaaatttttttctttttcaaattcaaatcccttgggaaaggccccccttttaacattttccaaactaaattgagggggcctttgttccccctggccctacattttggaaaagggttaaaggaggggtcccaaatttttcccccccgggtttttt

SEQ ID NO: 20039 - DNA, 656 bp, Glycine max
  unsure (1)..(656): unsure at all n locations
  Clone ID: PAT_MRT3847_11809C.1
cacgcgtccgataaagtatcttaaatttttaatcccccaaaaaggtcaaaacaaatcaaaagaaaaaaaagaaatatatatcactgtctctcactcttccaatctacaacctcccattttttttccttcctttcacacagtgttttctcttcaatcattctgctaaaagtaggagacttgagcaacagaacataagcatagaataaagtgtgcaaaggccactgctttagtgctttaccaagctgagaaacaacacaacacaacaagggtgttgtttagtattattattgattattattcattgtttgttgttgtcatgagcttcaacaagctcaaagtgtggaatgtgccactactcttgggtggtgtttgcatgttcactgcttggtcaagcttcagcttctgtgtcctatgaccataaggctatcatcatcaatggacagagaaggatacttctttctggctccattcactaccccagaagcacccctggagatgtggcccagatcttattcagaaggcaaaggaagggagggttgggatgtcattcaaaacttatgttttctggaatggacatgaaccttcacctggcaaatattattnttggaggaaactatgatctgggggaagggtcataaagctaagggcagcaagca

SEQ ID NO: 20040 - DNA, 262 bp, Glycine max
  unsure (1)..(262): unsure at all n locations
  Clone ID: PAT_MRT3847_1180C.1
aactatttgctttttggagccacaaatacatattncggggacatctagattcattcgtgggccaggtataaaatattgaattatgcttcgcatggttgccttacctttcattctttatggagtcacatggaaatgcatttggaaagctgctttggttattcatagcttgcattttgtctactatnttgatttggtgatgaagtagaagtggcctgaagttaatgctacttttgttgaattagctatgcattttctattttgg

SEQ ID NO: 20041 - DNA, 994 bp, Glycine max
  Clone ID: PAT_MRT3847_118100C.1
ccacgcgtccgcgacgcagaaacgagaaccacttcgctatgcatttgcaccctctccgtcacattcccattccgttaccttattttttatagacacacacgaatcccccttttctctgaataataattcaattcaattactcctaaattaaacaagtagacgaggaggaagaaggagaacagcaacaagtagatgaggaggaagaaggaggacagcaacaaggagacgaggaggaagaaggaggacagcaacaaggagacgaggaagaagaagaagagcgacaaggagaagaagaagatggtgatggtggaatggcaatggcagaagacacagaggagaagagtgctgctgtgagtggtgggaagaggaggcgtggggctgggaagaatgctaaggctacagggagagttgcatccaggaaaaagatggaggaggacgtttgtttcatttgcttcgatgggggtgaccttgtgctttgtgaccgcaggggatgccccaaggcttaccatccttcctgcgttaatcgtgacgaggccttctttcgagctaaggggaagtggaattgtggttggcatctttgcagcaactgtgagaggaatgcatcctatatgtgctatacatgtacattttctttgtgcaagggatgcatcaaagatgctgttatcttacgtgttaggggaaacaagggcttttgtgagacttgcatgagaaccgtaatgttaattgaacagaatgaacagggaaacaatgtgggacaaatagattttgatgacagaaacagctgggagtatctcttcaaggactattacatagatataaaaaaaaaactatctctcacatttgatgaactcactcaagctaaaaacccttggaagggatctgatatgcttctttctaaagaggaatgactggatgaaacttttgatgccactaacgatggaggatcagattgagatagctgctatgagaatgcagattggaggggggctgaaag

SEQ ID NO: 20042 - DNA, 112 bp, Glycine max
  Clone ID: PAT_MRT3847_118101C.1
catgattcattactcaagaaagtaacgaaagaatgccggcacaatccctatcatggcgatcgcatgtagtcgtatacaatgcatacatgaaacggcagctaaaaaataaaag

SEQ ID NO: 20043 - DNA, 141 bp, Glycine max
  Clone ID: PAT_MRT3847_118102C.1
ttagcaaaaacatgcaagcggttatggacattgcctccccaacaaaccatgcgccacttgtgacatgatacactttgataggtgcaaagagtcccacaagcttgtctgttgatcttgaacccgaggaccccagaaagcctc

SEQ ID NO: 20044 - DNA, 391 bp, Glycine max
  Clone ID: PAT_MRT3847_118103C.1
caggtttctcccttaattattagtcttcttcttctgttaacttaattgcgtccctttttctttcttattccccagtgcaaatcgtggaaacgtggacgcgacctaacccgaaccgacattgaagtcggcgacgatacgatgccgttttttgtggtttctctttggcagaagcaaatggggtccatggtatcagccggagatgtcgtcttgttacagaatctcaagattgcgaagtatggaaacgccgttgaggcaagaaccgttccatggtcttcgctgctttgcttggttcacccttaccaatcaattctatcaaacgctgttgaagagttggtaacaggatgccgtgtggggacaacaacaaaggacaagcttaggagggtcataaaat

SEQ ID NO: 20045 - DNA, 317 bp, Glycine max
  Clone ID: PAT_MRT3847_118104C.1
ctctagacgcttgaaattgcgcagctgaagcatttgagaatttcaaatggtcatcacttttaactaagaggtctacaagcaagcagcataataggggtgcgactattccggaattgaacaactcaagctctcgaaatatataaactggccagtaacatttaactcggaggtccgattaaagcgcatcacctatagagactctcgaaattgaacaacggatgctctcgagatatttaaatggtcataacttttcactcggaggtccgattcaggcgtttaacatatcgagactcttggaactgaactacggaagctct

SEQ ID NO: 20046 - DNA, 508 bp, Glycine max
  Clone ID: PAT_MRT3847_118105C.1
ccgaacccaaacaaaaggaaaaaattcttttttatttaattcagggaaatccatccctccccccggttttaagggtggccttcccacataaaaaaaaagaagaagaagcccccaaaagggctaaagctcccccttaaccaaatttggaaacccccggtttttaaaaaaaaaaatttttttcctcttttcccccggcaccaaaaaaaaagggaaaagggggggtaaaaccaaaaagcgggcgggggggcctttaacccttttaaaaaaccaaaccgggggggggcaaccatttatcaaactccatttccccaggggccaaaaaaaaaaaaaaattttcgcaaacccccctcacctaaaaaaaaaaccggttttttaccccccccataaccatttttaaaaaaaaaaaacctgggttcccaacccttggacccccccctgggggtttcccccaccggaaccaggggaaaagaccctttccttggaatcccaaagggggtccctttgggga

SEQ ID NO: 20047 - DNA, 495 bp, Glycine max
  Clone ID: PAT_MRT3847_118106C.1
ccacgcgtccggagattcttcttcggatggtgttttgacagataggtcattttgtgctgtgcatggtgatggtcttctctgattaaattcccacactgcctcctctctccaatctgctacgtgaggaagcaacatattaagagctgagcctgagacgactgggaaaacatggaatgcaacaaagatgaggctgccagggccaaagaaatagcagagaggaaatttactgaaagggaatatgctggtgcaaaaaagtttgctctcaaggctctaaatttgtttcctgcactggagggtctttcccagttgctaacaacacttgatgtttatatctgtgccgagaataaaatacatggagaaatggattggtatggtatacttggagtgtatccatatgctgatgaagagacggttaggaagcagtacagaaagctggctctaaatcttaccctgataaaaacaagtctccaggggcagaagggcattcaagcttgt

SEQ ID NO: 20048 - DNA, 1297 bp, Glycine max
  Clone ID: PAT_MRT3847_118107C.1
ttgcgtccggaaaatttagcagatattgcttgcttgaagaatcttgactccaccttacatgccatgccaaacataaaccaagttcatgcactcatcaatgaatatggccccactgtatacttccaccctgatgagatatacttgccatcatcagtgcaatggtttttcaaaaacggagcacttgtgtattcaagagacagtgagaagggtaaagcaatagattaccagggatcaaacttaccaagtggaggaacaaatgatggtgcttattggatagatttgcctactaatgatgatgctagaaataatgtaaagaagggagacatagagagtgcagagctttatgttcatgtaaaaccagctctgggaggaacatttactgacattgctatgtgggttttttgtcccttcaatggacctggaatacttcaagtggggttggtgaacgttgagatgaacaaaataggtgaacatgtgggtgactgggagcacttcacgcttcgcgtgagcaacttcacaggagaactatggaatgggtagatgcattcggtttggagtttatagaaggaaacaaaccagttgtttattcatcaaggcatggccatgcaagtttccctcatcctgggagctaccttcagggatcatccacacttggaataggagcaaagaatgaagcagctaaaagtaaactgacagtggattccagcaccagatacaaggttgttgcggccgagtatcttggtgagggagcaattgctgaaccatgttggttgcagtacatgagagagtggggtcctacagttgtgtatgactcacgttgaaatagataagttgatagacctgcttcctgtgtttgttagattttctttggtgaatttgtttgaattgtttcctacggagctttatggtgaggaggggccaattggtccaaagggaaaggccaactgggtaggagatgaaaagtgttactagtccctcctctttgcttcatctattcttctctgttactctgctatctgccttgttaaacggaatcaattattttgtgttgcagacagagaatgaaatctaaaacaatatctgaccaaacattccaaatactatttataggatttttttgaggatcacaacttcacaagtgtttattagtccaaactattaaggaccctaagttagataacaggtgaatttataagaaaagtttgaagagaatagtataaagccgctggcacctgagactcaatttcaaacgctgtgttgtgttctgaactggttaagggcagctcctccaatctcc

SEQ ID NO: 20049 - DNA, 354 bp, Glycine max
  Clone ID: PAT_MRT3847_118108C.1
ctgagactgacaaaaagttcagtgtcggcatgaggtttaagatgagattttatgacgatgattctgctgagactggcaaaagatcttagggtaccggggttggagagcaagatatttatatctcattggtgtaaattcaaaatgtgcgatcactacaatgttcaatagggatgaacgctgcattctgttccccagacctgataggtgtttcaccatgggagatacgaaccctatgttgcttgtgattttacacacctaatttcaacctactatgctaacgactaaaaggccccggacacccatcgaaacttcagatgttgacacaacatctgatgcttatgttttttgggatgc

SEQ ID NO: 20050 - DNA, 631 bp, Glycine max
  Clone ID: PAT_MRT3847_118109C.1
tagagccttaagatgacctcttcctgtcccaaacagtttcctttcaactccaaaaagttaaaacacagacaaaaaaaacataaaaccaaagcaacaacgttgttaagatgcagtcaagactagcagaagcaacaaggagaacatcttgtgcattatcctcaaccactcgcttcactctaaaacgacaactttgctctggcactcgtatccgaaccgcagaccccgaaattcattcgggagagctagaagctggtcccaaagttcacagaggacaaccccaaggtataagtacacaagataaagcgaaggaagccaggtattctgaaacagaacgcaatgcgagcaaagcgcacgagatgttgaaatctccaaaatctccttgtgaaccttcacggaaactgaagagcgcgggggtgaaccagagattggacccaagcattcagcaaaagcgggagaaagggtcgaaggtgggtattgaagaggtgagctgtgctggtcttgatggaacgccgtggccagaggacacaaacaaagggaaagagaaagaagataacagagagtactttaaacgccacaaggcatcgccctttgtcgagatagagtttctggattacgaaagccgttactcgag

SEQ ID NO: 20051 - DNA, 1129 bp, Glycine max
  Clone ID: PAT_MRT3847_11810C.1
ccatgcgtccggttgaagcaggagcgagtgattgcagaacacccagcgcgaatgagaatggaggaagcccttgcggaactggagcgagtccaaacccagctcctgcaacgcatatcgaaactggagcgttcgcatcttccatcaccctcttcccaaaacgacaccgtcgaagacactgccacggacaccgtggctcgcctctcctccattctgcgcagcaacggcgttcccgatttctccttcaagagagtcccttccgattactacgactggcccctcgaagcccgtcgcgacgccctctccgccgcctcaatccaccatctctgcaaaagcatcgttctcgttaacacgcaagcccccgccaacgtcgtcgattgcagcgaccgcaagaattccaaatactatgtcgttgtcgttcagtacaccgctcgcttcaacgctgaggctgtcaagaattttctgtattcgctcaacaatggaagtatcgcgaagaagaaattcaacatgaggctagctcctgaggagacatcaatggagttgactggatatgggcacaatgcagtgacttgtattggcatgaaaacagacatcccggtgattttggatgaagcaattgtaaaactaactccagatttcttttggttgggtggtggtgaagttgatctgaagctagggatccgaacatctcaattaatcaaatttatcaacccattcattgtcaactgtagcagtaattgattttgttgagcagcatgtggtcaccataattgagttttcatggagagttaccattttcagctttccatttttggtttttatattatttgaattattgccccttcagtaagatatttgttttttatggccaagttttgcggtttacttgagccattatcattatcttttacaaaatttgatggcaaccatcgtcatgtttgttgaaagtcaataacataatcagaaatagacgataagtttggctttatgattatctatgtaatataatattgcgtatatctgatataatacattctatctgaacatattataatctgcgggttggtgctgctcactagagccatcaactagtgtataatattggagactaatttggattttatatcatgtt

SEQ ID NO: 20052 - DNA, 1529 bp, Glycine max
  Clone ID: PAT_MRT3847_118110C.1
ccacgcgtccgctgctgtactagtcaaagatggggggctcccatggtgaattatgagtttgatacatcaactggatcattgaaaatattaaatggatatgagttgtgtctaataaatccttgtgaatttgatgacattggatctcatggtactaaagttattatctataatttgtggtgcaatgatgatgcaaatttggagctagactttgatacagatcctacggatattcgtattgctggggatgtcaagcagattgatacacttaaagcctggaaaagtgtaaatgaggagcacattgctaatcggcttcgttactctttacatgtatatatgtccatattatacttgaagataccagaaagttttcaaatgatattgcgagggcaagttgtgaagccacacaacattgctgatgatcttaagttccctcaatttgttaaatatgcaccagtaattggtggatccgtaaagggaacagctttgacagtcacaacaattggatttcttaaggaagctcctcaagtcaatatccatggtttcaatgtatatcacaaaaatcggcttatactgccattttggcaggttgtaagctatttggacagtaggggaagaggagttgttggaatcctgcaagcagattttattgagccaactcataacaaacaagattttgagagaacttccctgtttcaaaagcttgaagggcgattgaaggagatgacatgggaatactgggacacacattgtacattgtttgggtataaggataaggacaagaagaagcttccaccgagggttacgtcaatgcagaaaccacttgctatagaaaaaccggtcatgctgaacagaagttgctcccctgttgtcaatacaaaaatagaatatgggaattctgaacagtgttccacaaaactgcaaataagatccgaacaaggttctcataataagaggaagacacatgaactggtagaccttcagaatacggaaaaacatgcaaggacagagaatgtaacctgtgttggtttcagtcagaataaacagatcattgctactccagctgaccaggtgttcgaccgaaagactatgcacttggtgcaacaaaacaagaaactgcatgcaaaatgtttagaatttgaaaagacaggagaagaacttaatctcaaggtgacgatgcttaaaagtgaaatacaagaagctcaagatgagtataaacggcttttggctgaagtgaagtccctagacctgaaagaagagtagtttgtgttatgtgtagctgtaactctttcttttgtagaagtgatgttgtattgtatatagcctaatccctttttcagtcttttcaaacttgcttgtgtatggatgaaggttttaaaattttctaggaaatttaaatacacattttaattgtcttgatttaaatttcttttattttgtaaatattttattgaatgaagtaattcaatttcttgtattttaatttctggatccagtaatttaattttaataaaatttaaatttttattttt

SEQ ID NO: 20053 - DNA, 869 bp, Glycine max
  unsure (1)..(869): unsure at all n locations
  Clone ID: PAT_MRT3847_118111C.1
acagtttgctattggacggtatggaaatggcttcaagaccagtagtatgaggcttggtgcagatgtcatagtcttcagttgccatctaaataataggattttgactcaaagcattggacttctgtcatatacatatttgataaaaacacagcttgacagaatagtagtacccatggtgaattatgagtttgatacatcaactggatcattgaaaatattaaatggcaatgagcattttgtgtctaatttatccttgctgttgcgttggtcaccatattcatcagaagcagatcttctgaaacaatttgatgacattggatctcatggtactaaagttattatctataatttgtggtgcaatgatgatgcaaatttggagctagactttgatacagatcctacggatattcgtattgctggggatgtcaagcagattgatacacttaaagcctggaaaagtgtaaatgaggagcacattgctaatcggcttcgttactctttacatgtatatatgtccatattatacttgaagataccagaaagttttcaaatgatattgcgagggcaagttgtgaagccacacaacattgctgatgatcttaagttccctcaatttgttaaatatgcaccagtaattggtggatccgtaaagggaacagctttgacagtcacaacaattggatttcttaaggaagctcctcaagtcaatatccatggtttcaatgtatatcacaaaaatcggcttatactgccattttggcaggttgtaagctatttggacagtaggggaagaggagttgttggaatcctgcaagcagattttattgagccaactcataacanacaagattttgagagaacttccctgt

SEQ ID NO: 20054 - DNA, 1355 bp, Glycine max
  Clone ID: PAT_MRT3847_118112C.1
aaggggtgaaaccatggcgcttttggatgaagcttgtcagaaatggggtttctttctgattgagaaccatgaaattgacaaaaacctgatggaaaaggtgaaggagctaattaatattcactatgaggagaacctgaaggaaggtttctaccagtccgagatagcaaagaccttggagaaaaaacagaacacctctgatatagattgggaaagtgccttcttcatttggcaccgtcccacttccaacattaagaaaatcacaaacatctcacaggagctttgccaaacaatggatcagtatattgaccaactcgttaagctggcagagaagttatctgagcttatgagtgaaaatccgcgtccttcttgtttcacaagtttccttggaagccgtgcgctattactctctctccccttcttctattttctcattgctgcctctcttctcattatggccggcaacagatggatggaacctgaggtatgcccacgcttcgcgtaagtgggtgaggctgtttgaatctgctgtatgcacctatttagaaatataaccaccaatactgaagtcagggtgaccaaacagaacagatcttcaggaattcttgagaattttgcagagggagagaaatattcacaacatagcctgacgaagtatgttcgcggcaagcagcctcaaattatgccatccgtcaacaacttcttctctgatccatcaaactaaagcaaatgccaaactttttgttcttgagatttgatttttgggtttaattatttgctttcaagtattggtaattgggaagtaagtcatcaggtttggatttatcagataaatatgaactatgattctgtaatattttagttgtttaattacaaattgtcttattatacaattctatactttcactattacacaaagatgacctaggatttatcctagaaatctaaaaagaccaaaagtgggtggagattccaccctccaagaacaatgccatttttgtgaacacaggtgaccaagtagcaaaacagaacagagcccaggaataaaggagagtgcacaggggcaagactaacaaacacaaaataccctgccccaccgcccccttttataaccccgtccgagaagccaatccctccacaactcactctctcttccatccaactaatgcatatgccataccctctcttctcccctttttatctctgggtttaattgatttttttgctttccagtattgggaattgagaagtaggacaacgggatttgatttttcagataaaaatgtactatgattctgtaatttgttggtggataacattcaatctgtctaataataaaattctatactttcccgttt

SEQ ID NO: 20055 - DNA, 198 bp, Glycine max
  Clone ID: PAT_MRT3847_118113C.1
gacaactcagtttgttgatcgacataaccagaaacagtgtgatgacaatgaacgtccttgttctcctcgttgctacaattttggtggcatggcaatgccacgcgtatccatatgttccctctccgaatgaacactggctatggcacccgtagcccggaggtcaaatcctcaagttcgaggcttcctgtgccagcacac

SEQ ID NO: 20056 - DNA, 324 bp, Glycine max
  unsure (1)..(324): unsure at all n locations
  Clone ID: PAT_MRT3847_118114C.1
tcgcangnacgcntacgtnagctcggaattcggctcgagggcccttaaactttcgctctctctgcttcactttctcgcttttgcattttcttgtgaaaaaaaaaaaaaatcctcagancaaaaataggtcttctnctncncnganctaccaaagcttcaaatncccctnanttnggtttgtgctgngantttggagtgtaatgncnccgccgacgctggnaacggagnaggnggggcgnagcaccnaggcgtccgattcttngnaanccttggacngtttctcncagaatggtgctggattgaaagaangganttncttagggt

SEQ ID NO: 20057 - DNA, 558 bp, Glycine max
  Clone ID: PAT_MRT3847_118115C.1
acgagaaaaagagtaaacgaagtcaaatgttgaagagaattcaaaactacatctatagcccaatcaataaagtcgtaaaacatgtaaaataatattctgcactattagatctcgtgaacttcctcaaatttacttccgtggtagtttctctctaattataaaaaaaaagtacagtttatttctttcacactcttgagaaaataatttgagctgatttgttttcgaattatagttttagacaaggtttggacttgcaaacctggaacttccctttccttaatctaaaatggtttttttcccttaatttgagctgatttgttttctattgttctttcacacattgttttttttttcgtttctttgtttataaatatttgcaaagaaaacgagaaaaaaaaaatggatcccatctgtgatcaccaaaacaaacgaaccacatcttgacctcataaccacgtaatacacttaaatattaatgttatcaaattaaagtagcgaaatcaaattattgttagtgggtcatgcaatgcttgcgaaatcgataaacaatgtcacatt

SEQ ID NO: 20058 - DNA, 2015 bp, Glycine max
  Clone ID: PAT_MRT3847_118116C.1
cggtccggctccccgggtagccgaaccggctcgcgccacgatgacgcaacaagaatcaaccatgtcactaatattcttacaactacttttactcttgtcatgcctaacactgaacaatagtattgcagaatcaaccaccatcatcaatgtgtggcccaaaccaaggaaccttacatggtccccaccataccaaaccaccctcctctcctccacattcaccatcaccaccaccaccaaccaccacaacaagcatctctccatcgccatccgccgctaccagaacctcatcaaatccgagcaccaccacccacttgtcccacaagcagtcaacatctccaacaaatacctcccaccactgcagactctcaaggtcacagtggtggacactgctgcagaactcgtccacgccgtggacgagtcctacactctctccatcctcccttcctcatgtgctaccctcactgcaaagactgtatggggtgccatgcgaggcttggaaacattctcccagctcgcatggggccaccccacgcaggttccagtgggcgtgcacgtgtgtgactccccactctatgcccaccgcggtgtcatggtggacaccgcgaggaactattatcccgtgaaggacttgatgaggacagtgaaagccttgagcatgaacaagctcaacgtgcttcacttgcacctcacggatgcagaatctttccctttggtgcttccttcggaacctgccttggctgaaaagggggcttatgcccctcacatggtctactcacccaaggatgtcaaaaaacttgtagaatttggtcttgatcatggggttcggataatacctgagattgacacacctggacacacagcatcttgggcattagcccaccctgacattgtaacatgtgccaacatgttctggtggccagccggaagggattggccacataggtttgcttcacaaccaggaacaggacatttgaaccccttaaaccccaagacttaccaagtcctaaagaatgtcatacacgacataaccacattgttcccagaaccatttttccactctggtactgatgaaatagtaccaggctgctggaaaactgaccctgcaattcagaaatacctatcaaatggtggaaccctcaaccaacttctcgagaagtatatcaacaacaccctccctttcattgtgtccctcaaccacaccgttgtcttctgggaagatgttttactggacaacatagtccatgtgccatctgcaatccttcccaaggagcatgtgattctgcagacatggcacaatggacataaccacactaagaagatagtttctgccggataccgaaccatcgtgtcatcggcggaattctattatctggattgtggacatggctcctatgttggcaacaacagtgcatatgacaatcaagatggtgacatgggcaatggcggctcttggtgtgcacctttcaagacatggcagaccatatacaactatgacatagcatatgggttgagtgagggggaagcaaagttggttttgggaggagaggtggcactttggtcagaacaatctgatccaactgttttggatgcaagaatttggccaagagcttctgcactggctgagtcaatgtggtcaggaaatagagatgaaaagggtgtgaagagatatgcagaggccacagatagattgaatgaatggagaagcagaatggtaagcagaggaataggtgccgagcccattcagccattttattgtgttaagaatcctggcatgtgtaacacagtgcatccagtctagttgcattcttcctttgtcacaataaaaaataaggttgaattaaaagtttagtaaccaaaataaggttaagtttttttttaaaaaaaaaaaactaatatcgtcttttgttttaatttctacatgaaaaaaagtctaaattttggttcttacaaaaaatagccttactattatttgttaaagttacaattgtattagctttagtccctatctttaatag

SEQ ID NO: 20059 - DNA, 794 bp, Glycine max
  Clone ID: PAT_MRT3847_118117C.1
aaagggacttatcatcctgttcactgccaagtaccaccatggcacattgataaacacctgtttggctacaaactcaggatagttatcctgaagcagctgcagggcctgtttggtagcctgtctaagctcccacttagaagggccaggagaattcctgaggtcattaacctgaacaatggtgcatatcccaccagggttaaaatccagcttcctgatactcttctccaggaactgaatcctccacctgagaaacctatacctcttctcctcatcagagaaactcttcttgtacaactccttgttctgaaactcaccatagatgttgtaacacacagggtgaccctccttgtcgaacccatgcatgtacaccgccttctccaaaccatcaccacccaaatcctcctccaacagctcctccatcttgaactccttcctccaccgaatcgtgctctttatcatcgccaatgcctccttcaccttgaagtcccgagcacgaagaaacttcaacagaatcacgtcgcttctgtcatcagcgagaagcggcacaccccaaatgcaaacctcttcgggagaagcagaaagtgaaacagcttccacctttggttcctcggagacagtcactgtcacagacacaacggtttcttcgatggcttcaacggttttcgctccatcctcgtcagcagaagcagaaaccgccactttctcttcaacaacctcagtttcggttaccgtaacttctgcagcttctttttctgtctcttctgccacgtcagcagcatgttccttcttttctt

SEQ ID NO: 20060 - DNA, 360 bp, Glycine max
  Clone ID: PAT_MRT3847_118118C.1
aagctttcagaacagaagaagcattactttgataatcatcaaaaagaatacaaaaacataaatagtatccatcatcagatcgagaaccttgaagagtaaagggaaatttcatctatcacagacaacgtcacttaaactaacacagatgatatgatccctggatcgtcatgaggtacaccaagacatacataaagctcccacagttaatataatttgcacattaaaacccatgcagccaaaatcaaagtcagtactcatagaaaagtctctctggaccataagttaaacccccaacagcaggtcgtataagctcatcggccttgttcccattctgaaagaaatgaattgttggcacaaatg

SEQ ID NO: 20061 - DNA, 555 bp, Glycine max
  Clone ID: PAT_MRT3847_118119C.1
tatgagcattcacaagtgccaaggaatgactcttgagagagttcacactgatctgtctagagcatttggttgtggcatggtgtatgtagcactttcccgggttagaagcttggagggacttcatctatctgctttcaatagatcaaagattaaagtggaccaaagggtttcaaggttctataggagcttggcttctgaaaagagtaaggaggttatggtagttgataggaggagagaaaaggtggccacagaagtagcagtggtgtctcaagaaaagtgagtaagggtagaacaaagtacaagacttggtttatcaaaaggaaaatgaacaaggttgctgaatactttgctgaaattcttctttttattgcagttgtcatatattatataaactgacctgaggatgaaaagttaaattttcctcaagagggtgttataattgacttatgcaagacctggaagagcaatgtactgtagtcactattattattattctgatcctcgaagctgttcatcgatattgattagtgtaaagagtatatcatactagtagtg

SEQ ID NO: 20062 - DNA, 531 bp, Glycine max
  Clone ID: PAT_MRT3847_11811C.1
caaagaacataaacttgctacctattaccaaatagctgccttactacctatcctttccaacgatcacaccctacagtcttcagcctaaaagccaacccgaagaagaaccaaaggaaccaaaggaaccaaaggaaacaagcaaagggaaacaccacgctatgcagatacccaaaacattttctctctcatccatcctacctgaatcatcgatttcacaccagagataacaagactagaaaagggtcgtttcgtcatgtttttcgtatgtaatgatggccgtccgcgtgtctcctaataagttccagaatgtaccacaatctttgagggagtccaaagtgaaaagttggcaataactgctttgatcccgaatgtgtagggggaggaagtaaaacatggcggcttgacagcggcgaagtaaatgtgtgtatgcatatacatctcctgctccgccaataaagaaaagtaagggaatcacgcggcgactggtccctcgccattgagctcaatagcgtcttcgacgttctcatcgac

SEQ ID NO: 20063 - DNA, 589 bp, Glycine max
  unsure (1)..(589): unsure at all n locations
  Clone ID: PAT_MRT3847_118120C.1
ccacgcgtccgaagtcagtctcttggtggcaggggcacaatggcgctctctcnccatcgaacccaccttcctcgactttgagtgccctctagaccctcccaccaccatgcgccccggcgaccagctcttctccgacggggaactccttcctctccaccccctaacttccacaatcacaacctccaaaggcgggctcttcctccggcgggaacgccaccggctccggcggtaccaccgcgcaccaccgcggacccttgcctcttctcccccaaaggcccacgctgcgcctcccgcggggaagacctcctcgggctcaaaaaattctaccaaggcactaacaacgccaaagggcggccaccctcttcggccaaatccctaaaaaatctcctccaccggaaaacgacggcgccttcactctcctcggaaaacgcgccgctgcgagcttcaaattcctccgaggctgagtccctctccatcacctggtgggggctctctctttcctcatcctgctccgggcacgaccacgacgacctcccccggctctncccgggagtccgaaaaacctaaccctaacccctaaccagagctc

SEQ ID NO: 20064 - DNA, 326 bp, Glycine max
  unsure (1)..(326): unsure at all n locations
  Clone ID: PAT_MRT3847_118121C.1
cccacgcgtccgaccacgcttgcagccacgcgatcaaccacacggtccatggcagcgtttttcatttcatcgtgcgattcaatggccatcacagcagctctattcggaaccatggcgaggaccaccttcaataggaggccctcnttgagcagggtaaggctcaagacattcgccaacggtggaaaaactctctttggtctgaaaagggaacaacgcggacatgtcacttgcatagcctaggacaacgtgaatggcataaccccaaaatgagaagtggaatctggatgcccacaagatgtttttttatgcgaaaacgccgaagacca

SEQ ID NO: 20065 - DNA, 183 bp, Glycine max
  unsure (1)..(183): unsure at all n locations
  Clone ID: PAT_MRT3847_118122C.1
taaggttntagngtgtctgactttttgcagataaatatgtgcaacgtnctccatttgcntaaacttcataccaatctcggaaaccatatctttgattgtattagacaatcattgattgntgantaccctataccnccaatgangttcatatttcctacccntcaatccatgaaggcggccatc

SEQ ID NO: 20066 - DNA, 476 bp, Glycine max
  unsure (1)..(476): unsure at all n locations
  Clone ID: PAT_MRT3847_118123C.1
cccacgcgtccggngaaagctcggattagagctctcactctcctatctggtataggactccgtgggtagacttttctatttctgtcctttctttcactctcttcttgtcactgatccgcattgccgttcaaagcggtcttatttgaaaaacaccagggcgttggtgcaaaggtttgcgccgacaattttctcaggggacaacaggctcactgagaaaacaattcttacttgcagagattgggacatcgtggcagctcatgatacaatagcaactcaatttagaaaattcctaccgcattacattaggtggcatctgtataccttgttgataacattctcccatctttactcactgctgaaattaaatataagcggaatctaagtaatagttatatctccggctgattatacgacggcagatacaaactctggactaaccacgagaataaatttgctttgaccgaagaggaaaagat

SEQ ID NO: 20067 - DNA, 436 bp, Glycine max
  unsure (1)..(436): unsure at all n locations
  Clone ID: PAT_MRT3847_118124C.1
ctatctgacaaaccatcgattattatcattacaaaggatcgcccacaatactacacaatgaccatcgggaagggggcaaacacaaaacgtgtgtttccatccatgtaaattaatgatgcacataattcccatannnnacatgttcagaatctccagcatgcatgacaagaccctcactatcatcaccaccatggtcaacggcgtgctttctcaaatatccatcaatcaccgtcaaaacatcatgacacatgtgatgaaatttacggcctaacaagtcgagctctctgccatcgataaaactttcataaccaacacgccacctgacatctcaccgaaaatctatactcgccttgagattctgcgggcagaaatcgaaaaccctcttgaaggagctacaagctgattgcataccgagggacatgttccacccttggac

SEQ ID NO: 20068 - DNA, 423 bp, Glycine max
  Clone ID: PAT_MRT3847_118125C.1
ataagaaaagtatgccccggttttcataatttattatttatacaacatcccaggtcttttttctttataggctttaggaaaagaaaatttacccggtttacacgtgacactaaacggcaaaagcgggcttacagggttttgaaaattttgaaaccctccgaagtccgaaccaaatccatcaccaccttttttatgcattccctggttccggtcccattggccaatttttacaaccattacacaacctcgccacgggggtggtttaagacgagggtcttgcttgtcaaattctgggggtcccacatcggtgggacgagagaccttctttcattcggaccatgcgcattgggactcgccccgggtgccttatccacgggaacccgacccggattacccgggtgcgaccccttttcgaaaacacca

SEQ ID NO: 20069 - DNA, 405 bp, Glycine max
  Clone ID: PAT_MRT3847_118126C.1
aaaatgcacatactggtgaatactctaactggactgactgaagccctataggacaacagcgcaaacaccttaaatcctgcttacgacagaactcaatgccgggatggcattcttccgggataccacaaaactgttgtctccggacagcaacttgaatatggacggaccctgtccgtatccaacactccccatgaatcaacccctactcctcgacctgaggctaccaaggaggtatcacagaacccaccctgatggttttggttcgcctatactggctacacagaacgatctgtctcttgcgctatgccccccccgctgctaggactgcgacctaccgcttgaagaaaagcatcttggcctccatgtattggctaccaaaaacattaagggaaggctgcgtgatgt

SEQ ID NO: 20070 - DNA, 339 bp, Glycine max
  Clone ID: PAT_MRT3847_118127C.1
agggctaaatttcattaacaatgcctctgaattttccccattatcatcatcatctgttttttttaaaaaggagttctaattaattgagggggcaaaaatttcaaaatccattggcggctcccctcccagttacattattattttgaacttgctggaagtgatactgaagttggggttgggggcacccccctcctgggaaggagctgttactttcacctatgccaatgtttggcctggaccccttttcttgacccaacttttccttggcccatttttggcttcccaagaggaaccccactggccccccttgttgcgcctacaaattaaattgacaaaggg

SEQ ID NO: 20071 - DNA, 536 bp, Glycine max
  Clone ID: PAT_MRT3847_118128C.1
ccacgcgtccggcggtttgagtctcaaacctgcgaacccgacagggaggtctgatcttccaggaattgacgtgtttgtttccacggcagaccctgaaaaggaacctcctcttgtcaccgccaacaccattctctcgatccttgcaattgattatccagtggagaaggtcgcgtgttacttgtctgatgatggtggagctttgttgacatttgaagcccttgctgagactgctagctttgctagaatttgggttcctttctgtagaaagcaccacatagagccgcgaaaccctgaagcatattttgggcagaagcgtgattttctcaagaacaaggtccggttggactttgtgagagagaggagaagggtgaagagggagtatgatgagttcaaagtgaggataaactccttgcctgaatcataaggagaagatctgatgcttacaatgctcatgaggagctacgagccaagaagaaacagatggaagcaggttccaatgtctctgaaccattaaagttcctaaagctaatgggatg

SEQ ID NO: 20072 - DNA, 355 bp, Glycine max
  Clone ID: PAT_MRT3847_118129C.1
caaatcctcaaaatggaaatttttttgaaccaaaagggccctttatcatcagggtctatatccataaccaacatccccattttttaataccactacaaatttggccaataataaaaggggcccatttcccggctttgagggcattttttggaagggagggataaaaggctacccacttttttgacccaaaaatttttggccttcgtttttctaatcccttaaaaaaacccccctcccaccattaaattaccccgaaaatttaaccggggttaaaaaaaaaaaaccaaattttaaaaggaaagggcccacccagcaaaaaaacagggctaacttcaaaaattacaactctttttcc

SEQ ID NO: 20073 - DNA, 449 bp, Glycine max
  unsure (1)..(449): unsure at all n locations
  Clone ID: PAT_MRT3847_11812C.1
cttggcgttggggggcggccgcccttgtttttctggtggttttttttttttttttggggcgcgtttttgttttgttttggcgtgggcggtgggggcgggttttgggggtgcgggcttgcggggcgtcgcttcgtttttgttctccgggggcggtttttgttgattgtcgcgggcgttgcgtgggggggggggtggggcggtgtttttcgccgctnnctntgtngnccncccgcgccgttgggtgggtgttcncgggcccgcccccctggtntgggggggccgctttggttttttttcggtgggcgccgggccgcgtagtagggtcgtctcctctggccgttttcttttgttgggggcgggtcctctcgctctgntgttggggggcctggccctggccgggggggcctgtggggtttgcggggggggggtcgggccgggttccggggggg

SEQ ID NO: 20074 - DNA, 426 bp, Glycine max
  Clone ID: PAT_MRT3847_118130C.1
ctcactataagggagaaggctggtagcgcgctgcacggtaccccggtactcggaagttctccgagcccagagcccacctcgtgactgaaacatgggcttgcttacgctccttagagcatgcttcttgaggatttaatgttattgacttgagcggttggatagtatcacaagccgccagtgtacaggctgctcgctgagtaaccggcgattgattggccccgagctgagaagcacaccggctacaagactccatttgatatgcgacaagcagatcagtttctgattgggaggacaccaaggggcatgcaacacgttgtgaaaccggcactgtccaggtgtggcataggattaactgctccgacccagataactgctttagcacatcaagtgttggagggcccggaggataaaatcttggtggactag

SEQ ID NO: 20075 - DNA, 364 bp, Glycine max
  Clone ID: PAT_MRT3847_118131C.1
accagcagttctcattttcaggccccagtttgttatgaatgacgaatcctcatcccatcaagagtgtgccaggtgtgatacctaagaaaccagttcccctgctacttcatgaagttgatatatttttttcattttcacaaatcatgaatctggctgatatctcatgtgataaattagtggtgagaatctgggcttttaggactaagttgattttgacttatacggagcaaatttgtttccttgcatctttttttcttaagataaatattcatttttaactctattggaaaaatattaacttacaaagtaattaacctacattattacaagttatatataaaactgtctctctatatattgctgt

SEQ ID NO: 20076 - DNA, 291 bp, Glycine max
  Clone ID: PAT_MRT3847_118132C.1
tgggggggtttttttttttttttttttttaaaacaaaaagggggccgtaccttagatattacctaaccagaaaaagttgattcagcactagaatccataatcgaaccatggtaaaaaaaacgatcaaaattattagacttccaaagcctccaacaaaagtttttatttgatacacagcgtaaaacacgaaccggaccaagaacaaaaaggcacaagaccgccacctttgtcttttaacggcaagacttgtggaacatggcacgtgcgccacgccaaacaactttttgggct

SEQ ID NO: 20077 - DNA, 479 bp, Glycine max
  Clone ID: PAT_MRT3847_118133C.1
aattcggctcgagctttccatgcggtaccgtgttttctttgcatcaacggctactatttttgaacttgtcataattagtctctatttctaattagtatcgaatacacacacacaccttaaacgtaagtggtcactatttgttccacactattatgccttcactctcagaagcctaccgatcccaccccgtgcacgttcaacacaagcaccctgacttaaactccctacaagaactccccgagtcttacacttggacacaccatggccatgatgatcacactaattcccctgcttccaacgagagtgtccccgttattgatctcaatgacccaaatgcttcaaagttgatacaccatgcatgcacaacttggggagcgtaccaagtgctgaaccatggcatacccatgagcctcctccaagacattcaatgggttggggagaccctattctctctcccttctcaccaaaaacacaaagca

SEQ ID NO: 20078 - DNA, 873 bp, Glycine max
  Clone ID: PAT_MRT3847_118134C.1
ccacgcgtccggtggttatgcacaccacatggtggtgctgcctttgtggctcctggaagactagtgtatcctgcagctgctgatggccgtgcccgccaccaccatcctctaccacggttcggtggcttcaacggcggtgatggtagtggtggtggtcgtgaacgagtcttcgatttggatttgcatcttagcctatgagttctctgagtccgatttttcatttaatttagcatcatatgtgtagcagccgcctttgtattttcttttcttttctttttatcaccccatgttattggtgtgcctctgttaaagattcaacctgactagtcactttagtggatctcttctcagttatatattttttcatccacttgcaatccaatttcacttccacttgttaatagcaacctttgcattctaaattatatgcaaatgtaaattttatctgataactagttagagttgttgagaaataatttgtatgcatttctcatgccgatctttgagattttttttctgataaacttttaaatttaatttgtttcaaacgaatatcacgggtcattggcatctaggacattatattattatttataaatttgacttccagcttgccaaatgcatacggaattttatatatctatatctatctatatatatatatatatatatatatatatataattaagcaagagaattatcataaatattgattcaatcctcaacattaacaaatcccctaacaatatataatgcgacctgcatgtattaatcccaacattgtatgaaagcagtataccattcctaaccagattacgattacatctttcccctgttagaactagaatatgaacaaaatatagtcattttcag

SEQ ID NO: 20079 - DNA, 236 bp, Glycine max
  Clone ID: PAT_MRT3847_118135C.1
aacaaacgttggagtacagagtcacatgttaaaaaaaaaggagtaactttggcgatagatgcaaagagctacgcattcatagggggtgctttattggactggaaccggaccaactgccttcttccaaggtcttggcggttgctcaaatgaatctaatgcaattaattatcaaactaccatgtgaattataatccgtgtgtgaaaattcctggaagtcaacctctttaagcgattta

SEQ ID NO: 20080 - DNA, 351 bp, Glycine max
  Clone ID: PAT_MRT3847_118136C.1
cggcaaaaattaatttcaatgaaatgtcatttttgtcgggactaataaattactcccacggttatatggacttaaagggccgggtaaactcaaacgtacatatgtattgcatagtttttttacacctaaataaaaattgggttcaagctaacagctgctattaaaaataccgatcattatcaccaagaaggaggcaagcctaaacctaaatgacttactatgttgattaacttacaatgatctctgaggcagggggaattaacaaatattctcacaattgcttttacactgccaaaagaatgaattttcttcaccattaaagcttccaacctattttgataactaaaaaca

SEQ ID NO: 20081 - DNA, 319 bp, Glycine max
  Clone ID: PAT_MRT3847_118137C.1
acaatcacaaaagtcatgtaaacattggagaatctctaccaacgagaatctcacaagagttgggatcgagcacgcctctcgagttatctccagctccgaaactccatctggcggattctgtagtagaaaaaatagcaatctttgttggattatctgggaaacactcaaacgggttcgctctgaatccaatggcaaatcaaaccggtgtggactctgcaaacgtgggtgctatgaacagactcgtgagaagaaaacaagttgattatggtcattttatcaaaaacgacggacctcatcagcttgacaagaaactatccgc

SEQ ID NO: 20082 - DNA, 499 bp, Glycine max
  unsure (1)..(499): unsure at all n locations
  Clone ID: PAT_MRT3847_118138C.1
ggagccctatatagncggcggcctctactggttcgtntgtgttatgggccccgccgagcagaagggnaaacgcgccaacgatctatccggcggataaatntnagnnttgatagtncaagacaactacaancagggcgtggggcttattacgacaacccaaggagatcgagaccgncgacaaagatagggagtgngangacaccttatacaaaatagaaacngacatatanaagtggggttggggacaggccttacactaatncnnntacatcccaggnaagggccaccgcgaggacacgcgcctgcacgaggagatggaaaaaaaaaataataaaggacaagnccgggaacaaaaacaaggacgggggatgaganaaagaaaggcccatgcgggccaatcggggaaaaatagagaaagaacgcgggagagnataacaataaacaagnaccaggggaaganaaccagggaaggacaaaaagaaggctagggaagaaatat

SEQ ID NO: 20083 - DNA, 152 bp, Glycine max
  Clone ID: PAT_MRT3847_118139C.1
gatgcctttgaaaaggagatgatcccttggctttgtactagtattgccattgccagtcccctgataatcaggccaagaggaaaaaggagctcaggaaagtcaccataaagagctccgccgagaaaccacattacaagccagatctgcaagag

SEQ ID NO: 20084 - DNA, 374 bp, Glycine max
  unsure (1)..(374): unsure at all n locations
  Clone ID: PAT_MRT3847_11813C.1
agaaannactttcgaaaggaattttaatcctaatttgaatattttaaaatatgtacttggtgatataaccttaagtaaattcatnattattgangaattgaatatatgtaaaccaattttagagttggannttggtcgatatggttatcaataaaatatgtgagtacctaacttcccattntcttaatttattattcgaattaacccgatcaatcttgctttgttattcgaacctatttctttttgatttcaaaatattttcccggaaataaattttgaatcttaatttttatatcgcgatatcaatctctacttactttctgggtccctgaggttctctgctgctttgaaaataaaaaatcttgggactgtat

SEQ ID NO: 20085 - DNA, 406 bp, Glycine max
  Clone ID: PAT_MRT3847_118140C.1
tggctctggaacctttgggctcctttgggcgcttttatgtgcgttagaaggtgctagattaggaccaaccccaatgccaagtccaggatagaagggggctgcgaggataaaagaagaagcactatctacacaacatctcgcactaccctaccctgacaactacttacagtcatcgaagaaaacggtaattactctcgtcgtcactataattttactgactctttgtgtaatctccgcgtaaaagtgggctctactctttgcctccggcccgttagtaacgggcaaggcgggaagagcgagccgtcttacggaggaaaaattccacctcgcgaaagaaagtagtctcagtacgccggggacgggggtactctcgacggtagccgttagtgtcgtagttacgctaggt

SEQ ID NO: 20086 - DNA, 972 bp, Glycine max
  Clone ID: PAT_MRT3847_118141C.1
gttgatcctacgctaaacggaaccctctagaacccaaagtttttctctttcaattcttcctcagtcaattcaactccctttcaatttcaaccctatctctgctctcttcttcttcttcttcttcattttttgggtctctctgtttacaagcttttcagttatggcatcgaaacgcatcgtcaaggagctcaaggatttgcagaaggaccctcctacttcctgcagcgcaggtcccgtggcggaggacatgtttcactggcaggcaacaatcatgggacctcctgatagcccatataccggtggtgtattcctagtttcaattcattttcctcctgattatccattcaaaccaccaaaggttgcatttaggactaaggtattccacccaaacatcaacagtaatggaagtatatgccttgacattctaaaagaacaatggagcccagcactaaccatttctaaggtccttttgtccatttgctcactgttgacggatcccaaccctgatgacccgcttgtgcctgaaattgcccacatgtacaagactgacagggctaagtatgaagccactgctcgtagctggacacagaagtatgccatgggatgatcatgctcctcctttagctgcacaatcatgatttttatgaagaaacaaaatttacttttaatgaatgttttatctttttttgtcagtgtaaatcaaccatggtaagggaattgattgtcactttgtgaatatttctttgcaagacatcggtcatggtctcatggaagaaattgtattataatgtcacaatttttctgcttgttgactagctattctaaatgatggtaatcaaattatagttaggaacaaaagctactgcctattgtcggggaacttggatctttttgggcttgggacaaaaaaaaatctcgattgggattaaaaaatattaaattaccataataatattagacttttttgtgtgt

SEQ ID NO: 20087 - DNA, 862 bp, Glycine max
  Clone ID: PAT_MRT3847_118142C.1
ccacgacaataggcagctactacctgttcctaactataatttcattaccatcatttggaatagcaagtcaacaagccagaaaaatttgtgacattttacaacaatttcttccatgaccgatgtcttgcaaagaaatattcacaagtaatcatcaattcccttaccatggttgatttccactgacaaaaaaaagacaaaaccattcattaaaagtatatcttgtttcttcataaatcatgattgcgcagctacagtgagcagctaaaggaggagcatgattatcccatggcatacttctgtgtccagctacgagcagtggcttcatacttagccttgtcagccttgtacatgtgggcaatttcaggcacaagcgggtcatcagggttgggatccgtcaacaatgagcaaatggacaaaaggaccttagaaatggttagtgctgggctccattgttcttttagaatgtcaaggcatatacttccattactattgatgtttgggtggaataccttagtcctaaatgcaacctttggtggtttgaatggatagtcaggaggaaaatgaattgaaactaggaatacgccacctgtatatgggctatcaggaggtcccatgattgttgcctgccagtgaaacatatcctccgccacgggacctgcgctgcaggatgtaggagggtccttctgcaaatccttgagctccttcacgatgcgtttcgatgccataactcaaaaacttggaaacagagagacccaaaaacaaatgatgaagaaaaagagagcagagatagggttgaaattgaaaggggggttgacttgattgacgaagaactgagagaaaaacttgggttctagaagattcc

SEQ ID NO: 20088 - DNA, 368 bp, Glycine max
  Clone ID: PAT_MRT3847_118143C.1
ctgggaaccacaataggaacccttagcccaaatgagcgtattacaatttgtaaagattttaccggtttgggggtgccacttaaaatttctaagggctgtaaaatcataaacagctgtttcttctaaaaaaaaacacctagaagttttgctttaaacctttgggcccaaaggaacatcacatattggaaaattttggcccacaaataatcagtgtttaagaaaatttatccgatgacgatttttttttccacaaagaacggccatcaactcccataaaaaaatgacctttttaagcttgaccatttatttgtttatcttccccgtcattaattggtatagttgcctttcccccctcagccccctttgat

SEQ ID NO: 20089 - DNA, 269 bp, Glycine max
  unsure (1)..(269): unsure at all n locations
  Clone ID: PAT_MRT3847_118144C.1
gggaaacattccatcaccccatgtatccaaccttgatttgaataatgtatctcataagcttagccctctttaaatcaagggtgcatacacacctttattttctttatgcatttcatttgcttgagttaaatcctccaacatggtatattctgagatgtgtcatcagcaaaattgntggatattccgcatcaatgttatggtgacaaaaaaagttatattctgagatgttaactggatgtaggattatgtagagcaagtcaagttgttgt

SEQ ID NO: 20090 - DNA, 299 bp, Glycine max
  unsure (1)..(299): unsure at all n locations
  Clone ID: PAT_MRT3847_118145C.1
acgcgggagccgggggggagcaggaacaaggaagggaaaaccacncnncaaagcgaggaaangggagaagaagagaaaggaaagaggcagagganggggnaggggcaagaagnggagannccagagagaaggannggnngaacgacacacaagagaggcaaagagggagaagaaaagaaggaccgggcagaacagggagaggcnggagaggacgagagccaaacccgagcnggcgaaggaagagaggcagaaaaagcgcgacagaagcaaaacccaaccancagaaagcgaagaagaag

SEQ ID NO: 20091 - DNA, 152 bp, Glycine max
  Clone ID: PAT_MRT3847_118146C.1
accaggtttggtgttctcttttaattcaattatgcagaattatctataactggatttttttcccaatgtttaattgaatactttactaattgatattgatattgtcatacattacacataggttgattgaatagtaagatacataatcgtga

SEQ ID NO: 20092 - DNA, 290 bp, Glycine max
  Clone ID: PAT_MRT3847_118147C.1
cccacgcgtccggcgttcaaataggggcactagcttcactttatgttgcttcagctgtgtgtgaacaagtcatgtaagagacttgactatgttgttttctctttcgaggctttaataaaatatgcgcccttgttccattcaaaaaaataacataatgatcccttctcaaatgtacttatttgtattaccctttctttatcatggaggaaacaaaaaacccaaaaatttaatggggcgggggttttagaggatccaacttaacatacgcgtgcttggaaaaaaatagtttt

SEQ ID NO: 20093 - DNA, 229 bp, Glycine max
  Clone ID: PAT_MRT3847_118148C.1
attcgtccatcgatatcggcttcttcaggtgctatgataatggctcgctcgtttctacgcgggtcgctgcttcctctcacgatcgtgtccctagtacgtctatctgtgattgccattgtattggagattcccacgacgttgggtctgttcattatgattgatcttgcaacgacctatttcaggggtacatttctacagctatctgccatatggatatcatatccagtga

SEQ ID NO: 20094 - DNA, 703 bp, Glycine max
  Clone ID: PAT_MRT3847_118149C.1
gaagccaaagccgtgggcctttggcggctttacctggcctgcaacggtaagttactgtatccaacgaaactcccaacttgtttcccctgtcttctagatccttccctcggtccaccccgaaaccactttcacgtttcccttttatttttttgttttcccacttcgctggaatttcccatatatagtcacattgattctggaaccttctaaactctccatacccatcctcaactaccattattattgccacccccactcgcgagtgtattggattgagatcttaaaagaatattttggcagaaaaaacttccgcgtggatctttgctcatttgaaattcgatggcgaagttcggcgagggcgacaagcggtggatcgtggcggacgtcccgacggcactaacgtgcacaactggcactgggcggagaccaactgcctcgagtggtccagaaccttcttcaagaacaatttcagtaacgtcgccgtcggtgacggcgatgccactgtcacgatcaagaaggtggagaagctcgatggcgaggcctacgtgaacgtccgcaaggggaaggtgatccccgggtacgagatcagcgtgaggctcgcgtgggagggcgaggcgcgggacgccaacgggaaggttctgcagagagtcgacggcgccgtcgagatcccctacatctccgacgagaacggccgagaggatcc

SEQ ID NO: 20095 - DNA, 420 bp, Glycine max
  Clone ID: PAT_MRT3847_11814C.1
aagaaatggagagaaaggagtgaaaaaattatatgtgcaaaaatggcaagaaatagccaagaaatgcataacaattctacctataatcaattttgcatgatgccttaagcaattttgaacaactctgtgttaccagctaacactcacctgcatctagagttgacaaaatggacatgttagtcaggtccatcaggtcggcatttgtttccagcattctcactgttgaatctatcacctcccattgtaattttgaaatataatgagaggtataggttacaaaaagagaggtgtaggattcaaatatctgtcaggtgaaacattaaaaatggactgagtcaagtcatattctagatgggtttcatttgttgaagcctagtcaagcctagtggctcatcaaattcatacaaattctacaaattc

SEQ ID NO: 20096 - DNA, 501 bp, Glycine max
  Clone ID: PAT_MRT3847_118150C.1
attgagtacattattttcatgctttttatgaaaaataccatatgcaatagaaccacgtttatgagcgagtatggctgccgcaaaacctaagcaaccgaaagactcaaaatgacacattactaactatgatttacttttcacaggcgagagaagcactggactagagcttgttcgactaacgacacgtacatgttcaaaccagaatcatttgccgaacgaacctttaatatctttgtttgtccatagaaacgtcacggagcatatatgcatgcatgcatgcatgttcatcattttaagggaaatgaataacactggtgacaacaccaacgtgagatacaacttcctccatcaataccgtcaccgacttctgttaccgggaccgccaaatgctgcgattccaccgggaggaccgacgatgccaacaccatttgcaccctctagcccccaccaagtacaggatcttcgccaaaaccatgacctattagggcaccagctcctcca

SEQ ID NO: 20097 - DNA, 277 bp, Glycine max
  Clone ID: PAT_MRT3847_118151C.1
attatgtatcatgaaggaggggaatttatctgcgtggaaaatatcatcattataactgtcataaattaccagacttcactcactcaaagagatttagacattattagtatctctaacaaacatacataacccagggtttcaccccgtgaagatgctgtaaagcccaactataacctacttgaacagaacttattgaaagatactcctaaacatgcaccctatcatgcaaaagggtcctcaagagaaaactattctagggaaagaaatactcctactg

SEQ ID NO: 20098 - DNA, 387 bp, Glycine max
  Clone ID: PAT_MRT3847_118152C.1
caagctccttcttagcaccggttaacataataccattagtgacaccgtcttcaacccctaagcgtttgcgagatcctccactctcaggacaagtaactttgccaccggagacaactctacttttgcgattgaggaaccatcccaaaaggcttgcctccatctgacaaaaatgcaacacaccagctttgcagcatctgtaggattgcaacgtaagaacatacattgcttgtgaagccacctcaacagaagtcttgtgaaacaagcctaaatgccttcacactgaagtgccttatggcctaccttcttatcattctatgacgcgctaatgggcttctgcaggcgaaagtgcaaaggaactggacatttctgaacaacaatcttggacag

SEQ ID NO: 20099 - DNA, 613 bp, Glycine max
  unsure (1)..(613): unsure at all n locations
  Clone ID: PAT_MRT3847_118153C.1
gcgcggggcggctcgagctgttcctccttgttttgagtatctgcagtctgcgatgttcttaaaatttatgtttaggtcattttttcttgtacataatccaataaatgtgcatagggatgaggataccgagtcagatgatgatttgctggaaaaccagaatgaacagcagatttcaagtgatacctttaagaggaaaccttctgatattgtaactgttacatctgatgtggttgaaatcaatgatgttttatccttgcattcttctgtcaaggttaccaccagggcagctggtcggaatggacaatataggaacatgttgaactctagaggcattcagaagaggagaagttctcttaggaaaaggaaagcccgtagtccttcaatggtgagtatacgcagaaatggggcagtagcttctgatttaacaggtggtaggaaaaacaatagccaattgcctgttgtgacctctagcaggaaacttaggagtatggccaatggtagcaccaaagggaacctgaaagaagctcgttctgccatagtggattcgaaagatagactangctcatcttcctgttttgcaaacttattggtatcagagatagaccaatgttgc

SEQ ID NO: 20100 - DNA, 188 bp, Glycine max
  unsure (1)..(188): unsure at all n locations
  Clone ID: PAT_MRT3847_118154C.1
aaagatnacnggtaccatagtgtnaagngtaatanatgacaccncattgantaattcanaanggcgatcacacaaggttnaatgnnatgaaccaacagcngnncccagaccagatagggtctcaccatnggaaagagaacccaannaggctacagcaacnacacccacaacananagcaacaatggna

SEQ ID NO: 20101 - DNA, 303 bp, Glycine max
  unsure (1)..(303): unsure at all n locations
  Clone ID: PAT_MRT3847_118155C.1
aatttctctttcgggagaacttgtgacatgcgtgattgcgctcaaccaanggggggggagcataattcgaaatctgcggcgaaggctctacaaggtccggaggggattcatcctcaggtccttatgtagggtctaataccccctcttcaatatatcttngggtgccggcagatgggtcttctctnggcaatggggcatctngtcctccctatgaggtgccattttctgggggggcancgtatcactacaattatngggatgcggctttctggtgggaggccttataaaccattgggtttatct

SEQ ID NO: 20102 - DNA, 247 bp, Glycine max
  Clone ID: PAT_MRT3847_118156C.1
gtgaatatgaattttgtgaagaatcttcctcaattcctccaagttatttgatgctataaagtaaaattattttttgtctgttatgacttttctaattcagtgtaagatggtgtaagaattaagactgatcaatagtggttatttgtgcgaacttatagaaaaagattgatcaagatccttatttttgggctaaatttttcactgtatttattagggagaaaggtacaatgttttcagcttttatgac

SEQ ID NO: 20103 - DNA, 487 bp, Glycine max
  Clone ID: PAT_MRT3847_118157C.1
gcctgcatgtcgactccatattctggatgagtccaaacctcctagggggagtctttccatgtccgctttttcacctttactcactgcccggcgccaacctgggggcaaggggctcttcatcagattctacttctcacaaggtcaatcaggttacctggagcacgttctggtgccctcggctccagagtctcctctgcggcttgatcatcttcctcagttcatccctcttcactgggggaagggagcgctccaacatttggagcggatagatgtttgcaacattctttcttgacatcaagcacataaacattctggctggacgatgttgggacatcttcatcatactttatgaacagaggcggttttcaagattctactcacaatgctgcatatttgcattgtacatctacgtgtctacttccctagtactcgttacacggctaggattttcagcaatcttcactacctgtggggttcaagggaacca

SEQ ID NO: 20104 - DNA, 486 bp, Glycine max
  Clone ID: PAT_MRT3847_118158C.1
atgttcatgtagtaacatgcaaatgaacttggtactgaaacatgcaggaacagacccaacatatgaacttgaaattccggcgtgaacatcatgtttctggagtttttactaaacatgctaagaaaacatactatacaaaggaaaacggtttttaaagaattgttaatgacacttattccctgtggctagatttccatgcgctgcaagacaagaaaagcaattccttttactccaattttatagtccacctgtgcaaagacatgtggccctccatctttgatccgcagatcatccggatgcatgactgcctaatgaggccctattgcaggagcctcgttagtcttgattatcacaaagaggagcatattgtgtgattccaggacgatctttcctaggaatcgtataaccgccacacacttttattttgtctgtaattatataagccaattccctgcttaatttggaagacaggttatttaccccata

SEQ ID NO: 20105 - DNA, 538 bp, Glycine max
  Clone ID: PAT_MRT3847_118159C.1
ttttctttttttaccccattcaaggataatttttggtcatttcattggccttggactttaaattaaaaccagtaattatttattttacaagttccggacatttattaaaccaggtgggaaaatggctggttgggttcttgggtaatggaaccaaattggaccattagaatattcaactttcacattattaaaataagctttccacccaaaagaatggctgggaattttacccccattactttcaaggttttttggaagccttaataaacaccacaatctttgggctttgggctttgggctttttccaaaaggttatttttggattaaaccaggtatggtaatccagaaaataaaaagtttgaaaccgggaattggaaaaggtatgaaccaaaatgggttgaattaacgggcaccagcttaccaaaaatggattttggcccaggaggattaaattctggtcggggaccccttgggaaccactattaatttcaccccaatccaaggggctgggaaccaaaagaaacctaatggttttttc

SEQ ID NO: 20106 - DNA, 501 bp, Glycine max
  unsure (1)..(501): unsure at all n locations
  Clone ID: PAT_MRT3847_11815C.1
gcacgaggcgttgattagcagcagcagctttagctttgagcatagcctcatcattagcaggtacttttacatgcccacttatattggctgcatgatgtaaagctttttccttgttgcatgtgccatctaccccttcataagggtagtctttggaagtggttaaaccaccattctttttatatgaatgcaaatgctgtgtccattaagccaccttcacagccttggtttccatcttcaacatcacagtctctgaattcttgttcagagagagaaaccagcttccctgattttattttgttgattccttccacagaagccactgcagaaaatgcccaacaacttcctgcatgaagacataacttgaaacaagttattgtaatttgtaaggatgttccttaagttgtgtgaaatttcaggagaaaaccatgtnnnattctagttaaagaaaatgagttaatcagaaatgacacttttttaactttcattgcctttttaaagggt

SEQ ID NO: 20107 - DNA, 2438 bp, Glycine max
  Clone ID: PAT_MRT3847_118160C.1
aacgtgtaccctggtccccaaccctccaaagctcaacagcatcgccaccagcaaacagggaacgttgccgatctggtttgtgatcccagtggcttgggacgaagaagaagaaccagtgggtcgttgccttccaacacagccatggcttcgtgaaagacgcaccacccactgtcgcacgcatttacagcaactagtttctctcgttcttctccaagacgccccatttctgcaattggtaagctatattgcatgaccaaactttagggccacggtttcgaattataaatcccctcctttgaaatgatttttactaatcaatgttaaatgtgaacagaactatattattccaaactcattccactgcaatggcaatgaatttgttagagtatcgacagtttaaaattcagtaaattgatggttttgagtgaaaatggggatttgagagttttaaggtagagcaaaaccatgctaaacttcagtacataggctggctagctagctcaagggataaaatgagccgaatccggaggcttgtctatgttcatctcattccacctgtgactgagaggggattttctagcctgagtgtggtcactgcaccttttgattttactgaaattcaaattagtcgccttcccactgtcgtcattctagggcgacctaatgtagggaaatctgcattgttcaaccgtcttattcggaggagggaggctctggtatataacacccccgatgaccatgttacccgtgacatacgagaaggacttgccaagttggccgacttacgattcagggtcttggactctgctggcttggaagctgaagccacttccgcttctatcctccacagaacagcttctatcactgcacacgtcttagcaaagtcacactttgcgctcttcctcactgatgcaagagctggacttcatccacttgatctccaggttggaaaatggttacggaaacatgcacctcaaatcaagcctattgttgccatgaataaatccgaatcactctttgatgccactggctctctggcttcagctgcaaacgaaatgtgccgcttgggatttggggatcctattgccatatctgctgagactggactcggtatgcatgacttatatatgtctcttaagcctctcctcgaggactatatgcttcgtgtcttcactgaagaaggtgctcgcgaaaatagccacaacgaggtcgaggacagcagcgaccttgatgttgacaaaagtaagctgccattgcagttagccattgtaggacgccctaatgttggtaaatcaactttattgaatgcattgttgcaagaagaccgtgttcttgtgggtcctgaagctggtctgacaagagattcaatcagaacccagtttgaatttcaaggaagaacaatttatctggttgatactgctggttggttgcagaggacgaagcaggagaaaggagcagcatccttgagcattatgcaatcaaggaagagtctactccgggctcatataattgctttagtactagatgcagaagagattataaatgcaagacgaagtatgaaacatgctgaagtagttatagccagacgggcagtggaagaaggacgtgggctggttgtgattgtgaacaagatggaccttccaagaggcaaacaccaatcgtcatcctatgagaaggttatggaaattgttccacaagaaattcagacaattatacctcaggtaaaagggatcccagttgtattcatttcagcattggagggaaggggccggaccactgtcttgaatcaggtcatcgatacttatgaaaaatggtgttcaagattacctacagctcgtctaaaccgttggttgcaaaaggttatgagcaggcattcttggaaagaccaagcagcacagcctaaggttaagtatttcactcaggtcaaggcccggccacctacatttgttgcgtttgtgcgtgggaagactcagctttctgatacagacattaggttcttaaccaagtccttgaaggaggacttcgatttgggtggaattcctatacggatcatgcaacgttctgtcactaagaaagatgccagtggaagtggaaatagcaagaatagccattcggtatgcagagtggttgaaaggactgtctctgacaagagaagtatcgtagatgaataacaaatttgacttctcattaaaggacatgagtatcactccgcagaatttgctaaaacgagtttagagttatttaattacagtataattttattctcagttcaaaagcttgattctgaattattgaactatgtgcagcgaggaggagcacaatttcaaaggtgctgagttttatgcaacaataatatagtgttatgaatcgttgatgattttttttgagtaattgtagatgtttttgagtagtgcaatatatattgaatgaattgttgc

SEQ ID NO: 20108 - DNA, 402 bp, Glycine max
  Clone ID: PAT_MRT3847_118161C.1
gtgctacatagtcagcggtacccgttaatgcagcaagtttagtgaggcttgcgttcaactctatagatctgctatatctccacacacgctgaattcagtagtccggcaccatgcagaaactcgactgggatggcaaagccgatgccgaggtcaataaaatggcaactcatgcaaacttacgcgagagtaggggttgtgaacgataaaggaaccgtaccgatcggaataccaaacaaatgcacaacatgaatggggaatgggacgcacactggcgcggaggattccacaacgcccagcagagaaggtgactgtcagagaaaccaaatacgttgcctgtgccatacagcccggagcgtacgtttaactccattcctttatggacaagccacacgagttaacaag

SEQ ID NO: 20109 - DNA, 630 bp, Glycine max
  unsure (1)..(630): unsure at all n locations
  Clone ID: PAT_MRT3847_118162C.1
aatacaaaaatcacgaaacttttacacaaaattatccaaataaaccatagcaagatacatgaaaggatcatacaaaagtcttggggtactaaaacctgtggtaaacaacatctaaccagagaataggttacagacaaacatagatatacatatagtcatataaagacaaacatagatatacatacagtcatataaagacacatgagagtttaaaagcgaatcacataaccatttcatcattattttcagcatcgcccatctcttcgtagtcactatcaatatcagcttcaagaagccactgctcaaattcatccacgtcatcataatcatgtgtgtataacccatctgaagtgccatagggatcagccccaagctcctcaccatggcatgccacatgtaagaatggtctgcttctggctaaagcatctaccatgtctctattaacacttccggtcactcccaaccatttgagccttggaaaatatggtttcttcaaccagcgaanagcanagcgggtaatgccaccacagttaaaaagatccaataatcgcaaactgcttccatgtttggcctcatcaaccagcattgaagctaatgccataactgaagtatcaccaattagagggcact

SEQ ID NO: 20110 - DNA, 436 bp, Glycine max
  unsure (1)..(436): unsure at all n locations
  Clone ID: PAT_MRT3847_118163C.1
tgacactatanaagagctatgacatggactgctaccttacctcatccctcagttcgagtccaatcccacatcatcctcatacattgtcgctacaacttgggcttgtggacaatgttacattggcgacgaattaaggctcatctgtaccctacgaaatgagatcaggattcctagcagagagagaatcacacagtgtcacgcaatgaggaggcactgcacgaccatagcataatgcgggttgtatcatgcattaataagacctatacagaatcctaaataccttgtatcgcaattctgtcaggctatccagctccgcacttctgctatattatgcagcacacttagacatatgtgggcgtggctttcatgttatctcttcagaactgtcctgaacccaagctgatggagacccgacttccttgatatgcccaactcg

SEQ ID NO: 20111 - DNA, 378 bp, Glycine max
  Clone ID: PAT_MRT3847_118164C.1
tttgatcgagacattgaatcccgactaggtcagagcacggcagcaaagaaatacgtggatcataggggggcgaaaccaaaccttgaaccaaaaacatgtaatgaaaacaacgtaaacgctaaaaaaccctaaactgaatgctttgcttacaagtccatttggaaagtttgaacccatcaaaaagaaggcctcctcactctccggaagaatcaataaaacaaagcaaagtctccctaaatcaaatctgccgcaccggtaaatagaacatggagttgcctctccggcgctcaaggatgatggaccctcccactaatgcatgttcccaccttaaaaaaaacttccatgcatctggtgctattcaaggccttgcggcatcca

SEQ ID NO: 20112 - DNA, 472 bp, Glycine max
  Clone ID: PAT_MRT3847_118165C.1
atcgcaccttccattaatttttgcttggtagttactggtcttgtcttacaaccatattagaacatatctccaatctaattttgcgggttgtgatcatggaaaaaaaaggtggcctattaacattgggccttacacaggtattaaccctgactttgccacccttttttgcagccaccatccttgagaggattaacttatcttaacgctccgaagtataaaggggctactataaaataatggctcaaaaaccttccgcctttttagacatactttttatgggccttctaaaaatgtcctctgagttttttttttactgcatgaggattggttcgagctacctggcattctcctttgtgttaagccttgaaactagttcttctgctatttgccgatcacgcttactttttgcctccttccactttgtattcatcttactaccccttttaagatatttgctaacaaaaatatgtgg

SEQ ID NO: 20113 - DNA, 293 bp, Glycine max
  Clone ID: PAT_MRT3847_118166C.1
aggaaattagtcgtagaccgccctttctttttttaatttttaacatttgaggaagccacctttaacaccatggggaggggggttaattattaacacaaaccctctttaccccattaataactcacactatctcgccacgtatatactaacttaccattaacaatggtcacaactaccacaacccccacgttgcctcaaccgataaagaaaggtcaaccaaacccataatttatgcaaaaaaaacgctcaatatactccaaataagttccatctgatccatgggcctcagaggc

SEQ ID NO: 20114 - DNA, 346 bp, Glycine max
  Clone ID: PAT_MRT3847_118167C.1
ccataccatgcccctttctttttcccacctgacgctgagcggcggtttcactctttctgatccgctaacgcaccactcccaatcgaccattactaactgcttcctacagcttacaaagctgctcagagaggttttgtgttttctgaatggcatccccaccggctactgctaccctgaagctgctgcttctgtacaacttcgccctccctttctcgtaatggggggtgagacaggagaacaacaccaccatcaccgtcgctgactaccatcgtgaggcacgcccctccgatcacgcagttggatgagctttgcaagcctttcttttctgaatctaacgctttaacgt

SEQ ID NO: 20115 - DNA, 376 bp, Glycine max
  Clone ID: PAT_MRT3847_118168C.1
ggagggcctcaaggacagttgggttctttacgaaaacagggtcttggtgttagggccattgttcaacaaaaccaagagtttagcattcaaaatgaagatttcccagctttaccaggattcaaaggtggtaatgcagattatgctatggatatgcaccagaaagaacaacttcatgacaatactgtgccaatgatgcaatctcagcatttctctatgggaaggtcagctggtttcagcttagggggtacatattcatcacatcgagcacaacagcaacagcatgctccttcagtcagtagtggcaatgtctctttttcatctgttaacaaccaggatattctccatctacatggatcagatattttcccatcttcac

SEQ ID NO: 20116 - DNA, 200 bp, Glycine max
  Clone ID: PAT_MRT3847_118169C.1
ccacgcgtaagaacggttaattaagaatacagacgcggccctcactctttcgcatcgatctgtcactacaactctcatctctaaaacacacaattaactttctgccttcttacacctctctttatatcatctattccaatatcctccagcacattattttcaacctcactgctactaaataccccattattctgcattta

SEQ ID NO: 20117 - DNA, 904 bp, Glycine max
  unsure (1)..(904): unsure at all n locations
  Clone ID: PAT_MRT3847_11816C.1
gggggccttttccttttttggtttttccttcaattcaatgggggggaggagaggagaggagggggaaccccagatcctttccttcctttccacaaaaaaaaggtttttcatcgctcttcttgccgattccgccatttctcacttcgacttcgagattgttgcagcaggtgcattgtttttgcctctcaatggtatgttccccaggaagtgggagaatggaagtcatggcaaggcttctcgctgctgggactttctctcacactgtagcagatgactttgcccgtgagaagttggctgctgagtatatttgtagagaactacgtgaggcagatgaagcaaatttgcttcacgaagaagatatgcatgtctatggtgagagccccatgactgatgctttgcagctggtatgctgcaacacttgcaagaaaccaatcaaggacagtcaatttgctgctcatgcagaactttgtaggtcattaaagctcacagaacagactatggtggagcttgacactgggaatcgaaaacctccaaggaaggaaaagaaaaagttaggagcttcttctgcaaaccaagcttctgcagttggggagcagagaaggtccgagtctatagacaatattgactctgctttgtcacaatcccacttgaatagtcaaatcagagtggttcccttttccaatgaggtaacaggatactcaagttgtgtaggtgcagcattgatcatgggatggtactggcattgatgctggaaatagagatcactcagcctctgtaatgtatcctccaacanaacgtcataaattgatagcaaacatacatctacctgtattagaaagccatggaacagaatctggagagaccaaaactgtgagtttcacagatggaattacttgtaatttcc

SEQ ID NO: 20118 - DNA, 548 bp, Glycine max
  Clone ID: PAT_MRT3847_118170C.1
aaataactcaaacaggagcagccatggataccgcaaatgcagctcctttgcacatagcaatatttccatggtttgctatgggccatctaaccccatctcttcacctctccaacaagcttgcacagagaggccacagaatctccttcataggccccaaaaaaacacaaaccaaactacaacacctcaatcttcaccctcatctaatcacctttgttcccatcaaagttcctcatgtcaatggtcttcctcacgatgctgaaactacttcagatgtgcccttctctttattcccacttattgccgaggctatggatcgcactgagaaggacatcgaaattctcctaagggaactgaagccacaaattgttttcttcgatttccaacattggctaccaaacttgactagaagactaggcatcaagagtgttatgtatgtcattattaatccgttatcaacagcgtacttcgcaaacggaccaaggaaaagcaaaggaagagagttaactgaacttgatctaatggtgccccctcaggggttccctgaatca

SEQ ID NO: 20119 - DNA, 1737 bp, Glycine max
  unsure (1)..(1737): unsure at all n locations
  Clone ID: PAT_MRT3847_118171C.1
tcggttcttgaatcttttacactgtgcactctgatgcagctcttcaccaacatcccctttggcagcacactgtgtctttcactggccattatcatcatcaccctcgtgatcctcactaccttttcttcatctctcttccttcgctggccaaaaataatcactttcttctgtagctgcgaaacatgccaggcctatctacttcaggttggtccaaaaccttcgacaacctttgcgattggtacgctcacctcctccgaaactcgccgacaaaaaccatccacatccacgtcctccgaaacaccatcaccgccaaccccgacaacgtggaatacatgctcaagaccaggttccacaacttccccaagggaaaaacgttctccaccatcctcggcgatttcctcggccgaggaatcttcaacgtcgacggagaatcctggagcttccagaagaagatggcgagtcttgaactcagcaagaactcgataagatccttcgccttcgaggtcgtcaaattcgaaatcaaagaccgactcatccctctccttgttctgtccaaacaaaatgactgtgttttggatttacaagacgttttcaagagattctcgttcgacagcatttgtagattctccttcgggttggaccctatgtgtctggagctgtctctgcctatatcggagtttgctatgtcctttgacttggcgtcgaaactgtccgcggagagagccatgtcggtgtcccctctaatatggaagatcaaacggttcctcaacgtgggctccgagaagaagctgagaaaagctattaaaatgattgacatcttagccagagaagtcataagacaaagaagaaaagtggggttttcatcaatttcacctgataaggacgacttggtatcacggttcatgagaaccatcgctgatgacacatacttaaaagacattatcgcaagtttcttgctagccggtcgtgataccgnggcttcggctctaacaagcttcttttggctcttatcagacacccagtagtggaatcccaaattcttctangagcagagcaagtaattggatcagactatcacaaagaccttacaagctatgaagagcttcaacaactgcactatttacaagctgcggcgaatgaaagcatgagactttatcctccgattcaattcgattccaagttttgcttagaagatgatgtgttgcctgatgggacttttgtgaagagaggaactagggttacttaccatccctacgcgatggggcgtttggaggagatatggggttcggattgctttgagtttaggccagagaggtggttgaaggaaggacttttttgccctcagaatccgttcaagtatccggtttttcaagcggggataagggtgtgtttggggaaagaaatggcactgttggagctcaagagtgtggcgctttcgttgcttcggaggttccacatcgaattggcggcaccaccaccgcatcatcatcatcacagtaccccacgtttctcgccaggcctcactgcaacttttagttgcggtcttcgcgtaaaggtacgtgaacaaggaacccaacaacgacaacacactactcaacctcttcatcattcatagtgattatgaacgaatattcataattatcccacctggctgttgacaagggagaaaataatataaaagaaattatgaatctttgagaaaattaaatgatatacacttcggttcttaattattaa

SEQ ID NO: 20120 - DNA, 330 bp, Glycine max
  Clone ID: PAT_MRT3847_118172C.1
catggccacctctgctattcagcaatcagcattcgcaggtcaaactgctctgaagcagctcaatgagttgggccgcatgatcggtggcgccggtaaaggtcgcaccaccatgcgccgtacacgtaagagtgctcctcacatcatttggtatggccctgatcgtcccaagtacctgggggcatgctcaaaccagattccgccatacctgaccggcgaattccccggtgacttctgatgggacactgttggactataaagtgacccggagaccttcgtcagaaaccgtgagctggaggtgattcacaacagatgggccccgcttggtgcact

SEQ ID NO: 20121 - DNA, 627 bp, Glycine max
  Clone ID: PAT_MRT3847_118173C.1
ccacgcgtccgagcgcgcctacaccgtaactttgtctatctgtctatatctatcactatgatgttgcccaatgatggcagacgacgatcccagccactcagaagaggacgacgcacacgacgtgtgccacgacaaggacaccgagcgcacacatggaattccactcctccacacacggacgtatggttgcttcaaggacatggaagaatgccgatactacagacatacctgcttaaatctaagctcataccaaaataaacagggctcccacccattggacagaaccaggcagcttcactgctacgctcctgaagcatctggttatgtgcaacgatgggctattactagaacgtaactccaagataataacaatgagctctagttctgtatcactctctactatgactatgcaagagcaccctcgccaatcgagaaatcatgtttaagacccgctacggactatgcaggtggttaactgactgacctgcttatatgcatgcggagccctgtctatagagacactactagctgcatgcaaacatcccatgaacctgctcaattcaaggaactataggattataatgaatcaacgtgatgcaggttggcttacggacaaaataaatgtat

SEQ ID NO: 20122 - DNA, 463 bp, Glycine max
  Clone ID: PAT_MRT3847_118174C.1
ggagatcatagataagaccctcatcggcaagagtattaccctagaagccgaaagctccgacaccatcgacaacgtcaaggacaagatttttttttttgagggaatccccccagaccaggagaggctgattttcgtcgggaagcagcacgaggaaggacgaacccttgcggagtacaacatccagaacgagacaaaactacccgaggagaagagacagcggggtgggatgcagattctagggaagactcttaaggcgaagacaataactgccgaggcggagagcaatgacaccattgaaaatgagaaggaaaacacaacggacaaaggagggatagaaaagggaacagaacaaagctgaatagcggctggaaaacagcacgaaggaggggaaggaaccacggccgaaaaacaaaatatagaaaggaataagacttgaaaggtgggcctaagactaccgaggggg

SEQ ID NO: 20123 - DNA, 268 bp, Glycine max
  Clone ID: PAT_MRT3847_118175C.1
gttgatttgaataaagctcctaattgttataatttcgcaaaaataccattcttctaggatgcttagaaagaaaaaatactccttccttctctcttatttcttattgtcctcccccctattattatcaattgccgtccccacccttgcaacgtgataaagaaaaaataactcccctattatcatttctatgaccatcgtttttcatattataatcatgataatcattgtcgttaccattctttatataatataaacacatccccttttc

SEQ ID NO: 20124 - DNA, 169 bp, Glycine max
  unsure (1)..(169): unsure at all n locations
  Clone ID: PAT_MRT3847_118176C.1
gttgaatttggtgcnantgtgangnnttctgaagaaatggcaaatcaccctttgacacactctccctctntccgngcgnggttngatnaccctctcactggtcaccggaatnaacttttngcncttttgtccaggcttgatnccaanggcngggcntcctgcaacncct

SEQ ID NO: 20125 - DNA, 548 bp, Glycine max
  Clone ID: PAT_MRT3847_118177C.1
ggctcgagggcttgtgaagggtaaaaaaacaagagcaatgagttgtttgctcactatattataaacattgtgcgagtctgtcatagactaggatccgaatctagtgggcatctgaaattggtcgctcatatgtgtttatattcttgcaatcttgatataggtgaagatgcacattaatgtttacagatctgctcctctattcaatactcatcatctgattcataacaatatttatcttcccgtccacccctcacactataaatacatgggattcttagtctatcagaatgttatggttttggtggaaacaatatgactggtccgccccaatcctggtttactacccacgacggtgaagtatatgcgacatctgatgacttaggttgttcgaattactacccgacgcaagtctggatcctacagtgtatctttgatgtttcctacaatatgttgatcttcctttggcttggactctcttcgagttctagcgtcaatgtcttaagattcaaagcatgactgggtttgtagaactaatgtgtttttcttat

SEQ ID NO: 20126 - DNA, 731 bp, Glycine max
  unsure (1)..(731): unsure at all n locations
  Clone ID: PAT_MRT3847_118178C.1
aaaagtatccagtgctcctcacacaccctaccatatcatatgaatcggctctctctttgaaaactgttatgcgttcaccggcgtcggaaaggtcgtccggttagggttccggccatcgctaagggcacggatcgtaaaatcttctcgaagcttctatgctattactcatgttgagagggttattctctcgttgcaggagttattaggcaccatttttaccacttgaagtcagtcagcaacaatttttctgtggatttttcaggaatattttcacctgcaaaagttgaagcaaatgtctctgcagaacaaggtattttggatggtgaagggttctggacaaattaatgacagagagacaatatttgataatcctaccaaaattgaaccaaaacgacctcatcaatggtttgttgacactgctgaagtagattttcttccagacaagaaacaagctgtagaagatgcagatgaaaaatctagtcctggattctcaaatggtaatattgctccctgggagaacaatcccaattctcattcggtcccaaaccaatttattggccgattatttgggtctgaaaccaggcctgtcaatttcactgagaagaatacttcatatgttttggctgatgattctaatgtgagatcaaagatgatcaccaatcaatatggagatgatgcatctttggnttngnctatatctcattctattgaagattctgaagcatgtgtaa

SEQ ID NO: 20127 - DNA, 437 bp, Glycine max
  Clone ID: PAT_MRT3847_118179C.1
ccttctataagaacggcctaaactatccttggataccagtcacagcgttataatattataaaaaagaaacgcctgttagccagaggctcacggtggaagcttgcacggactaggcggattacttgtgataccggtatcaactgacgttgcccgaagctctatgattctgataccgttagtctcctgcagtatccgctttaccccgacgtgagcgataccaggactgtctcggtcagcaacgtaagtcatttcgcttgacctacccaaccaaatgcctgattccttacatagtccatacggttccaccagaaggcgttccctagcatctgtgtgacggtctacggacatgctcgtgagcagactgtctaccaccgtcgacggggagcactctccggggtaggacatcctgttctactgagcttcgattacgatggact

SEQ ID NO: 20128 - DNA, 616 bp, Glycine max
  unsure (1)..(616): unsure at all n locations
  Clone ID: PAT_MRT3847_11817C.1
cacgcgtccgctcgcttcttcaaacctctttattctatttttgccttctccctcttctgcttctccctccactccactggagagaagagaagagaagagagagaaacacagattctttccttcccttccacaaaaaaaaggtttttcatcgctctcttgccgattccgccatttctcatttcggattcgagattgttgcaggtgcattgcttttgcctctcgatggtatgttccccgggaagtgggagaatggaagtcatggccaggcttctcgctgctgagactttctctcacactgtagcagatgactttgcccgtgagaagttggctgctgagtatatttgtagagaactacgtgaggcagatgaaacaaatttgcttcaggaagaagtttttttgtctggatacaatcttcattttcttttggggattnttaaaatgctgcttcacatatcttatatcacagatatgcatgtctatggtgagagccccatgactgatgccttgcagctggtatgctgcaacacttgccaagaagccaatcaaggacagtcaatttgctgctcatgcagaactttgtaggtcattacagctcacagaacagactatgtttgag

SEQ ID NO: 20129 - DNA, 2218 bp, Glycine max
  Clone ID: PAT_MRT3847_118180C.1
cttatatatttattttattttctttggtcacttgctgtgtttgcattttccttcgttgtttagatgttgaggttgaattatgtttgtgaacaggctcggtgctcctcacacaccctatcatatcatatgaatgaatctgcactctctttgaaaactgtcacgctttcaccggcgtcggaaacatcgtccggttagggttccggctatcgctaagggcacggatcataaaatcttccagaagcttctatgctattactcagtattattaccatttgccaaggtgttgttaggcaccatttttatcacttgaagtcagtcagcaacaacttttctgcgaatttttcaggaatattttcgcctgaaaaagttggagcaaatgtctttgcaaaacaagggattttggatggtaaagggttctggacacattaatgacagagatacagtatttgataatcccaccaaaattgaaccaaaacgacctcatcaatggtttgttgatgctgctgaagtagatttttttccaaacaagaaacaagccgtagaagatgcagatgaaaaatctagtcctggattttcaaatgtaaatattcctccctgggagaacaatcccaattttcattcagtcccaaaccaatttattggccggttatttgggtctgaaaccaggcctgtcaatttcactgaaaagaatacttatgttttggctgatgattctaatgtgagatcaaagatggtcaccaatcaatatggagatgaagcatcttttggtttgtctatatctcattctattgaagattctgaagcatgtgtaaattttggtggaataaaaaaagtcaaagtaaatcaggttaaggaagttgatgtacaggctctggagggacataattttggtaggcagagtaatggtgatctacatcaggcctataacagggaagttgagacaaggtctgcatcaatagggcaagcctttgacaaggatcgtgatgccactttaatgggactcacctacagcagaggggatgcacatgtcagatcatttggtgcctcctttgtcaaaggtgatgactcaatcgtatcgattagtgaatcctataataaagaggacacaaatataatttcttttggtgggttcccagatgaaagggatattatctctgtgggtaggcctgctgcagagtatgatcaattatataatcaatcttcagttcatgggtcaacaacagcccacgagaaagagttggatgtgtcaagttctgatgcagttgcaagtacacttcaggtagcaaaagttaagtctgaaactgtatccaagaataaacaagagctcaaaacagcaaagaatgaagctccaaacagcttcccttctaatgtcagaagcttgatatctactggtattcttgatggagttcctgtaaagtatatctcagtgtcacgtgaggaacttcgaggaattataaaaggctctggttatctttgtgggtgtcagtcatgtaactatacaaaggttctgaatgcttacgagtttgagagacatgctggctgcaaaacaaaacatccaaacaatcacatttattttgagaatgggaagactatttatcaaatagtacaggaattgaggagtaccccagaaagtttgttgtttgatacaattcaaacagtttttggtgcaccaattaatcagaaagcatttcgcaactggaaagaatcatttcaagcagcaacacgggagcttcaacgcatttatggaaaggaagaacttaacctataagtcccaaccctttgtgaaaacgtaacttgggatagattctagtgtgcatagtaagatatgtctatttttaccattttcctgtgtcttttatatggctccgcaaccttcagtaatgtgctcctttggatgccttgcttaaaatattcgaagctttataagttagcttatgtacaaatcaatagtattaataggtgctttggtggacagaattatctatattacattatcgataaagctaatgttcttgtgcaatcaaacgagcaagacttgaatactctctttcttttcacttaaggtttgtgttgtccgttttgtgcctttgtaagggctgaatccctctcacaagttgtcaagttcacgttggattgtaatgtactaggacagcgctgtgtttgtttgcttttcattggaaattgttattaaggagctaatcatgcttttaaatttttt

SEQ ID NO: 20130 - DNA, 256 bp, Glycine max
  Clone ID: PAT_MRT3847_118181C.1
tgtactcatgatcggtctcatattttagagagagagagagagagagattgagcgatccacgaaagtgcgttttgctaatcaaccatgttgcagatgcgatggatctggaggtggtagggcgtgtcgctatgctgttcgactacgacagcatggcggcgttcgtgaactcagcggaagctctggtctaatggaactatctttgcatcgaccaatacaatgttcgccatgttttattccttgcccttccccggggcct

SEQ ID NO: 20131 - DNA, 474 bp, Glycine max
  Clone ID: PAT_MRT3847_118182C.1
caattcgatcccaatatattcttattatgtaaacacatttgttttgggacaaaaaaaccaaacagtggtagttgagttcccgaagctaattggccccgctatttacttttcaggatcacccccccctatgggagcaacgttaaaaataccccctctccccatgcctagcaggaggtgggacagtttttataattaacacacagagctgcctacggttaaaccggtaatgattacacacaaccttgcaggagtacattgtatccatgtcgggatatcattggataccatcttcaaagggggtcatttctatcggccgtaagactgctgataagtgggagccaaaacatttccatagccgccatatgcatgaggatagatcatgggagctgccaggtaagaccctgcaatagctgatgccggctcgggtgaataagcattataaggatttgatgcgggacttccgctgccgtacat

SEQ ID NO: 20132 - DNA, 439 bp, Glycine max
  Clone ID: PAT_MRT3847_118183C.1
gtgtgtttgacatatggtgcgcctggtccaaagcttccaaatgtaagatggcgatcaaacgaacccggtgccggctgaggctactgaagagcaagaggccggcaatcgcagggcaactgagaaaggacttgggtgaacttattcatggtggccatgaataaactgcatttaaccgagtggaacagtttatgggatatgaaagctcactaggtgcgtatgaattgttagagcacttctgagaattgatccttacgcacaatctactacattcataggcactaggactggacgaatgatattaatgaagctgcctatactgttatatgagctgatgcaagatgtggggatcctgctgagctaggtgacatcccacagctctttggacagcgttctaggaagaggtttgcaactgcaactgtagagctatcaccatgaaatc

SEQ ID NO: 20133 - DNA, 364 bp, Glycine max
  Clone ID: PAT_MRT3847_118184C.1
gtttttgtgttttttttttttttttttttttttttttctttaacaatccatgatattattgaatgacagaccatttttcatggttccgacatactctatcaggacgaacctgatgtcaactacaaagaagactccggtgatgtcaacaagtgggactttcgcacaacaccggataacacaataaatcctccggcgttctgtggacacacaatcatgagggataattcgcggttaaataaagaacgtaggtgcagggactgaagacgagcctaataccaacggtgccaggcttgtaaaaggggtgatttggtggttttaggaaggaaaaagagtgacaaggactggcaaggctcgcgccgaatgt

SEQ ID NO: 20134 - DNA, 278 bp, Glycine max
  Clone ID: PAT_MRT3847_118185C.1
ggtggtgtagactgtcgaccagtgaattacaattgcacctagaaccagcgcatatctgcatggcgggaatggcattcacgacccgttgcagatcattcatttgcatgaagcttctctccatatcgcaattcaactttgatatccatcatccactgagggcttatgtcaccattggtgacctgaaagttagattgagctgaatatatttcgtgcaagtttctctgactgtatatgtcttcatgctcctaactcatgttgttagcgtatcttccaccttg

SEQ ID NO: 20135 - DNA, 377 bp, Glycine max
  Clone ID: PAT_MRT3847_118186C.1
aaatattttaatactaatttgtgtaagttttttgttttctatttaacaggaggcttgccaagcgatcgctgaaaggttggagtgtcatctcaacctaaggatagtcacgctaggcacaaagacacatgaggccatcgaacaatgcctcaggattgtcaagagtgtcacagaagaccgcattgtgtatgtgagatcttgatgtaggcgacgcacagatcagccatagtttatttacacatttgatattatcatatttggaagatgtatatacatttcttgtacttgaaaacatgtttgtttttgactgaacattttgtatattttaagttactttggtttatgataatagtttataaattaatgttaacgtttaaatg

SEQ ID NO: 20136 - DNA, 366 bp, Glycine max
  Clone ID: PAT_MRT3847_118187C.1
cacaagagtggagagagaaagaaaagaatgaaagagagagaagaagaattggtgggtttattcactggtgtggggggtgaacttttgtgttgcgtgtggcagcagctcctgttccacttccgagtgtcaaagagaacactcactgaacttctctccgatacccatttccatcttttctctttgcaccccttttgcttcttttttttccccttctcagaatggtactcatgcaacttctcacagatctctgattctgagttgatggagtggagctgtaagggtgatcaaaattggtatgatcaaaatctgtgtcttgactacaccattcctgtgaattgaggttttcttgtagggggtgttgtatgg

SEQ ID NO: 20137 - DNA, 290 bp, Glycine max
  Clone ID: PAT_MRT3847_118188C.1
gtaaaacgcatgttaaagcgttgtacaataccaagcaatcggagttgattgcatgcctggcccgtacggtactactagctatgatcacaatacgacgatcacaactcaccatatatgccaattgcgaacgcatatactatgatcactaatgtcactgtaggccatacattaccgacacctgatggctgataaccctgagcctacataactgcatacgctacaattacatgggtcttgtgaacaaagatacgacaacactatatccagtgcaaattacccatttcgacgtc

SEQ ID NO: 20138 - DNA, 209 bp, Glycine max
  Clone ID: PAT_MRT3847_118189C.1
gggtgtttgaatcatgaagctgttcaaaaaccagtccgacacggacgtaacgacatgcatcccggccgtcatgctgttccatgtgtagtaggataccaaggccgtgaagcatgccactggtggcataaggctcgcatgcagaaagaagatggtcttcgcacttgtccatcaggcaacctccaccctcttatcacgccacaagacgatca

SEQ ID NO: 20139 - DNA, 663 bp, Glycine max
  Clone ID: PAT_MRT3847_11818C.1
cttgcgggtgtaataaactgttccttccaattaaacattcttcaattacaataaaacaatttgaagcaaaacgcaggccttacttacgacattattaatgaagggaattaattaagactgttgtgatcagcattcatatctccatcagcctttcaaaccttttcatggcagaagcaggcaaacctaggagcacgtttatgcttttactttcttcgttatgagacaagaacaaaatgacttccttccctggcaaagttacaggcccaaaaaagaagggcttcccccatccgaaatctgcacttcggaaaggtatcctagtccatgttgtgatcaaaagtgttgcagttaaggaaggccttgatcttttcacttcaaaatagtcaatagcagatctcatgtaactgtctgtcaccatgtcaattgctttgccaaccaatcccacactaaatgacagtggattattcactaactcctctaccttgcatagagcatttgaaaacacaatagcattgccaaagtacccctttggtattggaggcacgaatttagaccttccatcaacagcaaaaagtagcttggtttgttgattagggtccatgtgcatccctaaggcttcacttctagctctccacacaaaagctgtaagtgcctcaaaagtctggt

SEQ ID NO: 20140 - DNA, 159 bp, Glycine max
  Clone ID: PAT_MRT3847_118190C.1
caacgtaatttttcatttcgctcgagataacatcattctctctctctttttctataaactatggactccttaagcgcctgaggagggcatgattttaccgctaaagatgccaaaggaaatgatcttaaaccttggtgactacaaaggaaaggtccttat

SEQ ID NO: 20141 - DNA, 210 bp, Glycine max
  unsure (1)..(210): unsure at all n locations
  Clone ID: PAT_MRT3847_118191C.1
ttcgcccactttcaatttttntctcnctaaaaatcaaatcatgngccancgccacatcccaaaccctttnatttccaattttcgtcantttnntctcttcttcaaaanccctctntgcgganttntcggtttggtncggccggaanngcggntcttncggnanacttgtngnngttgtgttccngcgggcttcgcgnaaaaggccgaggg

SEQ ID NO: 20142 - DNA, 228 bp, Glycine max
  Clone ID: PAT_MRT3847_118192C.1
gtcaccaaagagtatataaacatcactaactggggacattacgatgcttacttagttcctttgctatacagtatttaaatctttttaaacatgatactgccttgtatgcataattttgctatctataatcaacattctatactgcgataccaatattaacgagatattcacatcttatctacttattattctagtccaaaacttctataggtcataaacgacaatgga

SEQ ID NO: 20143 - DNA, 484 bp, Glycine max
  Clone ID: PAT_MRT3847_118193C.1
ggggggggaaaatggggaacctttttaaaaaacccttttgtttttttgtcccggaggggaaggggggaaaaattttttagggctccccatttttgtggggtctcccggggcaaaacaagggaaattcccccgggcaaggaagggagggaggaaaaaaggggttgaagttaaaaaccaaggaacttgctaaaagccgggggggcccaactttaattttaaggaaccgggggaaaaattttgggccccccacccccgtggagagctaattgggggggccccggacccttggcagggaaaccgccctgaaggctaatttttgcccctcccaccggaagcgagcaaaaggggactgaatccccctccccgttgaaccccaaagggggggtttctttttttgggaaccaaaaaaacttctggggggaaaaaaccttttagaaaaaggggggcagaacttggtttcctttgaacccgggtccgggggggg

SEQ ID NO: 20144 - DNA, 433 bp, Glycine max
  Clone ID: PAT_MRT3847_118194C.1
ctgtttcagcctgaaccatcatatcattcaatatccttgtaaatcatgacatgctaagaatatttttatcatcgcttatgacccgatcctcgcaggcgcggcgttgcgcgcctgctgctgcctgcacggccccatttcatttcatggacaacccatacctgacatgaatcactcaaaagaaatcaagagacaacacgtgtcattaatggaagagaaggcagaaagatgagaaagaggctaaaggcgaacaaaatacttccattctccagacatagaaagaaagacgagacaaagaaaatgaagcaatatttcctctatctccagacgatatcctagcccccacaacagaaaccacgctataacccagaggctaaagttaaccctgtctctctctgcgaccgacttgttcacggaaaccaagcttgatcgcggg

SEQ ID NO: 20145 - DNA, 449 bp, Glycine max
  Clone ID: PAT_MRT3847_118195C.1
cagaaaacaaatgagaggtgcaggaaataattttccttgagaaggtagtgatggcaattggcataaagtccaaagcgatgcttacggggaagttccccaaaatctgcaacattttctatctgtagacactgttttgatttcaagaaccaaacttcatccgctacgttggtggaaaaaacagtaacaacagtacatgatgttgaaggtgtggaagtggtaccagaattgccttgctgttcatccagtgaagacccaagccatcagttctgcgattctctggggtgtttgaaacctttcagttcagtacatcactcattcagctgcaaaaaagcaacttctactatctgtaattgattcagatgctaaatttacgatcaactggaaccgtttggctgttacgagtatgtttggatttggttttgttggaccagttgggcacttctggaatg

SEQ ID NO: 20146 - DNA, 146 bp, Glycine max
  Clone ID: PAT_MRT3847_118196C.1
caatcctgtgattgctgttggctcctattctatttggtaagagtatcgacttccactaattggcaactgtttagattggttaattaaagcactcaatgttttcaggattttcatatttaattgaatgaaactctacatggtaattt

SEQ ID NO: 20147 - DNA, 145 bp, Glycine max
  unsure (1)..(145): unsure at all n locations
  Clone ID: PAT_MRT3847_118197C.1
tntttcnccctntacgtncgcaaanctcnganatgnnngctngcaanngtgaaganannnncaaanatgtntngntcngagnganntatngnancgtctntntgtacannncgcnangnnncagtngncnncttcagagnacacc

SEQ ID NO: 20148 - DNA, 332 bp, Glycine max
  Clone ID: PAT_MRT3847_118198C.1
ttcctaattcccggtttcccacgcgtcgtcatcctcgccgacacaggttgccgggctatttcagaacaaaggattctttacttgatttcaagaatctctcaatttcttcctacttctttgtgtacgatttcttaagggaaagaaaatcactctctgtgctggccacagacttcgtgaatcattttcttttccactcttgggttatttgctgaacactctcctatttgatataggagcttctgtcagacttaaacttctcctggctctttcctcaggtctgctgggtaatttcaagttcaagctggtgaaatcttggattagggctcccactc

SEQ ID NO: 20149 - DNA, 270 bp, Glycine max
  Clone ID: PAT_MRT3847_118199C.1
accacacattttaaattaatgccccttgttttttttcatcagattttttctctattaatatcatctcttcacaatctcttgtattatcatctactcttaccttattaactaacatctccaagacaaaatcacttaccaaaatcactccaatctcctttcttcttgtccagaaaagcatcctttcttgataatgcatatactaccccccctattaaacaaggatcatacatgcctttatctttttcatcaattcaaattctttcttacttc

SEQ ID NO: 20150 - DNA, 390 bp, Glycine max
  Clone ID: PAT_MRT3847_11819C.1
caagtatagtcacaggtgggacccctgccggaaccgccccggtattccaggcgtgccttttacgtccgtttcttgggcagactccggcccgggggattttgagatgtgtgagggagactttcgaccacgcacctggaatgaccaccattaacctggaccttaagaggggtggtctatgggtcctcaggaccagcgcttatggacactctggaagggatgatgccgacttccacctgcgaagttgtgaagccgctcaagttcagagaagctctatgcttaagagtgatgttaagtttatcactcccttcaggggatgtcttgctgggtgcggatgaataatttcatgtgtgtatgactactactactactccttcattcaatgtgtaatgc

SEQ ID NO: 20151 - DNA, 922 bp, Glycine max
  Clone ID: PAT_MRT3847_1181C.1
ctccttccctgcttcaactctattcgaaatttacagtgcggagatcctcctccatggatcgccggaaacgcaacgagacaacgaagtcgtcgacaacctcaaccgtggaattgccaccaccaatctcagcctcagaagcccttatagtcaacgcattatgcgcgcttggcttggccttcgccttctggattgcgaacactgtctactccatcgaactcgttactcatccttctctcacactcttcttcatctggattacagagctccccattgtgacccttctatacagtcgatatcgacaaaatcggaagcaatgcacgtacctgcgagctgttgggagaggggttctaggagtgcctgttggggcactactgaattttttaggagctattgctgtgggggcgcctgttacatttcagtatcttcccaagactgtaaattgggctcttatgatgtctgtgttcacaacaattccagcgtcatgtgttcttggttcatcgtgggctgactggcgacgtatatttgcacaaacaaagccaaaaggatctatagagtacctgatttgtttaccagcacatggagcagttattggagcatggtttggggcttggccaatgcctcttgactgggagaggccatggcaggaatggcccatttctgtgagctatgggaccgtagctggttacctggtggcattggttgcatcattgggctttgttcttgcttatggtagatcccaacatatcaaaagagaatgaattgtatttcagtgcaaacaataatactcatgaaaattaggaagatttggaaataattaggaagattttattctttatttcttgttattcttgattatcaatggcctatataggcagactcatgattgtattccagtgcaagcaataatattcagattttctaa

SEQ ID NO: 20152 - DNA, 373 bp, Glycine max
  Clone ID: PAT_MRT3847_118200C.1
ttatggtttggcccttgtggttaagtctttgttcgggaccgaagatggtgtttccatggtggttttaaacctaatgacccgggccaaattcttaatggaaggttggtcctttttgaaggatgcatcccttgaagggggttttccttttaccaaagcttatggattgccagcctttgattcccatggaccggatccagggtttaccagggttttaaccatggggttggttgtctattttaccatttcattgaataaaattcttgggccctacataggctttgggggacttaaatccctggtggatgttgggggagtacctgtttctttatttaatatgtattttttaaaattttctcttttatggtaattaatt

SEQ ID NO: 20153 - DNA, 216 bp, Glycine max
  Clone ID: PAT_MRT3847_118201C.1
atcggatgaggctctccttgcgtttttcttacataggcccctaattaagtatttttgatgccccttcttttcgccgcacggggaaatctgtaagaaggaactgaatatctttcttttgtttcaatttttgggtcacaccatgtgtaagaacctgctatctgttgtggaatgaactaaaaatacctgaaattgacaagcttctacaaaagaatatgg

SEQ ID NO: 20154 - DNA, 408 bp, Glycine max
  Clone ID: PAT_MRT3847_118202C.1
gttagtggaatgaactactatgcttgtctttccataatgtcactactaattctcacaccttttgccattgctgttgagggccccaaggtttggattgcaggctggcaaacagctgtgtctcagattggtcccaattttgtatggtaagcacaatttgtatttgtatttgtaattttttgctggggggttttgaattagttcaacatgatttcttatttttgtactttttatttcatgttgctggccaaattaacttagtgtatcctctttatgaattttttttattggcagatgtgagatgttagttttgttaattttcattaacagggaggagtaaattcagtctttttttcttttgcttgttgcttggcgccccgcccggccttgtggggtgcgtgtgtggggtgg

SEQ ID NO: 20155 - DNA, 285 bp, Glycine max
  unsure (1)..(285): unsure at all n locations
  Clone ID: PAT_MRT3847_118203C.1
cttctanaaagggtgtgtaaccttttttttgaggggctcacctgagagacatcttggatgtacggcgccgcatcggtaaatcataacccccactgtgtacattggatagcattccttactgaaaaacccaacggcgtctccccattatccttgcgcttattcaacaccaaaagaacgtgacagtgaacagcgcttgcattttataaacatttaggaatctcaataatgtttccgagagaaactcgtgtaaacttgactcaattagcatacggatataacactaac

SEQ ID NO: 20156 - DNA, 430 bp, Glycine max
  Clone ID: PAT_MRT3847_118204C.1
caaagcagaaaaaagtaattttattctgcttctgcaccattttgctctacgttacaaaccataggtttgttcctttacctgttcctgtagtatccaactttaactctatctaagatgatatacctacaccatctattcttttaggtagggggggttatggatcaaaataggggcaaaccacaagcatagaaacttgacataaatcatcctcaccattttaaagtaaagcccccgaaacccccccttaaaagggaaaaaaagtgcttatatacagagatatatattatgatcatagaacttgcctagttagctgtgcatgtttctttttcccttgtcgtacacatcacctatacctaccatcattttgtcatctcatgttgcaacagagtgattttccttgatgttgcaatttttcccacatgcatgtcat

SEQ ID NO: 20157 - DNA, 442 bp, Glycine max
  Clone ID: PAT_MRT3847_118205C.1
gctcgagcacaaatatcttacactacatagtacaaacacgttacatctcttaaatctttctctatctacacaccaaaggttcatttttatatatggttggggatgtttatccatatcaactttatgatagtaccatattccatatcactaaaatttttcaaatatcttcaacttgtttacaatcctcttttttctttttataaaatacccctttcactaatattgattcaaaaatctaatatatttctcatatttaaacatctttaaatcaaacaactccttctactcctccttttatttttttttttatcttttaaaatccacaatcactttttccttttactaaatattctaatctctttttcccaaatacatttattaattttcataacataaacttatctcttattcttccaaattctatcattaaaccctttttttt

SEQ ID NO: 20158 - DNA, 429 bp, Glycine max
  Clone ID: PAT_MRT3847_118206C.1
tttcacggtgaagacagcaacttctttaatgcatgaaagaacataggaaaatgaagtcaaagcagaaaaaagtaattttattctgcttctgcacaattttgctctacgttacaaaccataggtttgttcctttacctgctcctgtagtatccaactttaactctatctaagatgatatacctacaccatctattcttttagctaaaggagggtgggtgatggatcaaaataggggggaaccataagcatagaaacatggcacaagcatcctcaccatttcaaagtaaccctcccccccaccaaaaaaaaaagtgcttttatatactgagatatatattatgatcatagaacttgcctagttagctgtgcatgtttctttttcccttgttgtacacatcacctatacctaccctcattttgtcatctcat

SEQ ID NO: 20159 - DNA, 537 bp, Glycine max
  Clone ID: PAT_MRT3847_118207C.1
gctgatcatatttttgacataaaaccaagtatttatctcacatgtttttagtagtctgtcattcaacatatgaatgaaacatgtcaatgtcacattaaaaagagaggatgtctgtctcccctgtgatgtgaatcatgggatgcagatatttctatgatctaaatttatgatcaacctttttttaaatcaggtcctcacttaaattagatgatatcaatgactaagcttatgccacatatagaatcttttatatcagtgagaaaattttgtatttgtcaaaatatggtaggattagtccctttttaagtgaggatcctgaattcctgatccaacttttttgaagataaaataattgttgacaaaaaagttgagaatggttctcataaattcatagattgttatcagattgcttttactttatcaaaatctaaacccttgatttcatcaatggtcatcctctttttgcacctaactttctgaagttgaaggtgcatccacctcaacacccaacattcctttactccttgtactagttga

SEQ ID NO: 20160 - DNA, 439 bp, Glycine max
  Clone ID: PAT_MRT3847_118208C.1
acgtcgccggggtgggaacggagggaccgacggtgcgtaattttgtggtccgtttggagccatccatcattgctaagcctacaatgcaaccaccggagccgcacacttgcatagacacatatatgcacgcgtatagggcctgctatggcttgaacgcgcattctcaaggagctgacggacttgcataaggacccaccaactttttgcagcgctggtccagtacctgaggacatgttccattggcgagcaacaatgatgggtcctgctggtggtgcttatgctggaggggtgttcctagggactaaccacttgcctgcgggttatcctttcgagcctactaaggatgactttaggactgaggggtttaagccgaacatcaataggaatggccgcatcagtcttgagatactgcaggagcaatggagccctgcactcacca

SEQ ID NO: 20161 - DNA, 306 bp, Glycine max
  Clone ID: PAT_MRT3847_118209C.1
aggaaaggttgagttgaaagaacaggaaggagacaaaggaaaggaaaagttgaaagtgcaggagctggagaaagcaaagggagaggaaacatacctttctggacataaagagaacaccaagtcttttggtgtagaagttaaagcccagatgcaaaaagaagatgctaatcccattaaagatgatggtgaaggactacagagttgacagaactggagggaccaagggaaggaagagttgaaagaacaggaaggagagaaagggaaggaatagttgggagaactggatgaaaaacagaataaaatttt

SEQ ID NO: 20162 - DNA, 1169 bp, Glycine max
  unsure (1)..(1169): unsure at all n locations
  Clone ID: PAT_MRT3847_11820C.1
ngagagggttttgttcttcaatggaaagccagaagcagaacagtaaaaagcggaaacaagttttcccatacggcaactacaagagctactatggctatcgaattggtcaaggcgtggatgaggaccctcgattgaaggtgctgaggaaggaatggtttgaaggcaaggactgtcttgatattggctgcaacaatgggatcatcaccatacagattgcacagaagttttgctgtcagagaattctcggagttgacattgattctgatcgagttgaggatgcatattggaatctcagaaaaactgttaggttgaaatctacagggaataaacctgtgaaagcctccaaacttcaggacaaggaccatgctgatgattcagagaacagtgttactactttgttgaatgttaaaacggaggagatttcaaaggaacattcttcttcagagcaaattgatcttcttaaaatagtttcgtttaaacgagaaaattttgttcagactcaacacccaccaggaaagcagtatgatacaattctttgtttgagtgtatcaaagtggatacatctaaattggggggatgatggcttaattactttatttgcagaggtttggaaactgctccgtccaggtggcatttttgtgctggaacctcagccatggaagtcatatgaaagcaatcgtaatgtctcagagaccactgctgccaactaccgtaatattatgattcgaccagaacagtttcaggaaatattactagataagattggatttcgaacagttgaagatatcacttcaggtttgacagatagcaagactggtttcaacaggccaattctggttttttgcaaatgatccgtgcatgcaaaatagtcagccaatgttcacgatgaggacttaatatgcgcgaggcattcttggtgaatagcagcagtaaagcaaattctgaattgaggggtttgaatgtaaagaatgaaaatacataccatgtctttttgtttgttgctagcagtctcaattagatccgcacacaaaagaggtagatgtagtaatgaacatgttttgctagagtttacaacttgcagataccacaacttgagaattttatttacaaaaagaaatgaaatttatagtccatttggtttgaaaaaaaaaaaaaaaaaaaaaaaaaaa

SEQ ID NO: 20163 - DNA, 196 bp, Glycine max
  unsure (1)..(196): unsure at all n locations
  Clone ID: PAT_MRT3847_118210C.1
ctgactcgcaagattcactccaaattatgcttttcgcttttatattcctcatcacatcagaganacgtgggacatcatcntatttcctttattatttccttttgttgatacactgtatcacacacactaaacctgtgtgttcactgaggtataaagaaaatgattgaattgtaaacatcatgaattacctttttgg

SEQ ID NO: 20164 - DNA, 443 bp, Glycine max
  Clone ID: PAT_MRT3847_118211C.1
cttatttcttgccgttgggaggaaaccacttccagcggtacacatgcagcatgttaaggggatgtgagtggtgcaacagcacctggtcataccgagaagacaacgttcatgaagccaaataggagctgcgcacttctcgatgcgcatcctgacatgtactccaattgactatcgatcacgttatgtgcttgtacacctaaatcgctgcacataggcgtcaccttaaagcctatggccttgatcatgaagctatacgttgagaagtgagaatctacagcgattgagaagcccaagcgcgtatggtcatgattcaagctcatgactattgtacctgtgacgaatggtgacataacaggagcgtacattggcatgacctttactctagtggacatgtgaccgcttatgaatgagcatgatccggcatagtatactattggatacag

SEQ ID NO: 20165 - DNA, 396 bp, Glycine max
  Clone ID: PAT_MRT3847_118212C.1
ggaagtgtatttcgtcactgacctatctttgtagggattcgagggataaaccttgatattaatcaaccccttttaatttccctttacattctacgacactgcgtgctatggcgctacaacgcacttcttgtgttcgggatgttgatgactgcgggcctcgttaacgtttcatctgatccaaagatagaacgaccaatactggaagcacaacaagaactcccgtttccccataacgatccacttatcatgagagacgctaacagaatgctaatgcacgatatggactgcggtgggtcgtgcaagacccggtgcatagcacatttaaggcccaacttgtacactacggcgtgtggcacttgcttaatgaagtacaagtctgtaccacctgccacatct

SEQ ID NO: 20166 - DNA, 423 bp, Glycine max
  Clone ID: PAT_MRT3847_118213C.1
ggttgcccacatatgtacacaacacggaccacgcgagcactgtgtttctgatcaccacgaacccgagcgagcgacacggtccttagttgaagtgttgaaccacaacccagagttgaagttgtgagtggcaaggggtgttcgaggctgttttcatcttcaattccttcattcagaggtttgcaaccattggagccaatgtctcctgcttcgtctcctttgcaagtgccatcatcaactgctccttttgctggtcttgtcatatgcgttactggtttatctaaagaagcaagaaatcaggtcatggaggctacagagagattaggtggacagtatagccccaatttgcatcctcaatgtacccatttggtggttcagagttttggtggacgcaagtttgagcatgcgctgtagcatggagcaaaa

SEQ ID NO: 20167 - DNA, 340 bp, Glycine max
  Clone ID: PAT_MRT3847_118214C.1
acagattttccttttttttttttccttatagaaggggagagaagggactaaacatggactacaatcttatgctcaggccgatctcattatatacgccaatacccaataatacacatacatatatacttgtacatagctcagggcctaacatgatgcagttcacagccatatctgagccattaactaggcaatatctgaaccatcgaactcactttccctgtttcccccagttaccgaccctatacttaatttgcacaccggacatgttccttgatagtcgaaaccctggatcaatgcaacttgcatgaaactgatcgcatgcctgggtacgctactaaca

SEQ ID NO: 20168 - DNA, 368 bp, Glycine max
  unsure (1)..(368): unsure at all n locations
  Clone ID: PAT_MRT3847_118215C.1
accagacaancacancaccccctcntcaagagtcagtggtgcaagtggaggaagtggtggtaaccgatgttccacagcccgacaaaacaacatctacagttccagntgagagagattcgcaccctcanccttatgagacagagaagaagaagcccggtggggaaaccgncactctcgagactcacctctccanccccaacantngtgcccacancaacaanatcnctgtttacattggagagagcaccantctttctgccctcccagaaagcgaanacagggntctccaagagctcaagnngctcgcncaagacgctctcaacanncancnnttctctnccaaatatntatnacaaggngacaccaca

SEQ ID NO: 20169 - DNA, 473 bp, Glycine max
  Clone ID: PAT_MRT3847_118216C.1
ctcatcctattcgtggagtcccaactgctatcaattgcctagcaacactacttaaagaacctgtggttaggtcttcctttgttcaggctgatggggtcaagttacttgtgcccttgatttcgccagcatccactcaacagtcaattcaagtaagtttgttggactctacctctgagaatccaaaagccaagtaactggattttccttcagttggcttatatatattataccaataggataggtgcttgaggaagcatgatatatctagttatgcctgtaatacttgctggaactggaaatccaatagcttgtattgaatttagagatggttaacttaaacatgcttggtgcatccgaccaaatgatagatttttggaaaaacaatgactgagtggtatctggggattccagatttgttggcgtctaaattgatttatcaataaaatattaaatattactgataaaatttgtag

SEQ ID NO: 20170 - DNA, 458 bp, Glycine max
  Clone ID: PAT_MRT3847_118217C.1
gggcaaatattctcttaggatcaattctgttattagagtattatatacagggatgtaaataacaagcaagggtcataatgaaaattacaaattacctctccctctctcgggggcttctttccttccttactcttcttcctgggggagggctggttcctcgaaaaccagttcattacccgtaacaatttggggctctcgttctttcttccatggccgattcacccaaccccccacacctagctaatgtcctcgcccgtttaggagacaccctttaaaccatgtctctgaaattaaacgaaatcctaacccgcctcgctcctgttgcttcacccatagccaatctcatacccatttcgtccactcttactcctaaacctgtcgaagtttgaggacttggcgaacaggatcatcaggttgccgccccccttcctcttggcttggttcatctctggcttggc

SEQ ID NO: 20171 - DNA, 745 bp, Glycine max
  Clone ID: PAT_MRT3847_118218C.1
cctcacgcgtccggaccttcaatggattcggcaaaactggaaacactctctcctctacatcactttcctcctcgcaattctccacctcacgcagaaccatttctgccacaagctcttcttcgccaaccaaacggtgcgcgtcaagaagaaccccgacctccccctccggttccgttccgacggtaccttcaagatcctccaggtggctgatatgcactacggcactggaactagcgtgacacggtgcagggacgtgttggcctccgagttcgagttttgttccgatcttaacaccactcgttttttaaagcgtatcattctagcagagaatcctgattttcttgcctttactggagataatattttcggatcaagttcacccgatgctgcagagtctctgtttagagcctttggccctgttatggaatcaggacttccttgggcagcagtgttgggaaaccatgaccaagaatcaactatggatcgtgaagagttaatgtctttaatctctcttatggattattcagtctcacaaatcaatccatcggatgatgatctcactaatccttctaaaggtggtatgatgactaaaattgatggctttgggaattataacctaagagtatatggtgcaccagggtccatggtggctaacagcactggtttgaatcttttctttcttgatagtggagacagggctgcttatcatggaattcgaacttaatcggatgatcagggagtttta

SEQ ID NO: 20172 - DNA, 412 bp, Glycine max
  Clone ID: PAT_MRT3847_118219C.1
aacaaaaaaaataaagctggcattgtttcatttaagtaaacctccctttctcaaatgccgcagatgatacaaattgcaacttgacaaagggatccctttgcccaaatggaaatgaatataatgccgcggccttaccggagatgtaatcaggattttggcccttggaggaatcaaaaaggaaaaagtaaaaaaactttttttgttaaaaaaaaggcataaaaaaacccccccttttcttttcttttctttttttcttcttaaaaaaccacggggccaagggcaccttggaccaaataactctactggatgcaaattttcgggtgggtcgccaatccaatcggaattaggaggaggggccacctccccctcctggcggagaacttcccccttttgccactcatcccattttttt

SEQ ID NO: 20173 - DNA, 402 bp, Glycine max
  Clone ID: PAT_MRT3847_11821C.1
tgttttttaaacgggggagaaaagggaaacattgaatcgggtggtataaacattggctcattgatctagttgtgctgacatagaaggccccataaacacttaatggctggcatcctacctaaggcatggagtgactatccgtgcgaagccgagcatgtatatgccatagcagattagagccaccacacctatagctgttatgattagatcgaccaccctgattgatgcgacgactcgataatattatgactgcgtagcacaactatgactcgtctttcgaaggccattcgtatgcgaccatcgaccctgcgaaaacgtgacacaatgcttatgccaagactgcgtatgtggctaccacaatgcagccctgtgccttgctcgataagcgagagcatacatgat

SEQ ID NO: 20174 - DNA, 1120 bp, Glycine max
  Clone ID: PAT_MRT3847_118220C.1
ggcacgctttctcttgggctcatagttattccttgcttcacttgtatgctttagtttctagcatcgatcactcctaattacttgctgcatttctctactccttgtgcttgacacttttgtcatttaaaatggaacttaattttaagtaccaacttagccttttctgtgtcacactgctcttacctgccctgtgtacctctcaagactcttttacgtgctccagagcaacctattatggtagcccagattgttatggaaatccaaggggagcttgtggctttggagaatatggaaaaacggtaaacgatggtagtgtcgcaggcgtgtcttggctatggaagaatggatctggctgtggagcatgttatcaggttaggtgcaaaataccacaattctgcgatgagaatggagcatacgtggtggttacagattatggcgagggagacagaacagactttattatgagtccacgtgcctactcaagattggggagaaatgcagatgcatctgcagaactattcaaatacggtgtgatggatgtagaatacagaagggtaccctgtagatacggtggctataacctcttggttaaggtccatgaacacagcagaaaccctcactacttagccattgtcattctctatcttggtggaacttacgacgtaactgctgttgaattgtggcaggaagattgccaagagtggaggcgaatgcgcagggcatttgggactgtgtttgacgctgagaaccctccaaggggtgacataaagttgaggttccaattgagtggtaatgcagagaagtattgggtgcaatccgagaatgttatctctagtgattgggagggtggagctgtctttgactccgaaattcagcttggttaaaatgaaaaaaggcactttctgatttcaggaatatagatagtgactagattactagtgttttattgtttatggtttgtgctattctaagaatgttcctttgtggtgagtcgatctagtgctctttgtattggggactaaaactgtggggattcatatatttcccgtatgaatcatcacagaatatgaataaataaaagtgatgctcagctaatgtcataaggaaaccttcctaaaaa

SEQ ID NO: 20175 - DNA, 533 bp, Glycine max
  Clone ID: PAT_MRT3847_118221C.1
ggatcgggctcccacatacccctccgttaatgtgttggattctaggctttttagattccgcttgtgggtggtcccaattccaaggtagtgtgttatcatcgtcatccctttataggacagacaaagctgattcacttaaggagcctaaggacgctctgcaactactgtttgcgcgctgcgatggccggcggcagggattggaaatccccctccgtctttgccgctttcaccttttacagatctgactgcaaacgctgcctggtcagattcaccacgcagggctgggacgatgttgacaccaccttctgcatggcccgatgatatcccttttctctttgtatatcagacatcaggtgacgatgtgtcttccgaaattcatatcgacagacctgaataggcaccctgacgataatgaagatctttcctggggaccatatccatttaggacaattttggctttcctgaaaatggaactggccaacatgaccaggtgcgaaacaatggttgttacataatgacgattatgtcaaaag

SEQ ID NO: 20176 - DNA, 449 bp, Glycine max
  Clone ID: PAT_MRT3847_118222C.1
accaaaacatttttttttcatattcttgaaatctgccaaggggggaaaactaaataacattaccaaccaaaacctataggtaaattaatcacgcacttataactgctttacccaaacaaaatattatccacgcataaattatacaacctttactaccataaaatgaactactgttgatcacattgcactttgtgattagatggctaataattatattcatcctatgccaaacgcagttgctgtcattgtttttgtctcatctcctacttaaagatgacatcatgcaaagtgtttttctttcaatcatccagcttcatatatgagacctgcttgctgctcttctgaggcaacacctttaccaatgactggtattggtccgaggaaagaaacccttagtcggggaaataaacatcaaattggatgtaaaggcgaccattcatgaatggcct

SEQ ID NO: 20177 - DNA, 455 bp, Glycine max
  Clone ID: PAT_MRT3847_118223C.1
acgagttttgattataatgaggttccattagatactgcatccccagaaaatttgactttgatagatctggcaattgatggtgaagaacatgatgaatgtgaagactggacatctaaactaggcattaacctacggaattgtgtccatgcaagaaataactctccatctaaacaagttccttggatactagggacgctgttgtatgataaatgccttgcttcaaaatctttagctttaaattggcaatcacggagatctcgatcaaaaaggtcaagttgtttggctcagactaaaccgtgtgacagtattgagagaaagaaggaggatcggttttatggaagaatagatgactcccctgctgaaaagaagctacttcaatattcaagaaggaagttcaagtcaaagcaaaggtgtttccctgtagcaagcatggtcagtgaattccaagagaagtc

SEQ ID NO: 20178 - DNA, 402 bp, Glycine max
  Clone ID: PAT_MRT3847_118224C.1
gttattcatttgtttttttgttattttttttatcattttgtgattgtattgcctattttatcttgggggaaaaccctatccactgggaaaccgatggtaacaagggaaacctcaaaacaaagggggggggggaacccctaatacccctggggggggaccctacccccgaaaaaaaaaaaaatctccactgccccaaaaaaccctacccccctttgggccattgaatccgaattcttctaaaaaaaaatccaacacttttgtaactatttgctggcttaggaaagacacccccccccctggggtgttaaagccctattttttttccccccccaacacacctttttgaaaataagggggggctgaagccattttgaggcctccccacccttttttgtgattttc

SEQ ID NO: 20179 - DNA, 460 bp, Glycine max
  Clone ID: PAT_MRT3847_118225C.1
aaaagaaaaatataatctttttgatagagaaaagagggaaaggaaagaaaattggcaagataagtttaaagaataatatacccaagttacagaaaataaggtttattcctttctatatgttcagaaactagtcgcaatttccagggcaaagctaaacatcgggaaaaaagcctgtgcctcaaagcggaacgagttcaatagcttagcccaaaaaaccaaaaaagcaaaacaaaaacatggtacctgggccaaatcccccttttcctggtcaagaacagagatagagcaaaacttaaaaccgcctttcctttagcacaggaaggggaaaaataggaagaagtgggggagagattcaactaataaaaagctctgccaggggaaatttttaattgtaatggaacctcaacatacaaattactaaataatcagcaagttctaaaaaaccgcaattgcaaaaggg

SEQ ID NO: 20180 - DNA, 807 bp, Glycine max
  unsure (1)..(807): unsure at all n locations
  Clone ID: PAT_MRT3847_118226C.1
gtccggaattcccggctcgacccacgcgtccggctgaaggaagaatacgtgatggtgaagcatctacccaaaatccagaaggatgatgattccaggaagtgttgtttgtctgactgttttagttgctgtaatgacaattggcaaaaggtatgggctgtactgaaacctggattcttggcattgctggcagatcctttcgatacacagcctctagacatcattgtttttgatgtacgtccggcctcagatgggaatggggatggtcgactatcgctggcgagtgaaatgaaggaacgaaatcctttacgtcattcattcaaggtgacttgtggaatccggagcatcagaattagagtgaaaagtagtagtaaagttaaagattgggttgctgcaattaacgatgctggactcaggcctcctgaaggctggtgtcatcctcaccgttatggttcatttgctcctccaagaggcctagttgaagacggaagtcaagcccagtggttcattgatgggcgagcagcatttgaggccattgctttttcaattgaggctgcaaaatcagagatatttatctgtgggtggtggctgtgcccagaactgtatctacggcgacctttccacactcatgcttcgtcaaggcttgataatttgctggaagcaaaagcctaagcaggggttcaggtaacctttactatgagctctcacccatgctttgcctttttaagagacattttttaattacttgngtttgagttgtttaaagagataattacaatcattccaaggattttagtatgatgatggctt

SEQ ID NO: 20181 - DNA, 485 bp, Glycine max
  Clone ID: PAT_MRT3847_118227C.1
agcggtggtacatgggggtggctgaaactggctcggcgtgtttgtttagaagttgattcgagccaaagggaggttgaggaaaagatgagttaaattgttgatcaggagctggaacagagacacccttttgcctgtttagataagactttttccgtgtatagttttttggacattctgttttcttagcgatgaaggtgaagaaagggctggagttcagaatgttgaagatgaagaaaacaatgactgaaaaacagataccaaatatacaaatgcttctttcctctcttattaacagtctctaattactaagatcccgtaacacacctgctttctgcaatagaaaaaaaaatggcctacatggttttgttgtaaagaagtgttgaagcttggattgcctccctgattatgtatgtacgtttgttgatccggttgtaccagagcaaattgtaattaagcttttgcagccaaaaaaaaaaaaataataa

SEQ ID NO: 20182 - DNA, 142 bp, Glycine max
  Clone ID: PAT_MRT3847_118228C.1
gtcgtaaaaaaaaaaacgtaaccgcaccgtttatcatgttgataagagctaaaggatgatcaaccccccaagacgaaaagggtttaacgcttatcatcacatagaagcggcaaacatatctcctttgaggaggatatattaa

SEQ ID NO: 20183 - DNA, 259 bp, Glycine max
  Clone ID: PAT_MRT3847_118229C.1
gggttattccctctcaggaatgggggttctttacctattgtgttcgatattcacaaaaccctccagggttaaataggtggatggggaaactgactatcccctatggcaacttcccgcagtgtcacaaagaatgccctctttctatagggggaggagctggcgcacagaatgccttttcccatgagacctcctcctgctgttcattcaatgtggcgatactcagacggagatttcgtctttgatgtttcttcagattgac

SEQ ID NO: 20184 - DNA, 2421 bp, Glycine max
  Clone ID: PAT_MRT3847_11822C.1
gcatatgactaagggaaaagcaaatgatttgcaaggttcaaacagttttacaaatttagtaaaccaatacatgatttgctgctttacaaagcaatgattaaaataatggactgctctcccccactaaaagggcataattaaaattaaaaaaaaaaaatcatcacaagtatactgtaaagaatatacaggaaaaagaaaaacatacgagtgatttctttccctccaggtacctcctcttttatgtgtaggaaaaagatgtccacaacctactgtatcattaatactttggcaaatagaattttcaacgttcaattttgtagtttgccctcactgaataattaatagctactttgtgttcataaaggatgaggaatgtttagatatcttgcatcatgcaaggagctgatcaccaaaagatccaacgggtgaatgagggtggttgaaatggcgtgaaggtagtggcaaagataaactataaatgatacaaaatgtatacacagcacgacatcttaggcccatgatgcttatatctgcctttcttaaaacagccactgtttcctctttggtttattctggattggtgcatctcggatttcatataatgaattgtaatgaacctcacaccaaaagctcaaccacagttcacgctgtggtgcttggtacagtgaaacacgagctcctcagcaaattaacataaaaaacctctctttctctatttcttttattattgggtatgtcttgaagttcttctgaatttgaagcatatatttgtccttgaatggaaacacgtgctggaagtgatatgaagatggccatagatgatgctttgaacgccttctctcctgtttccacccccaggattttctggaaatcacgaaggagatcagctagcgggaggaatttagaggtatctgaagttacttctaataaacgaaccagcaagcaggcaggtagtacttataggcatcagaaaattttgatagtggacctccagaaaaggactcagattctccagcgccgactggtcttgttgggacgattagaacccctaatgatgattgccgacagacgctccttggctgagtctttacttcctcccgtatatattatactatacataccctcttaagtcttaacttgacctacctctactttctctttctactttatctcgcacgtagtgtcagaaaacatatgacaattgttcatcatttctcttatgtcccacactcatatgatattgctcaaggtaagttttaacaacaatccacagcaaggaattaattttcaatattgtgacatgccatctgacaattcttaattctttcaaatgttttttaactgggaattttgcaagatttggaactgaggcttcctttttctatttaacttccctttttctgggattgatttctgtaattcctgcaaaattgtccactgtttcagagagagagagagaggaagcgtaaacacaggttttaacggttggtgtgacttttatgttacgttgctctattttgttagggtcttgcagcaaataaagcaattaaaagataaaagtttctaatgcattttaaaattacagagaaacgtatttttacgcattcagtattttttttttcttaaccgctgcccggttagcatttggcaatttgctatcaatggcttaccgaactttggctctgtctcgttatcagtatgttttaatgattgggacccaaatttattctaaagataaaataaattggaagaaattatgatgtattttgttagctaattagtagctcataattatgagctaactctattatttttacctaataataataatagtaaaagcaacacgacaattttatgcatcttagtaaaagttttatttgtggtgatatagatgttgaagatttgcagcattttgtgaaggataggaaaaaagagaaaataaaaacgtatgtggctgttgagatagtgtaaccatcatcatatatcattggttacactgttggacagctcacccttcaaccaaccctcttcagtatataacactaacctttttgtaatccttttttaatgtgtgtatattaacattttaagtttacgtttggttgggcggtagaaaaaagaaaaaaaaacccaccaaaaatgcatgaaaatccaaaagtgatgaagagttgcggtaaccttgactctctttcacccaaccaaatcactgtaaataggcatcttccttttagtaaccgtactcaattatattaaaggaaatccaatatcacggattacctagccttcactgaaaatgaagtcaatttgtccatccaaaagaataggtttatctacatgattttgcgttgctaataagtgtccttaggatattagtcaagaattaaaaaaaaaaaaaaagggcggccgctcagaggatcaagc

SEQ ID NO: 20185 - DNA, 883 bp, Glycine max
  unsure (1)..(883): unsure at all n locations
  Clone ID: PAT_MRT3847_118230C.1
ccggaattcccgcgtcgacccacgcgtccggtgatttttctgtgcgcctgatgtaaatgatggggctcgttctctttggtgctactgtgttgggtgcctcggcgntgccctgcgctcgatttgttccctctccttctgaccacctggctatggcgccctgtcctccggcagcgaaatgccgccgtcgccggcttgctgcggtcgccacttcctttttggctctgggacccttcctgcttagtgccctcgccctcccacgggatccctccctgtccatccttctctttcncgctccanttcccgttccgacgggcttacttttntgctcctgccctgtggctccctccctcgggcccgttcgtgttcgagttataccgctccggactctcttntcttccctgctgcgccccgcntgggtngtggggtggngacattgacctcgcccttggctggtgtatgggttatcgggggccttgccccgggccttggcctgcctcttctcaaccccttcttgctggtgcctcctcgctctcctctgtttcccctctgctcgttgttccctggccaaccccggccgcggcctgcaccccacttccctgcccgctgcctcccctccctgcctgcccctaaactctccgggcccccccccgcccccttcccccccccccccccccctccttacccccctcccccccccgcgccccccctcctnnccgccgggcctccccccttggtggccgtcccctccccccccaaccgcgcccaccccccctcgcttcccccccttcgccaccccccccccccccccccccccccccctaccccccccgctcccctcgccccccccccccccccnctctcccccccctcccnctccccccac

SEQ ID NO: 20186 - DNA, 453 bp, Glycine max
  Clone ID: PAT_MRT3847_118231C.1
accagggttagtggcatgtttattgcaatattttatattgaacctttgtaatttgccccttttgtgatgtgatttcttcttagaaacctgcattatttgttactaagctatatcataaaacttatctttacatgattttttttcctgaaagatttgagttattgcttgggacaatgatagtactaaattcatgctgaaggtaatacttttctggctatatggtgcatgaatacagcaaaattggtatacatgtcagatactgatatgcgtgctactgagttgcctcggtatcaaagcatgattgtcttatcttcaaacaacgtgattcttttaatataatattttaaaataatttttattacaattagtctttttaattgttttttcaagagattaatgaccaacaataatatgacgatgatagcaaaccaatattaatatcggctatattaa

SEQ ID NO: 20187 - DNA, 1493 bp, Glycine max
  Clone ID: PAT_MRT3847_118232C.1
gcacccgtctaatacactgcaacaggaatcggtaaagattttctaactctagaattacgtttactaatttgtctacgtttaaacgcggtatccacacgatcttcgtctctccctgttaaatccacgggtcaagccatttttttgttgactaatcaaaaacacactccctattttatctattgtttagcacaccgaacaacacaacagagtagagagacagagcattaaggatgttggagctgtgccgcaagccactgaagatgtgcttcggtggtggaggcaacgatgatgacctcctctggcacacggaccttaagccccacgcttcagggaactactcaattgcagtggtacaagctaattcatccttggaagaccaagctcaagttttcacctctccctccgcaacctttgttggcgtatacgacggacacggtggtcctgaagcttcccgtttcatcaccaaccatctcttctccttccttcgcaaattcgcaaccgaggaaggtgatttgtcggaggaagttataaagaaggcgttcgaggcgaccgaggaggagtttttgcgtgtagtgagggaatcatggattgcgcggccacagatagcttcagtgggttcgtgttgtcttctgggagcgatttcaaagggagttctttatgtggctaatctcggggattcgagggcggttttgggtaggaaagcgttggaaggagaggtgaattgtggtgctgtggtggcagagcgtttgtccactgatcataatgttggggtggaggaggttagaaaggaggttgaagctcttcaccctgatgatgcacacattgtggtttgcattggtggagtttggcgaatcaagggcattattcagagacctgtaatgacagctgaaccatcgatattgaagcggaaattgaaggcagatgatctgtttttgatctttgcaacagatggactttgggagcatttaactgatgaagtggctgttgaaatcatctccagaagtcccagaataggaattgcaaaacgattggcgagagctgcactagaagaggttgcaaagaaaagagaaatgaggtatggggatctaaggaaaacagataaaggtctaaggcgccattttcatgatgatattacagtgatcgttctatatctcgatcattcaaaagaatcacaaaatggtagatcaagacgtaaaggagtttatgattgcattaatactcctattgatatcttctctgtgagctcagatgaagctgatctttaaattgaattagctattagcagtgactctccacgtactgctttttacacaagaaatttgtcacatacagaagtagtagttacggtggccaaaggaaaaggattgtaaaaggagtaatactcattatcttaatcatcatatttttttctattatgaattaaaagggtaaaagtttaggtgattcggcttgggtcccaaaggattattattattattattcagaatttctgt

SEQ ID NO: 20188 - DNA, 1134 bp, Glycine max
  Clone ID: PAT_MRT3847_118233C.1
ggattggctgttgtggattaaagagtaatcttctcttgagcggacgcgtgggcggacgcgtgggcagggaactactcaattgcagtggtgcaagctaattcatccttggaagaccaagcacaagtatttacctctccctccgcaacctttgttggtgtatacgacggtcacggtggtcctgaagcttcccgtttcatcaccaaccacctcttctccttccttcgcaaggagggtggtttgtcggaggaagttataaagaaggcgttcgaggcaacggaagatgagtttttgcgtgtagtgagggaatcatggattgcgcggccacagatagcttccgtgggttcgtgttgtcttctgggagcgatttcaaagggagttctttatgttgctaatctcggggattcgagggcggttttgggtcggaaagcgttggaaggagaggtgaattgtggtgctggtgctgtggtggcagagcgtttgtccactgatcataatgttggagtggagaatgttagaaaggaggttgaagctcttcaccctgatgatccacacattgtggtttgcactcgtggagtttggcgaatcaagggcattattcaggtctcaagatcaataggagatgtttacctaaagaagccagaatttgacactaatcctctgttccaacaatttgtatgtccactatacttgaggagacctgtaatgacagctgaaccatcgatattggcgcgtaaattgaaggcagatgatctgtttttgatctttgcatcagacggactttgggagcatttaactgatgaagcggctgttgaaatcatctccagaagtcccagaataggaattgcaaaacgattggcgagagctgcactagaagaggttgcaaagaaaagagaaatgaggtatggggatctaaggaaaacagataaaggtctaaggcgccattttcatgatgatattacagtgatcgttctatatctcgatcattcaaaagaatcccaaaatggtagatcaagacgtaaaggagtttatgattgcattaatactcctattgatatcttctctgtgagctcagatgaagctgatctttaaattgaattagctattagcagtgactctccccgtactgcttttttc

SEQ ID NO: 20189 - DNA, 1462 bp, Glycine max
  Clone ID: PAT_MRT3847_118234C.1
taagcgggagagtaaaatccgatcattatactttcataaaacgtaaggcattcttttatgaacatcaacattcaacattgtgaaatgtgagtttagttctcaccaccagtaaaattaaatagaaacatgaaaaccaacaagaaataaagaatacaatgaatatttgcaaggattctacaaggaaagatggattgagaaagcaatcatccatcccacgaccctggaaaaagaatccatccacaatttatcataagaattataaatactctgaatataccctttttcttaagaggaacttctgttctcttgttctataagctaaagccccagccagtgtctgaattctcctcatttgaacctgtctccatctagtgaacacctggtcactaacattattcatcacttctcaaatcaacaacatctccctccctttcttttttttaaacttgtgataatccctctcaagtccctctcatgcacattgaccttgagcccatttttcatgaaaagagtgagtgacatcttttgctccacctggtgtccaggcaccagcacaaggcggtgccggagcagcaccgccgcagcaatggacttcatctgcaagtaagccaaatccttccccaaacatatccttgggccagcattgaatgccacaaacttgaaagagtcatgcatgatgaactttgttccatccaatgacaaccacctctcaggcctaaactccatgcaatcctcaccccatgtggacttcaacctccccgccgaatatatcgaatatgtgaccgacgaacccgccggcacgaatgtcccgtccggcagcacgtcgtcggccaccacatgctttgagtcctccggcactgaagggtacaaccttagtgtctccgacaatgcagccttgagataaaccaaacggtcaacttcctcaaaggccaaaggctcatcaaacaactttgccatgtcatcattgccacgtgtctccatcaggactgtacaaatttcacgtagaattttctcttccaccttagggttctgaatcaccaaccaaaaaaaccaacttaatgccaccgatgaggtgtcacgaccagctaggataaaattcaacgccacttgttggagaaacttgtctgaataggattcttttttcctcataacccttgtcaacaagtcatcatgaagagtcccatctttctgtgagtcaacaactctaccttgcgtttctcaatcacatttgacaaatggtcgtccacgtgggcaaggcttcggctcaagctgacttccatcccaagccgaagccattttttcaccttccacaatacctcaggtaaaatgaatcgttggagcgtggcttcagtggctcgatcgaaaagccgtggcaaatcggttatcgggcagacttgacacacaagtctgtgggtctcgcccgaaagccaacccacaaatattatcaaaagtgagccgaaga

SEQ ID NO: 20190 - DNA, 332 bp, Glycine max
  Clone ID: PAT_MRT3847_118235C.1
tcggccgtcgccctttttttacttatattatgcaatgaatcatgcggcctgccatcatgtgcaaggttataaagatctaatgagtcctcttttaccatcctattataaggcattaaaatcttcaataggatcatgaggacccattcaaattggcccaagctaattgcgtgaatcagaaatcatcccctatacacctgcgaatattggcctttgagtcccttatgctctccccattggatgtaacgtaaatgtgaatacagggataggtcaacattaggcctaactccgagaaactcgggtcttatcagagtgtcatggcacaacaccaaggc

SEQ ID NO: 20191 - DNA, 858 bp, Glycine max
  Clone ID: PAT_MRT3847_118236C.1
cggccgcccctttttttttttttttttttttaaaaaaaattcattaattttctcttttctttctattcattttcatttccatccagaatgtaatacgtaaattatttattttgtgctttgattctctattgcattgaggcaatatagtcatttcctaggctgctgcattacaaggtttgtgctaatctatggaatcgatgaaaaaagatcgaacaaaatacactgatttataaataaaataaaataaagtgcagcatgaataatgcctagtctcatctatctacagaactattaccggatgccatgttgggtttatatacttactatatacaatgccttttattattaaacagggaaggtcgtttccggtactcaatggaacgtgcacatcgcacgttttaactgagcaaactattccatcgttctttaagggcctcataagccttcggacaaggcatagccagcaatccccgccttccatcaatactagattcagttgctaagcccagccttaataatgtattgagtgccttgtcaatttgcatttcaacctttactttaaacacttcatacatgaatctctcacacttctctccaacactttgccgagaaataacctgactcttctctgctttgagcaggatggcataagccaaaatagcttccttgtattgctgctgttcagaagcatctagaagaaaatgcactgagccaaagccacttgccaatgttttttcataaagtgtcttgttgactaacaactgatacctatcccatgtctgtttgtagcctagaaccacacgactcccatatattattagggcacttacagcaactacatcaagtaatattgctgat

SEQ ID NO: 20192 - DNA, 308 bp, Glycine max
  Clone ID: PAT_MRT3847_118237C.1
tcggaggagattgatctgtctctgcctagccattgatttggaatcggccaagctgtatagatgagggtgctttagagtgatgcacttatagaaggcatcttatgaaacattgctgattacaagtgatagaacagtaaacacgtggagtccattgcactccagtatggccatgatatctattgatcaacactaggacaagcgatttagagtcacagctaagttgtcatacacgactttcactatgattgaaatcgagatgctttgtgaaacttaacacgtataatatgctgagaacatctgattgtatt

SEQ ID NO: 20193 - DNA, 420 bp, Glycine max
  Clone ID: PAT_MRT3847_118238C.1
ggcctggagattctggcatttccatgtaatcaatttggtaggcaggaaccagaaagcaatgataaaattgtggattttgtctgcagtcgcttcaaatctgaattccccatctttgataagattgaagtgaatggggacaattctgctcctttgtacaaattcttgaagttggggaaatggggaatttttggtgatgatattcagtggaacttttccaagtttgtggttgataagaatggacaagtagtgggtcgctattatcccaccacttctcctctcagccttgagcgagacattcaccagcttctgggtatttcttgaaggcaaaaagataatgtcttcctgagctcattatgttcccttatgtggtgaaaatgtaatgcaaatatgcacaaactgatgcaattaatcttatggaca

SEQ ID NO: 20194 - DNA, 337 bp, Glycine max
  unsure (1)..(337): unsure at all n locations
  Clone ID: PAT_MRT3847_118239C.1
tattgcatctgcaccaccaaaaaaattaataaaacaggtaccgagttttttaaaactaagttaattaattttagtaatatctccataaaattaaaataacttaagtaataattgtatttaataacaattcataattcatactccggtccacttctaactaaattagacaacccaacagaagtagatttttttaaataaaaaaatattaatagtgtacccaatttatccttgaatgatgtaaagacattaaaatctaaaaccattatccatcactgtcaaaaaaaaaaaaanaaaanaaaaaaaaaaaaaaaaaaaaaaaaaaaaaaaaaaagggcgg

SEQ ID NO: 20195 - DNA, 356 bp, Glycine max
  unsure (1)..(356): unsure at all n locations
  Clone ID: PAT_MRT3847_11823C.1
atccctaattaattcccttgtcgaccagcgctctaatccggggccgcccttattccntttgttttttttaaaacttttgggtttaaaaccacctccccggtaaaatcttctattcaccattaatcttttccattcgataccatctaaaccttggatttccattaactacactaccccctaatttctcttttaacatacataaacaatcctaactaattctcccaaatccttaaaaaattaatcctaatgtgggccctccttcctacattcggcttcctaaacaaaatacctcttattttaacggctcaacaacttctcccaaaacaacctttctcacctcatttccccttctaaaa

SEQ ID NO: 20196 - DNA, 422 bp, Glycine max
  Clone ID: PAT_MRT3847_118240C.1
tatcactttctcctttaatcgcaaccaccaccgatcccgaacccgtacctttgactttgttcgagcaacaataatggatcttcctccagaaatcgacggttacatcaaggaatccatcgatcacagcgtgggccttcccgtatcctcgcaaaccctcctcttcaagcttcacgcttccctagaatcgcagcgccaactccgcgaccagcacctcttcctcctcgcgaaattgaaggagaaagacgctctcatcgaacgcgctagagttttgtgaggcgaacatgaacgcccaagcggtgaagaggttcgttgaggagaatcagaagttggcggcggagtgtgagagtctggtggagcaacgcgtgaaattggagcaggaatgcgcgctctacgaccatgacagggaagcgttgatggagttt

SEQ ID NO: 20197 - DNA, 293 bp, Glycine max
  unsure (1)..(293): unsure at all n locations
  Clone ID: PAT_MRT3847_118241C.1
acncacaccacacacannccncaccccacacnancaaccataaaaacnccaaantaccaaccnacaacancaanaaacacacacancanancaccacnacaccaccacncncacannaanccnncannacacnaacaacacncacccanacanccancnnnnaccaccacaacacacaacacancaacncanancncacacnncnnnccnacacccacnnacnannanaanncccacaccaaanaccacccnnaanccaatcnacancancananacnccaancannananac

SEQ ID NO: 20198 - DNA, 674 bp, Glycine max
  Clone ID: PAT_MRT3847_118242C.1
agcgaagatgctagtccacgatgggttgtgcatgtcacagagtgggcagcttttgtcgagtccctaggagactccctgaaggatgcagtttttctcgtgactgacacagatcttgttaagacacatgagtcgggaagcctaagtgtggtcgcttacctggtatatcgacacagtggatggcctgcttgccgaagtggttcaatgaatgtgactagcggaaatcagcctctagtcatcaagtgtattgtacacgtgcacaaactcggtggcaattctcttttcactatacacagtgactgacagtgctcttgtgagatcacttaaagaactctgaaatcctaactgcattggtatgtagagatatgcttcataatccacgtatggatctcatatgtatggagtctgatatggtagactccatcactgggaatatgcatcacctgcgctctagattatccttataaagaaaacgttgacgactatgactttggatctgatgtggaccatctctcgctggggtgaaatatgtgaataacttactatacgatcgtacctttttcctccagctcactgcagagcttaggattggctccaactgatgaagactctgggctgcctatattttttgagcttttcgtgcctacaattaagtcagactcgttggctatgaacct

SEQ ID NO: 20199 - DNA, 797 bp, Glycine max
  unsure (1)..(797): unsure at all n locations
  Clone ID: PAT_MRT3847_118243C.1
ccacgcgtccgcacaaactatggtgttccttaattgctccgcccattggcatatttccctcctataaataaattctcaatctttttcttcttcatttttcatttttcatttattcatctttcttgggtgatccaatgcctatggcgacgacccatttccagggattgggagttgtgaccccatcattctcttcttcccactccaacaagttcctgctttcttctcgttcagagaggaaagatggcatatttatggttagatctgatgcagcaagggttctgaagactgaaggtcgtaagcatgaattgttggttactaatgcagttgcaacaaagggaggagccagttctgcggcttctacctcaaaatctggatctgggcatgaacttctcctttttgaggccctacgtgaaggtttggaggaagaaatggagagggatccttgtgtatgtgtcatgggtgaagatgtaggtcattatggaggatcttataaggtgactaaaggccttgccccaaagtttggggaccttagagttttggatacccctattgctgagaatgcctttacagggatgggcattggagctgccatgactggtctgaggccagttgttgagggcatgaacatgggatttctacttctggcatttaaccagatctctaataattgtggcatgctgcattacacatctggaggccagttcaaataccaattgtcattcgtggacctggtggagntgggcggcaacttgnagcagagcactcacagcgattggagtcatattttcaatcaatcc

SEQ ID NO: 20200 - DNA, 627 bp, Glycine max
  Clone ID: PAT_MRT3847_118244C.1
cccacgcgtccgcgccgctaatcactatgaaacaaaatgcccgatctcatttcgaataaattgaaaagcaaggaaacgaactctcaactgaactataagcaaacccttcagatcgagggtgagagttgctttcgcttgtctcgcttagggattagtcaaatcaaactcttcagttccgaagatgaaaacagtttccgattggatcgattcgtgttcgaaagagcaattgaagacttaccaggactggttcaacttagccgactcagacggagatggccgcatcactggaaatgatgcaaccaaattctttgctctctccaacttatctcgctctcaactcaagcaggtttgggctattgctgatgccaaaagacaaggatatttgggttttcaagagtttgttatggcaatgcagctcgttgccctggcacaggtgggacacgatatcaactcagatatccttaaaactgaaattgacaaggaaaatattaaatctcccgtaatggaagggctagatgctctaatagcaaaaacaaagagtttgacagtaaatgcccaacctgatgtatttgggactgctatacctcagcctttgccactcaattcatgggctgctccaaaatctgt

SEQ ID NO: 20201 - DNA, 159 bp, Glycine max
  Clone ID: PAT_MRT3847_118245C.1
atggcatcctcttatcaacaaaacccttcaacagagcaacaagaaacttccaccaacactaatagaagtattcaacctccaacgtcttttgtgacgatgcagagggaaatgggttttgacttaatccttattcctagacataaagaagaatgtaggaaa

SEQ ID NO: 20202 - DNA, 364 bp, Glycine max
  Clone ID: PAT_MRT3847_118246C.1
ggctgctattgcgttgtatgtcacacccttccagctgcctattcttctgactggattctacttgatgaggcaccccatgcttcgaagcaaggtgccgcctgctccggttaatttcttccgcaggttgccttctctcacagacagcatgctgtaaatggacactcttggtgtgttcttgaatcttgaaaacttatctgctgctgccagtgtttgaatctggcattagtttttggcagtggttgtagaatcattggagctatctcactttgtgttggtttattgagtgttgactgttgatgcaactgcatacttagtgtggtaaaactccaatgtagttttcatgttaatcagcgtttgtgaactt

SEQ ID NO: 20203 - DNA, 540 bp, Glycine max
  Clone ID: PAT_MRT3847_118247C.1
cacccaacatatttaatttttttttaggggctttgttttgtattaaaacctcacttctaaattacccagttcaaacaatacaatgataataaataagggggggaaaaaagtttttgggaaaggatgaatcaataatccaataaaaaactttgggggccaaccaaaaacatagtcctacatgggaatttaaagggcccggttttttttacattaagggggaaactgagggtaacggtttttgtcaaggcaaaaattgaaaagggggtatttcctgggcacccacctgagccattttctttgaaaaacatcaaaaacatgattctgggcttgaacccaccaccttttgccttggggagaaaaaaaatttgctttcactgaaattttacacccattaagggggaaccctttgtattttgctaaaaagggggctttggaccaatttgttttttccaaacccccctttggggcccagttataaatattccaaaagctgggggacacctttaggggggggtcaaaggggaacttttttcccaaacc

SEQ ID NO: 20204 - DNA, 373 bp, Glycine max
  Clone ID: PAT_MRT3847_118248C.1
ggacaacagttttcccagagagaacaaataataccatcacttgctcggctccgttaacaaaacaagaccaaaaggagaatggagtaccaatcttttggaagagtccagagaccaaaaggggctaacataatgcaggcattgaaggtgatcctggttttggctgttggtgcatggctgttatatcaggtcaagcactcgagaaacgatacagagaactatagcgatcaaaccgagtttgatggagctatattgttggggcgtaaagggatgccatcacggttagatgaaatggattttcctgactcaggaaatgtagattctgcaggagaagctaatgagtcaagtaatggcagggatgatgggtctggtggag

SEQ ID NO: 20205 - DNA, 297 bp, Glycine max
  Clone ID: PAT_MRT3847_118249C.1
catcggactgtcactccttcctccttaaacatcaccatagctgccaacaccaccatacccacccagatttggcaaaccactattcaccatcaccacgcacggctctaacatttttgggcttggtggaggtggatttggtcgttgtaatggtgtttggctcgttaatggtggattttgtgatggcggagggtggagacattgcgacaactcatagttctagtggtgccatggttgcatgcatgtaggtgagggagatagagcgacgagcaacatgggtgtttggagtggaggtggtgc

SEQ ID NO: 20206 - DNA, 1692 bp, Glycine max
  Clone ID: PAT_MRT3847_11824C.1
tgttttttcttttttttttttttcttattgaataagcacttaaaattttgtataaaacttgatacacggctaattgcatatgactaagggaaaagcaaatgattggcaaggttcaaacagttttaaaaatttagtaaatcaatacatgatttgctgctttaaaaaggaatgatataaaatacaaatcataatggactgctctcccctattaaaaagacataatcaaaataaaaaattaaattaataaaaaaatcatcactagtatactgtaaagaacaatatacaggggaaaaaaaaacaagtggtttctttccctccaggggcctcctcttttatgtgtaggaaaaagatgtccacaacctactgtatcattaatactttggcaaatagaattttcaatgttcaattttgtagtttgccctcactgaataattaatagctactttgtgttcataaaggattaggaatgtttagatatcttggatcatgcaaggagctgatcgccaaaagatccaacgggtgaacgggggtggttgaaatggcgtgaaggtagtggcaaagataaactgacaaacaaaaagtagaaagtagtgagctattaagatatcttccaaatctgaaaaggggtcaattctcaattggaagttaagagttctacttgccaaagcctcaagagttgaaagaccgttttatggatttttttcccctttacctataaatgatacaaaatgtacacacagcacgacatcttaggaccatgatgcttatatctgcctttcttaaaacagccagtgtttcctctttggtttatgctggattggtgcatctcggatttcatataatgaattgtaatgaacctcacaccaaaagctcaaccacagttcacgctgtggtgcttggtacagtggcataatttctataaagcaagtgtctctgaatgatgttagaaggcatatctttgcagaaaacttatccgcagctgcctgtaaggtaacatggtccccccattctgcagttttagccattttcttgtggtattttttgtacttcattggtacagcattcatataaggaacggtgatctttgagctgtttcactatctctttgcgaacatgcttgtggtgttcaggtgacctatacaactgatcggaaagtgcacggaactgacaatttccatctccagataccttgacctcacataaaccatacacattcaacctctgaagcaggcgctggtgatccatactggcatcacttacagtggggataaaggaatttatccggggtacatgacgaacaggttccaagttggtaaggcgccggccaactgctccatctaatttggcatactcttcagacagcacaagagcaatcatcctgtcatcctccacatcctgctgactgctatgggaagttgaacccgaactttcgccccaatactcagtctgagtaccatttccattaatcataatatcctgacccaacactataagtttcaacctgaaggcaaattttaacaactatccacagcaactgaaccctgtgatttctgatgcgagtgaaagatgatgcaatgaataatgggtgcgaaggtggaaaaagaaagaaggtagctagtaaggtgtgaagattaaaaaaaggttggtttcaattcccgccccacgcgtccgcccacagagagagactgctcg

SEQ ID NO: 20207 - DNA, 408 bp, Glycine max
  Clone ID: PAT_MRT3847_118250C.1
acacaattcattacctaccaatataattaaagcggggagtcaatttttaaaacaaactctacttccaaacctatatttataacttaattatcaccttttcaaatctaaccaacattcctttttttcatttattattccaatctcttatctaacactaattcaataataatctttatacacaactttaattaaaaaaaacaaagttcctatcattcttttttttattaccctctcctttcctcatatatttaatttcccaattcaaaatctcttatatatcttctatatctttctttttacatatttttaatagtatatcctttttttaaaacatattcccctatcaaaaataaataaacattatctttttataactactttctattctttactttttaaattatattt

SEQ ID NO: 20208 - DNA, 711 bp, Glycine max
  Clone ID: PAT_MRT3847_118251C.1
gtgtaaccgccctctcctgtcttcaccgttcctctctttttccgacgcgcaaacactcacacaaatttcgtttctatttccgactacaactctctttccccaattctccgatgaccggcggcgacgagcgtcaccggacggagacctaaaaacatctctcacacacacactcattctccggcaggcatgtccgaggacgcggacctcgctctgcagaccttccgcgcgctggtggagagcgcggaccggaagttcggccgtgtacgcgacgtgccagcgtatggcggcggcgcgagccagtatcagcagcagcaccacgcgttccagaaggtgttcaaggcgtacacgaggctctggaagcaccagcaggagaaccgcgcgaagctggtagagtgcgggttgaagcggtgggaacttggtgagatcgcgagccgaatcggacagctgtatttcgggcagtacatgaggagcagcgagtgcaggttcctcgtcgaggcctacgtcttctacgaggccatactcagtagaaggtacttccaaggatccgaactcaacgccaaagatctcggagtgaggtccaaggagttgaggttctacgcgcgctttttgctcgtttcggttattctcaaccgcaccgagatggttaagcacctcgtcgaacgctttggggctttggttgaggattgcaggactacctttcgggtaatgcat

SEQ ID NO: 20209 - DNA, 301 bp, Glycine max
  Clone ID: PAT_MRT3847_118252C.1
ggccgttttattgatgacctaatgtcgcatcataggcggttgcatgttacacactggttgtgaactacttcatcttggaaagatcacgcctatagtaggcatggtgtatcgggatcagtctctggtctactgtgaatctctgtttgctatctggaagatgccgatcgcatgttttagctttgtgcgtaagagcgctgtattttttgcgctactagattagcgacctgatcatatgtatgcttgattatagggattctagccaccaccatgaacaaaagccaatggagggctttgtgaatgc

SEQ ID NO: 20210 - DNA, 212 bp, Glycine max
  Clone ID: PAT_MRT3847_118253C.1
gggcagagtttaggccacacacgttgttggagaagcttccgacacgagagtgcaaccttgtggtactggagcccctcgcttatccggtgttacaggctggtcccaagatctgtctggcgcaggacctggacttaatgcagatccacacgttggtggctggtactctcaggacgtgcatcgtgattccaatacccagcccacgggcctagcct

SEQ ID NO: 20211 - DNA, 401 bp, Glycine max
  Clone ID: PAT_MRT3847_118254C.1
aagaaacctaaaaattaatattaggccccctgattaattgggccaaaacatgaaaaaatttacaggggggactcaggggactgcaaaaaaaacaaaatcctacattcacttgcatatgcaagctgatgtccaacaaaaaatgggcatcactaacacatgcaagtttgtaaaaagaaaaaatcaaggttaaaccttccagagggcccaaatttaaagacttttttttgcagtcccaaaacgggaatcactctttttttttccaaagggctttaaggggtagacatcccaacccccatccctccaatgggggatataaacgggggggaacatgttgactctccaataatcctcacctccattgggacccagggctgaaatcaatttttcgggcatatcaaaaa

SEQ ID NO: 20212 - DNA, 457 bp, Glycine max
  Clone ID: PAT_MRT3847_118255C.1
tctagccttaatcatgaagaagtctttttctaaaggaaccgatcgcccctgtcaatcttcgggggcgcaataatagcagacaccaaatgcttcctctcaaatgccttaagcagacccactgtatacctgtcaatgacggaccccgaggtcagaacatacgaacaccgtatgcttaagttcctcaaggtacgggggaaccttaaccggctaccatgcgtcggaaccgtaaggatgtgatggactgcggtcattcttctgtcctgaactgaagctgcttgcggtgggacatgagctactgagtccggggggactgatatctgaaccaccaactcagacacgaaatgatcgaaaaattcgaagaatttctgggtcacagaacattacctaatggtaaggatctgagaaacaagatgggcggcaaaaccaagtcttacgagctgactcgcgccgagtttga

SEQ ID NO: 20213 - DNA, 534 bp, Glycine max
  Clone ID: PAT_MRT3847_118256C.1
tgttgcccaaattgagtcttgactaaacaaatttgcctcattttcgtttgtgtgtgcttcttttgtacatatacacatgactaacatggacacaatacatcgacatgatcaatactaattgaatcatacttgttcagtacaattgttcattacaagggatttcagtttgtgtctgtatatttgattgttgaatgaatttaccatgcagttggatgctccacttacaacaatgatgagaagccctcctcccattgttacgacttcaacatctgttggttatgtagttgatttaattttagagaaacgatacccaatggttattgtcgtaaattacagaaattcatatgctactactcaatacagctctagagcagttggagtttttacatcagaccaattgagtaggtttatcacacctgtatctcaagtaaaagggacacacctttcagcctacaaaaggtaaatatatcacgtctagcttgaccaaaatgtcaaattcgttttttttttttaattttttttcttagtacatgc

SEQ ID NO: 20214 - DNA, 314 bp, Glycine max
  Clone ID: PAT_MRT3847_118257C.1
acaacacaaaagagggggcctaaaaaaacaaagggggcgaccacaaaccaccactgcaccaaaacaaacacagaacctaccgcatctaccaaacccaaaaagcatgtccagcgctcccaacagaccacaaaacacaacaaccaccgcgatcgggaacaaaaaacctacaccgtattacccctcaaagaaagacaacaaaaccgaaggacacagcaaaatgatagcatcaaaaaacactctttcatccccagccagctgggcagacacagccaattccagaaggcggaacaagcctccactggggaggaggaaca

SEQ ID NO: 20215 - DNA, 184 bp, Glycine max
  Clone ID: PAT_MRT3847_118258C.1
gggagaaacataaaaccataacattaaaattggttattactaatgaatacagggacacactaaaaaaaaatacaatgataattagtaatcactaataattacttatgcacaaaaaaactttttcttaataaactaacatacagtgacttttaaaacccaccctataattataatacaatgcaat

SEQ ID NO: 20216 - DNA, 380 bp, Glycine max
  Clone ID: PAT_MRT3847_118259C.1
gagctagagctcctttctacatatttgctatggacctatgcattggaatagcaccccacactggccacacgtgcatgctctggcacatgtatgtacatgcgagctgtcattggtcaaacacaggcgtttgcctcaattcttggcccgacatctgcttagatatccagctatgggagaaagaatgttcattttagcttgcagccactcttaattgggcttaaaattgactgtgctgccgctaaaccagagacagttgagacagagtgcataataactgagaagctgctggctatgcctgaaactgatgtatgtgactgtggagtcaaaatttgcaactcttggcgctgattcgcttgacacggatgacagcgagatggcgc

SEQ ID NO: 20217 - DNA, 1521 bp, Glycine max
  unsure (1)..(1521): unsure at all n locations
  Clone ID: PAT_MRT3847_11825C.1
gcaagctcggaattcggctcgaggtctacccttatctctgaccatttctttctctgaagccaactccaaaactaacagacagaaagaaagagaaaaagaaacccaattcctgtttcaactgaaacacagcacacacaacaatcatcaatttctctacaaaaaataaccccacaaagaaaacaaactgaaacaacagcaaaaaagaaatcttcacctcagcttcctctgttccgtccttcctcgtcgccgcgccggagcatctcgccgccgtcatccaccgcatcattcgcgagggaactcggaggtcatcgaattcgcgaagatgtcgcggttcccgttcttcaaccgttcgaacacgattcactcgacgaaatcggaatcctcgcagaaaccctacctcgtccaccaccacctccacaatcttgaccggtccggttcggtgaaccgcttctacggttcagtggactccatgaaatcctcaatccgcggaaaaatggtgaagaagctctgcaccttattcgaatcctccaaaaaacccttgccagaaccagaatccgaatctgaatcgttttcttcttcaaaatcacgttcaaaaacagattcagattcgtgcattactatattgtttcgattacccggcacagaggacagaatagttgtgtatttaacgagccttcgcgggattcggagaactttcgaggattgcaacgcggtccgcatgatcctgaaggggttcagggtttgggtggacgagagggatgtgtctatggacttgagctacagggaggagctgcagcatgtgcctggggagcaccatgtggcgctcccccaagtttttatacgagggaagtacattggtggtgctgatgtgatcaagcatttgtttgagagtggtgacttggcgaagatgattctggaagggctccccaagctgaaacccgggttcgtgtgtgacaattgtggggacgcgaggttcgtgccgtgcgagaattgcagtgggagcaggaaggtgtttgatgaggatgaaggggaattgaagaggtgcttggaatgcaatgagaatggactcctcaggtgtccgtattgctgttcttgattttgattaatgatgattttcatgggggttaattgggttgttgctcgttgaacatgtgttttgttttgttcaagactgggtgttttattttcttttcttggattgagatggaaaactggggtgagtgggggatgtgtatattatattctaatggagggtgtaaatatttagtggtgtacaagaatttgctaaatattggttgttgatggatgatagctttctaatgggaattatgggatgttttaatatatccctttattagtctaatctcggatccaagttctgtatatatattttttttactcacagattttttagagataatcttgttggtgagacagtaaaaatactaaaagttaatatctacatcatatctttgttaatcatgttgttttggtactagctactanctctgtgctagattc

SEQ ID NO: 20218 - DNA, 478 bp, Glycine max
  Clone ID: PAT_MRT3847_118260C.1
agcttgttgttttcaatccaaaggctatcctcccttgtttcgtggtcatttacaaagttcctttgtgttagtttagttaatgcacgtttagacatccgttaaaaagtcattcaacggaaagaaaaacacatttttagacacctaagttgaactaactctcttgttaagtttgacagaatgtttgttacattcaacgaaacagtttcgcaaacataatcttgatagtagctagaagtagtaatttgcatttgtagtaatacaatatatatctttcaattttcacaactcaacccaataacaataacaatgaataagttactagttgttattgtcaatctgtatatttcagttacaacagaatgactagtaatttattgatcgttaattatattatatggggtgtgaaatactactgaaatatatattgtgaaagtgtaacaatattatataacattgagtgatggaattagaatgttgt

SEQ ID NO: 20219 - DNA, 424 bp, Glycine max
  Clone ID: PAT_MRT3847_118261C.1
gtgggaggggtgcgaatggttaacaataccataatacaggacattatttcaaatctgagacagacattgacaactttaagtaaacctgaccgcaagactacacctggtactaagctgttaaagcgcactgaaatattacccacttgctcattgaactcgaagctcactggataccaagctgaagtggaaccttatcactcgcatgacctgaccaggccgcaattctctatacgacatgctattgaggggaaggtggacaattggtttcagggcttgagaagatcgaaatccaagactttctgtacataggtctgccatgggtactgaggctttaattgaacataaggaatctttatcaggtgaagaaacttatgtacaagataaacgtcataaatgcctgtgttcatactttgaccgaggatag

SEQ ID NO: 20220 - DNA, 253 bp, Glycine max
  Clone ID: PAT_MRT3847_118262C.1
ggctaccattttgcttttgaccttcctttctttcaattaatgcagggccactacccaacacggttataggaaacttcaaaggttatcttctggatccccccacccaccctaccaaaccgcttatcactttcaaccctccaagaattggattaatggtccccatgggccattgagaatatccagacttttccaaccaattctatcaatacaatcctaaaggggccgtttggggaaatattgggggggcacattc

SEQ ID NO: 20221 - DNA, 257 bp, Glycine max
  unsure (1)..(257): unsure at all n locations
  Clone ID: PAT_MRT3847_118263C.1
ggtttccaaatgaaacatggtaagtgaatttgcctgttgaggaagtgcctcctgaacttcctagttgcagcattgaggtataaagctttcgccaggtgcacggcatcgcaagaagaagtatatanggctatgcactgtgtatgcagttgcacagtagactacatgagctagcttgcttcgtcgcgtttctaattttgcgtgtcccgctgttgggatttcggtgaagagatgaacaggaataaggcttttctcagatg

SEQ ID NO: 20222 - DNA, 1540 bp, Glycine max
  Clone ID: PAT_MRT3847_118264C.1
tctcgagccggaacaagtctgggctcgaagtgcagagtaggatacttctttcaaatttatgtgatcgggaaccctaaacccccaaagcctttgactttgttcaatccttcgacatgagtatgacccaattcgccatggttgaggaattggcttttcttgtcaaggacaatcttccttgcaagcatttagttctcacaatggaagaatcccttgttaactttcttcaggatgatgacactagttcagatgggatcttggaattggagccaatgaactcttacaatcgtcttctattgcatcgccttgctgaaatatttgggtttgcacatgaatcggttggcgaaggagatgatcgccatttgattctggaaagatgtccagatacgtccatacctccagtccttgttagtgatatcctatggaagtatgatgatgaacctcaatctttggttacatcccaccaaatattaaggagaagtgaatcctctccagtattgcagaaaaacacagcatccctttcacagtcactagaggagagaaaagcagcttatttaattgctcgtgagcgaattttctctatgaagttggaagaggtaaaagagcctggtgaacaaaagccacggagtgtgcctgtggttgcccgcagaatgattgcccatgccctaggtcaaagaatccatacaaagaatcagaatgacttggctagtgatagtatgaaggatggagtcctcacagatgaattgaatgctcatgataagaatatggaagagtccactctcaagaaagtttctgaagagtcttcacacctaagagggaattcaaacaacagcataagaaacacgagcagttctaatgcagcctcacttaataaaaggaatgatcaaacaacagttgacaaagatttgccagaattctctcaagaaagaaaacaagggcttagtgtaagtaaagactacataaaaaaggagcacttaggagctgcaaagagaatgtttgctcatgctttaggagtgcattctgggaaggatggttctgttcctagaagtagaagtggagaaataaagaagaattagatgaaaaggttgtgaaatatttaaaagcagaatggtattctgttgctccaaatggacctggataggtgctccccaagtttcaatcaagcacgaagatgagtaacgagcatgctttactcaggagattcatgcgaaagactatcgtagtataaagtgaaagggaattcttgaaaaaaactatccagaatcaagtttgacctgatttggagtgaacaggttatggtgttttggcccctcgtctatatgttgttgtaagacatgtagttccagtttcattctactgtgtttagtctattctgtcaacgtgatggtttttgttatggctgttcccaggggatgatttcccgtcatggtgggtgttatgtatataatatgtaaaatcacaaatttcttgtgtcgtgtttagaaattccaaatttcttcctcgtttcccttctatggttacacaattatgtcatttgttacag

SEQ ID NO: 20223 - DNA, 1312 bp, Glycine max
  Clone ID: PAT_MRT3847_118265C.1
ctcgagccgaatcggctcgagccaaatatctcagcaaggcgatgcaataaaagacggttgtaagagttcattgggtttgcacatgaatcggttggtgaaggagatgatcgccatttgattctggaaagatgtccagatacgtccatacctccaatccttgttagtgatatcctatggaagtatgatgaaccacaatctttggttacatcccaccaaatattaaggagaagtgtagcctctccagtctcgcagaaaaacacagcatccctttcacagtcactgcaggagagaaaagcagcttatttaattgcccgtgagcgaattttctctatgaagttggaagaggtaaaagagcctggtgaacaaaagccgcggagtgtgcctgtggttgcccgcagaatgattgcccatgcccttggtcaaagaatccatacaaagaatcagaatgacttggctagtgatagtatgaaggatggagtcctcacagatgaattgagtgcacaagataagaatcaggaagagtccactctcaagaaagtttctgaagagtcttcacacctaagagggaattcaaacaacagaataagaaacaacagttctaatgcagccacacttaataaaaggaaggatcaaacaacagttgacaaagatttgccacaattctctgcagaaagaaaacaagggctaagtgtaagtaaagactacatgaaaaaggagcacttgggagctgcaaagagaatgtttgctcatgctttaggagtgcattctgggaaggatggttctgttcctagaagtagaagtggagaaataaagaagaattagatgaaaaggttgtgaaatatttaaatcagaagggcattctgttgctccaaatggacctggataggtgctccccaagtctcaatcaagagcacgaaggtgagtgatgagcatgctttactcaggagattcatgcaaaagactatcgtagtatagtgttggttgcttagttctctctgattgtactggagaatttccaagcagccaagtgaaagggcatattgaaaaaactatccagaatcaagtttcacctgttttggagtgaacaggttatggtgttttggcccctcatctatatgttgttgtaagatatggtagttccagattcattttactgtgtttagtttattctgtcaaagtgatggttttcgttatggctgttcccaggggatgatttcccctatcatagcgggtgttatgtatataatatttaaaatctcaaatttcttgtgtcatgtttagaaattccaaatttcttcctcgtttcccttct

SEQ ID NO: 20224 - DNA, 148 bp, Glycine max
  Clone ID: PAT_MRT3847_118266C.1
tttttactcaaaagagctgattagagcggaagagaataattggatccggtaaattaaacaccactttaattcccatgggatcgaatataaaacaagaattcaaccccacatctaagaagatgcattattgcttgaaagacaatatgta

SEQ ID NO: 20225 - DNA, 560 bp, Glycine max
  unsure (1)..(560): unsure at all n locations
  Clone ID: PAT_MRT3847_118267C.1
aagtgcataaaaggttgatgtagaaaagattttggtacccggttcattatgttttgttgcagccactgccagaaagattgtaaagaaagtagaacccgctaaatggccaaaacgaccttttagacttgtcctagaccagctttatgaaagatgagctccacctcgcattgcttatgggaattgtacaatgaagactaagcgttagaaccatcaaaactgccctgcgcactttgtcgtcttttttctctccaattctctccccacatcttggcttcagccacggcacgttctctatcaagatccctgttgttgctgtttaacatccttgcagtttcacgtggggagtcatctttctcagatccttccaaatcccatctgcctccagatcctcctcctccaccttcaccatttttcaatactctgttccttttatcgtcaccagctccccccctatggtcatatgcctggntggctagaaacgaaagggctgtcaccacatccccaatgagaggacgtgctgcagcctgttcttgaatgacattgatgccacagctagagct

SEQ ID NO: 20226 - DNA, 233 bp, Glycine max
  Clone ID: PAT_MRT3847_118268C.1
ggctcgaggaactctcacactgtaaatcttgtagagttgatgggatgagcacattctgcatttcttgcgctgtggaagtactcgacttccattcggataagaactgcatggctagccgcgacacatgtgtaattcagacacagggctgttaaaggagacagaagagctttggatctatatggggatcgctgggatgctgaccatcgcttgtaacaccaactacctcttggacc

SEQ ID NO: 20227 - DNA, 191 bp, Glycine max
  unsure (1)..(191): unsure at all n locations
  Clone ID: PAT_MRT3847_118269C.1
tttctcactccctgtgtatgcngctgaggattccgaacgagtcgaccttcttcgtttcccgcaaagtttaagttaacacgggtaaggaaaaggtcacaacaacattgccgtcattggccatgtcgacccgggaaagtcaactagcactggtcacctgatctacaaactttggggtattgacaagcgtgtga

SEQ ID NO: 20228 - DNA, 317 bp, Glycine max
  Clone ID: PAT_MRT3847_11826C.1
caagattcaacaaggacgtagagaaagctcatacctatatactactaaacaaccggaaggaagcaaactagtctactgggaactggaagaaaaacctccagcaagcaacttgcaaccaacactacacttaactatacaccatcaactgtgtgtgagaacaaccctcatcggtatcaccatggaactgatgctactacgaaaattaggaaataccagatcagcactcatctactaatcaagaatcttacttcacagacgtcaattctaaaaatatcccaacataccatgactgctctgcgagcacatatacttactaa

SEQ ID NO: 20229 - DNA, 514 bp, Glycine max
  Clone ID: PAT_MRT3847_118270C.1
ccaagctggaaccgatggtgctaagccttatgattttatggattgtcgggttggaacactgcgttccactttggatgcttaaaggtttcaacatgtttctataatggcctattccgcaaaatatgcaaattctttttatgggccatttagaaaggcactaaactcaaacccccgggttggggacgagaaaacttattcgattaaccccgcttattaccgaaaagcttttactgaaatgccggacgatgaatcttaaggaactgacattcttttggtgaagcctggacctccttacttggattttataaggctgctcaaggattattttgctttgccaattgcagcataccagggttcttgggatattgcaaagattaaggctggctgtgctctccaaatgattcacgaaaagaacggtatgatggaggtcctgatgtgcctccaaatggccggtgctgatatcagtctgccatattctgctgtgcaaactgccaaagtttgtgtggagagaaaa

SEQ ID NO: 20230 - DNA, 706 bp, Glycine max
  Clone ID: PAT_MRT3847_118271C.1
cccacgcgtccgcccacgcgtccgcggactcgtgggtccacccaatgatgctgttttcagtagcgatgcagagccatatgtaaaacccataatagacttcctagtgagaaatgaggcgccacttcttgccaatgtgtacccttactttgcttatgcgaatgatcaacaaaacagtattcctcttgcctatgctctttttacccaacaaggaaacaacgacgctgggtaccaaaacctcttcgatgctatgttggattcaatatacgctgcagtggagaaagtgggagcatccaatttgcagatagtggtttctgagagtgggtggccatctgaaggtggtggaactggagcatcaatcgataatgcaggcacttacaatgctaatttgattagtcatgcctcgggtgggagtggaactccaaagaggcctggtgggtctatagagacttacttgtttgccatgtttgacgaaaaccagaagcaagatgctgaaactgagcgtcattttggtctcttcaggcctgataaatcacccaaataccaactcaatttcaattaattgaaattaccagaactatgttcctatatttatttactttgaattagtgtgtcaagtatgcacatctgttaagaaatgccataatttagttttgtaatattttttttatttgctttgtttaaataatacaaaccaaatttctattgg

SEQ ID NO: 20231 - DNA, 1255 bp, Glycine max
  Clone ID: PAT_MRT3847_118272C.1
atatagtaaaatattgataatagaattattatttaaaataaactttgctcgtaaatgggtacataaagactccaacaatcaatagtgcagataaagctccatacggaccatacctgcctgcctcttctagaacaattatggaagtttgatttggaatcatagcccttatttcttatacagtatgcttctagtaactaattcaaattaattgagtatttaggctgtttatttggaaggaagagcccccaaaacttctcatactctggttgcttctgattttcatcaaacatggcaaacacataagtttcaaggggtctattaggcctctttggggtcccttgtttcacattccgaaccaagtttgtgttgtaagttcttgcattatcaagtgaagtggctgttccaccagaagaaggccatccactctcagacacaactatgttcagtgaccctcctcctgctttctccaatgcagcataaacagcatccaccatagcattaaaaaggttacggtaaccaagtgaaccatcttgcactaccactgaaggagacctaaaaagtgcatagtcaagaataatgtccctagggtttccaatgtaagcgaaataagggtacacattaaccaataatggggcattattgttcactagatgtctaatgacaccatcaagatatgatgttaaatagtcagacctaaaagagccccttgatggagggtatgattctgccaaggcaccagtttcaatggcagtggaaacttttatttggtttccaaggccagccgcagaaacggctctttggatgttttggattgcaggcactacaaaacgtgcaaatgagtcccaaggttttacttcatttcccacagtaatgtacctgaatctgacattccaaaagtttctgacattgtcttgcacccatctgtttgcgttgtcttggctagaagctacatattggaggtcgatgttaggaagatctagcagcaactcaatgttggaatctctcagagcttggaggacttcatggtttcgatcatagattctcatcctttggaagccgtactgtttaaaaagggaaactacttcttgtggcgatggcagattgttgccaactcttccatagcatacaccagattgtgcacctgttgtgcctgtattactgataagaagcataaacaggaggagtattgaagtcatggaagaggtttttccagaatgggattgagccataaataggttaaggcggacgcgtgaaa

SEQ ID NO: 20232 - DNA, 606 bp, Glycine max
  Clone ID: PAT_MRT3847_118273C.1
agctgctagaaaattcggtttttggcttctgggtatttggttgaaacctttcttatgtgctgagtaaaggttaaagggggcaaacattggatcttttctacttgagggtggtgagtggggaactgaaagtgtgagtttgtagtgttcttttgcagaaatctgagtgaatggagcctcctacggggttttgtgcttctttgttgagtttcatccggtttcttccttttttcattgggcttctgcttcttggcaccatcaaaggtatccttttctgccctttgatatgcttaataattgcaactgggaacactgctatcatacttggactttggatagtgcattctgtttggacatattactgcgttgtgagagctaaacaatttgggcctattctgaagcttgttattggcctatgtgtactaccagtgctgttggttgagtatgccattgctggtattctaggaagtattgctggaggagcagcctatggatttctctcacccatatgtgctactttgtaagctgtagaagaaggaaaagatgacaaattttaccactgcttcattggtggttcatggtgcactgttgaaaagagctgcatggttg

SEQ ID NO: 20233 - DNA, 501 bp, Glycine max
  Clone ID: PAT_MRT3847_118274C.1
tgtgtgtccaaacacacttttatccaacaccattctcactcagttcctcttcctcgtgctttgaaaagtaaaatccaatacaattcacctaaaaaaatccctctgcagagagcatgtctctcagtagcaaacgagcggctaagctggacagctggtgacaccagcattgcagtgtttgtcagggattagtcaagcaatcaatacactatgcaaaactaaatcataattttcattttttatttttttaaaagttgaatttcaaaccaaacctctgtgctcatcggaagcatcatgatacacctcatgctcctcctccggcacaggcggaagctccaccggttccccaacctgcacaacaagaccaccagcaccggtaccgttaccgttaccgttatcgttctcctcggggtagcgcacaaccacaacgggacacacgcaatggtgcacgcagtaatcactaacactcccgagcctccccttcgcggctcgcttcgacgcgcc

SEQ ID NO: 20234 - DNA, 329 bp, Glycine max
  unsure (1)..(329): unsure at all n locations
  Clone ID: PAT_MRT3847_118275C.1
ctgngtcatatggtgctgcagcctcatgcaggattgatgctcttgcagagctccttcccattaaggaagtgaggcatgaggatgacggaccgggcaaacactgggggcaccaccaacaaatacaacatcatggacagatctctggcacatcctaagaacttattaaagactaggactgtctgtgagtagggctagcagaactatatcttatagagcctcctcaaccatagcaaagagaaaaggtgtaggaggaaacaattacctcctcgcagagaatcattcgcagagaggagaagggacaagtgaggatcgagttctcaagggcatgg

SEQ ID NO: 20235 - DNA, 1398 bp, Glycine max
  Clone ID: PAT_MRT3847_118276C.1
ggctcagtggctgcagtgcttgacccctcagtagtgtgaatgacgccatagaaattggaggggaaaaaaatctaatggcccaatacaagccgcctcatttgtctattaaacgagctagttttggagcctaaattgtcattcccttgtatcacttttgcttccttaacctattttgttatcctcaattttcaatggctcaatcccattctggaaaaacctcttccatgacttcaatactcctcctgtttatgcttcttatcagtaatacaggcacaacaggtgcacaatctggtgtatgctatggaagagttggcaacaatctgccatcgccacaagaagtagtttccctttttaaacagtacggcttccaaaggatgagaatctatgatcgaaaccatgaagtcctccaagctctgagagattccaacattgagttgctgctagatcttcctaacatcgacctccaatatgtagcttccagccaagacaacgcaaacagatgggtgcaagacaatgtcagaaacttttggaatgtcagattcaggtacattactgtgggaaatgaagtgaagccttgggactcatttgcacagtttgtagtgcctgcaatgcaaaacatccaaagagcaatttctaatgctggccttggaaaccaaatcaaagtttccactgccattgagtctggtgcattggcagaatcataccctccatcaagaggctcatttaggtctgattatagaacatcatatcttgatggtgtcatcagatttttagtgaacaacaatgccccattattggttaatgtgtacccttacttagcttacattgaaaaccctagggacattagtcttgactatgcactctttaggtctccttcggtggtagtgcaagatggttcacttggttaccgtaacctttttgatgctatggttgatgctgtttatgctgcgttggagaaatctggaggatggtcactgaacatagttgtgtctgagagtggatggccttcttctggtggaactgcaacttcacttgataatgcaagaacttacaacacaaacttggttcggaatgtgaagcaaggaacaccaaaaaggcctggtagaccccttgaaacttatgtgtttgccatgtttgaagaaaatcagaagcagccagagtatgagaagttttgggggctcttccttccaaataaacagctcaaatactctattaatttgaattagttattagaagtatatatagtttataagaaataagggctatgatttcaagtgaagcttccataattgacctagaagaggcagctatggagctttatctgaactgttggagtcaatatgtacccatttacgagcaaagttagctttaaataaagattttccttatcaatattag

SEQ ID NO: 20236 - DNA, 1733 bp, Glycine max
  Clone ID: PAT_MRT3847_118277C.1
ccggtccggattcccgggtcgacccacgcgtccgtttgcttgcgttgcgatttgcgaaccctgttgtgttgtgtcactgttgaaactcgaaacccctctcctccttcctcccttcaacgccgtggaagaagaatagagtctgagtctccgttatgttccgcagaatcttgtcccatcatcgcgcactctcagcctgcgcccacaatgcaacaacgcgctcactcgttactcgccgcacccccaatgttccaccaccacccaccttcccaatcacaggatcaaggcccgtttcttccaaaacatcccaatccaacgaaaccggtgaaaccaccaataaggctaaaaaggatgtggcaaacgtcgaggatccctttagtgcccctacttataacattcctgagaagcctgtcacgttcgtggaaggggcttcctacagtgttgtcattcttgcggggctcggaatcgcagctgctgcaggatatgctgttttcaaagagcttatttttcaacctaaagagtacaagatctataacaaggctctcaaaagatattcaggatgatggtcagatacgagtaaggattggatttccaattactggttatggtcaggagagtagaaatcgagctgctcgccaaagaattcctcacagggtatggactgatgaggaaggtgtcgagcatgtggaggttaaattttatatcccgggcccccatggacatggaaaagtatttgcggaaatgttcaaaggcgctgaccatgagtggaagtacttacttgattgttgagattagagcaccatctaccgcaaataatcgagtcatacatcccatcttacagtgcaaccaagtagcctaaatgataaaaaggtctttaatatttggtccattactggtgcatttttcagctatcagcattgaccaccttagccagtccatgtttcacaagggatgggagttgaaagaaggaaagataattaaagaaagtcaaataatgtgaaaaacgggatcccaagtctcaggttcagtatttttgtttttccatttagaacctgcagatttgagcaaaagttttgggcaaggatcttagtaatgatgatgacaagagcaattactttgtccttgacagctattgagaaatccgtctaccaatttgttgttattgctgacaattcaacttggcttggtttgtgaaagtactttgagtagctggttgtagcatgcaaatttttaaggatgaatataaggggattgtagccctcagtgggcaagtaagcataccattaatcgcaactggattcaagcgtcaagaggaaagtgaagggagacctatgcaggccagtcaactcacacaaggagataccgttggtatcaatcggcgatcttctactttcactgatggtagctttgttgagatccctgaattcttaaagaagaaggggcgctcacgttatccaagagtttaatactcttttccccaactccttaatccctccttgcatctctttaccaagcaatttttagggatacaaatctcatcagtctaggtattagatcacgttttgccccttttttcatttttaggttcgcattgtgcatacagttgttcatgaaagcgaagtactttccaaaaccgttgttttctgagttgaggcttgttggcatgttttaataagtttattagcttgtatttttgtacagagaataatatatcagtaatggtcagtgcttgttat

SEQ ID NO: 20237 - DNA, 1122 bp, Glycine max
  unsure (1)..(1122): unsure at all n locations
  Clone ID: PAT_MRT3847_118278C.1
actcgaccttggttcccttggttttctgagtcaagataccagtgatctacatgagaaagtcgattttgtggcatgcttgggtggagatggcgttatactgcatgcgtcaaatctattcagagatgctgttccccctattgtgtcatttaaccttggctcccttggttttctgacttctcatgattttgaagattacaagcaagacctacgacaagtcatccatggaaataatacacgagatggtgtgtatattactcttagaatgcgcctccgatgtgaaatttttcgtaaaggtaaagcaatgccagggaaagtatttgacatcctcaatgaggttgttgttgatcggggttctaatccatacctttcaaagattgaatgctatgaacatgatcgacttataaccaaagtacaaggtgatggagtcattgtggccacccctacaggaagtactgcctattctacagctgccggaggttccatggtccatcctaatgtcccttgcatactgtttaccccaatctgtccacattcactctcatttaggccagttatacttccagattctgctcaactagaattaaagattccggaagatgcaagaagtaatgcctgggtttcatttgatgggaagagaaggcagcaactctcgagaggcgattctgaccgaatatcgatgagccagcatccccttccaactgttaacaagtttgaacataccggtgattggttcagtagcttgattcgctgcctaaattggaatgagaggcttgatcaaaaggctctgtgatgcatgtgaaagtgaagaacagatatgcattaccctaacgtgaggatagggcttctataattactgtacagcttgtacattgagattacagaacttagatatatagcagatacctacactttattacattggctaccattgtgaagatagggtttgccaatgttttttcaacatgtcataatggcaagatgctgttgtatatacatttataaaatgtagtaattttttttaatcttagaagcagctattggtgctctcaaaaaaaaaaatnnnnnnnnnnnnnnnnnnnnnnnnnnnnnnnnnnnnnnnnnnnnnnnnnnnnnnnnnnnnnn

SEQ ID NO: 20238 - DNA, 245 bp, Glycine max
  Clone ID: PAT_MRT3847_118279C.1
acgccacaagcgattttctaatctctcatatgtttcaccttttggatcttttcaattccttggctttctggtgaatttttaaatggcatcggcaactggatatcacctttcaatctcagtcctatctcgtaatgccaatgttctctaatatcatattaatgtcaatgatcattcgactcatgatcttgtataacgaccacgactagaactccttctttttctatgatattcacagcacaatccat

SEQ ID NO: 20239 - DNA, 292 bp, Glycine max
  Clone ID: PAT_MRT3847_11827C.1
ggctcgagctccctttctctttccccttacccttcttgtgtgtgtgatgatgtacattgagaattggtagagaccagtgtgcacagagaaagaggttggtcacttcttgtgtggctccgtcctggactctgaggctgaacatgctcatgggtgaagagggagaatatgattcaacagatacggaacaggatcacatgggagtttatggaaatgaccggctgtttagcagatactgagcacactggccccgctcaagacaccacaatgcccgttctatgcctcctattgagtg

SEQ ID NO: 20240 - DNA, 680 bp, Glycine max
  Clone ID: PAT_MRT3847_118280C.1
ccggggatcctctagagtcgacctgcagcctcataaactctctaagcccaaccatcccatggctaagaggtttcttcaactcagttcttaggttaggtttcctgtcctaactcccaattaaaatgctgtcttcactttttaagcaagtcttactcatctgaatacaaaggtataaaaagagaacacaataaagcaagtataacaattaatatacttaaaaataagtctacatttttttataattaggacttaaaaatacactcatttgttacaaagaataaaaaacgttataaatttttaacgtaattaataaactacataaaaaatataaatatgatttatttaaataatcatttacattatataatcccatgcatggaaaatataaaactgagtgaactaacccgtatactaaaatgtgtcccatcaacaacatgaaataggttattatttaatccacacaaattcatgttgatgattaaaagtgtaattaaattttttaaaatagactcatttatgtataaaattttaaaaatagacttgcgcacgtgaaaatgtttcctaatcccatgtactccttatttttaaaataagagtatgagttttttttaaaacttaaaatacttttaataaaataaataatcttctgaatttctggtatgtttgcttaaactgatttt

SEQ ID NO: 20241 - DNA, 1804 bp, Glycine max
  Clone ID: PAT_MRT3847_118281C.1
cgtccgaatacacatcactccctctctctttggatctcacagccgccgctcgcggtggtgccaccgttgcactctccgctgctctctattcgatctccctctcaccgatactaagaaggtaaagtcgttaacgatggacgaagtctctggtagtaagagttgtggcactttggctctttctggaggttgatgaaggctatagttggatgaacacaactgaaatgaatggaaaccagcaccgttacaatcctttgctaatcagtaagcattgacaaggttcaaataaggctctgcgtttagattcggtgcagaatcagaggttggataagttgaattactaacttagataataattataattgtggaggtagtgaaattgaacagtggaaggcacgtgaagatgaaggtggacaaacagtggacattatgcgtattattttaacttatgggcttgatccaattaatggttcagtggagaacaaaccatgtctaacgaaaagggtagaagaatctgggagaagactgctgaaagaaatagtaggcatccaagcaaatttataaagaaattagaaaatccgtattcaaaagtttcgacaacctatttgaaatcctcaagaataaattacaagggcaaattatttcaattacaatctagctaattctacattgaataaaacacaacattaattattcatacaatttgtccccaaagcacatgaccccctcatcaaaaagctaattgaaggtttattatgaacatactcaatttcaaatagtgaactttctcacccaaccccctttcagtagtgtgactaaaaaatttgaagtattacctgagctgaaaaatacctgttccagtcacctcattgtcttgaaactaatggaactatagatggaacactaaaatgtagaattataagttatactcagtatgcaatgtcatcaactacaattggtggaacgaatttgcaattttcaagggtttgctcaaagatatgtcccactctcagcagctctccctcattaaatgcagcaccaatcatttgcagaccaacaggaaggcctgaaggcccaccctcaacaaatccgcatggcaaaaccaaggcaggtagtccagctagattgacatttacagtcatgatatcgcctgcatacatagccaatggatcatttttcttttcaccaattttataagcagctgaaggagctgcaggggaaatcaagatgtcattttgactgagggcctccttaaagctattcctaattatggtccttacctgctgtgcacgtttgtaatatgcatcatagtaaccagctgaaagggcatatgttcccatcaaaattctcattttaacctcagaaccaaacccttgagcccgggaacctccataaagagaatctagctcatcagcataaacttggtttccatatctgataccatcataacgagacaagttggaagatgattcagatacagcaaggatataatatgctggcaacccaagggaaaaggatggcagtgaaacctcattcacagagcatcctaattcctcaaaatgcaaagcagctgcccgaattgcagaaattactccagcatcaacaccatcatcaatagtttcacggatcaaaccaactctcagtcccttcaagggcttactttccaaggagctcacagcgacaaaatgagattgaaagtcaggcacatcctgcttacttgaggtggcatcaaatctatcatggccagcaattgcatgaaggagagtcccagtatcagcaaccgatgaaccaaaacagccctcgagcc

SEQ ID NO: 20242 - DNA, 247 bp, Glycine max
  unsure (1)..(247): unsure at all n locations
  Clone ID: PAT_MRT3847_118282C.1
gggaccctcgaggccgccccccccccccggtgaggggagagggnactactaggtatcaagggggtgcaagaaaagggggtttgggtttgctaatcagggaggccttcttgcagagagagataggggcaagtgtaagttactcaaggtgtgcagtggctttncncttgtaatgttgacttttacagtccaataccatgacttgttgaagggggctattagaaatcattttttttctggccaattaatt

SEQ ID NO: 20243 - DNA, 523 bp, Glycine max
  Clone ID: PAT_MRT3847_118283C.1
tttttttttgcagccacctaatagttcataaaatcaataacctcaaaaaagtagtatccagcaaaattaagagaaaaataaaacttattccgattacatatatatggatgattggaaaattatatgcctttgttttctcctcatcatctcaattttaacatgactgaaactcatctgtacctatgtcaatcattacttattatatttctttgttatatataatacatcgggccttcttaattggtagcttggatagaatatgttcggactgcactattgatgaatctaagagaaaccattctttgctcaactttttggatgggacgccattttccatttggtttctttgcctgccattgttgcatgaccaaaaacacatttcgggttcaaaatgaatatcatcttcaaattgaaaataatttgcagaaccgttgtgctctgcttgaacaaatgattgaggactttgcctgttcatggaatgaactgttctgatgcaaggttcctcttttttttttgttcgatg

SEQ ID NO: 20244 - DNA, 223 bp, Glycine max
  Clone ID: PAT_MRT3847_118284C.1
tcgatcctgggccccttagagcggcccttccacttatgacctcctcaactgggcaattaattacggaccgtaacctgcaggcgtacgagcttgtgctatatggagtgcaattagagctcgacatagccagggacatagccattacccgtcataaagtgtaatacactcacaatttcacacttcatactagccttaaacagcatacgtgaagtctgtggtgcct

SEQ ID NO: 20245 - DNA, 158 bp, Glycine max
  Clone ID: PAT_MRT3847_118285C.1
gatgccacaatggttgtccctcttaggcaccttcgtgttttctctctcaccctcatatcgatcagcctccacatccatggagcgttctctgagtaatcaacactccaatttacccacagtccacggagcggtagagaacctgagtcacttgccttttt

SEQ ID NO: 20246 - DNA, 602 bp, Glycine max
  unsure (1)..(602): unsure at all n locations
  Clone ID: PAT_MRT3847_118286C.1
tttttattattatatttaatnnnactttatgaagnagaaacatcatatataaagtatcaatcaatcaaaacatccatctgggtgaaggagaatgaacagcactctgccggggtggtggcttgcttgaactgctgttacgtttcatgattgaggagacagtggggctgaaatagtcattgcttctctgagaagttgttgcaccttgtgaatacattctcttcacatgcatgaagcttctctgattttccaccatcatcccacgtgcaacttggcttcttggtgcagcaccccacctattgtaactcacacaactctggctccttcccacttgttgaaacttcaactctctagggcttgtgtagttgcgagactctgcggtttctgctgagtacatggtctcgccttcgctgctgtatccattttgcatctcgtgtacttccacgggagacgaactagactgaacctcgctttgagctgctccattgacagaacctgttgaggaaacatctggaataggagttggtggccttgggtgcctgatttgttctccttctacttgggtttcgggcaaaggttctttggcaggatttcagcacactttg

SEQ ID NO: 20247 - DNA, 164 bp, Glycine max
  Clone ID: PAT_MRT3847_118287C.1
gatcaatcccaagaacgatgctttaactgcctaacacgctccaaatggactgacagctcatgcctagcctaactgttgcatcgaacacctgcacaggctttgtatccacccatcgactactaccatgttacatgctactattacctgcgggccagtgacaattt

SEQ ID NO: 20248 - DNA, 159 bp, Glycine max
  Clone ID: PAT_MRT3847_118288C.1
catacatccctcattaggaaaagctttttcataactgacttcccgttcaacatgtcttaccaaatgtgtcctaaagaacaagggaatgtggattactttccgggaattaagatccacactttgcaaattttacatttcttccttccttttttttttttt

SEQ ID NO: 20249 - DNA, 932 bp, Glycine max
  Clone ID: PAT_MRT3847_118289C.1
ccggtccgtgatattcccggtgtcgatcccacgtcgtctcgtaccggtctgcatgaagaacgagtttttccgttagaggaagcgtcatatttccgtacgctctttgtttttcctttcatcgttttccttctccatttatttgtacgtattccaccactgctccccaaaacgcgcgagacttcactcgctggcctctttgaaaaatcaacacctctttttctcctccttctgattccgattccaattccattgaatatggagaaaactctcctcaaggatttcgagctccagcacaaaaatccctccgtcgaagccctccgccgatggagatccgccgtcactctcgtcaaaaaccaccgccgccgcttccgcatggtcgccgatctcgacaagcgcgtccaagccgagcagattaagcaggggatcaaggttttttttcttactgctctctactttttttttttagcattacaatttattgatgctggtaatcgagttgagtacaaactatcaagtgaggcaagagattctggttttggtattcatccagatgagattgcatctattgttcgtcatgataacaagaccttatgatattgagatccattgcaagattagttcggatggcgaagagataaatagcagacacagatatattcaatcaccttcctgatggcattgcaggactcattattcggtactatctgttggtctgaaagtgcatcgtaatatccgtaaccgccatagcatagaaaattcccaaaaaaaaaaaaagcccagtaaagcagaagaaggtgctatcattaatgatcctattgaatattgatgtgaaatataaaaaaccaatacttataaacaacaaagaaagtagaatatgctaagtttctgtgtaaggttaaagcttaaatcaatatatatgccttagattttgg

SEQ ID NO: 20250 - DNA, 510 bp, Glycine max
  Clone ID: PAT_MRT3847_11828C.1
atacacatacacattacacgctagactctggaccatcatctgctatcggtatcaactccctgagataggtggtgaaaattgaattatggctgatgatggtgctgatccatttccgaagttgacaagtgtgtatagagtgtctggttccaaaaacaataagctgagctggaatgtagccaattctcagcaaagtgttgactccagtgtaaacaactcaaggcagttacagagcatttctgatggcagtgcttcaagatcctggttttctcaaaattctagaccaaatgcatgggaagttccaagtgtgattcagaagctgaggctggggaagcggggtaatgacggattgactaacaacagtaacctacaggacaaaagtaattctccagatgctctggctttgacgggaagtggaattttgaatgacagcaagttgcctcctgagtcagcaatatctccaacatcagagacatgtttaaattcatctgttgatgttgttgatacaactac

SEQ ID NO: 20251 - DNA, 179 bp, Glycine max
  Clone ID: PAT_MRT3847_118290C.1
caacggggaggtctcgtcacaactttattcaatcatgcttctcctgcgacaagggtattaacggatcctcctccaaaaatacgagaaaatgggtaaagaaaacgcttatctcaatatcgccgacatctctcactctcacaactgggaaatccacttctcttcgtaccttatttacaacc

SEQ ID NO: 20252 - DNA, 176 bp, Glycine max
  Clone ID: PAT_MRT3847_118291C.1
ctctttagagatgcggtttgagatgcacaaaaatgaactcaatatgcatgaaccttcggctgcttaactggagccctcgctgcgtcaatgtatatatagacccactaaagattttcccaacttttacatctacttcccttcatactctccggaaaatcaaagcaaattttttttac

SEQ ID NO: 20253 - DNA, 572 bp, Glycine max
  unsure (1)..(572): unsure at all n locations
  Clone ID: PAT_MRT3847_118292C.1
gcctacctaagctcctttatcgggctcgagggcagaccttccgggtctacttgaaggggcacatcgaggttttggtttaagccatgagtttctacggcacactgaaaggtgttctgctctggtacatgttgttgatggttcatcacagcagccagatctcgagtttgacgcagttcgtctagagctgaagctatttaatcctgaacttgctgagaagccttatgtagttgcttttaacaaaatggatcttccagaagcatatgaaaactgggaatccttcaaagaaaagttgcaatctcgtgggatcacaccattttgtatgagtgctgtcaaaagggaaggtactcatgaagttatctgtgctgcttatgagcttttgcgtaaaagaaaagaagacaaggaggaatatgaagatggaagagatatggtaaacttgaaccatgtcgctgctgcagtaaagaagcagcggagtgcatccattagtgattttgagatttttcatgacaganattcaaatatttggcatgtagttggatctggattgcaacgatttatacagatgacgaattggc

SEQ ID NO: 20254 - DNA, 223 bp, Glycine max
  Clone ID: PAT_MRT3847_118293C.1
tgcgtatctctttctctgtccatttttatgtatatatttctctccattatttggtgtgcgtgctctagacacacacacaccgcaccaccaccaacactggcttttagcagaagggtatagagcctaatgattcacagaaccgcgtcctttcccacgttaaggaaattgcttcttcgggctggctggtccaaaattggtttgtgcaagatccggacttacaatt

SEQ ID NO: 20255 - DNA, 585 bp, Glycine max
  Clone ID: PAT_MRT3847_118294C.1
tgaaaagctatatttgctcctattactttattaggaagcctttcctaaaaaggagaaaggttttccaaggcaagtagtgaatctccagctacagcaaatccattgtatactgctgctgtgggggcatctgttggtgctggtcttggccttgtcctggcaattgtaataggtacagcatttgtcctgaggaagccctaagaaccaatgtcgattgatacaagtagagatgctcaagctaaggcaaattcattgaattctgctgctgtgggagcatctgttggtgctggtcttggccttgtcctggcaattgtaatgggtgcagcatctgccctgaggaagccctaaggaccaacttttccttttaattgacctggtgcttgctcaacagaagttagattgggtctgcccggtgttcaaataatttttgttattgttagggtttcattctttccctagataatatagagagatagaaggtatttatatgaaggcaaattttaatttatttgtcacactagctatatattatcaatcatttatttattattattttaaattcttgagttttgagtttgttgtattgtc

SEQ ID NO: 20256 - DNA, 305 bp, Glycine max
  Clone ID: PAT_MRT3847_118295C.1
tgtaaaaaaaaaaaaaaaaaaaaaaaaaaaaaaaaaaaaaataaaaaaaaaaaaaaaaaaaaaaataataaaaaaaaaaaaaaattaaaaaaaaaaaaaaaaaaaaaaaaaaaaaaccggccgcccaaaaggttcaagccttacttacccttgcatgcaacttcaaaccccttcaaaattgtcaccaaatttaaattcacgggccttcttttaaaaacttcttgacgggaaaaaccctggctttaccaaattaaaccgctttgcacaaaatccccttttcccaaacgggcttaataccaaaaagg

SEQ ID NO: 20257 - DNA, 321 bp, Glycine max
  unsure (1)..(321): unsure at all n locations
  Clone ID: PAT_MRT3847_118296C.1
cntangcatncgtncgnaacntnngtangcncgcnnattnngctcgatgtgatgtcnagcgctncnngacgcngaccaannatgtggggcaccatcancctcanatttgcaacgnccnagggtcnagattcgngannncgttcatnncctangntaccgnatntttcgacgaanaagncgagtgtncacgcgccgacgtcaacgaggttttgggcatgancnnnggnnngntngctaanttnccagananggcaagaagggctctgcagaagtcnattggtcnccagntgaaccattgaaagctgaactgcaccattgnnn

SEQ ID NO: 20258 - DNA, 293 bp, Glycine max
  Clone ID: PAT_MRT3847_118297C.1
caaaaggctaaaaagcgggccccaacataaagataacattctgggggggaattaatcatctattaaccaggggtgccaacaaccacaaaataactaacaatttttatatggtagagtcggtacctttacaaaataaggaaacattgaagggcaaatctctttggcgaagcttgaataaaacttattatcctttgcaaaatttttccactataaaggtatcttaaaaaggatccttgtaaataacccaccatttttgactgccttaatagcacgcccttttaactcataaattc

SEQ ID NO: 20259 - DNA, 261 bp, Glycine max
  Clone ID: PAT_MRT3847_118298C.1
ggctcgaggtgagactttgacctcactacctgtatttcaggaccaagaatcagtgctacagcaggagtgttttctcagaacccgctacctatcactccagcgccaacaggagctaccccagggagggatcagcgaggaagactacccgctccaaaaactaggaatggccgacgattgccccggctaaaagggccggccccaatagacgattagggcagcctgcccgataaggaaaaaaaggccagggctaactgaaagggc

SEQ ID NO: 20260 - DNA, 137 bp, Glycine max
  Clone ID: PAT_MRT3847_118299C.1
atttcccaaccctaattgccaattggaccccccctttaaccgggcatttaaccccgccggtgttgtgggttcccgcaacgtgaccggttcactttgcaacgccctatcgcccgcttctttcgctttctttcctttct

SEQ ID NO: 20261 - DNA, 251 bp, Glycine max
  Clone ID: PAT_MRT3847_11829C.1
ggggggggggatctttgactagggggacaaaagcacaccacttattcttatgtattccagaacaatttattctcatgtatgtgggcatataagcaagcttgtttatccgttattgaacaggaagccccccacccgatctaattttatggggggaaaatttactggggacccttcatatttaggaaaaagaaaggaacaactccgtgggtgggaacaagattgtgagcccttaaagagcattaaatcaaaaa

SEQ ID NO: 20262 - DNA, 1102 bp, Glycine max
  Clone ID: PAT_MRT3847_1182C.1
ggagttgccaatttaattcttgcgaaaaatgttggaactaccattcaacatggcacttcggtttcccaatttggatttcaagtctttaccctttgctgagaacctcaacactgaattgctaggtggcgtagttgctcttgttgccgttggctttacggttgcatatatttattatcgcacaaaacaccccaaaggaggcttggacccgaaaaatttcaaagaatttaaactcataaagaagactcagctcagccacaacgttgcaagattcagatttgcccttcctactccttcttcagtattgggccttcctgttggaaaaaacatacttgctagggggaaagatagccaaggagaggaagttatgagatcatatactccaatcacgttggattcaaatattggctacttcgagttggttgtgaagatgtacccgaatggaaagatgtcccaccattttagacaaatgaaggaaggtgattacttggccgtgaggggccccaagggacgtttcacttacaagcctggccaagttagggcatttggaatgattgctgggggctcaggcataactccaatgtttcagctcataagagccattcttgaaaaccctaaggacaaaacaaaggtgcaccttgtttacgccaatgtaacagtggacgacattctgttaaaggaagaactagataactttgcaaacaaatttgctcaaagatttgaagtctaccatgttcttaataagcctcctgaacaatggaatggtggcattggatttatatcgaaggagattattaaatcacattgtcctgaaccagcccaagatattcagatacttaggtgtggtccaccacctatgaataaagccatggctactcatcttgacgcacttggctacacatctaacatgcagttcgagttctaaccgcttcaatctaattcatttaattattgccacgtacttccattcgcttgtatcgtatgtgtcttaatcaaattttatcacatgattcatttcataataatttatgcaagtgacaagagtgctactgtgagcctactgtttcattccacgagccaaataggcaaatacgttatactgtac

SEQ ID NO: 20263 - DNA, 276 bp, Glycine max
  unsure (1)..(276): unsure at all n locations
  Clone ID: PAT_MRT3847_118300C.1
gttccatgccnanccgnncnncgcnnacgcggggtacacttaaaaaacncccacagaccacgcgcngnncaaggaaaacccnggcgnggccganccgggcaacggnccaaaacacaccaacnngnncgacgcncaaaacgacgccgccnnggcggccangncagcagccaaacacgacgacgcnaagacggcagncccggaaaccggccggccccccgccggggaccccaacgagacaggagccagccccgacaacgcggcgccgcacaacggaaa

SEQ ID NO: 20264 - DNA, 1450 bp, Glycine max
  Clone ID: PAT_MRT3847_118301C.1
aaaagagattgccatggcaatcatctggaagattcaaatgcaagcaaaagtttatatatttattttttctataattagaattgttttctttctacttcatgtaggggctgatgtttttagatttctttgtttttttttaacccaaaaatagaattatatggtttcattatgaacattccgggattccgggacgagacaggaagggccctcctttattggattagtaacaccaagtggaaaaagcccgtttagaaatttagtgcaagaaatccagggttaaaccccttgtatatgatcgcatcaaccgaaaaaactttttcgttttatttaaggaaaattttctgtccttagagttttggaattgtggacacagaatgaactcgttttttggactttccgtagagtatcttccttcatagataataaatagcagttaagaatctctcgttttagtcatggactattggagcgccaccctctcacatggcggcagcaaccacaatttgctacggtccctcttctattgttctagggtcaaatttacttaaacgaagacacttgaaaaacacttcgtttgctgatcgtttttctccttcaagatcattactttgtagcggatttgttccaaggaagcctgctttgggaagaaactctttctgggtatcaaaaatcatggatgaatccgtgggaacttctgctttcagagatgcaaagggggatgaaacgatccaagtgtttgaacaagaagctttcatcgatggctcatcaccgtttcggttcaagtttttgtcccctgaggtggaatacaagctcaatcgactgagcaaatggatagtaactgccctctttggcagtttcattctttggaggcatgatgcagaagccttatggtttacagcagggtctgttttgaatgctatgctttctgttttgctcaaacgtatactgaatcaggaacgaccttcaaccctgaaatctgaccctgggatgccatcgtcacatgcacaatcaatattctttactggcttctttggtattttgtcaggtgtagaatggcttgggctaaatggattcaccattgccatcagtggattggtcctaacatttggttcttttttttcgtacctgagggtggtgcaacagcttcatacagtgagccaagtggttgttggagctgctattgggtccattttctctattttatggtactggctttggaacggttatatgctggatgcatttgtatcttctctgtgggttagaatcattgtcgttttggggtctgcaggactttgcataggttttgttttatttgcgattcgttattggcttcaagacgactagaacttcaagacgtgtacaacattgcaataataacacatctcattttgtttctttcaaggttgaagtctttatgttgcctagtaatcaaatgaaaattgtttaggcc

SEQ ID NO: 20265 - DNA, 2630 bp, Glycine max
  Clone ID: PAT_MRT3847_118302C.1
ctcgagccgattcggctcgagatcattgttggctattcattcattcgtgttcctcaggagagagagggtgcgtgtgattcggattcgaattcgaattagggttttgcgcatcgtcatcgaatttttctcttatgcaaggaaggttttccttctccgatttgaatttgattgaacgagtagtgttaagattatgatattttttgagaagcttcgtttctctcctcacttgagccgcttcattgccggcatcctcctgttaatcttctgcaattcattccagttagtctctaatttccccattcctatacagccttagattcaacgtcgatcgctacactcttctctccgattcgtacgattccgtattcgatattcgtttgtttgattcactcctctctctctctctctctctctcgctttcgattcgacgcctgaacaagtgaacatggaccctaatcacctcttcttcacgcatttccgcgatggtgctattgcctcacgcattgagggccaacacagaggagctcttccttctgttattgtgattggtgctggaatatctggacttgcagcagcacgaagtctctatgatgcatcttttaaggtgactgtactggagtcacgagataggcttggtggtcgcattcatactgacttctcatttggctgtccagttgacatgggagcctcatggctacatggagtttgtaatgagaatccattggctccattgatacgtggcctggggctttcattatatcgtaccagtggtgacaactctgtcttatatgaccatgacttggaaagttatatgctttttaacatcgatggtaagcaagttccacaacagatggtcattgaagttggagacacctttaagaaaattctggaagagacagggaaagtgagggatgagcataccgaggacatttcagtttcccaagctatttcaattgtgctagataagcaccctgatctaaggcaacaaggacttgcccatgaagtgctacaatggtttatatgcagaatggaagcttggtttgctgctgatgcagatatgatttcactgaaaacctgggatcaggaacatgtcctgtctggtggtcatggactcatggtgcaaggatatgatccagttataaaagttcttgcaaaagatattgacatacgcttgaaccacagggtgaaaaagatatctagtggttacaacaaggtaatggtgacggtcgaggatggcaggaactttgttgctgatgctgctatcataactgttcctattggaatcctaaaagcgaatttgattgaatttgaaccaaaacttcctgattggaaggtttcagcaatttcagatcttggtgtgggcaatgaaaataagattgccctaagatttgacaaagtattttggcctaatgtagaactcttgggcactgttgctccgacctcttatacctgtggctattttctcaatcttcacaaagcaacaggccatcctgttcttgtctacatggtagctggaaggttcgcttacgacattgagaaactatctgatgaagcagctgcaaattttgtgatgcaacagctcaagaagatgtttccaaatgcttctaagccagttcagtatcttgtgtctcgatggggaacagatccaaactctcttggatgttactcgtatgatttagttggaaaaccaactgatgtgtatgacaagcttcgtgcacccttgggtaatctattctttgggggagaagctgtaagcttggacaatcaggggtctgtgcatggagcttactcagctggggttatggctgctgaaaattgtgagagctatattttagaaaaactaggccacgcagaaaagctatctctagcttctgttaggcatgaaatgcttgaaactcttatacctcttcagatctcgaggatgtgatttgttggtgctcagtagcttttagacaatgattctgcataatgcaatggcaaaatatttgccattcgatataataaagaaataaatgttctttaaggatggtgaattggtgactatcgtccaagtaacaccattttcacttatccgcattggattcgaatagctttttttatccttttttttaggcctggcttattaaggtgtatgtagtatgtaccttggtccatctgagacacagtgcatgtaagaccatcactattgtgttaccccacaattctgtaatgtgggtgtgtcctacttgtaggtagcttctcaacattttccttaatcaacatgtttcttggcatacaacaatgttttctttccttaagaataatttgtactgtttgtcctttctatttcttgttttttcaaattattgtgttttttcattaagccaaaaaagaaccgaaaggaaacatgattatcatttccataataaaaaaagtacaaaatcacaatacttttggtaaagagggagcactggaacggagtgggaacatctcataaaagacaagcaataacaaaaaaaaactgattaaaaagctagtaaaaattagccacttataaccaggttgctaatatagttttgtgtaaattacacaaatatccccttttcacaccttgattgaatttgttaattaatgttgtttgtgtgtttgtg

SEQ ID NO: 20266 - DNA, 1329 bp, Glycine max
  Clone ID: PAT_MRT3847_118303C.1
tttttttttattgattttacgtatttttttattttatattgtcttttgattgttatttattttttgtttattttttttatttttagttttttttttattgattttacgtatttttctcacaccaggcgcacgttagcacaaactatcatggccacggcaacagcagctgccacctcgtcctttatggggacgcgtctcctggaggctcactccggggcggggcgagtgcacgcccgattcggcttcggcaagaaaaaggctcccgccccaaagaaagcctccaggggatcgggccgagacaccgacagacccctttggtatccgggcgccaaagcgcccgaatatctcgatgggagtcttgtcggagactacgggttcgatccgtttgggctagggaagcccgcggagtacctgcagttcgagctggactcgctggaccagaaccttgcgaagaacgtggctggggacatcattggaaccaggaccgagctcgcggacgtgaagtccacgccgtttcagccctacagcgaggtgtttgggctccagaggttccgtgagtgcgaactcatccatggaaggtgggccatgctcgccactctcggagctctcactgttgagtggctcactggtgttacatggcaagacgccggacatgtggagctactagaagggtcatcataccttgggcaaccacttgcattctcaatcaccacactgatctggatcgaggtactcgcaattggctacatagagttccatatgaatgcacagctagacccacaaaaaaggctgtacccaggtggcagttacttcgaccccctgggcctggcctcagatccagagaagaaagccacccttcaattggcggagatcaagcacgcccgtctcgccatggtgggcttcttgggctttgcagtccaagctgccgccactggcaagggcccgctcaacaactgggccacccacttgagtgacccactccacacaaccatcattgacaccttctcatcctcctcttaagaagaagcaaaagaagaagaattgtctttcttgtgcctggtcattctagttatattgtaaaagtctttttcttcttcttcggctttgggttgtaattaaacattttctacatagctggattagtagtacttgtgaaaaacttgtaacgtgaaattggagaggctaagcaaaaatgcttttgcttgatgttaagtgttttcctgtgaatgttaattatgcccgaaatcgaaagggaaggccgccggtaaaaaaaactgatggggttaagatccctatgaaaggtaagggcaggaaattggattggggccc

SEQ ID NO: 20267 - DNA, 405 bp, Glycine max
  Clone ID: PAT_MRT3847_118304C.1
gggggcaacaaaaaagatccttccgaaggttcaccaaaggaaaccttggaaaaacttctccttccttaaaaagaaaagggtaaggggacttttttaaacggcgggggcaaaaaaccgctaacgtggccgaaatccaaacacttaaccggaccattaaatcggtagaaacaacgggcggggtgaacaaagggcagggacgtaatcaacgcgagctgaagacccgcgcttactaaaaattcctcggtgaaaaccaacaattgcaaggatctatccccatcacaaaaaaatttaaaaaattacccggacctgggggccaagggtaaaaacccggtgaaacataaggggagcgcgcgggcggcccaaaacatttaagggcatcacaaacctgttattgcctaaaacttc

SEQ ID NO: 20268 - DNA, 1726 bp, Glycine max
  Clone ID: PAT_MRT3847_118305C.1
atgtaacaccagtgagccactcaccagtgagagctccgacagtggcgagcatggcccacctcccgtgaatgagctcgcactcgcggaacctttgcagcccgaacacctcgctgtagggctggaacggcgtggacttcacgtccgcgagctcggtcctggtcccaatgatgtccccaaccactaattctcccaactcaatttttctctcaaccggcccaatttagcataagcccagcatggccaccgcaacagcagcagccacctcgtccttcatggggacgcgcctcctggaggcccactccggggcggggcgggtgcaggcccggttcgggtttggcaagaagaaagccgccgccccgaagaaagtttccagggggtcgggctctagctccgataggcccctgtggtatccgggcgccaaggcgcccgagtacctggatgggagccttgtcggagactacggattcgacccatttgggctagggaagcccgccgagtacctgcagttcgagttggactcgctggaccagaaccttgcgaagaacgtggctggggacatcattgggaccaggaccgagctcgcggacgtgaagtccacgccgttccagccctacagcgaggtgttcgggctgcagaggttccgcgagtgcgagctcattcacgggaggtgggccatgctcgccactctcggagctctcactgttgagtggctcactggtgttacatggcaagacgccggaaaggtggagctagtggaaggttcatcatacctagggcaaccacttccattctcaatcaccacactgatctggatcgaggttctcgtaattggctacatagagttccagaggaacgcagagctggacccagaaaagaggctgtacccaggtggcagttacttcgacccactgggcctggcctcagatccagagaagaaagccacccttcaattggcggagatcaagcacgcccgtctcgccatggtgggcttcttgggctttgcagtccaagctgccgccactggcaagggcccgctcaacaactgggccacccacttgagtgacccactccacacaaccatcattgacaccttctcatcctcctcttactcctcttaagaagaagcaaaagaagaagaatagtctttcttgtgcctggtcattctagttatattgtaaaagtctttttcttcttcttcggctttgggttgtaattaaacattttctacatagctggattagtagtacttgtgaaaaacttgtaacgtgaaattggagaggctaagcagaaatgcttctgcttgatgttaagtgttctcctgtgaatgttaattatgcacgaaatcgagagggaaggacgacggtaaaaaatactgatgaggttaagatcactatgaaaggtaatggcaagaaattggattgaggccattggagattttaatttattcattttattaagtttgattctacataaacgctgatttgctgcagtacagaaaatagcgctggtttaccgaagttggtgaccaatggttaactaatggccaagttagactatatttcctacatctaattgctacattttgtttacattagttaagggcggtttgggttgattttgatcaaatttaagattgaactcaattaaatttgattaaaatttgattagtttaattcggtttttataaattcttttttgaaatttaattcaatcccacttattcatg

SEQ ID NO: 20269 - DNA, 547 bp, Glycine max
  Clone ID: PAT_MRT3847_118306C.1
ctcggtacccttttatcctctagagtcgacctgcagaaactttgctcatcactggagcctattctacgcagagttgtaagaaaattcagttcattgtggtatttattcttaatatgctaatctgttaattttgtgaaaattttagtttatttattggtcaatagtacctgaagttatcacttgcatattttactgctcacctaatcagccacataaactacaacctctggttgctggcctgtagctaaaatttactgtacttcaagctggtaggccttgacttgatctcaggcttacatggaattgggtaggaaattagtaatctcagattcaaaactgtagaagtttatgtatttcattttttccatttactcatctatgagaggaaacgtcctctaacatgctagaaacagctttctctgctgtgggagggtaaggcttcttatacccatcccaagcctcattaggtgggagccttatgccctaggtcacccattttactcatccatcagaggctttctggaataagttgttctgcaggcatgca

SEQ ID NO: 20270 - DNA, 309 bp, Glycine max
  Clone ID: PAT_MRT3847_118307C.1
tcctctatagcggtcgcccttttttttttttttttagtttgccaagtgaactgctgtatggagaacatccagccaggggtgttactgttcacttaaacatgactttcgtcttgctgaacagtggaaaatgaggggaaatcctgctgtccaaagaagcagaggaaaggggccggttcacacacccagacgttgagcttttcattctggatataagctgtctgtctggggagagaaaggctcctggctggactctaaggtgggagcgggtcattccttcatagcccacgtaagtatggaaggaaagatcat

SEQ ID NO: 20271 - DNA, 1292 bp, Glycine max
  Clone ID: PAT_MRT3847_118308C.1
atttttctcacaccaggcgcacgttagcacaaactatcatgggccacggcaacagcagctgccacctcgtcctttatggggacgcgtctcctggaggctcactccggggcggggcgagtgcacgcccgattcggcttcggcaagaaaaaggctcccgccccaaagaaagcctccaggggatcgggccgagacaccgacagacccctttggtatccgggcgccaaagcgcccgaatacctcgatgggagtcttgtcggagactacgggttcgatccgtttgggctagggaagcccgcggagtacctgcagttcgagctggactcgctggaccagaaccttgcgaagaacgtggctggggacatcattggaaccaggaccgagctcgcggacgtgaagtccacgccgtttcagccctacagcgaggtgtttgggctccagaggttccgtgagtgcgaactcatccatggaaggtgggccatgctcgccactctcggagctctcactgttgagtggctcactggtgttacatggcaagacgccggaaaggtggagctagtagaagggtcatcataccttgggcaaccacttccattctcaatcaccacactgatctggatcgaggtactcgtaattggctacatagagttccagaggaatgcagagctcgacccagagaagaggttgtacccaggtgggcagttacttcgacccattgggcctggcctcagacccagagaagaaagccacccttcaattggcggagatcaagcacgcccgtcttgccatggtgggcttcttggggctttgcagtccaagccgccgccaccggcaagggtccgctcaacaactgggccacccacttgagtgacccactccacacaaccatcattgacaccttctcatcctcctcttaagaagaagagtctttcttgtgcctcgtcactattactagcatattgtaaaagtcttttcttcttcggcttttggttgtaattagaacattttcacttagttggattagtagtacttgtgaaaaacttgtaacgtgaaattggagaggctaagcagaaatgcttctgcttgatgttaagtgttctcctgtaaatgtttattatgcacggaatcgagagggaatgacgagggtaaaaaaatactgataaaattgagatcactacgaaaggtaatggcagggaattggattgaggccattgaaggttttaatttattcatttgttaagtttgggttctagatacgcgctgatttactaaagtttgattctagccaatttgac

SEQ ID NO: 20272 - DNA, 347 bp, Glycine max
  Clone ID: PAT_MRT3847_118309C.1
gcacaaaactggtaaaattccagatcaataaggattgcggcgaagccgaaaagatacaccattcattagggaaaacaggaggggggaaaaataaggggggagggcttgaggaacatataatcgctcaccgatgatgctagaacacctaatgatcccacacacgcatattgtaaccacccatgataaacaaaatgcctcatgggcgttttatagtataaagcccctccgaatgactagggggactccactttcttataccatccactggaggagatcacagaggacgaatcttgctggtgcgaccaagtgagagacgggtgtgttcaacttaacgtgcttactgcggt

SEQ ID NO: 20273 - DNA, 469 bp, Glycine max
  Clone ID: PAT_MRT3847_11830C.1
cacacatcacttagtctttgttcttacattcctcgctcatccctcattgctcatctggcagattcaaattcgcctcactcactcgctcgctctctctcagtttcgaaaatctctttctcttcatctctctgtctctgatattatagacagcaaaactcgttttcagatctcaaacggtgctagttagaagagccgacgtgagaggtgagaggttcacgttcctttgttttgcatctaaaattttggaaatggaggacgcggtagatgctacagcaactttggattatgtttcaattcagatttttcctaaccaaaacaggtatgaggcatttgtctgtaaggggaaacaatctgataaagtggcagctggacatttggaacatttgttgcctcatttacctgcaataaatgatttgtatgctgaaggatttgatacaaactttgatcttaaattaccagaaaatctgca

SEQ ID NO: 20274 - DNA, 469 bp, Glycine max
  unsure (1)..(469): unsure at all n locations
  Clone ID: PAT_MRT3847_118310C.1
gtngatttttgtcatttggtgtcaagttgacaaccataaacaatattgtgtgtttttgggctcaatcctggtatttcaggttctcgtcttttngggaaaaaaacctcactccattccacatttaactgtttggaaagaggtggggcaatttagaacaccgttgaattttctttctaggaggcggagcctctgtcttttttttattgacctcccccgcggacgaatcttaaaagcacaaatctcggagattgggtcacacttttccttttttctacaattagtgacttattgggaggagctgctaggacgaaaggctgttttttgcccacgattgtaatgtctgggaatgccccccaaaaaatgaaaaattcgggcctctttgtggcaagtgtttttaacaaacaccacccccccagagcttttttttgccccttagaagccccaattttaaccacctttttgggaaccc

SEQ ID NO: 20275 - DNA, 279 bp, Glycine max
  unsure (1)..(279): unsure at all n locations
  Clone ID: PAT_MRT3847_118311C.1
gggaaccantgtngaagaggcctacaanaagctaatagtngaattgagataagngtnctagattggttggcattgaatgtcccaaggatgagannttntcgtcgcaaaatttttgacaaacntaagacgcgangnaacantattctcnctatggagtttaatccttgtgggttcggtcagaagttntanatttgtgaggtncattatgaagaanagggacaagcttagttgtcaagttggaatcaacccatactccatggaatggactggttgggccaa

SEQ ID NO: 20276 - DNA, 429 bp, Glycine max
  Clone ID: PAT_MRT3847_118312C.1
cccccaaaaaccgggggggaccttttttttgaaaaaaccaaacttggtcccccccgggggagaaaaacaaatttctctttttcccccttaaggggggccccccccccgggctaaacccaatttcccgccccccccaaagggcccccccccccccaggactcccaaaaaggccctggttaatttttaagaaccacccccccttttccccccccccaggacccaaaaccgggggggttaaaaaaaaccccccccccttttttggggcggggccccaaaagttcctgaagggttaaataccaaaaaaccccttctccggaaccaccttggcttaaccccccaggtttaaaaggggccccaaccggggtcccttttggccccttggcccccccccttgggaaaaccgggaggggaaagggggggccccccgcc

SEQ ID NO: 20277 - DNA, 951 bp, Glycine max
  Clone ID: PAT_MRT3847_118313C.1
ccgcccacgcgtccgaaaaaaaaaatgggggcttcacaatcacaggaagagctacaatcacaacaacagtttcaacaacaccaacacccaaatgaactcaccagaagggaatcattgttgttgtctcctgcagctagtaacaacacaaaacaattcagcaacagcacaaaggtagtagataatgtcacagctgccaacagcaccaacaccaactgtttcatgttgaatgcgagagcactctcaatcacctgggcagaaaatccagactattggacatgggtacaggataaagatgaaagtggcacgatgatagagttacctaatctgaaaatggtttgctggctagaagtgcatgggaaatttgacactagaaaactttcactaggaattctatatcaagtgtcatttattgtaatgttgaaagattcagctcaagggtgggaagttccaataaatgttagacttgtccttcctggaggaaagaaacaacaacacaaggaaaatttaaacgagaaattagtggagtgttggatagagattccagtaggaaagtttgaggcatcagaaaaaaatgtttacatcctagagatatctaagtgtgaaagggaatgtggtaagtgaaacacatggctaataatccatggcatcgagttctataagtaaaaattaggttatgcataagttaaaattaatatttggagaaccaaatatgaaagaactccaccaattaacttatgtataattttttttaactatagaatttttttttattatgaaaaaatttatccaaacaaattttaagttgtatacaatgagactaatcaatcacaacaccaccaacaaccacatgaactcactagaagggaatcatggttgatgtctcctgcaggtaactcaaatacttcaagatagcacaaaggcatagatatgtcacaagtgccaacacaccat

SEQ ID NO: 20278 - DNA, 391 bp, Glycine max
  Clone ID: PAT_MRT3847_118314C.1
gcaacaagaaaacttctatttttgacagccaatttcggttccagtaacaagagacaacaacctttcactttaactatgatgagagaaaaccacgtctgaagagtttgagcaggacatagaacttagaatgatggaggcattttaggagcatgttttgtggggatcgagattgacctgggacccggggaaggactttttgccatgatttaaagttattgatagatccttctacatgcattagccagttcttgatcattagcgttgatgtgctactaactggtcatgttgggattcattacgatccagagatcttgtaagacctatgctgtaagtaagcttgcaaagatgttaaaacttcgcagctaatttgtaggcgttaccagaggactct

SEQ ID NO: 20279 - DNA, 462 bp, Glycine max
  unsure (1)..(462): unsure at all n locations
  Clone ID: PAT_MRT3847_118315C.1
ggtcggtttatatagaattatatacgaagtttctcttatattagaatatttttattttaatacctattatataagaaaaattagaattgttttccaattcctattagtcagattattactcaacagaaatattgatgtcatagattaaaatgaaaaaaaaatattaaggaccaaaacagacaaacaaattttaagaaaaccaaagcgaaaaccattatatatttttgtggcctgattaatgttctcattattgatattgtgtaagcgaaacattttccaacattctctgttgatatacttttattgatttttttaaagcttatacttttattgataagaattcaacgaggtgaatggaaaatcttacaaatagccaaagaaaaaaggacttatctttttagtntatagcaaaaccacgataataaggtcatcgcacttgacataattaagcctagcatatca

SEQ ID NO: 20280 - DNA, 356 bp, Glycine max
  Clone ID: PAT_MRT3847_118316C.1
cccacgcgtccgctcacgcgtacgcggacgcgtgtgtagccaccacaataactagtataaataacgactattcacagcagcaagctgtcaatctaattacgaagtcggtacctgacgccattagtgcatcaactgctgatgcatccagttatgacttagggtcgagtgcacacgcatattaaaatcatctatccagagcttcgtctgaggatgcacatgattataaagccatgcaattggatatggctggacacgatctagttaggccaattcgcccattttaaaacgatcattctagggcttaagttgacagggtgtataactctgctctaaagcgtaaatagcagctttacaaa

SEQ ID NO: 20281 - DNA, 385 bp, Glycine max
  Clone ID: PAT_MRT3847_118317C.1
aaaatgcaacgctttttatctaaaaattagagaccgacaaatatttttcaaatctgacaaattaaactatctatcacataaaatattcaacccatttaatctaaaaaattacatagaaattttactcctaattttatcatgcggttctaacacctttacatgtgattgtattccatgcatcatcagggacttatgatgttgaagtaaggtcatgctctattccccctcacctgcttctttttccatctggacaagttaatgctaagagtttaacttacgctgcctaagatactcttaaatttttactgttgatgcagaagtaaggtcatgctatatagtctattccacctgccacgcacctatctccatttggacaagttatgag

SEQ ID NO: 20282 - DNA, 484 bp, Glycine max
  Clone ID: PAT_MRT3847_118318C.1
gcggccgcccttttttttttttttttttttttttttttttttttttttttttttttttttttttttttgttttttttttttttttttttttttttttttaacaaacaaacatttttcttaaaaaaaatggccaaaaattagaatttcggggagcgccataaggggaaaccccattggccgaaccctaaaagggccccccccagggggacatttttgcccgggctaaaccgggaaaaagccaaagggggccccagccaaagcccccgcttttaccaaccggttcccccgggcgggttatctgggggaaacaaaaaacccccccccgggaaaaaaacctcccggaaaaaaacccccgggcaccctttaaccggttgggaaaccccccaagggccaacagggccccccccttcccggggggctcccccaacttccggctttgagacaaccacgggggccttgccgggtttaaaaggaatttcccctt

SEQ ID NO: 20283 - DNA, 687 bp, Glycine max
  Clone ID: PAT_MRT3847_118319C.1
ttttggatttctatgtccacctctgtggtactatgcaacaagaaatgagaaccatccaattccacaaccataacatggaaggggtttatcataaagtcccgtttggaattggatggttctcatttctttttggatttctatgtccacctctgtggtactatgcaacaatcctctactttggaaattattacaggaaagatcctagggaacgggcagggttaggagcctctgcaattgctgcattaatatgctcagtagcattgctgatcgtgggagctattcttatgttacgctacccctgatgctagttccagtaataaagtgagaatccagaagcgattaagattggatatcagaaacaattgtacgtgtatataacaaaatatgaagaaaaaatatgcttgaagatactacatagggtgtaccattagagaaggatgaaatatcacagccttggtaaatttgtgtatacaaaagaaatatatctcacgttaagttattacgaatctcacataatttgtactattgatcttttttcgactaagagtttcgtattggagaatacttaggctactgattttgctataatgttatttttttgtactcaccattatattaatagagagtaattaagattcgaattttgaattacttagttaaaaaatataaatcattattacttatatt

SEQ ID NO: 20284 - DNA, 145 bp, Glycine max
  Clone ID: PAT_MRT3847_11831C.1
cagatagttgagaacttttaagagaagttttggcttcctcaatgatctgttccccaggtggtaccactgtgaaccgtgcccgtgccggcattgactctccatacactggccttaagtccatggctggctttcctaccagtttgac

SEQ ID NO: 20285 - DNA, 464 bp, Glycine max
  Clone ID: PAT_MRT3847_118320C.1
gggggaaaaagccgggttcccaacaaaaaaggtttttcccccccccccctttatagaacaaaaggaactcctcctcaaaggacctcacgaaaaggtcttcctttttagaaagggcccggggccatggtataacctaaacaccgatttgcaaaggctattgaacccaagcccttgggggggaaacaaaaagggccccccccgctaaaaaacccaggagaggcccagcccaaatagccaagccaggcgtaccccccggggaaacatcaccggggggggacccacccctgggggcgaaaataggaccggaaccctcgaccttagccccggttttggctacaaacggggaaacaccctttccctttcctttcctgccagaagcatcaggtccctcccccaaagccctgccacccttaattccctaagggttggcagtcttgatcttcttgcccctggccacaactttg

SEQ ID NO: 20286 - DNA, 326 bp, Glycine max
  Clone ID: PAT_MRT3847_118321C.1
ctcctcgttagaagacgacagcagggggtcgagggggggccttataaaatgtaacacggcgggatagaacctcgaatcttcaaaagttggcagtgcagggattggtgttcgctcaagttaatgagagatggcctgaatccccgtatattgctggacgctgcaaaaagttgcatattggcttattgctctgctcccagacggcaaccacttttgattaggcgagcgggaggctccactggacaaagagacatgcaagccccttaggcctgtttgaggattgactctgagatgctttattctgaccaattacttcctgccctttgatc

SEQ ID NO: 20287 - DNA, 255 bp, Glycine max
  unsure (1)..(255): unsure at all n locations
  Clone ID: PAT_MRT3847_118322C.1
cgaatnncaacatanngtgnctacacanccaggncncaggntacaagntntatgtanancggnattntgnctngagancnncnagtngntnntngactcgagnacgaggnnngtangttcctgcgatgatcncgancnccagtntgntnnccancgnncagtagtncggntgncggnatggttgcntnaatttcatcgggttgagatccatgggncnancttgcncgncnccnaagacnaatcaatgncatttac

SEQ ID NO: 20288 - DNA, 480 bp, Glycine max
  Clone ID: PAT_MRT3847_118324C.1
ttgtttgttgtgttagttgatgcttgtgatggtcactagagtgatgggggggatttgaatttgatgactaaaaagcaaagctgaaaagtgaaaattagaatgtttaagttactgtgactgactggagaagaagtctacaatttaagaagtgagattcaatgagtgatgtactttatgcgggtcggatttttcatcttgattgagtttttttctttcttgatttattggtgctttccttttgagtcacgcttttttgtcttttcaccaatgaaaccatgtttttgtgaggtgtgttttgtgacaagtggaattgtgggaatcttgtttcatggatgatttgttttcgtgggtcttattttttttttctttggcaaattatcattactttatgctccctttattttgtcccggtgccagtttgtaccagctagtttatttaaacttatgctcttaacatcttgttttgtttggtattttggc

SEQ ID NO: 20289 - DNA, 240 bp, Glycine max
  unsure (1)..(240): unsure at all n locations
  Clone ID: PAT_MRT3847_118325C.1
tggtacggcctgcaggtacggctgccgcagtgtcccgggggacccacgcggngcgcccacgcggtgctacgggtgcgagaggagagggagggggagctcaagagatatataaattacactgccaataacagagacattgtgagacttttgaaaattgcaaaacagagcataacataaatggggtatattgagctttacctgggtgttatttttggggtgggtgatatattgaggtttgac

SEQ ID NO: 20290 - DNA, 787 bp, Glycine max
  Clone ID: PAT_MRT3847_118326C.1
ccacgcgtccggctgctgacaccttcagaaagctcttcacggaagagtatggatcataatttagaaacccttgactctcccaatggcaaaaagctatctgctgcaaaacctggtgatatgtctgttgtatatgtttgtgaactgcctgaaataaggggaaatttgatccagagaaagctaaggctcttggtctcagacctgggcctaagtatcgtgaactgcaacttggaaactcagtgaaatctgatcgccagaatatcatggttcatccaagtgatgtcttgggtccttctgttcctggtcccattgtactccttgttgattgcccaacagaatctcatttggaagcattattgctcgagccgctcgagccgagttattgtgatcaagcagacaaccaaccagaggctgggaagagtgtcacttgtgtaattcacctaactccttcatctgttgtgagttgttcaaattaccaaaaatggatgaagaaatttggttctgctcaacatatcatggctggacatgaaaagaagaatgtagagattcctattttgaaagctagtgcaagaattgcaacacggcttaattacttgtgtcctcagttctttccagctccaggattatggtctcttcctaatcacaatagctcaaaatttggctgtcttgcttcaagtgagggttcattttcagaactttctgaagtcatttctgctgaaaatcttcttaagtttactttgcgtccttatgctcatcttgggttggatagatcttgtattcctacacggcg

SEQ ID NO: 20291 - DNA, 612 bp, Glycine max
  Clone ID: PAT_MRT3847_118327C.1
tctcacgcgtccgcccacgcgtccgatctgagaaaatggtgttgtctgatctggagatctgcaagccaacttcaagttctcacaataaagttggtatttctagatctgggagagatctgccaccagctcattacttgttcaaaattgaatcatattccgaattgatgaacacaggagtggagaagtatgagactaatgttttccaggctgggggatacaaatggaatttgagggtttatcccagaggaatcgagtccgagagaggcaaaggtctatctgtttatttacagctcacagattgtgaaaggttcccagcgaagagaacagtgtatgcaaaattcaagttgggaattttagaccagctcaacaataaatatcatgagagaacagatagccactggtttcgtgcctcaggtaatatttggggttttaaaaagttagtagctctgagtgaactctatgaagcagcaaaaggatatattaaagacgatactgtaattgtggaggttcaaatccttgtgatgtccatagctaagatttccacctagctagaatttttcttcttctgattaacattaaataaattaagaatcctgtgtggttgtggtggac

SEQ ID NO: 20292 - DNA, 408 bp, Glycine max
  unsure (1)..(408): unsure at all n locations
  Clone ID: PAT_MRT3847_118328C.1
tgtccagagcacttattnacttgttggagattgacaacaactacgcgcgacatttgcgatatatacagcatgcagatcgggatattattaatactaactatatgcagatgtcttaagttccgagggaggctcctgaggacaaggcgagttaacggtcactgctgaattatgtttcaggtaataatctggaaacgcaactagctgatcttgtcaatcccgcaaatgagttacgagaatcgtattctcacagttcagaggaagctacccaattgtgaatgaaagctctctctcgtattgaccgcttgcaaaatgctgctgtgcctaccatagcacatattgaacagtgccatgcacacactatgatgttaatgcttctgattcacatgtctgcatcttcctacatgggac

SEQ ID NO: 20293 - DNA, 492 bp, Glycine max
  Clone ID: PAT_MRT3847_118329C.1
aatacattcagttatgtcttcgcgtatcaaatattttcttttcatatcgatgcgtacgatatttttccagcaattaatgtatgtgagacagaaactttcacttacagttttttctttttactcgagccgcacagagcaagaacactgttccaatacggaatctaaggcgaagcaaaccaaacatcttgaatcatgggttcaacaggtgagactcagattaccccaacccacgtatctgatgaagaagcaaaccttttcgccatgcaactagccagtgcttctgtccttccaatgatcctcaaatcagcacttgagcttgatctgttggaaatcatagccaaggctggccctggtgttcatctttcccccactgacatttcttctcagctcccaacacagaaccctgatgcacccgttatgttggaccgtatattgcgcctattggcttgctacaatatcctctctttttctctccgcactctccctgatggc

SEQ ID NO: 20294 - DNA, 377 bp, Glycine max
  Clone ID: PAT_MRT3847_11832C.1
cccacgcgtccgcccacgcgtccgtacggctgcgagaagacgacagaaggggaccagaaaatgcaatgatttgtaaggaatgaagcagtaagcttttgtgaagggtggaaatggagtctcaaaaatctcaaaatcatgctaaaaaggcaaacaagtacattattatggaagttaccaagcgcaacatagcaccatgtagcaaaaactgcctaccgccagcatcaaatccttacaacagaggatgctccaggatatgcaaatgcagaaaatgaagtcttcagttcgttcaatgggaagaataaggaaatcatatacctatttttcatcttttatatttatgcagtcgtctatgatgaattgatgagtgttttcctggc

SEQ ID NO: 20295 - DNA, 963 bp, Glycine max
  unsure (1)..(963): unsure at all n locations
  Clone ID: PAT_MRT3847_118330C.1
ctcgagccgattttgtatcactatgacacggttgtgttcttgtaggtactatttgaaagatgcagtccttgaagggggtattccatttaacaaagcatatggaatgacagcctttgaataccatggaacggatccaaggtttaacaaggttttcaacaaggggatggctgatcactctaccattacaatgaagaaaattcttgagacctacacaggctttgagggacttaaatccctggttgatgttggtggaggaactggagctgtagtcaacatgattgtctcaaagtatcccactattaagggcattaattttgatttgccccatgtcattgaagatgccccatcttatccaggagtggaacatgttggtggagatatgtttgtcagtgttccaaaagctgatgctatttttatgaagtggatttgccacgattggagtgatgagcactgcttgaagtttttgaagaactgctatgaggcactaccagataatgggaaagtgattgtggcggaatgcattcttccagtggctccagactctagcttggccacaaaaggtgtggttcacatcgatgtgatcatgttggcacataatccaggtgggaaagagagaacagagaaagagtttgaggctctggccaaagggtctggattccaaggtttccgagttgtttgctgtgctttcaataccaacatcatggaatttctcaaaaagatttaagttctttggcatggattcatgtcaagctgcatttgggttttgagattgaggttgtggttgtggtgctactttccaaagctttcccggaaaaacgtaattttctcttaggaaaagaataatgaacaagttcaatgtagactgccaatatcaaataacaagtttcattttgtggattatatatataaaaaaaaaaaaaaaaaaaaaaaaaaaaaaagggcggccgctctagaggantcaag

SEQ ID NO: 20296 - DNA, 707 bp, Glycine max
  Clone ID: PAT_MRT3847_118331C.1
gatttacgttactcccaaatcgcaattggccaattccaccaaagctcctcacgctcacactcactcatttgcaaagaaagagagagaaatggcactgagggcagccgtgctccgccacgttcgtgtgccactccaagccgctccaaaactgcagccatggcgtgccatgtcatcacacggcgacgatcatctctccaaagaggaggtcgtcgaaagagtcctcgccgtcgtcaaagatttccccaaagtcgatccttccagggtgagtccagatgtacatttccagaaggatttgggtttggatagcttggacaatgtggaaattgtaatggcactagaagaggagttcaagctagagatcccagacaaggaagctgataaaattgactcttgtcatcttgctattgagtacatttctaaccatcccatggctggttaactaatgtgtcctttttcctatttggcttcatgttgaacttaaacacagtgcaaccttgaaccttccccttactttcactggatgtttctggaatctggtgttgttggtatgttttcctttttccatttaaattggagtaaaggggctggttgtttagaataatgtgaattgttcagagaagagtttgtcaatgaaaaactgggtttctagaaaaaaaaaaaaaaaaaaaaaaaaaaaaaaaaaaaaaaaaaaaaaaaaaaaaaaaaaa

SEQ ID NO: 20297 - DNA, 1962 bp, Glycine max
  Clone ID: PAT_MRT3847_118332C.1
cgtccgttcaatcgccgatttcaccatcattattattataattacaattattattattctctcgctcgatttgtttcaattacgacatagtcgcgatgatggcctctttgtttttttttgtgttatcaggctgcgagaagacgggagatgggcagaataaggtcggaggattgattgagaatcgttcgagactgcaaaatccaaaaccaaacacaacgcacaacattcgtcattcaccgccttgtcttgtcttcttctgtctccgaatcacggaatctctctgaatcgcgggattaagagaggaatatgcaacagaggcttaagttgcagcaacaacaacaagccctcatgcagcaagctttgcttcaacagcagcagatgtaccaccctggcatgctcgccgctgctatgtctcagatggagcctgttccaagtggaaatttgcctcctggttttgatacgtctgcatgccgtagtgtttatgtaggaaatattcatgtaaatgtcaccgataaacttcttgcagaagtttttcagagtgctggtcctcttgctggctgcaagctcataagaaaagaaaagtcctcttatggttttgtggactaccacgatcgagcatctgcagcccttgcaataatgacattgcatggacgacaactgtatggtcaagcacttaaggtgaattgggcatatgccaatagcagtagggaggacacgtcagggcacttcaatatatttgtcggtgatttgagtccagaggttactgatgcaactttatttgcttgcttctcagtctatcctagttgttctgatgcaagggttatgtgggatcacaaaactggtcggtcaaaaggatatggttttgtttctttccgtgatcatcaggatgcccaaagtgcaataaatgatatgacaggtaagtggctgggaaataggcaaatacgatgcaactgggcaactcaactgggcaactaagggtgctggtggcagctccaatgaagagaagattaatgacagtcaaaatgctgttgtgcttacaaatggatcttcagatggaggtcaagataataacaatgaggatgctcctgataacaatccttcatacaccacagtttatgttggcaaccttcctcatgatgtaacacaagctgaacttcattgtcagttccatgcactgggggctggggtgattgaggaggttcgagttcagagggataaaggttttggatttgtcagatacaacactcatgacgaagctgcactggccattcagatggctaatggaagacttgttcgtgggaagaatatgaagtgttcatggggtagtaaaccaactccacctggaacggcttcaaacccactacctcctcctgctcaaccatatcaaatacttcccactgcagggatgaaccaagggtattctcctgcggagttgttggcttatcagcgccaactggccttgagtcaggctgctgtatctggtctttcaggtcaaactcttctgcaaatgactggacaacatggcctagctccagcttcgatgggcgtaaactctggggcatctcaagccatgtatgatggatataccggtaattcatcgagacagcagcttatgtactatcgttgacacactggccagcgcagattcacagttgcattgttatcttctgggggctttgatgtgcatcacatttctctttgcttccccacagcatgtccttttcatactgggctttttttatttaggtattatcgtggcttgatatttatttaatttttacgtcgtgttgtattttgtattgtttgatctaatgaggatttgatggctcgaaaaagaggaatctatgttttgctagaaagagaagcgaattttatgttcgggtagttttcatcaatgttattgtgtattatatttatatataagtatgactcaagttcgtgttaataaaaaaaaaaaaaaac

SEQ ID NO: 20298 - DNA, 654 bp, Glycine max
  Clone ID: PAT_MRT3847_118333C.1
atttctgtggtcgtgggttcgcgccccacgtgtgggcgccgaccaaagctcctcacactcactcattttgcaaagcgagagagagagagaaatggcactgagggcagccgtactccgccacgttcgtgtgccactccaagccgctccgaaactgcagccatggcgtgccatgtcatcacacggcgacgatcatctctccaaagaggaggtcgtcgaaagagtcctcgctgtcgtcaaagatttccccaaagtcgatccttccagggtgagtccagatgtacatttccagaaggatttgggtttggatagcttggacaatgtggaaattgtaatggcactagaagaggagttcaagctagagatcccagacaaggaagctgataaaattgactcttgtcatcttgctattgagtatatttctaaccatccaatggctggttaactaatgtgtccttttttcctatttgacctcatgttgaacttaagcatcagtgcaaccttgaaccttccccttactttcactggatgtttgttagtatgttttcctttttccatttaaattggagtgaaggggctggttgtttagaataatgtgaattgttcagagaagattttttcaatgaaaaactggtactgggtttttgaaggacccgt

SEQ ID NO: 20299 - DNA, 2037 bp, Glycine max
  Clone ID: PAT_MRT3847_118334C.1
ccccctttactcaatttaaatggaaaaaggaaaacataccaacaacaccagattccagaaacatccagtgaaagtaaggggaaggttcaaggttgcactgtgtttaagttcaacatgaagccaaataggaaaaaggacacattagttaaccagccatgggatggttagaaatgtactcaatagcaagatgacaagagtcaattttatcagcttcattgtctgggatctctagcttgaactcctcttctagtgccattacaatttccacattgtccaagctatccaaacccccacgcgtccgatctatctatatcgattttatcttatagaaataattgaaaaatacattcaattatgtcttcgcgtatcaaatatggtcttttcatatcgatgcggacgatatttttccagcaattaatgtatgtgagacagaaactttcacttacagttttttctttttactcgtcccgaattcagccggcgcgtccgctaaaatggtgacaactcacaagctcacagagcaagaacactgttccaatacggaatctaaggcaaagcaaaccaaacatcttgaatcatgggttcaacaggtgagactcagattactccaacccatgtatctgatgaagaggcaaaccttttcgccatgcaactagccagtgcctcagtactccctatggttctcaaatcagctcttgagcttgatctgttggaaatcatagccaaggctggccctggtgttcacctttccccctccgacattgcttctcggctcccaacacacaaccctgatgcacccgttatgttggaccgtatattgcgcctcttggcttgctacaatatcctctctttttctcttcgcactctccctcatggcaaggttgagaggctctatggtctcgcccctgttgctaagtacttggtcaggaacgaagatggtgtctccattgctgctctcaacctcatgaaccaggacaaaatcctcatggaaagctggtactatttgaaagatgcagtccttgaagggggtattccatttaacaaagcatatggaatgacagcctttgaataccatggaacggatccaaggtttaacaaggttttcaacaaggggatggctgatcactctaccattacaatgaagaaaattcttgagacctacacaggctttgagggacttaaatccctggttgatgttggtggaggaactggagctgtagtcaacatgattgtctcaaagtatcccactattaagggcattaattttgatttgccccatgtcattgaagatgccccatcttatccaggagtggaacatgttggtggagatatgtttgtcagtgttccaaaagctgatgctatttttatgaagtggatttgccacgattggagtgatgagcactgcttgaagtttttgaagaactgctatgaggcactaccagataatgggaaggtgattgtggcggaatgcattcttccggtggctccagactctagcttggccacaaaaggtgtggttcacatcgatgtgatcatgttggctcataatccaggtgggaaagagagaacagagaaagagtttgaggctctggccaaagggtctggattccaaggtttccgagtcctgtgctgtgctttcaatacctacgtcatggaatttctcaaaaaggtttaagttctttggcgtggattcatatcaagttgcatttgggttttgactttgagactctgcttgtggtgctacttaccaaagctttcccggaaaaacgtaaatttcttctaatgctttaggaaaagaataatgaacaagttcaatgtatactgcctttataaaataataacaagtttcatattgtggtttatgttcatatatatgttctgattgaggttgtggttcggtttcctcccttaggaaaagaataatgaacaagttcaatgtagactgccaatatcaaataacaagtttcataatataaaaaaaaaaaaaaaaaaaaaaaaaaaaaaaaaaaaaagggcggccgctagctaggaatcaag

SEQ ID NO: 20300 - DNA, 488 bp, Glycine max
  Clone ID: PAT_MRT3847_118335C.1
tggcttggaacctttgggctgatttatgtgcttgcatggtcgtgagaagatgatagaaggggaaaacctcaaccaaaaaaaaaataaaggcaaccgacacccctccaaagaataaaacgcccgccacgtccaacactcccaacccggctcgcacccgcacctatcttgcttcccacctaagcagcccccctctggtgaaaccgtttgaagttcatgtccctccgaacttaaccgcggacaccacgttagcaacatttccatctcccccctccccagtccccgcccggtaagtcgtcgcaagcccctgacgacactcgcaacccgagcaacgctccaaaaaaaaaccaagaacccactagaaaatcaaaacctgaataccccaataacccaaaagactaaacaagctccatagcgcgaaccactgaccttaacaccgaaacccccggacacacatgaaaaaacatggattactctactactcatgcccc

SEQ ID NO: 20301 - DNA, 555 bp, Glycine max
  Clone ID: PAT_MRT3847_118336C.1
ggtaaataattgagcctcactctatcagtgcagggttggactaccccggggttggactagagcatagtttctcgaaagatgtagggcgtgctgactactaaagtattactgatgaagaagcattggaagcctttagagattatctcagctggaaggtattactgcagctctggagacatctcatgctctggcttatttagagaaattctgccctacccttccaaatgtaactaaggttgtggttaactgcagtggcagaggggataaggatgtccaaactactctcaagtacttgaatgtttgaaagtggtgttcctgttctgctagactgctacattgctatgacatgattgaatctccagcatagctgaacaacttggctcttgaatggttttctttcatattgagaatggtatgaaattcctgagtttaggtcgattgcttgtgagagaattcattagggaataattcactttgtgaaaaccaacatgtgatttagacattttgaaaatgttataagggattacgtgatgttgttgtctttgtttgtttcaa

SEQ ID NO: 20302 - DNA, 406 bp, Glycine max
  Clone ID: PAT_MRT3847_118337C.1
aaccgccccaaccaaagaaaggggactttttttggccccggggtaacaggccaggtatggcccaattttatttaaccttttttttggggcccaagtttttggggggccccaacttttttttgcggaaattaactgcacgggggggcaggcctacaaaacaattgcggaaaaaaattttgacaaaattgtacttttgggcaaactgacaaagggacggttctaatatccccccccaaaaaccccccccccggggcaagggggaccctttttgaatgttgaaatccaacaggggggcgccatcccccaactgtttgccaaaaaaaaacaaactttggtggtcaggggggaagccctccttgtgttggatcttggccttaaaatttccaaaggagccactgggctccac

SEQ ID NO: 20303 - DNA, 184 bp, Glycine max
  Clone ID: PAT_MRT3847_118338C.1
tcccagggattataccttggatggcaccaaagctactgacaggcctaagacacactgcttcactatacgccctatggagcttaatcttgagggccttaagagatattcaaactgtgggaggtccattatcaagaatacgcacaggctcaatcataagatgcgaatcgacccatactccatgaac

SEQ ID NO: 20304 - DNA, 362 bp, Glycine max
  Clone ID: PAT_MRT3847_118339C.1
aataaagatatgaaacacagaaacagcgaagcgcccgcctttgccaatgagaagagggcgaaccatgaagacaaaaagatggcattcctcgctctgaaaatcggagttaaacgctatgatcatatttgcggtatcttctatctgattgagcatcatcgggaacctaatgaaggaccgaggcggatcatcacggcctgaaaaaggtgaagggggaggtctaagatgagagcccccctcttcacactgacaagcgacccacattgggagctgcccctaagtgtggggcacgcgacgaatccatttgaataccaccacgctcatacaatcccttggatgagccaagccctttcagttagggtctc

SEQ ID NO: 20305 - DNA, 644 bp, Glycine max
  unsure (1)..(644): unsure at all n locations
  Clone ID: PAT_MRT3847_11833C.1
cggtccggaattcccggngtcgacccaacgcgtccggcggttacaacaaaaaatatcaggcgcacctaaaacgaaggctcattgaaacactagaagaggagaagatcagaggggacgagctatcgcatactacgaagactatcctgcgctatcaactgatggacctttttgtgcaacttgcactatgctagcgcttcttaaggtcacaagtgcttcacttaacaaggcatggccactataaacaaaaccaggttgatcattgcctacaccatcgacactgattccacagaatctgaaggctactgttatggatacctacaacaaaatgaggacttgaatgtcaacattcggaatatgaataccaggctactgctagacgctaactaatcaccaatcatcatctaagacattacacggagaacaataaatgacatactggctcactatctaataatcctagccaggtgtaactatatatctaaaatatggattaattagacatagaactattctatactcgacaagattatatatatctgcacaaagcttgacctgtttaatgataatcagctgtgcataaaccattctgttgcctaaactattaccacatctgaggctacaagaacttatgaagctgattaatg

SEQ ID NO: 20306 - DNA, 149 bp, Glycine max
  Clone ID: PAT_MRT3847_118340C.1
ttccgcctggggattaatggcaagtctgggctcacctcctaattattagttatcatgtagcaaattaaaagctgtttgataaaaattggctacatgataactaataatgaatggcgagtcttggctcagcttctaaaaaaaaacagaaa

SEQ ID NO: 20307 - DNA, 358 bp, Glycine max
  Clone ID: PAT_MRT3847_118341C.1
caacaaaagggaacaattccgggaggggattacatgacaggttcaaaaaaaaggccccaagttggggggatgcaaggacctggtttcatccgccaagaacctccaaataaccaagaaacccattctttccaaagaccaaagttcactaagggccaaggggtttaattccccatcatgcttattccccaaaaagggaccttgccgggttggggaaaagaaaaactaaacccttttgaaaaccttcaggttttttataaaaaaaaaaatttttgcccttggctgccttgggcttctcaacccgtggcttttgtttttccaacctttccctttcccatttttggaagaaaacgtttttttt

SEQ ID NO: 20308 - DNA, 376 bp, Glycine max
  Clone ID: PAT_MRT3847_118342C.1
cttttgttttgtctacaacctccccgacaaaaaatgcacaggcacttatttctgcatggaaaaccggtgagacgatgccattcatatttgacacggtaacttattatttatcatgcagatttaccatatggagccacttaatgctccaactgatttgtttgaattgtaattatgagttatgatagtttaaacttacgattagtttggttcagaaatggtgtattattccttgatctggcaggtctgggacttgattaaattggcagattatctaacacacagagaggatgtagacccttttaggataggaatcactggaatatcacttggaggaatgcatgcatgtgttgctgcagttggtgatacttgctatgct

SEQ ID NO: 20309 - DNA, 415 bp, Glycine max
  unsure (1)..(415): unsure at all n locations
  Clone ID: PAT_MRT3847_118343C.1
ggggggcccgngnnnnnnnnncnngnnnnnnngggggggggaaaaacaggaaaaaaanaaaanaaagacncgcaccaaangcnaaacccgaaacgngcacaaagaaacaaacacaacaggcagcacaaagggaagccagaaaacagcaagggaaaagaagaacggaaaaaactgttttttttaggacaaacagccacccgaannaaaacccccgcgcgggggggaagccacgacccacagccaagccaacgccnaggaaccancagaccccaaaaccccaacaacaccacccaggggagcaggnannanaccggaccngcacaggaaagggccacaagggccgagaaaagcggagacanccaacacacacgaccaggaggcccaagcgcaaggcaacaagggggaccgaaacggg

SEQ ID NO: 20310 - DNA, 177 bp, Glycine max
  Clone ID: PAT_MRT3847_118344C.1
agcattgcaattaattccactaagggggggtgcttgatacattacgaaaacaaaaagtttcttaatcacactcacaaaagccatggggttttgcatcccaaatagccaaacccggcgtgagtcccaatcccaaaatataacgccctgatttacaaatacagactatccccctaaaaa

SEQ ID NO: 20311 - DNA, 247 bp, Glycine max
  unsure (1)..(247): unsure at all n locations
  Clone ID: PAT_MRT3847_118345C.1
aatacacgaacaaacaaattctttagtgtataaataatccagaaaatccaatgatggaggccaatttaagaaaaaaggaaggggggatattatatatttatatccaagaaagaaagaaaaaaagtgaggcaaataccagggggggaagctttccccgctggctgtnnccagnaaaanccaaannngnataagaaanncctccggcaacangngggcggaacggcggccctcaccctgnaagggcagg

SEQ ID NO: 20312 - DNA, 358 bp, Glycine max
  Clone ID: PAT_MRT3847_118346C.1
catagaccgtaccaaagaatgtgtaccaacagtcataaccgacaattgcccccaccataccggtctgggttgagatttgtgacacatcattctcttcatcagacatagcattggccgatgagacacttccaccgacggaagatggggctacataccattctgggtggtggagaatcaaaagatgaagagtagtgtgttaaaaaagacgctaattgaggtgagacctacttgatattcagcttctggaatgtcatattacccttcaaagatgcaccctcctagacagacgattgaataccttttgacatgttgttgccgcgaccagtaagggcttatacacgacgattcagatgttctt

SEQ ID NO: 20313 - DNA, 219 bp, Glycine max
  Clone ID: PAT_MRT3847_118347C.1
gtgagagaagaagttgttgggttgagttggattggatttctaatctaatctatacctttcttttttcctatgcttttaaggcacaaaccctattttcttccctcctctttttttttcttattgttattccttgcctttaccctttagggaaggaagaatgaacaactatactactattatccttattattgatattattgtcattaatccttttattat

SEQ ID NO: 20314 - DNA, 451 bp, Glycine max
  Clone ID: PAT_MRT3847_118348C.1
tgcttgtttatcattttcttacttacctatcacgctctgccacacaacttcgtctgcgcaataacggaataaaaaaacaagactgattactattatggcgccgagggatcataccacaagcaacgctaagcgttaacggtaacggcaacagcggcctgaaggaggagcattttcgaggagtgagaaagaggccgtgggggagatacgacgcggagatcagagatcctggcgagaagagccgtgtatgactcggaacatttgagcacagaggactgatgcagccgcgtgtatacgacgccggagcacgagagttatgtggtcatacggccaacgacaacacttccctgaggccttgggaaaatgttaagaactctagccacatccagagcaggaccgaacagtccttcagccgctagcgctacatcgtcgccgatgccttgcactagacctt

SEQ ID NO: 20315 - DNA, 401 bp, Glycine max
  Clone ID: PAT_MRT3847_118349C.1
ggggggatgaaaatgaaatttttggtgataaaagaaggggatgaagatgcccaaaacaagaaagaggactcgtaagggggcgtaaatcgcattcaaatccttaaaacaaaaacttaccgggtgacaaacgaattacaaacgaaaaacaatgttaaagtcgattaggatcccaattcgggagcacctcggcccccggtttcccttctttcttcttcttccctcggaattcccccaaggggggaccttggaaccctttaattaacctcccttacacctttttttagcaaaaaatggcttttggagtcttgggcgctcacccaggcgagtttttgctttaacccgaagtaactttttttgccccggcgaactaatttttttaccccttaacttttttggggcct

SEQ ID NO: 20316 - DNA, 443 bp, Glycine max
  Clone ID: PAT_MRT3847_11834C.1
cggctcgagtgttgcctgtggagtctctgctgaaatgaatcaggattcgagctctaggatgagacagaaaatgaaagcatgttgtttgccaggacactgtgggtttatattgatgtgtaacaagttgatttggaacactggactctcattctgttattctggttttgttttttttgttttgttttttttcttttgtaaaggcaatgagctagtcccagaaaggatccttcagttacatacaatttgtttaatgaaatgtcatggctctgttcatatttttgtcttgttcttccaataggtatatacaactttcagagcctcttgtatttggaaagctggaaaggcccagactttggaatagtgtcttggttccactgattttgctttgatttttttttagctttgattttttttaaactaaagccatataaagcttgtggatt

SEQ ID NO: 20317 - DNA, 319 bp, Glycine max
  Clone ID: PAT_MRT3847_118350C.1
aaatagctgcagggagaagggcgttttattttgatggcgagcagtttgctgtgaaattgactgatgaatggtgcccaatagtactagaacctgaaataccatgattaagcccatatgcacacatattgtttggaattaaatggcaacagagagaacaccattgaattttgattctagcaagcagagcttttgtcaattttctattgacctttttggtggatgaattttagtttacaaaactggagattggatctcacttatacataattcttcaattagtaacttgtatagagttgttgcttggatgaaaggctgttta

SEQ ID NO: 20318 - DNA, 319 bp, Glycine max
  Clone ID: PAT_MRT3847_118351C.1
gagagagagagagaactagtccgagttttttttttttttttttcgtctaagaaccctgttctaattaggtatatgatattagtcagcagagatcgaaccaattgctatactgatccaggtcccatgtgaaaaattcacttaaaatattatttcctttacgtaatttgaaaacttttaataaattcatgatgattgtccaaagctattgcattgctttattataccaaactgaacaaaatataaggatgccatctaaccttttcttaaaagaattgaactgtagtgaaattagaggtttgatcaacatttcaatattttc

SEQ ID NO: 20319 - DNA, 270 bp, Glycine max
  Clone ID: PAT_MRT3847_118352C.1
ggctcgaggttctagatcgtgatctagagctagaccggagttgggatttataggaaccctcctatgcgttcatttatcgatccacgtccatccacatctttcttctcctattgtctctgtactgtatgcttcttctctgcatgtgagagtacgactccatggacttgagcgatgctgattgagaatcaagggggactgcccatgctctgaactccggggcatatcggatctgcgctagtgggcgatactgtatgcgtgaatgtaccttca

SEQ ID NO: 20320 - DNA, 931 bp, Glycine max
  unsure (1)..(931): unsure at all n locations
  Clone ID: PAT_MRT3847_118353C.1
tcaatagcatggatgaagctcccctccgtgaagtatatgctggcgcatggtctttcatggaaacctgnaagttccccctcttcatagacaaatactttgaattgtttctccatttctaagtagctcctgtgaaattccttaggattccaatacattggacctactggaacataatctgaatcttgtgtttgattccaattttcagcttctctgattgcagctcgagcttgtgctagaacagcttcagttttatctaagaaactgaattttcttttccgcttctgtcttgggtgagattcatcagattcatttgcaggagctaaattgaacccgggtttggagacattgaaaacttcagtttcattagattgatgaagtgtttgtaaagaggaatttgaaggaggatcaagaagtgtttatccaggcatttaaggagtcccaagagctacacgaggcataacgttttgcaataaaatctcttccgttataaacagttgaaccctttatagaagcaaagcccgcaagcactaagagaggcaccatgaacaagaagagcctcattgtagaagaagcttctgttcccctccatgaaaaacagttttcccatctgcttctatcgtggttaagattcatccgattcatttgcagcagctaaattgaacccgggcttggagacattgaaaactttagtttcattagattgatgaagtgtttgtgaggaggaatttgaagaagcaggaagaggagtaaatgagatagaacagtcagcaatgaaaccccatctgcaaaggcttggaccctttacagaagcaaagccagcaattagtacgtgaggcaccaagaacaacaagagtttaatttttgaaaatacttgtgaaccccaacaagcccaccaattccatctgctactacccatttgtgatattccaag

SEQ ID NO: 20321 - DNA, 179 bp, Glycine max
  Clone ID: PAT_MRT3847_118354C.1
atttatttccctatccctgttttctttcatcttcttcttgtgcccgtttcttttgtccttcttcaccaacaagtaccgcacacagggtaagtaaatcttttaatctctgcttggaaccgtgcctaatcaactcaatctccaagtttcgacctaggacgctccaaaatttcaaattaggg

SEQ ID NO: 20322 - DNA, 295 bp, Glycine max
  Clone ID: PAT_MRT3847_118355C.1
ctgaatcctggtattccaggcactagtctttagagcaccatatctaagtcaatttcacagaggactgtttgtaatcagacggcaacaggggggacagcattgaatttcgaatctagcaagccgagcttcaggcaataaactattgaccttaactgtagaggaatgttaacggacataactggagattgcatcacacttatgccaagatcttcaattagtgactcgacgcgagttgctgattggaaaaaaggaccgttaacggtcaagactgggatgtctgcgaatgcatgaatca

SEQ ID NO: 20323 - DNA, 485 bp, Glycine max
  unsure (1)..(485): unsure at all n locations
  Clone ID: PAT_MRT3847_118356C.1
aaaggctccctctttttacattattacgaccttaaaaaagggaggaaatttncaaataggcgaaacatactccaacaagagaggtcctcgccataagtgtccttgtcttgggaggcaaactcaacagaacaatgcgaaatgaaaccaccctttccgaaacatcccaaggattccccatttttaaaaaacctgggggaaacctgaggaacaaaaaaagctgtgataaaagttttacccccatttttaaaatctcgcaaaattccccaaaaaatatcaaaaactggggacttttttggatggtcaataaggaaacttaaattccattaggtttgttttgcccccccataactccacctttgaaagaccctattaggacctcctgcctttattgggaaaaacaatccccccgaatgtggttcccattttgaccacttacatgcgtcctagagccgctagagcctctcgagccgctagagcgggtcgag

SEQ ID NO: 20324 - DNA, 198 bp, Glycine max
  Clone ID: PAT_MRT3847_118357C.1
gttataaaggggccaccatttcattggggttataagcttccgagctaccttttcatttccacgtaaaaagtgccatcagctttccctaattgccaaatcaactactcatgtatctccaacacaagggcaatcgggtgtgcttctctgagataaacacacagataatggggcctgatggcgcgtgctgatatcataacc

SEQ ID NO: 20325 - DNA, 232 bp, Glycine max
  Clone ID: PAT_MRT3847_118358C.1
gtttctcaaccttacttcataggatctagtgataaagacctttccttcaccttataaaagagtcgtggctatagacattattacattatctacaaattcggctttgaatatgtgatacactctgaagcatacagattcctacaaagaatacaactatttaccatattttgataccaatccaacaagatggctattacgctgaccctaggtggtttcatacaagcaatatacc

SEQ ID NO: 20326 - DNA, 1939 bp, Glycine max
  Clone ID: PAT_MRT3847_118359C.1
ggaaagcttctgaatagcaggaatcagagcatggatgggaaaaataaaaaagctgtgcaaaaagtgaagacgataagccaacagagaaaaagggttggggtactgagccatttgcctctaatcgctgataacgtaatccatattcagagcgatatcctcgtacatctcgttaaggagatagaaatatatcaagaaacttggtgagaaacactggctgatgatgttacaaaaggcgctctcaacaaggacgttttcgatgcccgcccagcggagcgaatggtcacagataccaaaccagaaatagacggagtaggagcaactcgtgcagtcctgtgagcggccatttcagctaccgtgaccgcagccggagtccaagacgtagtcctagtccagcagacagacgtggtcacattagtacccaattaaaatcacgacttggtccaagaagtgatgaccgattgccagacagggggaggtcaaagtccaaatctagcaccaatggagccggagctctgaggactcaagtgattcaaatagcgatagcgctagtggcagtagttctagcgatgagaaagctgatcgtcatgcctcaggtcgtaaagcacctgctgacaataaagcccggagatacctagacacaggaaagcaattttccaacccttcttgtcaaaggcaaactattcctgaacaaacaatggatcccaaggtaagaagaattgtggacaagcaatcacatgaagaaggtgaattctctccggagaatggtgcatttgtgaataacaggcatgatactcaagctgaatttagtaaacctgctaagcaacatgctaattcagatgattcaaatcacaatagaggtgcaagtcctggaagaagtcctaccagggattctggggagctaaaccaaggacgtgctttgttgttggctagtcctggcaaaaaaagtcctggccaaaaagcatctgaacctcctgcccccaaacatggtcagggattttcaaaaagcccttcaccaaatagcatgcctaagcgtattaaaaaagggcgtggctttactgagcgttatgcctttgcacgaagatatcgcactccatctccagagcggtctcctcctcattcatatcgttatggtgatagaaatataagaaggaactttgatagaaacacaagctacagaagttattctgggcgctctccaccacgacgttttcgaagcccgccagggggcaggaatcgtccaagataccaaagcagaagaagtaggagtaggagcatctctggcagtccagtgcgtgggcgttttagagagcgtgaccgcagcaggagtccaagacgtagtcctagtccagaagacaggctgcctctgataagtgacagattaaaatccagacttggtccaagaagtgacgaaggactgcgagacagggggaggtcgaggtcgaggtcgaaatctaggagcaaaggctcttctcactccagatcccctgatgccacaccaccaaaacgatatgataaaaggacttctgtacctcgtagcaggtctagatccagctctgcatccggccaaaagggtttagtttcttatggagatgccagtcctgattctggctcaaggtagctaggtattatgctctgactagataccaactctcaagtcccagctggacctgaaattgctatacattatattacaagtctcaagaagagttaagtgttgcattagcttaaaaacgaccgttctatcatgttacttttagtaagagccaaaacttgaatgatgcgtcgtaaattggatctgccgtttgtgtttaataaatatttgttaacagtaatttttttctttttgaatacaatccttcccttttaagataactattattttcatgttttttttataaagcaatattcaaataattcaaaatattaccttcgttttata

SEQ ID NO: 20327 - DNA, 456 bp, Glycine max
  Clone ID: PAT_MRT3847_11835C.1
gtggaggagccaataacctgcaggttaatgccctagtggctcggctgcctctgctccttccccgggcccctcgctcactaattccgccaatcccagtctctccacctattctggcccccaggctttcttcaggtgccctgaaagtggctacactgcctctgtctagtagggccggggcacccccagcagctgtgcccatcattaacatgatcttaccaactgttcctgctttgcctggacctggacctgggcctgggcgagctccacctgggggactcactcagccccggggcacagagaacagagaggtaggcataggtggtgaccaaggaccacatgacaagggtgtcaagaggacagctgaagtacctgtgagtgaggccagtgggcaggctccaccagctaaagcagcaaagcaggatatagaggatacagcaagtgatgccaaaaggaaac

SEQ ID NO: 20328 - DNA, 504 bp, Glycine max
  unsure (1)..(504): unsure at all n locations
  Clone ID: PAT_MRT3847_118360C.1
ncattngaggcatttttatttttttttttgtttcttttttttttttttttttcgccggggggaacattttgtccaccgcggggaaagaaaaaatttggccccattttttttaaaaagagcaccaccccccctcttcccgaagatgagttccttttttttttaaacccaacccatacaagttttgggggggcgccaccttattttactccacatggatacccaccatcaggcttttcaaataaaggagggtataaacaaacagctttttcaccaccagttttttcgccccccggtgtatttccgcattcaagccactattctttcgaatacccacctggatatacgcctcggggagggtcttcacccactggtggtcctctcccaaaaaaaaaaaaaaaattttaccctggcggggagggctatccacctggggggcctgcatataccgcccggcgtgaaagctggcctggcaggatagttgcccgctggtgttgttggtggtgc

SEQ ID NO: 20329 - DNA, 1160 bp, Glycine max
  Clone ID: PAT_MRT3847_118361C.1
ttcgcatttgcggcatcgctgtgtcctttttatatcttcactagatctactacactcccaactccacacttcttcttcttcttcttcttctgtccggattgcttctgtctcctaagatactttcctcttggtacctttaatgtttcaaaatctgagtttttttttctttttgttttctgacagacaagaaagcagggaaaaaatcaaacatatacttcagcaattagttccagattcgcagaacaattatgacggcagcttcctcatccactccatttttgggaatcagagaagaaagccctcagattacaacacaccatcaaccctccacagtttctccaaccacagcgcctcaaaagaaacggaggaatcaacctggaacaccatatccagatgcggaggtcataaaactatctcccaagaccctaatggcaacaaacaggtttatatgtgaggtgtgcaataaagggttccaaagggagcaaaacctacagcttcacagaagaggacacaacctgccttggaagctaaagcagaagagtacaacaaaagagccaaaaagaaaggtttatctgtgtcccgagcccacctgcgtccatcatgatccttcaagggctttgggagacctcactgggatcaagaagcactactatcgcaagcacggcgagaagaaatggaagtgtgaaaagtgctcaaagaaatatgctgttcaatctgattggaaagcacattctaagacttgtggcactagagaatacagatgtgactgtggcactctcttctctaggcgtgacagtttcatcactcataggggccttttgtgatgcgctagcacgtgtaaccagcagagaacgttgcatctatatttccaaggggacccgtagcaatggtgtctatgtgcatcaatggtggggagactgaattgcattgaacctttgatgattattatggtgttagagaaactctgtgtatgtacaagtttctcttgtgttttatgtatttggactatagtccaactatgtctctgttttgtgtttgttgtctgtgaaagtgtgtaggatgctatgaacatccgagtgctttatggttgggcgattaatgctaaaataaacaaccactgtcgttctcgtttgctaataaaatctgtgatgattcgtggt

SEQ ID NO: 20330 - DNA, 396 bp, Glycine max
  unsure (1)..(396): unsure at all n locations
  Clone ID: PAT_MRT3847_118362C.1
cctctcgatacggctgcgagaagacgacagaagggggaaaaaaaagatatccctacggtaaagaagcccttctttttcttctcttacaaccaagagccactcttataactctggactcgtttacactcgtacctaagggttgaatcaccggtggcactttccactttcttcccttccttgccacgaagcctcgatttcggatttcaccttcgaaacgcttgaaagcgtttgaaagcgcgtgggagaaaatgtcatccttgtcggaaattagagaggacgcgaggtgaagaggggtgaactgcgcgtggccgctgtttgtcgctatttcgtgagcgctcacgagagcctcgttgccgttggtcttgtgggtaaacttatncgggattcatgattttg

SEQ ID NO: 20331 - DNA, 411 bp, Glycine max
  Clone ID: PAT_MRT3847_118363C.1
cgtcccgtacgggtgggagaagaccaccgaaggggattgccaccttcttccaagcattggattcaaaaacctaagttcattccttggggtttggtttctttcctaaaacccaaccttgtcgacccattcgggcacctgcgactgggcctgccagaattacttgccccaaggaaaccacctttggggtattggaaaaaacggaaaaaagtacttcaaaactgttgtcttggttgttccaccacctgaccatgatggaaagggcaagggtggaactaactgcacttgctcggcctgcacctgtggccattaaggaatatgtttggaaaaggaatttgcctggtgtttggcattccaaatatccaaataatgtattcttcgtatgaataatggagggggctggcttcctactgg

SEQ ID NO: 20332 - DNA, 1406 bp, Glycine max
  Clone ID: PAT_MRT3847_118364C.1
gaattaacttgcatcatgagaaaattcattaagttttaaaggtctttgatatttgaattaaattgacgtttttactatatgtaggaagcttattggagcaagatatttctacaaaggttatgaggcaaatgcaggtacaaaactgaatgcctcagagcttagtgtacgtgactatgaacgtagctggttcacatactttatcaaccgcaggtggtaactttgttcctggagctagtgtatttggcttcggcaatggaattgcaagtgcttgaaaccaagggagcgtatggatgccattactggacaccttgcagcactaattggagagctggcttagttgtgtcacaagaacgtgcactcgtaacacgattagaacaatctttaataacttgggacacaactaagctggtgttgactgatttgtcttcaaagatctcggaattgcgcaccttccagatgaaccagcacgcaatggagagaagataattccatgaccacccgttgccaaacacctgagctaatgagagctatcaagatcagtgtcatgatgggagacatctaacctgagagcattccaaacaacaacagtttttatgcaatctctcaaccaatggaggattgtttcatcaccaacgctgcaacaaagagaaacagacgaaaagcattagttggaatacttttatatatggtgggtgagtttatgaatgaaaactcagagcatgatgcaacaaagcttgaggcagaagcaaaagaagaagaagaacacagaaggacaaaaagggtaattagtaaaccacggtaccttgaggattatgcaaccaaatgatggtgagctggcaatactcttctagaagcagaatccaggaattcccctgtgccgttagaggctgtctccatgattagcgcaatgtttattttcctccaaggcatataatgtcaaattctgttagaatatgtatctagaatgtgcactggaatatctacatatatgaggatatgtaattcttatagaggcaataaaacagttttatccttaccttcttctctgctatggaggtcctagacctcgaatcctaggttagctctgtagtctacaacatgcagcctaaggcatgttggccagctacgttcggtggtggatgtttagatgcagacattttggctactttttaggctgccataagtaacggcattaacgcgatttaggtgtcgttgggttcagatattgcatcggaatgtttctaagatgctacttcaatagggtccttccatgcagttgccaacgacataacagtagtggcttctggaggaaattcaggaccttctcctggaactgtatccaacaacgaaccttggatgctcacagttgcagcaagcacaattgatagagacttcgctctcgagcc

SEQ ID NO: 20333 - DNA, 319 bp, Glycine max
  Clone ID: PAT_MRT3847_118365C.1
acgaggcaaagcttaaagattgatttctgattgaagtcattcgattctactgctttgcaactattttctccctttttattttattacatcttccattgctttaaatacacacacatatatatataatatgtaggacaatcgccgaaaattatgatattgaagagctaactagaaatgaatcggtagtgaaatggtcagtgtcaaaaaaaaaaaaaaaaaaaaaaaaaaaaaaaaaaaaaaaaaaaaaaaaaaaaaaaaaaaaaaaaaaaaaaaaaaaaaaaaaaaaaaaaaaaaaaaaaaaaaaaaaaaaaaaaaaaaa

SEQ ID NO: 20334 - DNA, 267 bp, Glycine max
  Clone ID: PAT_MRT3847_118366C.1
ccatcgcttactttcagatcaactcaaaagattccaccaagaaatatagacgctagggttaggttacattagcgttagcacgcaatactttacatatatcgagagcagcttacgagacatgtagaacaacgttgaggagctcattctactgcaagactctgtttaccttatcctgctcacttcatcaaacgtgttcaacaagtacatgaaaaaatctaacagcttcaggccggaacgctcggtgagcattcgactgatgctaagttt

SEQ ID NO: 20335 - DNA, 379 bp, Glycine max
  Clone ID: PAT_MRT3847_118367C.1
acaaatgcttttattttttttagaaaaaatgggtaaaaaaaacatgcgccttcgtgagggggcattaattttaaggcctcccctatttcacaactttcttttttttggaggataatccctgttgtcaccacccaatttttttcttgattttttaaaaacttttacgggggggcgtttaatttctatatgccaaaaggattgctacccttctaactctttatggggacgacaaacacacttgtgttcacacatggaggggtcctctccttgaagaattcccaattgaacttgggaggacctcccttattggcccccaaaggatcctgggattgggatgtggatggcacacggattaatggttggacataatcaaacaatt

SEQ ID NO: 20336 - DNA, 1748 bp, Glycine max
  Clone ID: PAT_MRT3847_118368C.1
caaccgagtggaagcgaattgctgattgatggttcctactttggggttcatatatgtttcaagttcttgtgcagaaacctttgtcactgcactcaaaatctgcactagctaggtggaacagaaatggcagaggattggaaccgcacggctcttcttgtgatcgatatgcagaaagattttatagaagattggagtcctgtggcactaaaaggagggaaagacattgtcccaaaatctgttcttgctgttgctggggctgaccctttggaaatggcagaggattggaaccgcacagcccttcttgtgatcgacatgcagaaagattttatagaagatgggggtcccatgctagtaaaaggagggaaagacattgtcccaaatgttattaaggctgtcgatgttgctaggcagcgtggaattctcatagtttgggtagtacgggaacatgatcccttaggaagagatgttgaactctttcgtcggcatctatatgcagcagggaaagttggtccaacctctaaaggaagtgaaggtgcagaattagttgatggactggtaattaaagaaggggattataaacttgtgaaaaccaggtttagtgcattctttgctacacaccttcattcagtccttcaaggagcaggaattaatagtcttgtggtcactggtgttcaaactcctaactgtattaggcaaactgtctatgatgctgtagcattggactatcaacctgtaactgttattgttgatgctacagcagcagccacacctgatattcatctcgccaatgtgtttgacatggaaaatattggagttgcaaccccaacattacaagaatggagcgaacccaaagcttgatctatatgaactatgaagcatgctactttttgcacccagtggtgtactggtgttcaattccaagactcaagaaaggtttgaagtgaagcaaacgtatctatgtttactgcataataaaatgatttacatggctaagtttgtttattttggtattcacttcacttttgttgtgactactatgaacttattttttctagtccaatgcactccaatttagaaaaacccctagttgctaattggtacgcacccctcaccggaaaggaaaaaaaccaccttacaggaaagactacgtccacggccgacccgggtgaccccgagaaacactctgcgggggcccggtgctcgtttcccccttagcagcaccctgaacgaccccccctcacgcgccgccagggcacccaatcgcgccgggaagaaccacgatcacaagcaacctaatatccccgggggacatcccccctgcgccacctgcccttattccccactacccccccccggcctccccgatacaaatcctactacactcttcataccccttacttcctgcagtcccattgatacagaggaacagaccattgcagttcaagctcaagatgcaggaccaattgcagaaccaatttcacagactcgagaacaagaagagaatgcagaagcaacagatcagcaggtgcaattagtaaagaggcctaagagggtagtaacaaaaccatcttaccttaaagactatgtctgagggtgagatgggtattttagttaagtaatattcccttgcttggtgcttgtttgatagttgggaacaagcataacgaacttgcgtaattgggctccaaaatatccaattctgttaggaagaactagtattaatagctatgtaataattcaagcaaggc

SEQ ID NO: 20337 - DNA, 303 bp, Glycine max
  Clone ID: PAT_MRT3847_118369C.1
ccacaaaaaccaaaaccggcaaattcccttgccttttttattttaggggttccaaaattccaggaaatggttttttcattttttgggtttacctaccaaaaagcagttaaaaataacatttcttaaccaaactcaaccaggaatgactttttaggcaaattatgattttggggctttttggggacccttggggtcaaacctgggacccttaccatcgggaggtaacttttttggggggggagagggaaatttttttgccccacccaaggttttggagttttttctttgaaaacctttactccc

SEQ ID NO: 20338 - DNA, 311 bp, Glycine max
  Clone ID: PAT_MRT3847_11836C.1
cgggacggaaaggccgggccgacccacgcggctgggtacgcgcgggcacaaaagaagaaaaaacgagagggaccaaaacagcccaaagcgagggacgccagacagagacaaagaaaagaaccccaacacaacgagggccaggcccagagggaaacaaaggaggggaaaacggctcgcgaagatgaggaaacacccaaaggtccccagggggaaccgaaaagaacgcaaaccaaaagagcaccacccaaaaacacagccggaggaaccagccagcgacacgagccaaaggcaaaagaaccgacagagggcaa

SEQ ID NO: 20339 - DNA, 315 bp, Glycine max
  Clone ID: PAT_MRT3847_118370C.1
gaggcagtgcggtgacgaatgactggactgatgaacgtgtgtgatcatttcaataacacgcgtgattggctatgaaattgactatgtttaggtagtgatctcattttatgtgattacgtggccctactcaagtcgggcgttgtgtgctagagatagtctgttacacagtgatatatctgattatctctgtaacatgagagagtgatcggctgcacataaacgaggatctgacgtggactatagagctgatgttacttattatgggctcactgaaagaggagcttgatgacacgaggcctaagcttggcactggcc

SEQ ID NO: 20340 - DNA, 1524 bp, Glycine max
  Clone ID: PAT_MRT3847_118371C.1
agtctatattgagaagcacccttgtggggaaacaaagctatctgagccaaagaccctctttgtttgtcaaagtctatatggaaggaatccccatcggaagaaaattgaatctgatggcacattatggctatgatggactagtgaaaactcttggccatatgtttaggacgaacattctctgtcctaactctcaaccacttaattctgggaattttcacgtgctaacttatgaggatcaagaaggggactggatgatggttggagatgtgccgtgggagtaagtgataaatatatgtctcaaaattgaactcttaaatcttattagctccatttttcagtgtatttttttaacccttttgtatttgatatatttaatacaggatgttcttgaacagtgtgaagaggctgaagatcacaagagctgacagatgctagttaatttaataataaactgatggaggtttcaagcctacactgtccaaggttgaaatgaacgtagcatggcaacaaggaaatctgagaaaattctgccaagagaaaggaattcatgtgagtgcatggtcccctttgggagctaatggtgcttcatggggttctcttgctgtgatagatagtccagtcctaaaagacattgcaattgcaataggcaagagtgtggcacagatcctgaaaccgttctatgaactaatcaagagtgaaacaacgatgatgagaactgcttctcagaaatggggctacattcggatcatggctggtacaatctttggaggcatccttggattctatgtcatgcaccgccttgaaactaactacaaggaataaaatccaagatagtaaactaactctcaaagagcttgaaactacgcacaacaactatatgaaaagacaagaggagttagataatgatatgaggaagtgcaaggaagagttcaaagagtttgagaggattgcttgatgaggagaaggtcttagaagaaatcacagagagttccaaagcaaaatatgatgttgcaatatcaacagcatgccatggacttgattatattgtggtggaaacaactaatgtagctcaagcatgtgttgagttacttcgtagagagaatcttggtgtcgctactttcatgatattggtatttttttattttttatattaatcaacttgtttttgtctctaaatggctgtttaatattttgaatggcatgaattaaatatgttcacttttacttctggacccttggatttgtataactgtgactgagttcatgctctacgatatatttgctaatttaaggacatgttggtataagagtgttttctgtttcaatttttgtttattttcacctatagtgacaaaaatgtgataacaatttcaccattttttgtttttaaagattttatatgaaaattgtgaaatcactcattaacttccaactaacagcttgagtttttggcatggttggccacttgagtttttgaaggggaaattataaatttcgcaaaaataataaaaaaaaaaagaaaaa

SEQ ID NO: 20341 - DNA, 360 bp, Glycine max
  Clone ID: PAT_MRT3847_118372C.1
gggacgcgtgggccgccctttttttttttttttaccgagaagagagactttttccattaggcagggaaaaggggataactttttacgttcgggaatgcaatgtaaaaggacacacatgcagatgcccaaaaaataaaataaagccccatttttaatttgggaggcaactcaacttttccaattggaacaacacactcccctttaattaactcaacaccgggaacaacaaaacagaggcgggggaaactaaaaaaaaaatactttagggttgctaaaaaaggaggcaaggggaagggcaaacctgtttgtccaatgtcaaaagagtcaaagatgattgtttttaaatgtgagaaacaaaaa

SEQ ID NO: 20342 - DNA, 343 bp, Glycine max
  Clone ID: PAT_MRT3847_118373C.1
gaagtcatttaaatcctaattctgcactccttgatcattcgattattcttcttaagggtaccttgtgcttgagcgcttttaatcatcgcggcctaattacccttaatttattgacttagctttggtctttcaccatggatacatttttacgcatctatctttcgatttgagattttctactttaatatgtgtataccgggtttgtcctaagagaattccaaactttacattctactttctgaaaccgaatttcgttagacacatgcaaaaccttacccgaatttcaatctggctatctgattagatttaattcttaggaattaatgatctgtgttatgatttg

SEQ ID NO: 20343 - DNA, 539 bp, Glycine max
  Clone ID: PAT_MRT3847_118374C.1
caggactacgctccaattgaattagatcttactcaagcttctctcttttctacctaatctctctcttccgagcttcccttaaccacaacctcggaagaaaccagcaacattagtacatagaacaccaacatgggttccaatcccttgtctgcattgacttcaacaaagcccacaccaatcccaacccaagaccacgacgaccaagactctccttcatcaaaatgtcttctttccttcaacaccgactcttgttcttcaaccccatcttcctcttcccacaaagccctcttcatcactctcatcctcatcacctctattgccttatcaacatccttcgccttcgcctttctctacttctcttcaaaaccaccaccttctcctctcctcgtggctcgtgctctgggcaaactcaaacgccccgtcgtcctcttagtctcctccgacggtttccgattcgggtaccaattcaaaacccccacaccccacattttccgtgcgcctgttaacgcgacccgaaaccaggtcgggtcgattgccgt

SEQ ID NO: 20344 - DNA, 234 bp, Glycine max
  Clone ID: PAT_MRT3847_118375C.1
ctcttattaggagtgggacgatggagaagaaaattgagttgtcatattgttgttatgaggcttttaaggttcttgctaagaattatttggatgttgatcatcatgatttgtttcatgatgttgaggggttgttggaaaagacgaatatgacacctgctgatgttgccgagaatatgatgcctaagtcgaagggtgataatgttgagacatgcttgaagaagttgattgaatctc

SEQ ID NO: 20345 - DNA, 560 bp, Glycine max
  Clone ID: PAT_MRT3847_118376C.1
gcttcctccaattttaaaattaacacacgccatgaaggttttagaatttattttggcactgattctggttcttgctgtggttcatgttcagccaaacctagctgttagggtattgaacatgaaggaacaactgaaccttatgtctctagacaagggtcctgtgaccccctcagggccttctacctgcacttacattcccggaaccggtggcaaaaactgcccccctttggaggaaatgaatgtcgcaggaaattacgttcagcaccacagtgatgaaacttatcctcgtctagttgttccatttggtgttgcaaccaatcaacattgaagctctctttataagcatgaaagcctatctggttataattaagttctaattaatctcagagagcacactttttggtggagggtgaacgctccaattattcgaagaaatcaaagattatatcatacatattatatatacacatgtgtgtgtctaacaaaagtatcttattatcattgcttatttatcatgattttttatttatttgtaaccttccgcagtttacgttatatgc

SEQ ID NO: 20346 - DNA, 126 bp, Glycine max
  Clone ID: PAT_MRT3847_118377C.1
cctctctcccatactcacatttacaggcgtgagactgagaaaactcatatcttccgtgctgatattccacaggtgaagaaaaaggattttaaagggcaagtggaggagaataagattctgcagata

SEQ ID NO: 20347 - DNA, 375 bp, Glycine max
  Clone ID: PAT_MRT3847_118378C.1
ggagaaacgcaatcttcgtcgccttgctgaaaaaaaaaaaaaggaggaaattataaaaaaaaaaaaaaaaaaaaaaaaaaaaaaaaaaaaaaaaaaaaaaaaaaaaaaaaaaaaaaaaaaaaaaaaaaaaaaaaaaaaaaaaaaaaaaaaaaaaaaaaaaaaaaaaaaaaaaaaaaaaaaaagggggcgcccccccttatttgacctttcccccccgaaatttattttcgccccgtccccttaaggccccccatttttctttttatgaagtcttttaaaatttgggctaaatatttgaataagtttttcccttttaaaattttttttcctttaaaatttccccacaattttctaccctaaattttaaattttaaa

SEQ ID NO: 20348 - DNA, 217 bp, Glycine max
  Clone ID: PAT_MRT3847_118379C.1
tttcgttctttgccaataatagtttgtgttactttgctaagaaggcttctccaccgaagaggattgctggaggccgtagagtgacagttgttgcaagccctcctactaaagactgctgaagttgcactctgaccttcttacgaagcaggatttctttgattatcttgactccggttgcaagcccaaagataaatggagaacaggccctgtacatgac

SEQ ID NO: 20349 - DNA, 359 bp, Glycine max
  Clone ID: PAT_MRT3847_11837C.1
agggaaaaaagcgcaaaactagaacatgtgagattgctaaagccaaatagaccttgatactactagccttatacgacgtaattacatagactgtgcagttccaagagctagatttagctgaaccaggacttcattacgtaggacccctgcatatcctactacctgacctttaacattgacctgtaagttataatgaaaagcgcagtctaacagagatcactcactgtgaatacgctacatgatacgcaagactgaagtcttcactttgaccagatgatgaatgctgctcaagggtcggagtgcttttgtgcatgattaaactcctcctgggtctggaacctaacatggagctagagcca

SEQ ID NO: 20350 - DNA, 814 bp, Glycine max
  Clone ID: PAT_MRT3847_118380C.1
gttttcactttcattctcataactcattcaattattatcataatttctgtgttctgtttctgttctcttctaagttactatttggaaacctctctttctatttctctctctagaaagacccagcaagccaggttggtaaaggggtgaagaatggatgctataaggaagcaagcaagcaaattgagggagcaagttgccaggcaacagcaggctatacttagacagttgggccaaattagcaatgaaccgctcatgactgatgaatctgaaattgaatgtcaccagcaacttcaaaagttatacacttctacaaagacagccaagcattttcagcggcatattgttcgtgctattgaaggattcatttctgttagctccaagcagatggagatagatgtgaggaggatggcaagggactgttgtaagtatgggactgagaatcttggtagtagttacctccttgcaagggcttctcttcaatttggtaacacatatgatacaatggaaaatgagagagagactctgctcgggatcttaggcgatcaggtttgtatagatctctgagccactacgggcacagataacaggagctcctttggaggatgcacgccacctcactcgccgctatgacaaacttcatcaagaggtagaagcccaggctgctgaagttttgaggcgtcgatcaaagttgaagaattcttctgtttctgcagagagttccgcgaggcttcaaaatgcataaacaaggttgaaagaacttaaatttgccttggcagcacttggtagaaaaaccaacctctgctatgttgtctgt

SEQ ID NO: 20351 - DNA, 336 bp, Glycine max
  unsure (1)..(336): unsure at all n locations
  Clone ID: PAT_MRT3847_118381C.1
cgcccnnttttttttttgtgttcatatagaaattcatacacatccacggagaaatgtatttgcacactggtgttgctatgggcataaaatatcatgtgtaccaaaatcaagcttttctaagtttcaacgcctacaaccccaaaacagctagctaagaactcactatagcagaaactaagatagataccaaggactcgacacggacatgacacgacaaatatcataccattttgactggggaataaccgcctaagggaatcacttatagcacttggcatacaaaagagactctacctctgatgtgtcaaatggccctatcatctgatggacgcgctt

SEQ ID NO: 20352 - DNA, 315 bp, Glycine max
  Clone ID: PAT_MRT3847_118382C.1
gtgtcaatataattgccatcttctaatactaattcagctctcaaaagacttgagtacgcataaaaaaagtagcatacttactttgaacgacggtgcaaatgcctgatccgtgttggggtataggacaagatacctcaggtaatgggtactgcatgtgcgtcggtacaaacatgctctttgtgcgccctcactactcgtgatgtacctaatatgcccgttcttatcaataccttctaacaagattgtattaccttcacaagtcttaatctatcagaaaggtgatgctattgttttacccgggcacttggtgcaaag

SEQ ID NO: 20353 - DNA, 1812 bp, Glycine max
  Clone ID: PAT_MRT3847_118383C.1
catccatttgggttcaatgccattgtggttctgactcatgctgcatctgctcctcctgaaggccctaatggtactgcttccagctatgactggtttgttactcaacgttctcatgttgtgcagcaagccattcgtcaagcagctggtgacatgcgtctcatgaatcctgtatccttggtggagaaccattctgcttgcagaacaaatagggctggtcagagagtattgccaaatggccaggtttggaaacctcatctgttacttctatcttttgcctccaaaattctggctgaagcaaatgctcttctcaagttacaagatagtccacctgggaagccatatgtagctcgaacaagagcgcctccattaccttttcttttgtcaacccttctccaatcaagaccgcagttaaagttgccagaggagcagtttggtgatgaggacagtcttgatgatgaccttggtgaatcatcagagtctgatgatgaaaatgaacatgatgacttgccgccatttaaacctttaactaaggcccaggtggaagagctgtctaaagctcataagaaagcatatttcgatgagttagagtatagagaaaagcttttgatgaagaagcaattgaaggaagagaaaaagcaacggaaaatgttgaagaaaatggcagaatcagcaaaagatctaccaagtgaccatagtgaaaatgtggaagaagaaagtggtggtgcagcttctgtccctgttcccatgccagatttggccctgcctgcttcttttgattctgataaccccactcaccggtatcgttatcttgattcgtcatcaaatcagtggcttgtaagacctgttttagaaactcacggatgggatcatgatgtgggttatgaagggttgaatgtagagagattgttcgttctcaaggaaaagatacctttatctttctctggtcaggttactaaagataaaaaggatgctaatgttcagatggaaatatccagttcagttaagcatgggaaagggaaagcaacttcattaggttttgatttgcaaactgtggggaaggacttggcttatacattacgcagtgagacaagatttactaattttagaagaaataatgcaaccgctggtctctcatttactttacttggtgatgccttatcatctggattgaagattgaagacaaattggttgctagtaagcgattcaagctggttgtcagtggtggtgcaatgacagggcggggcgacattgcttatggtggcagtttggaggcccaactgagagataaggattaccctcttggtcgtttcttaaccacacttggcctttctgttatggattggcatggagatcttgctgttgggtgcaatgtgcaatctcagatcccagtaggacgacatacaaaccttgttgcccgggcaaatttgaataatcgaggggcagggcaaataagtattcgattaaatagttcagaacagcttcaaattgctttgattggtctcatccctctcctaaagaagctagttggttatcatcaacaaacgcagtttggacaatactgataatgatagttttagtttatttgagctggagcactttcatggtattagggaatgatttcaagatggcatctttcatgaaatgagtgatactgaatttcgttatgttttttatactcaaaagtttgtcttatttgatcataaagcagtacttttctatgttagcgattctcttttggtgcttttgttatgttatgctgctgaactctaagaattacatcaattttattcttgtcttctgcatatatattt

SEQ ID NO: 20354 - DNA, 353 bp, Glycine max
  Clone ID: PAT_MRT3847_118384C.1
acttattttttttttttcagcgtggttgtttattttgatagctctatcatatgataaaaggtcatatgacaaagctatcaacggaaacaaatctacattctataccttaccggagtaaagactaaggggatcatcggtttcttatcatatcatagtcaatggcgaatagacaattttgctttaattcacctattagccgcacctatattacgattaagaagcaactgccccgtgtatagaccctatacgcaaacctctataactataatagttctttaatattcccgcgaattacagcaattattccaataatacataaaccacgaaaatctctttactctcctatctctatc

SEQ ID NO: 20355 - DNA, 256 bp, Glycine max
  Clone ID: PAT_MRT3847_118385C.1
gtgattctgaagatcagaagcgataggatcatgaggcttatggctgtggctgctaatcttgcggatttgttcatagcaatagccgagattgagccaaaccccttctgcaaccacactgttactcttggcattagtggcttggtttctgcttgggctggttggtatagaaattggccttcataaacctaagctagctgtaattttttacgtctattattaatggatgctcaataaatatttgaatttaatcgtgtct

SEQ ID NO: 20356 - DNA, 272 bp, Glycine max
  Clone ID: PAT_MRT3847_118386C.1
gctttctgaaggagattccagggctttatcagcttcccactgaggcttcagtggtgaaggctgctgctggttgggctcactgtgcttcagttaatgggagctaatggaatttcagacattaaacaggaagcccacaaagctcaaacacgagcagtggatcagattctcatcatgacaacaagaaagtgggagatgaagtattgaagcgaaggaagatcactttttctagacaggattctgacagccaagcatctggagatgaattctttact

SEQ ID NO: 20357 - DNA, 649 bp, Glycine max
  Clone ID: PAT_MRT3847_118388C.1
agctgctatccatcatcttcatttcccaaagggtgcaagtgcaactattacaaacttcagtcttcagactctgagcctgaggtgtgtgtatgtgtgtgggtgagggttgggatctcatacgtgtcattgctacatgttgcatgagtaagggctttttcatcactcaactcagacagatagatagagagaataccaaagtccaaaaacaagttcatctttcttctttctttttcctcgtatttcttgatttcttatttttttttaacaagtattatatatatatatatatatatatattagttaacagaattacaaatatttttttattgaaaattatggtaggtctgtgttgatatcatttttttctctccagtatttaatcacaaaaattgatacgttaagatccttctttttttttccttttcttttgagatgttcttctctggtgtcaaaccctaatttttgttttctagtaatttatatgaaattgttgatgaataagatgtgcatcatagagtccatcgtttttcctgtaatgggtatctctctattcctccagatctgattcaattccgaattttccccccttttttatttttccaaatccacttttctttttgtgaggctttccaaatttgggcagtatttg

SEQ ID NO: 20358 - DNA, 486 bp, Glycine max
  Clone ID: PAT_MRT3847_118389C.1
ggctcgagctccacattcctgccgttgtacaaatcgtcaatctcctcgttcgtatcgtgagtatcctcgaagtcagactcgaagtctcggatgtcgttgtcatcggtgtcctcatgcttcctcggcaactaaagcttcagaatcgcatccatgatcaacgggagcacctactcatcgccttgaagtagttctcgatctgcgctttcaggtatgccaagggaaattgaacggcaatggtgtaaaacaacgtcgttagaatgagaagaaagagattaattgatataactttgatgtccacgttcgcgatttggggaacagagagatgagaatgccaaagaggaagaaaaatgagaaatagtctacagagttgtggcattcagattcagattcaaattccaatttcaaaaacctaaactctgtagccaaaatttcaggattgtggcaaaatctcttgatcctgcatgttggtttctgctacttgctttt

SEQ ID NO: 20359 - DNA, 168 bp, Glycine max
  Clone ID: PAT_MRT3847_11838C.1
gcggcctttttttttttttttttttgcttaaacaacctcctaattctttaggggaccttgaattggattacccagaaccaggaaaggtttaatttttaaccctttggtctgctttgaaatggctcttattaattttttgtggtgaataaattataacacccgtttttt

SEQ ID NO: 20360 - DNA, 230 bp, Glycine max
  Clone ID: PAT_MRT3847_118390C.1
ggactgccgtggctcggaggagtgttctcgggggcgccttgtgctaggctcctcgtctcatcgagcctgacaacccgtcatattgatatacgtaagttgaactcgaacccgttgagatccactgaccggatcggatgtcggggaacgctctaatatactcttaaaaaattctaatctgtgaaaagaagaacaacctgtggatgtaacgattgatgagatgtacagtagat

SEQ ID NO: 20361 - DNA, 613 bp, Glycine max
  unsure (1)..(613): unsure at all n locations
  Clone ID: PAT_MRT3847_118391C.1
tctttctccctccttcaaattcacggcgcgtcacgatgcctcttcaaatttcgccccaaacaccaccgaaacagcgtggcacatgagaacacaccacactctacccgactcataatatttataaatctcttcctttccgtacccttattcggaagaaagatcgaaccacctcgattctcttcttcggaggttgctaccgaattccctttctctctcattttctatgctaacgtagagatccagaaaccatttccgaaaccacatccctatttccctctgtttccgcgattaagagatggagggaaaaactgaggatgaagtggtggatattgagagtgcttctagtggttcttccaatgatgattcagatgatgaggaatctttagttcctgaaatagatgatggaatgcgtcttggggagtcattaacagaagaggaaatacaagatcttatttctgagttgttagaagtggagagtaaggctgcagaggctcaagaggctcttgaagaggagnctctntctaaaggggagagtgaagttagacaagaaattgaacaaaatcttcaggggatgatttggaaactgctgttgctgatgagatggctactttta

SEQ ID NO: 20362 - DNA, 545 bp, Glycine max
  Clone ID: PAT_MRT3847_118392C.1
gaaatgaaggatcgatctccattattttttattttttttaaaagtataactattggaggagtcactattacaacctttgtattcaatttacatagaaaatggggagggaaacaaaactgagaggggactatacacaagcctaataaagtcctgcactcctgcgcttttaatctttttttttgttggtggaaaaacatctccactaacccgtaatcagtacagactttattctttctttctttttttgcaagattttgttgtatattaagaatccaatttcatgatattctgtttgttgcaaaccatgtccggcaaagtaaaaaactaatgagtcctctgaccggcagtccttcacaagccaatttaatgattccagtatgttcttttttgttggaattaaattgggatccttctgttcttctgcaatttacaagtttgaataaaattaatctgcatctttcattatcactacaatttaacttccaatacagatattgatcatcatctactactataatatataggcgaagatagtcagatacata

SEQ ID NO: 20363 - DNA, 387 bp, Glycine max
  Clone ID: PAT_MRT3847_118393C.1
aaaatggggataggacatcaaatccttgacccttatccatggatcttattttttttctttggctatatctcttgccccatttatttacccaaataaaaaactaaaaaaagtatatacaagaaaaaaaacatagaagaattcaataaagatcaagaccaagaagggttggaaatttctttctcctattccaattctagctcattgcaatcatatttaccatcaatcattcagtacatatccttaaaagagagcatataactccttacaatcactactcaaagacaaactattttagggaactttttccttggcactttgcccattctctacaattaattaagacttaaaacctaataaagcaattcctgggttttatatgagcatttg

SEQ ID NO: 20364 - DNA, 481 bp, Glycine max
  unsure (1)..(481): unsure at all n locations
  Clone ID: PAT_MRT3847_118394C.1
acggccgagaagacgacagaagggatctctactggaatttacttggcaatttaaaattcccagattttatgatttttaagtaatatttattcaaatccttggtgaatttccgagtgttattattatagtctattgaggaatgaggaatgctaaacagctacaagattgtgattatccacaatttaaaatgcattgatgtatatggtactatggttgtagattatactcccttcgtccctaatataagactctttcaattaattcatgctccttaagaaaagtagttaatttagttaatcacattaaatttgtcaattaattgtactatcattcgaaaattaccctttttcttatctctatccacttaattgcttctcattaatgtttggagagagaataattaaggggatgtagggaaaaaaataattaatgcatctttatattaaaaaaaggtcttattaaaagggacanataaattttt

SEQ ID NO: 20365 - DNA, 305 bp, Glycine max
  unsure (1)..(305): unsure at all n locations
  Clone ID: PAT_MRT3847_118395C.1
ggactcganggcattagtggaggcnaagaagacccggcaangngtatggcatttgatccagaangactcaatccatgcacggggcctggataggcagcttggctattgcgcacagggagatcgaatgagaaatgttggtgtggttgattctgagtacatagatcatctgggtctgcctactcttgggggctcaaaagagaatgaggcaagtgattttcatttgtacatgcagtgaaactagtggataatagtcagataaagatgtgtgatgtttgtagtaatgcactgctaccaaactgtaaaat

SEQ ID NO: 20366 - DNA, 517 bp, Glycine max
  unsure (1)..(517): unsure at all n locations
  Clone ID: PAT_MRT3847_118396C.1
gttcncgcatcntacgcaanctcngaattcnnatcgagcnaccatgtngtncgantangtngancanagcanagtgntctgtgaagnttnngtgaanaatgngtaatgtaatatgcntgnnnnnattgntgtatctcnntnntnangtgcnannngngtaagngtgcgaacncattgtagtacacctggagatgngnagtgtngngacccanacncgnggtgtntnaatntcngtgtcgcgatgtgcanangactgttgctgtgcngtgtttgctaatgagncactcgnncagnngtgtttgtagtatgacgngcntnccntgtgtgngngngagttgtgtnntcgagaccatcatncccgtncngncacngangtnctgctgagtgttntngctagtgagtagtacatatgngtgtgnttactgngtaagtcggtgctgagctgtagtagtgtgtganntgtgtntgnngtgcantatntttnancnaccgctggngtgngnntgattgaacgtnc

SEQ ID NO: 20367 - DNA, 454 bp, Glycine max
  Clone ID: PAT_MRT3847_118397C.1
acgaggaaggctcccaataatattctatcaaattgatatggagtacaataatgatagtgatatcatatgatacaaattattaactcaatcgatagtcctattcgaaccaagaatacaattaaccttaattaaataaggaaatatgatgaaaagattgattctttccttggttagaaaactaattaattccacaatatgttctgaagatcttctaagatgttcaagatgcacagaggatacaatggtagcactccctctataaactttagcttgttacaaattaacataaaaataactgtaagtgcagtagtgcacacaatgggagatgtgctcttgtaaaggtgcataccaggagaggcaccttcattagggcacacaatgggagaggagccaaaccatattttctttagagctaatttgcaaaaggacaggttggaacagagccaacatgttg

SEQ ID NO: 20368 - DNA, 1001 bp, Glycine max
  unsure (1)..(1001): unsure at all n locations
  Clone ID: PAT_MRT3847_118398C.1
gcgtacggctgcgagaagactacagaaggggaactgtatactgtgaaaaatccaacctaggaagtcatagtgaccccaatatgtcaaaatttcaaagtatttaatgaggacaaataatatcttacatgatgaaagtaaaattngtggctaaatattttagggggaatgatgagctgtggatgggtaagcatataaaagaaaaataatttaacagttagaaagaaggcaggttcaatttcaagacattaaaccattctcagctttagaagtcataagaacatatctttccttgtttggataactcatcaaagtttggtatttaagtaggagattaagctcttttaaattgggcttgtctctaaattgaataggtaacgatgtcttcatttattaatctaaagtgcatcatgaactttatctacttaaatttaagggtgtgtacatccttatttgttcatttagagacaaactttagagggggtttctactgtaacgaagctgcagagatttcaaagataggaaaggctttcttcatctttcgatgacagaaacatggagtccatgggaagttcttaagttggtcttagcaaactataaaaaagaaactgccagtacgaaagtaggggattattatctgttgttctggctttgcacttatctctaagctaacttatgttcaaggccatgaggctattcgatctctgacatcagttaccccaattggcaatgagattgtgtatactatgacataactagttaacatcaatatgaaagaggtgacaagttaggagcaatgatggtataacagagtttcccccctctaacctaaagaagctcccccactgagccatgtgtttctaaacagtaaataatgaccataagatttcttcaatcaacttgtaagttgttgtatattatctatgtagtatgaatttttgccatgtattcaactttatcattctgaaccatttgttgtttatacaattactaatttaacagcc

SEQ ID NO: 20369 - DNA, 483 bp, Glycine max
  Clone ID: PAT_MRT3847_118399C.1
cccccgggaaaaaaaaaaatttttttttgggggaaaaaaaacccactttaaaacaaaggggcccaagggtttggtttttaaaaccggggaaaaaaaagccccggggaaaaaaaacattttaaaacccccaagcgaacaagcttatggggggcccctttggctaaaggaaagggcattcaaaaacattggttttggtggaacaaaggggacccccttggggggggggggatcagccccccgggggacaaaaaaagccggcggcgaaagaattgggaaaaaaaaaggggtactggcaaaaaaaaaaacaattggtgccatgggggggctggcaaggggaatttttgggaaccacaaaaaaacaaaaggggggcgcgggaagacctcattcggaataaaggatcccttaaaaaggggggcccacagggccaaagggggcccccccctccaaaggggccaaacctagctaaataaaccccccccccc

SEQ ID NO: 20370 - DNA, 415 bp, Glycine max
  unsure (1)..(415): unsure at all n locations
  Clone ID: PAT_MRT3847_11839C.1
gcagttgctcaaataaaatccagcatttagttttaaatgatcaccctggcttgcaacatttatgcttttaagtgctcaaagtgtacattgattttgcatatacgagagatatttatatttttcttgatgctttggtgagaaaagaattggctagcagttgcttagaaagtaccttatatcagtgtggtcgaatgaatgaatttcacacgtccaaaattggtatcttgtatcaaagtttgtatgatttataaagaaaacacaaaacaaaacatgtatcattgtacaagaggggtatgctgatgatggatcgagtatttagattgcctgaactatttacttgagttcaatcatataccattntcctactttttctcatgctctttgatcatttttgttttctcgagtttatcttccc

SEQ ID NO: 20371 - DNA, 548 bp, Glycine max
  Clone ID: PAT_MRT3847_1183C.1
aataaagtgtattttattagtgtattttaattagcaaaaaagtaccggctaaagttccttttttcagattgtatgtaatacctaaaaaggtagaacaagaaggatattctccttattctgtagcaacatcaaacttgtatgtatgcagtctattagtagatgacaacaattaatattacaactctaacctaaagataatattgtcatgatgggaaaaagtcggcaaggcatctaacatggtcttaaaatcaatattctcatcagccttcctagtgcttgagactttcacatccttcaagccatgccaccagcacttaatatgaccagaactgcaaaaacactcatcctcttttcttcctgttagcatctcgtagaaaaactcaatgaatgctctgctgcagaaaaaagaattcaagctcaacgaaatagttgcagggcagcaactggaaagtacactattgacaagaggcagatacaaagtttcattttttggaacagcacgcaggtccaaatgtttgatgcttggtggagaggatgaaactggcaag

SEQ ID NO: 20372 - DNA, 315 bp, Glycine max
  Clone ID: PAT_MRT3847_118400C.1
ctcgagcgattcggctcgagaatcagtctctaatattggtctcactgtcttgtctctccagagaactgtatagagagagatggcagctgcaacatctggtgctgcgttaaatgggttgggatcttccttcttgagtggaggaaacaggagccaaacccttatggccactgctattggaggcaaagttggtgctgctgctggtactgctagtcctagaagactcattgtggatgctactgctgcaccaaagaagtcatggctccctggtgtcagatgtggtcgcaacctagtcgacccagaatggctggatggatc

SEQ ID NO: 20373 - DNA, 178 bp, Glycine max
  Clone ID: PAT_MRT3847_118401C.1
aacaaccaggcctttttttcaattcaaaaacaattgggggacaaaaggggaaataaccttccccaaaggggccaaatcccgcccacaatttttaaatcgggaatcttcttcccggggtttgcccttggcatttgatacccggggaaggggacccccttgaacaaaaatcccttgaggg

SEQ ID NO: 20374 - DNA, 140 bp, Glycine max
  unsure (1)..(140): unsure at all n locations
  Clone ID: PAT_MRT3847_118402C.1
tnntttnnnnnnccccttcttccttgcaagctcttcggaatactgggcctttcaccactcccttgctgggctcctcttttccttcttcaaaaccccactatcggccatggattcccaccattccaatttcttcctacttt

SEQ ID NO: 20375 - DNA, 327 bp, Glycine max
  Clone ID: PAT_MRT3847_118403C.1
atggattcctagattggaattctagttagagcacagtttcgtgtaccgcgtgcacaacaggtcaacaggatactacgatggacgctactggaccatgaggaagctgactatgataggatgaactgatgcttctcatgtgttgacggagctcaaagaggctaagactggatacaccaacgggttaatccgattaatcggatccgacaacattcgacaagagcagtgcatcatcttgattgcctacaagcccggagccttctaagcgtgaaaaattagcagagcattagtagccggcaacctacttagcttgatagcacttaaactaca

SEQ ID NO: 20376 - DNA, 148 bp, Glycine max
  Clone ID: PAT_MRT3847_118404C.1
ctgccatatactcagcagagcgcgcgcttatcttgtgcggcccaagggctatgatacctacaattagactcgtgcggttcacatatggcgggtacatcctcagagcggggggtctctactaggacatcctaaagctgaagtagaccat

SEQ ID NO: 20377 - DNA, 283 bp, Glycine max
  Clone ID: PAT_MRT3847_118405C.1
agcagacacaaccccttcctgcgaccctggagtcccaatcgtgctgccattgtccttctgcccaggactctttcgtcctcagtcaccttggacaaagaagtgtggatcctcagattccatcttttccaactccaaggtgccatggcagagaaggtgctggtaataggtggggctggctacattggcagccacacggtgctggagctgctggaggctggctacttgcctgtggtcatcgataacttccataatgccttccgtggagggggctccctgcctgaga

SEQ ID NO: 20378 - DNA, 1037 bp, Glycine max
  Clone ID: PAT_MRT3847_118406C.1
ctcgcattcgcggcgggactctgcctccgccgcggaggtgctggcgacggcgaacgctcgtgacatgatcggcgagatcgagaaccgttcgactcacttgttggcgataaaaacagatgtagaaacacaaggagactttatcagatacctgatcaaagaggtggagagtgcagcattcacggacattgaagatgtggtaccttttgtcaaatggcttgacgacgaactttcttatttggtggatgaaagggcagtactgaaacacttcgattggccagagcagaaggctgatgctttgcgtgaagctgcgtttggttattgtgatctgaagaagttagaatctgaggcttcgtctttcggggatgatcctcggcagctgtgtggtcctgctcttaagaagatgcagactctcttagaaaaattagaacatgggattttcaatatctcaagaatgagagaatcggcgacaaagagatacaaagtgttccaaattcctgtggattggatgcttgatagtggttatgtcagccagatcaagctggcatctgtaaaattggccatgaagtatatgaagagagtctctgctgagcttgaaacaggtggtggtgggcctgaagaagaagagcttattgtccaaggagttagatttgcattccgagtacatcagtttgctggaggttttgatgtggagacaatgagggcgtttcaagagttgagagataaagcgaggtcgtgccatgttcaatgtcacagccagcaacagaaattattttgcaggtctgccacatgcaatgctggagcaaactcagcttcagagaattagttgcgccgcactcccccctcccctattgttttttctgtattttgtgaatagaatggcaaatagtattagccatccttaaaagtgtagaacacattcataattcatgattcatcctattcattactggaaaaacgcaaatcgggttccattctagcaaaaaaaaaaaaaaaaaaaaaaaaaaaaaaaaaaactcgagactagttctcactctctc

SEQ ID NO: 20379 - DNA, 849 bp, Glycine max
  Clone ID: PAT_MRT3847_118407C.1
gcccatcatgaactttatgttttaattatttatatgaagaacgaaaataaaagatccttttaatatgattgcctatatatgaataaatgtcacatgcatgtgcagaagaatggataaagcattacctcacagtagattgctattactaattttcttactacaaagtgaagaatgttggttagctagctcacttcatttattgtacctgcaatgttaaattgtgacagatcaagctggcatctgtaaaattggctatgaagtatatgaagagagtctctgctgagcttgaaacaggtggtggtgggcctgaagaagaagagcttattgtccaaggagttagattcgcgttccgcgtccatcagtttgctggaggttttgatgtggagacaatgagggcgtttcaagagttgagagataaagcgaggtcatgccatgttcaatgccacagccagcaacagaaattcttttgcaggtctgcaacatatgatggagcaaactcagcttcagagaattagttgcgccctcccccctccccatttttctgtattttgtaaatagaatgggaaatagtattagccatccttaaagtgtagaacacattcataaattcatgattcatgattcgatgattcattactggaaaaacgcaaatcgggttccattctagcacatgttgctgttgcgaatacttgaaggggcaaatctgcttctctaatcataaattagttgctgctgggaaacaagataagatagtaatacaaattcttttccagctttggtaaatgttgattcgaattacttgaaaaattcgcttctctaaccaactcctgcaaaaaaaaaaagaaaggc

SEQ ID NO: 20380 - DNA, 160 bp, Glycine max
  Clone ID: PAT_MRT3847_118408C.1
aagagctatgacgtgcccctgcacgctgaagcgtcggatttgggttcgggccgcttttgaagtttttaagatgactcctccctccattaaaggtccagttttttttttaatagcattgggaaattgggttgataacaccatcaatttgggggtttttccc

SEQ ID NO: 20381 - DNA, 1075 bp, Glycine max
  Clone ID: PAT_MRT3847_118409C.1
ccacgcgtccggtttgtttttgttttgtagggtttcaactttcaaatccgcatatttaaaatccaaatcgggaatgctaccctcgcaaaagcgcttctcctaacccccccatttccagttcaaattccctccgtttcgcgatccgtcaatggcgttgttggcggccagtggcggcgacaccgtcaaactcttcgacgcctgcgcggtcaagcccggcgtatacactcctgccggcgatccctgcgccctcagcttcacccctgtccgcggttcccaagtcaattcagtcaagtggaaccacaccaatttggtcgtggccagtgctggagatgataagaagatctctctttggcggaagaatggaaacagcatggggaccattccggtcgccggcactgatagtggagacagcattgaggaatctatattggccatcagcttcagcaacaaggcatccagatatgtgtgttcaggaggaactggtcaagttgtaaggatatgggatttgcaaaggaaacgctgtattaaatggctaaagggtcatactaatactgtcacaggtgtaatgtacaattgtaaggatgaacatttggcatctatcagccttagtggagacctaatgcttcataaccttgcttctgggcaaaaggctgcggagctcaaagatcccaatcaacagatgttgagagttcttgattattctcgagttagtcgtcaccttcttgtgactgctggtgatgatgggactgtacatttgtgggatacaactggtcgcagccctaaggtttcatggataaagccgcattccgcaccaactgctggtattagcttctctccatccaatgataagatcattgctagtgttggccttgataaaaaaatgtacatttatgattctggatctagaagaccatcatcttacatttcttatgaagcacctttctcttcgttggcatttagagatgatggttggatgctggctgctggaactagcaatggccgtgtggcattctatgatgttcgtggaaaaccacaacctgttgctgttcttcacgcttatggtagttctgaggct

SEQ ID NO: 20382 - DNA, 781 bp, Glycine max
  Clone ID: PAT_MRT3847_11840C.1
cttggggttttgggggggtttttttttttttttttttttttttttttttaaggtaacccattctgatttatccaaaaagaacaagataagtttaaattttcctaacagcaccccacatgcatagcattgaacaatttataagttataacagaagtgtaattaataacaacggcgagctaacttcaaaattactttcaaacaatccttcgcggcaaaagtaaatataaatgtaggtttacacataaaacacctttgtctgttgaatacaacatctggtccagtcaaagcctctcaagaagcccgtcataccgaatatcaaattttcaaattaacagcttctcaatagcatcctttagttgctgaatttgggatttgagttgacttccttcattagttgttacagaacatgcaatcactggccgtgtgactccacatgctcgcccaagtgcttgttttgatggaacgaatacatagggaacattcttatcctcagcaaggagaggaagatggagaagaatctcaagaggctcagtgtctgcggccatcacaacgaactcagaaatgcctctgttcagtgtcttagtcgcttcattagcacccttttttagttgcttgtagttggcagcttgttgcacaagatccaagattgttattgcgagttgcgcatcggccaaagggtaagcttttgggttcactgtctctcctgtcatttttgtggggggtgccgttgattgcaggggagacaaaaagaggctaactagggttttgaagagaaacgtcc

SEQ ID NO: 20383 - DNA, 445 bp, Glycine max
  unsure (1)..(445): unsure at all n locations
  Clone ID: PAT_MRT3847_118410C.1
tcgtctcgggccgnnttctctgcttatctctatcctacatctctctcttcccttggcctnntcctcgtttcctcgcagagactggttgagaactataaaaggtgtgtcaattgtccctttctgaatttgtgcccagtgcaacgggtcggtcatagcagagacactccgagtagcatagaagagtgaagcggtcattctannatgctcagtcttcacagtgcctgctgcnntcctaaactccaagaaaccccgtctaaattccttgaagaaacggtcagaaattgtgatgcggtggacataggggagaaatanttctcaatagccgttncaattatcttnnntctgttgggccactccatccttaattactataaggatnntagattactatnnttatgaggacttcgtggtgaatnggtcctggaatatgcccgtatttatttga

SEQ ID NO: 20384 - DNA, 441 bp, Glycine max
  Clone ID: PAT_MRT3847_118411C.1
agctcactcggctcgaggcacccttgtgtcccgtgccactttattggtgggtcatggcgacccttttgatcccactagggaaatcccgctggtttcctatgcagacggcttatatttctaaccacacccgatcaaccttgccagtaaccgtattgcacactgctacttccccgataaaggctagtacggatgagctagtagttcaacacgtttccgtctctagatggtacaggcatcactgggccctacagactggccaaagctcctagattgtcgaccgctgcaattttcgatccatgcagtccttagaaaactggggacgttgctgtaacgccaaaaactggccctgagatccgaagtgatgtagcctcaatctctgcgtgggagaacttgcacaacgcaaaagctgttgcatgcatactgagacccgagatgaaactg

SEQ ID NO: 20385 - DNA, 722 bp, Glycine max
  unsure (1)..(722): unsure at all n locations
  Clone ID: PAT_MRT3847_118412C.1
gnaaagataagaaagtggagtcttttgactgagcctagccggcaaaagccgtctaaggttgttgtctggttgatgataatgttctttttaatgtctgaatacgcgttgaactttcagacatacccaccaccacactttttttttttctagtgaaccttctgatccattttcacccttaaccttaatcccaattcaaaggtccacttagtcttttgccccaccctcctttctttttttaaattgattccttggtttatataaattgtatattagtctctgagtgttatcaccttcattcatctcagacttttttgtttttattgcttgaatctcttctcctttgttgaacaatgattcctttatgacagttagcgattgttgttggagggttatgaattgtgggtttggttcaagtttgcttctttggaattgggtcgggcaggaatctttcagtattagagttttgatatctgattttgaattgggtatgtgtctatgaaggaagttttcatcgttgcctttgatagaaaaaacaaaagaaggtttgaattgggtatgtgtctatgaaggaagttttgatatctgattttgaattgggtacgtgtcaaagaaggtactgtgtagtggttgagttttttgtttttatgagttttggtggatttggtagaagatgtgttgctggggaatgatgatcctgcttggggggtgggtggttgggtgtg

SEQ ID NO: 20386 - DNA, 435 bp, Glycine max
  Clone ID: PAT_MRT3847_118413C.1
agctcgcgaatatgcgaaactcgataccatatcagatagatcacattgcggttctcttatggcggaacccaaggacccgctgaatctttgtgatgatcacagagagagatgtaagaattcaccctaacagcctgaagattatcgtcagttgtctgattctcaatccaatcaattagctgaatcaatatttgactctgcaagtgaggacttgcaaggtaccactcaacttatgtatacacgttcgacaatggagaacggtgccatgtcatagctggaagaggcaaacatgtcgcgaccacgttaatagaagaaacgagaactctgctgcttgtatattgagttggctgaaagttaatgcacagacattgaatatgacatcaaccaaggatgtattcggagttgctaggacccttggcttggttgagagcgatgatc

SEQ ID NO: 20387 - DNA, 606 bp, Glycine max
  unsure (1)..(606): unsure at all n locations
  Clone ID: PAT_MRT3847_118414C.1
gaacatgtgaggacagcagttcgaacaacaaacctaatggtacaatgaacggttgtactacccatatggcaagggagacttttaaccatttatccaactgaattagttatttgtcaaactcgtacaatttacactcatacaactaaattaaccattttacatgttacaggaagcctaccacttcgatgtaagatagaatttccctatcataaatggtgctcacaagggaagaacaatgatataatccgtgccttcttactatcttgaaatattttactgcgggatgcatcatcacagacatggctcaagtgtttgtgctatcagatttcatcgatcattagcttaagctatagtgcttcacagttttcttcgtcttctccgacacctattgcaatgcagtgctagtatacctagtcaagtactttgatgcttcttatcctcatgatcattgtcatcttcgccaaaataaaactcactccattcaatcatttaaatacaagcatttggtatttgttacggaaagaaaatatttagctctnnnnngtcatcatcnnnnnaaacaggattcnnnagtnctgggtacagnnnnttnnnatcttcaatctc

SEQ ID NO: 20388 - DNA, 728 bp, Glycine max
  Clone ID: PAT_MRT3847_118415C.1
aaaactatatgttacttccactttattaactctattaacgcatgtttttattctacatatttatcatgctttttcactcggacgaaagggaaattattatttgttgtcataacatatacttctatctaaggggttcaacaaccagtgataagatatgtttcttgatatctcggtcttggataccaaagccatcgccattttgataaagggtatgggccacacgagctgcatttatagcttgagtaagaaatggctccactgaagcaactctattggagcaataatgtccatttatctttttccatgctttgtgtatcatgtcttggatgtgctttcttgctttttcctctgaagcatccttttgattcatgtagcataggatcgacgaagcaacatcacccttttctctttcagccgctgtggtccctaaatcattgcacaatctaattatgagagatacattgtagaccaaatcttcatatgtgtgtagaaaatcgtctatatccattgcttgattcattgtagcaaaatatgaaaggagaagaatcactggtcccgaagatgaaatccaagcattgcttaaatactcttccaacgatggaatgtatcccttgttgtaccactttgcttccacgtataatgctttgcaaaagtctatccacgctttctttagataaggtaacaccgagtgaaagttattttctccaccaatttcataagcaatttca

SEQ ID NO: 20389 - DNA, 876 bp, Glycine max
  Clone ID: PAT_MRT3847_118416C.1
ggaaggttcccaaaattttaacccacaggttgttccctcaagcacagtatagcatttggattgatggtaaaatggagctgatagtagatccattgctaatccttgagagatacctgtggcgaggcaagcatacgtttgccattgctcaacacaagcatcaccgtagtatatatgaggaggctgattcaaacaagaggcgaaagcgatatgctcgaccccttattgatctccacatgaaaatctattattacgagggaatgaagccatggagctcaaataaaaagaccaatagtgatgtaccagagggagccgtcatcattccccacgcgtccgccataaataacttatttagctgcttgtggttcaatgaggttcacctcttcactcccagagatcaactgagttttggctatgttgcatacagattgggggacgcgttcaaattcttcatgtttctcaactgtgaatacaattcactgtttgtgttgcaccctcacacaagagagcactcttctcccatagaatgggttaaacagttggatgaacttaagaaaggcaatttaaaagaaagtaggggaggactaggcttgtttaccccttatcctggggatcttgattctgttgttctgccaaatgtaacaagaacatcaaaagcaggctgacattttgtttattgtttaacatattcattttgtcatgtatttttttttttccaagaatttcttgatgtttattttgcttaatcttaatgaaagtaaagataaagctcttcaatttttaaaaaaaaaaaaaaaaaaaaaaaaaaaaaaaaaaaaaaaaaaaaaaaaaaaaaaaaaaaaaaaaaaaaaaaaaaaagaaaaaaattttaaaggaaaa

SEQ ID NO: 20390 - DNA, 1683 bp, Glycine max
  Clone ID: PAT_MRT3847_118417C.1
tttattcgagctccaattaaaaacccttgacactgttgcgtttggctaaaatgccggatgttcagacccttgttaacgattttctgaatcagcttaagaaacgtaaaattgaaggttctcaggccacagcgaagctcacagcagagttgctccggtctgtgatttcacagcagcgagtgccacacacaaaccaagccacagctctgattaatgcagtgagggctgtgggggagcagcttattgctgctaatcctgttgagctagctgtcggaaatatcgtgaggcgtgttttgcacattataagggaagaggatctttcccttgcaacagctgctatggatggtttgggggtatcagctgcaagtgatgatgaagatgatgcagagcgagatgaaaatcctgttttatctgctgctgctgttgcagctgctgctagaagcacattgcgtccaccgtcattgcaaactcttctagaggatacatctgattcagctgcccctccccacacatcttcctcagagggtgaatctgatgggagaagtagatctgtggaaaaaggttcaagagggaggaaattgaagcatgatgtcatcgaagcagtcaatgaacttattcaagacatatctacttgctatgaacaaatagccgagcaggcagtggagcacattcatcacaacgaggtaatattaacattaggcagctcaaaaacagtgtggcaatttctttatgctgcgaaggaaaaacagagatcatttaaggtctttgttgctgaaggggcccctagatatcagggacatctccttgcaaaagaattggctgctagaggcttacagaccacagtaattactgattcagctgtttttgcaatgatttctcgagtgaacatggttatagttggagctcatgctgtcatggctaatggtggagttattgcaccagtggggttaaatatggctgcacttgcagctcaaaggcatgctgttccatttgttgtacttgctgggagtcacaagttgtgccctttgtatccacacaatcctgaagtcctactgaatgagctgagatccccatctgagctacttgactttggggaattctcagattgcatggattctgcaagtggtgccggttctcttcatgttgttaatccaacatttgattacgtgccaccaaaacttgttagtctctttattactgacacaggagggcataatccttcctatatgtaccggctcatagctgattactactcagctgatgatttggtggtgaaacgaagacccactacagggagttgagttcagataccccaaattttgtcctataaatgttgttggtgttctctgatgaaccatgagccggagatatttgtgtagtagaaaatgaaccttattaaaaattgtaggaattggggtggagaaattgtaatcgtggaaatgatatgggaaaatacaaagtgaaacaaggaaaattacatttttgtggttctgacttcttggacataacattgtcgttttagttttgggcccaatcttgggcattcaagaatatcaactgtccccattttttaattgtacatctttgtttccacataaagaaatgctaatactataaaaaaaaaatatatatacgaccgcggtcgtacgtgagcgtcgtctaactccggatcggtaccgcagcgcg

SEQ ID NO: 20391 - DNA, 1053 bp, Glycine max
  Clone ID: PAT_MRT3847_118418C.1
ctactgattcaatttgcatgatgcatttcctagaagtgtatccaaactattcacattacacaatcctttccttcgatatagttcaaactaccagtcaccagacatgaaagcttagtatcaacagaaaaataccaatagattttaatcttacttctggctccatttacatgatacatccccaaatttgtcaccaaactataaacactacacaattcttcaaacagactacaatgacaaaatctgatgaaataaattcctcaactacacacaaatgtttctctcacattcaagagctgcacaaactgctaaacatttcaaatttcatacagggttctcaccaggcagataagaaggagaaccaccctcaacctggttctttttcctttggaagatgccactaatattaggcaagagggctttctttgaaactgaaaccttctccttttcaaaccttttcacctccaccgttgtacgaggaggattctgcttttgaatcctgtagtgctgaggagatgattctgttgacacctgtgtttcagccagaattcgagacgcagcttcggcagcttttttctgctccctctcgcgccatcttcgaagctcactctccactgcccttttcgctgcttcagccatttcagcctttttcaaagcctcctgtgttgcagtctttatatcctcaatctccttttgagttgtctccaaccttttgagagcctcattttcactagccttcacagcttcaacctgtgccttggcagcagccactttcatatctgctaatttatcagactcctcaactttatggcttagcgagtcaaactcctcctttgagatcgtaatcacagcaccagattcagatgttgatgcacgtgcagcagtagtcctttcagttaaaatcgtaatctggtcaagagcacttttctcagctgcttttgctgcttctgcttcttccagcgccactttaagatttttttctgcttcttctaatgcaagcatggtaacttcaacttccttctttaattctgctgtcctgttcctcgagccttctgc

SEQ ID NO: 20392 - DNA, 365 bp, Glycine max
  Clone ID: PAT_MRT3847_118419C.1
ctagcgatatattctttaaagaaggaagtgaggagccaccccgaagaggagggcaactgattccccggatgactacaacaccgctgccacaaacaaggcggaaaaaaaacagccccacacaacaaagaagagcgtgaacaccggtgcaggaccagacaacgaaaacaacgcgcccacgcacgaaccacgatgagaaccaccggggcaggaggcagcagccgcggaacacacgacagcaccgcaagaaaagaagcccctgacccccaacaaatcacgaggccacccgaaccgagctagaacaaaagcaaaggccaaagaaggcaacaaacaatcacaccactggactccataaacaggaacgccca

SEQ ID NO: 20393 - DNA, 370 bp, Glycine max
  Clone ID: PAT_MRT3847_11841C.1
ctcacttctactattacctttcacgaatacatttgtacatgattcaatgatcactgcactactttcgttactgtgacattacaactgggggtggggatactaactatccttcacatcctcatcatccaacatataacctgcatgcaccaaatcttgatgcatgccacattatcgcagaattcccacaaggttctcctctagcgtcccgtaaatattatgggcaacggccttcttctatctctgaacccttcttccattcaagacttgattaccatcgttccccgcatttcaaatctctggattggaataatacgtgtcaccgctttctctaaagaggacatatacaaagctactcctccatcactcccat

SEQ ID NO: 20394 - DNA, 765 bp, Glycine max
  Clone ID: PAT_MRT3847_118420C.1
ttcaaccaagccgttcctacggctgcgagaagacgacagaaggggagggtgaaggaagacgcgtgcgtggataatatagagaatagtaatgtaatggcagagcaaagtggtgcagagttgattgatcgatgattgatgatggttcgggcgtcggtgaaggtgggttccgccaagttcgtagtgatctgcgtggggcttttaggcttcgctctcgtcgccgactttctatgggcctctacctcttccactcttcccacctccaccaaaccctccgcatttgtggttccctccaaccacaataagaagaaatatgagaatgccactgcttctggaagattccttgccgcggcttacgccgatttggatgcgccgcagctcaagtggcaaaagatggctcctgctcccgtccctcgccttgacggagccgccattcagattcgggatctcctctttgttttcgccggctacggcaccatcgatttcgttcattctcatgttgatgtatataattttactgacaatacttggggaggaagattcgacatgccgaaagagatggcgcactcgcatttgggaatggtgaccgatggaagatacatctatgtggtgactggacagtatggcccgcaatgcagaggtcctactgctcataactttgtgctcgacactcaaactaggaaatggcgggatctacctcctttgccggtacctagatatgcaccagcaactcaactttggaggggtagacttcatgtgatgggtggc

SEQ ID NO: 20395 - DNA, 353 bp, Glycine max
  Clone ID: PAT_MRT3847_118421C.1
cggccagagagcgtgatcatattatgttctaaactgcctataccggacccatggtctactatgattttatcaataaccactcaaatgtctatcgcattgttcataaggatcttaactccccgaacgccatcaattgcccttctgaggtcacctctatcgccttagatcatctcttcaaggcgacctatgacaagaatcccctagcaacgaccagcaccacactgcccagaactaacatcaacgatatgactgttctacgagaaaagcctaccatcatggacattgtaaacacatacgatgcttgtttcacggaaagtcatatcagatgtgccttacgaatgcacacatatctc

SEQ ID NO: 20396 - DNA, 107 bp, Glycine max
  Clone ID: PAT_MRT3847_118422C.1
cccatgcgtgcgttcacgcgaccgggaacctcagggaaacaggggttactgaaactaacccaactacagctcgaaagtatcccaaggtctctctaatccctggagct

SEQ ID NO: 20397 - DNA, 266 bp, Glycine max
  unsure (1)..(266): unsure at all n locations
  Clone ID: PAT_MRT3847_118423C.1
gcgatttagcgccttctgctactttgtnntcgttcnagagntgtgnatgtgaaggntgagttcaaanagncgngcntnaggcntggaggngtggcggccgtgttggagtgntngcggncttgcagggccagggtnatgcaggnggaaccgtgtgatgagttcagnacnagcancatgntaancntgtgtgaggtcttngtctnaanccgagaggttttcttttcgatcttctgcgatggcttctgccgattganagntgagnaagc

SEQ ID NO: 20398 - DNA, 224 bp, Glycine max
  Clone ID: PAT_MRT3847_118424C.1
cgccagtattcacgtcgcgattcgtgaactcacgaaaagcttaatcgattcgtgttgagttctccgatcctaagatatcctatatcattatcattcgcgtgtcgcggttctcgttctcctttcagtttcatcgagataacgaccacgagaacgtgcttcgttcgatcgcgttcgtgcgtctcaatgtacaacgatttcgattggcttccttcgctgtattccga

SEQ ID NO: 20399 - DNA, 242 bp, Glycine max
  Clone ID: PAT_MRT3847_118425C.1
ggggaagcggccctgccggcgcagattcttcacccacaaccggtgccggaagatgacacagcccgaagacgttacctaggcgacatcccgcgccagctggcaccgagaattaggaaatctgccaccccgttgacagggataccagaagcctcgcacggaaaattggaagaaaaaaggtcacaaaactcggaaagagaccttttagtccagaagctcaatgagatacctttgcctggagatct

SEQ ID NO: 20400 - DNA, 225 bp, Glycine max
  unsure (1)..(225): unsure at all n locations
  Clone ID: PAT_MRT3847_118426C.1
cnttgatgaatcnactncagaanagcgtgctgngtaganttatttggtcttagtgtcaacaagcagatgcaagcaaagaagacacgcgagtncnctggtggttggagnangnggntttcnttagcacgtgctcgatttatganccctaccagccttgnacntgatgnaccaaccaatnacctnattnggaagcttgtgtgtggctcgnagannatctgaagnant

SEQ ID NO: 20401 - DNA, 451 bp, Glycine max
  unsure (1)..(451): unsure at all n locations
  Clone ID: PAT_MRT3847_118427C.1
atatgagacaacactgagcatcgtctagctatctcgatcgaactgtccaaggtcctgtcacgtttgaatggaaaagatggccagagtacaggtaataatggttatctaatcggtttgtctcttgtggtcatcgtaaatgtcagctatgtggtagtaagaataataagggttaaggtgtgggctttcacaatggccccaatacgttgcgtgtgcggcggcacgggctaaataagcattgaaaacccgcgtggttgggcacggccggaaaagcaaaccgatttggaacgccaggagtagtattaatcgccgtggaatcccggcgggcttgacgcacaagaccccagggccataaccgcatgcacgggcagcgcactggtaatacnggccggccacaaggcttgcacgtggcccaacaagcaacaacggccactactgcaagcgcctctagaat

SEQ ID NO: 20402 - DNA, 414 bp, Glycine max
  Clone ID: PAT_MRT3847_118428C.1
gtttttgcttcttattcaacatcatcaaccaatcacccccccacaccaaccccaagtgatattattttctccggagagaagatgaaacaaagagcttcatttttaagtaacaataattttaatattaattaaataattaattattaaccattgccttcttcttcttttcagtttggaataaggttcaattctaataactgaacgccgtcaacaaccgccaacgtcgcattcgccaaacggcgttaacttgccccgaagcagccttcaacgccccgcccgtcaacttgcggcgccgtcgcctaaatgggtgcccttcttctctcttctggcaagggaaatcgcggccttccgaacaacggtggcgcttcaacacgccaaaaccgtggttgggcttaaaccagtgcttgcttcccg

SEQ ID NO: 20403 - DNA, 437 bp, Glycine max
  Clone ID: PAT_MRT3847_118429C.1
gtcaaaataagggcttaataccattgatttcaaagtgaagggcacagttcatgcgaaaagtttgagcagttattaagctcgatcggcatataattggctattctaagttctaacatatatatatagttgagcctttgtcataatatcacatgtcacatacttggcagaatcatgccagcctaactagtcagatatgaagcatccatggtgggatgagagaattgccactagggactgtttgagcctttcccgtttcttccaccaatgctcttccttggaatgtctcacagagagttagagaaggaaccagtctttgtggtggcggatggagctgtggagaagttaagttaagggtccatgaatttgggcctagagtttttgggccaatatgtggacctttagtcactggtttcgctttctccttcaactttgctagc

SEQ ID NO: 20404 - DNA, 918 bp, Glycine max
  Clone ID: PAT_MRT3847_11842C.1
attcggctcgagctattccacttcattgaaagctagtcccacttgagctttctttccacaaatctctctttgcatatcttcaatgaaaacctgagtgtcaccaactccatctttcagtttcatctttcacacatacacacttaaaaaaccacttcttcttctagtgcttctgatccaaaccaccaccatacacaaaattcatattgaaactgtgttctgtttgtttgtttgttactctactaatctttagaacaattcagtctttggatttgtttgtgtcctttttatcaatcaaggccacactcaaaatcccaagttttataaatcaagcataatggaatctgaaaatggagttgctatggaggacgagaaacatgtcattggggaaacaaccaaggagaacataaacaaagaagctgaaaacagttgtaatgctgaaattcagaccaagaatgaggtatctgaaactgatgtaaaagctgaagggcccaaatctgcagcaagtaaaatctcaaaacttgccaagggacatgttggcaaaggtggtgttgcttcaaagaacaacaaatctgccaccaaagacaaacccaatttgaagtccacaacttcatatcaaacacacaggccaaacctttccaagagcttttctttcccagccaaatcagctggtggagagggcgtgaagaaaagcactaatggcactctcgcgaagacagaaactaagcatgctaatggggctaaagctgaggcttctattcgccgttcaagcaggctgacaaactccgaagttaactcaaaggaggcagaaacaaacactggaaattctaatcagaggacttctttgacatccatcactagccttaaaacctctgagtctggaatatttacagtgaatgcggttaccaagagccttacatt

SEQ ID NO: 20405 - DNA, 239 bp, Glycine max
  Clone ID: PAT_MRT3847_118430C.1
gcacaatgatctcgctcacaatcctcctcatctctcatctcttctgcatcgcccacacttgcagcgcctccaaatggtagcaccagcaagattgctgccgcagcagctccagggggctgacctcacgccctacgacaagcacatcatggagcagatccaaggctgcggcgatgctcgatgatgatgatgacgacgacaatcacattctcaggaccctgcggggaagaatcaactacata

SEQ ID NO: 20406 - DNA, 497 bp, Glycine max
  Clone ID: PAT_MRT3847_118431C.1
caatgcttccctcgctggggccattcggcgatctcctccgggtcactcgccgtgactcccgcagagctgcccgcccctgcccccacctttatacaagccagtcatcggaatcgtcagccatcccggcgacggcgcctccggccgcctcagcaacgccaccggcgcctcctacatcgccgcctcctatgtcaaattcgttgaggccgccggcgcccgtgtcgttcccctcatctataccgagcctccggagaagcttctcaaggtaaaatgtttcaactttcaaccatcactccctcactcttaatgttactacttttaaacctaactacataattaaatagataatcaactagtatttttgttgccactagatgcaaacgagtcgagtccagcccaacacttaaatagttctggtttggtttctaaaaaaaatgggatgctcaattgctgatgcttaactgtttagttaaacctgtaagctttaagcttgacttgtt

SEQ ID NO: 20407 - DNA, 1739 bp, Glycine max
  Clone ID: PAT_MRT3847_118432C.1
tgattgtaaaaaatggaaatgaaaacgtgacgtgaaagaatgattgattcccgagcgaaggtggatctcactcccacccgttataaaatgacataacttcatttcctcatagtcattgacttccccaacatgtcaagcgacgccgtttgggtcctcttccacctcgccttcttctcccaatgccttccctccgcctgggcccactcggcgatcctcctcccgggtcaactcgcccgtgactcaccgcagagctgccccgcccctgaccccaacctctactacaagccagtcatcggaatcgtcagccatcccggcgacggcgcctccggccgcctcagcaacgccaccggcgcctcctacatcgccgcctcctatgtcaaattcgttgaggccgccggcgcccgtgtcgttcccctcatctataccgagcctccggagaagcttctcaagaagctcgaattggtaaatggggttctcttcactggtggatgggctaaaagtggtttatattttgaaactgtcacaaaaatatttaagaaaattttagagaagaatgatgctggagatcatttcccattatttgccacctgcttaggctttgaactcataacgatgatcataagccaggacaataatattcttgaagagtttagtgcatcaaatcaggcaagtactcttcaatttgtggagaatgcaaatatcggagaaagtgtctttcaaagatttcctccagagttgttagggaagatgagtacagattgtcttgtcatgcaaaaccatcgttatggcatatcccctggaaagcttctgaataatccaaagttgtctagtttttttgagatcttgacaacttgcacagatgaagatgataaggtttatgtttccactgtacgttctcaaaactatcctgtgactggcttccaatggcatccagagaaaaatgcctttgaatggggttcaccaagaattccacacacggaggatgccattcagataacccagtatgttgcaaattttttggtcagtgaagctaggaaatccttaaacagaccagttgctcaagagttgctagacaatctcatttacaattacagtccaacttattgtgggaaggctgggaaaggatatgatgaagtttatatatttgcgcaagcctgagaatgctggagaaatcagccaagaattgtattgtgcatagtaattaccatgaatgttgttgtatgcactagtaatatcattgttatgatgcacaataatgagagcaagatgcttaatattgtaccaaaagctatgctcatttatgcgttgtatcatgttattaccgagtctttggccttagcttctgctagtattccaatattataatacgtgcatctgcagaatgctaacgctgtgttgtttaggtcaattttctgttgaagatgacttgtaacatgtaacctttaggattattgtctatctgaggccaaaaagataacatcagaaaaagaaaaccaagcttataaggtttacaactttcagccgtcactccctcacttttaatgttcctacttttaagcctaactccataattaaatagataatcacctagtatttttgttgccactaaatgcaaacgagtcgagtccagcccaacacttaaatagttctggtttggtttctaaaaaaaatgggatgctcaattgctgatgcttaactgtttagttaaacctgtaagctttaagcttgacttgttaaaa

SEQ ID NO: 20408 - DNA, 403 bp, Glycine max
  Clone ID: PAT_MRT3847_118433C.1
ggggggggcaaacaatttactttttatttatatataaaaaaaaaaaaaaacccaaaacaccccactttttccgccctacaaaaaatttaaggaaccccctaaagaccgattttttgagcaaaaaagcaggggggccctaggaattaattaattaattccggggggcgggggctttaaaaatttttattattggggggttgagtaataggaccggcatttgggggaaaaggcatagggggggggggcatgtagttaaaaaagggggggggcccaccaaacataaggggggggggggacatggggggggccaaatttgcttgcggaaggggaggccgggtaaaaaacaaccccaaggggggctggtgaagggttttgtgtggagcatgttttttttccccccctt

SEQ ID NO: 20409 - DNA, 385 bp, Glycine max
  Clone ID: PAT_MRT3847_118434C.1
ggggagcatgcagattgcataactacttaaaaggagcattcataacttcatattgaaaatttcgggattaaaaaaacactttcacgaaaaaaggcggtatgtcaagtcaaaacttgctcacgggatcaaaaaaggaaaaacaaaaaacacagcaaattgcgcaaggaagcaccatgggcttgtcttccctttttttgcttctccaacacccctttaacaaaaatggggcacacgaaaggcacctatttctggctttttctactatctatactttacttcgcaacttttaaacattggtgggaaaaaaagacccatagcagggaaagacatcccttttatggcttattgctaggattatctcttcttaccccccgggggggggggg

SEQ ID NO: 20410 - DNA, 447 bp, Glycine max
  Clone ID: PAT_MRT3847_118435C.1
gtttaggtactatgggatttggaattccatcagcaataggagctcaattagctgaacctgagaaaacagttgtatgttttgtaggagatggcggttttcaaatgacgaaccaagaaatggctttacttccagaatatggacttaatgtcaaaatagtacttattaataacggaactttaggtatggtaaaacaatggcaagataaattctttaataaacgattttctcattctgtatttaacgatcaacttgattttatgaaaatggcggaagcatatggtattaagggattcttgatagattctccaggataaattagaatcttcaattgatgaagcatttgcatatcatggaccggcactcattgaagttagaatctcacttatagagcctagttaatcctaatggtacttagtggcaaatcaaatctatgaaatggagggttac

SEQ ID NO: 20411 - DNA, 400 bp, Glycine max
  Clone ID: PAT_MRT3847_118436C.1
aaaccatttaggttttttaaaaccaaaggtccttaaaacaattttcccaacacttttaggggggtaattttttttttggttttttcccaacaaaggggtttgggcccttttttttgggtggggcatgggccagggttaaggtttttggggttctgttttggccactcttgggcttttcaatgataacaactaaggttatggcaccagattttgttaataattggattggaaggaatattggccctgggagtttaaggagttaacagggcctttttgaatgcacaggaggatgtagccggccacagtcccacaggccttgattggttttttgaaaccaaggttgaaaaaggggccttggggttcctccgggttactatggaaccaggtttgtgggcccttg

SEQ ID NO: 20412 - DNA, 433 bp, Glycine max
  Clone ID: PAT_MRT3847_118437C.1
aactcggacgcgtgggcggacgcgtgggctgcctttatattttcttctgtattaagctgaccaaaggcaaatccatttgtatctgtagctggaattttcgtcattcttactttaccttccttcctcaccttctaattctgcaacaagttccaaactttcaaatctcaccgccccaaaaattcttttttggttacccatttgactttagcctctgcaacagagtctcagatctctgcattccaattcccatggctggtcgctatgacagaaaccccttcgatgaggaagaagttaaccctttctctaatcctggaagtgttcccgctgccactaattcaaggcttccacctcttaagccagaacctgttgattataattatggctttggtgcgacagctgatattacctcttgattcatcaatggatttgaaaa

SEQ ID NO: 20413 - DNA, 280 bp, Glycine max
  Clone ID: PAT_MRT3847_118438C.1
gaatgagtattgttgttcatttgataaggagataatgattgtgggatttggtgcttatatgaaagtttatacgatcactgaagcgggtgcgtgttgttttggtagtagttggaggatattgcaaaatgtgaatgcgatggtaactttctaatatttatattgcgattgagaatttgggtggatattacttccttttgtaggcaataatggagtctatatgttcgaacctttgggaggtgcacaaatttattgaaatacataggtattggccttgaggatg

SEQ ID NO: 20414 - DNA, 341 bp, Glycine max
  Clone ID: PAT_MRT3847_118439C.1
gcttccccccaaaacaaccggtattgggaattggcttctataccaaaaaggtttttttaacaattaccacccctaatagtacaaaaagccaatgtccactatacaaaacttaatggtaatctcagtttgtttgtgcggaaacaaataattaaacatatacatccccccctaaagataatctcacattgcccaaggaacaaggtgtacattttgttttgttacaggacaaaaataatttttgacaggccatttgtccccacatataaagagaaaggtttggtgacaccccggaaagcttctttcaatttcccccactacaataaaccgcgaacatattgccc

SEQ ID NO: 20415 - DNA, 294 bp, Glycine max
  Clone ID: PAT_MRT3847_11843C.1
aaaacccacaaaggggtgggcttaatttataaaggtaatttatcccggtgggttaaaatccccaaaaaaatagggggaaacgctggcctaaaaaaccattgtaaacaggggcggttttaaccccaatttgaagcaggtttttttttttgcccgctaattactccgggggccaggaagtttcccaaggaggggcgttttttattcaaatcgggggggggatcatggccctttttaaaaaaaagggtataaaaaaggggttttaatttttcccgcgtttaaatccctttctaaaaa

SEQ ID NO: 20416 - DNA, 239 bp, Glycine max
  Clone ID: PAT_MRT3847_118440C.1
ttcacggctccatacaggctgtcagaagacgacaaaagaggcacaaggggatttgatgttatcaataatcaaattcagtgtaatgctacagtatgaccatgttctctgcagtgcaacaacattggtacccgtggaatgccagacgttgaaaatgatcccacgtccaatgaacactgtatatggtgacccttatcaagtcgtcagatgcacatcttagaggcttcccagtagagcacaca

SEQ ID NO: 20417 - DNA, 1668 bp, Glycine max
  Clone ID: PAT_MRT3847_118441C.1
taaggcaagcaacatatgcagtgctaaatcatttaattgaatatgttgaaaaccttgagaaggctgggatattggaagagaaagagatgctacaactccatgatgctgttcagactgatttaaagaaactactaagaaatcctcctttggttaagcttcctaaaataagtagtatccatccaatgttgggtgctctcccatcttcagttcgtgaatcacttgcaagttgtaccaaggaaatgatgaaattgcgtggtttgacactgtacaaggaaggtgccaaatcaaatggtctcgagccgctcgagccgggagtggtgaagtgggaaagcaagatgataagaaccaagcactcttttaatcctacatttacgcatgggagcacattgggtatttatgaagtgttgactggaagatcatatatctgtgatgtcgtcactgattccgtggtattctgcatttttcttgaagctgataagataagatcatgtctcaaagcagatcctttgacggaaaaattcctgtgggaggaaagtgctattttcctttccaaattattgcttcctcagatatttgagaaactgggtatgcaagatttaagaactcttattgcggattccgagagatctcgaatgaccatattcataagaggggaaacaatagaaattcctcatcattcagttgccctcttactagaaggatatgtcaaaactcaaggtcgtcaagaactggtaacagcaccagcagccctgcttccttcacatgggaatctaagcttccaaaatttggcaagttcaggttctaaggaagctagttttattcatcaacaaggatctagttatctagttgaaactacagcaagagtaattctgtttgacattccagcacctgaggctgatgctgctcttgttagaaggtcaagttcactgttatcacatgccggggatcatcctcatagatctttccgtcgaaaacatagtggtcttatgagttggcctgaacatttctacaaacaagaccataagcagagatctgaaggagctgggcgacaaaccaatagtttatctgcaagggcaatgcagctgagcatttatgggagcatggtggacatccctccccggagtagaagtttgttaaccaatgatggtagaccacctcatagcttgtcctatccaaccattgtgtcacatcaaggtcgtcctcttgtttcagtcaaatcagaaggagctgcaactgccaagaaggtccatgaggtcacaagacatgttacaaatccaccttcacaaagcacagaacgaagacagcatcaccatggagataattcaagtgatgattctggtgctgaagaagaagatattattgtgaggattgactcaccaagcacgctatcttttcgctagtcttcagggtgaagaatcttttgtgattatttgtttgttgtgcaataaatggtgcctctgtatcaccaacattgtacattagaacaaataggtgtatagaatagaccacgaggctgtattttatttacaataaacgtatttggaaatgggtgttattacttgaagttttttaagttgtaccaacattgttatagaaatacaatacgtttgagtttggtagacactcttcaatcacaaatcccctgggaagtttttctccatttaagtc

SEQ ID NO: 20418 - DNA, 458 bp, Glycine max
  Clone ID: PAT_MRT3847_118442C.1
gcatcttgaaagcagctctatcataagctaaacctgcttcttcttcagtctcataagtcccaagccaaacccttccacctttgctctttgggacccatatctccgccgcgaactttccccacggcctccgcctcacgccccggtaatgcttccataccggatgcgtgtgaaattcacgcgcgtccacatgctgttcacttttgcatgaaaataaaccctttgagtcgtggacaccttccaagcagatttcgtggttggagacattggagatagtgttggaatcattttcatgctctagaagatagtgttgaacagattccaatggagaaagatcgcaatatattgtattattctccatgttaattagtttaatttggaatacaatagcgagggtagtgtgtttttcttttggagagtaactttgcggttgattgaatttctttttctttttctttttt

SEQ ID NO: 20419 - DNA, 763 bp, Glycine max
  Clone ID: PAT_MRT3847_118443C.1
gaccaggcagaggataggctgcaacaaatacctgcatgtggccatacatttcatatgagctgcattgatctttggcttgccacccataccacctgtcctctctgccgcttctccctactaaccactgctaaatcttcaacgcaggcatccgatatgcagaacaatgaagaaacacaagccatggaattctctgaatcaacatctcctagggatctagaaaccaatgtcttccaaaatgtctctggagaagttgccatcagcactcactgcattgatgttgaagggcaaaatgtgcaaaacaatcaataggagcatgatgatgcaaaactctttcaggtgtatcaagttgataatcaattctactatcaaaatgatgaaatccagatatattgacaaacttatcccttccaactcagttgaatgaagcctccagagtgtgcgcagcaactgcacagattgatacttcggcaagaaatgtcttcattcggggaactacagctttgatggtacatttgaattgactcatcattattgtaacttatggtaccctgaatgtgtcttttaagcattctaattttggttaatgtacctaagatagtttacatcacaagtgaaaagtattttatatattgctggtttttcttcttttttttcctgcgttttttcgttaaaaatgcaaagggtttggttttggatttagatcctgtcttatccattttgtcgttcccactaatgaatagcatttttgatgcatgcatacttc

SEQ ID NO: 20420 - DNA, 222 bp, Glycine max
  Clone ID: PAT_MRT3847_118444C.1
gcgacggcggtacagagctatggtatgtcggagacggaagttaacccatactccatggagtggactggctgggccagacaaatactgagtcggggcaacgattttgtgaagggctatcttgctacgagttggcgattgattaccatacaggatatgagcacctatgctggaccgagaacagtctttatggtggtgatcaaaaatagatgtttgaaaggacac

SEQ ID NO: 20421 - DNA, 664 bp, Glycine max
  unsure (1)..(664): unsure at all n locations
  Clone ID: PAT_MRT3847_118445C.1
ctagacattatatagtgttggaggagtggctgtaanaagagaagaaagatacaagcgattcaaacagtctaaacaaaaagaatgtggaatctattttaacttttgactcttgcttttgggcacatgttgaagaagctatcctttcatgcaaagtgttggaggatgtacaatctagtgtgacagagaaggaagaggaaactgggaagttgcttgaattcgagaagtatgtttatgggttgctcccgaaatatgaagtgtcatcagagatttcctggagcatagcagctacatgacttggtggaatcagtataaggcaattaagaataaggaaacttcatataattcagctctagcagacttcatgagcaatcctgattattataatgtgcagtatgctaagggaacttataatttcctccctggggcatagtgaatgcccgtgttgttgagcagggtgcaataaattattaattcatctttttttatattttctttgttgaaaatgggttggttgggatcttggatttatcctcccttgtgtcgtgatgttggaaactcttggaagaattgtctttcccttgcggacattcactctcattcttcttgaaaatttaagatgagtatggatagcttagtattaatgtaatatgaaaggttcggtgtg

SEQ ID NO: 20422 - DNA, 255 bp, Glycine max
  Clone ID: PAT_MRT3847_118446C.1
tctctcactcgcgaacacacactgaactagagaacatcattggagtcttggcggatgagtccttcagcattatcatgccttattgcgtccaaagaggccttattggcgagatcattagcagatttgatggtgtaggtgtctactttgaaaggtgtgtaactgttactttggacctgcgtgttgtcttataagcactatgctgatttgtctgccaagcctttctttagtggtgtggtggattacatgatctctggc

SEQ ID NO: 20423 - DNA, 212 bp, Glycine max
  Clone ID: PAT_MRT3847_118447C.1
acagtataacttttggtttggttgttagcatctctgtgtcagtgttgggtttcctttcggcgatatctcgcgcatatttaaccactggtatataaccaggtgggattcggtaagcagaagatttatgtatgattatgaagcgacaaatcattattacatcagaccagaggatttacctcgtatgaagtgagttaatgtgaagtacagtaaaa

SEQ ID NO: 20424 - DNA, 882 bp, Glycine max
  Clone ID: PAT_MRT3847_118448C.1
aggggaataccttcaaagctttccttgaaaattaaatttcatcattcaaaaaacaataatgatgatgatgatgaaatttccaaccggataacaaaataataatattatcactctttcttccaccaaacatttttctttcattcatgtaaaaagtaaaactgactttctaaccataataatgttgacctggaggtgaagcaccaccaggtcttgcatttggctgaaccaatccttgagcagcttggctggtttgcatgagaggtgaggaaccaggagctgaaagtgaagcaccactggactgtaaatttgcattgggtggaaccctgggctgggcgattcccattggatttgcattatgagccatggggctgctttgtgcatgaggtgaggaagcagcaggcatagctgcggctggcgcataggctggcattggaggagctgcaccagattgaacatgaaaagtaccaggtgctgatacataactcggtctaactgcctgcaggtttggatcccatgctggcacttgtccgccaggaacttgagtatgataagcaggggcactgccagggtacataggtgcagcctgaggattttgccaagctgttgcaggaccttgtgctgctagcagactaggatctggcactgtatagtctctacttttgtcactgaaagcctacaaccaaaacaaattatataatataatactaaaatcaaaatagggatcattattcaaccataatgaacaaattacgacaaaaggtaggtcaatcaagtgtcaagaagcatacacttaagaaccaaatctctttctgatcaagtgtccacattgcttctaaggatatctttaatattcccccctttttcatttttcccctcaagaac

SEQ ID NO: 20425 - DNA, 580 bp, Glycine max
  Clone ID: PAT_MRT3847_118449C.1
acgagataaagtgtgaagaattaaccgcactccacacgtcacaaaaaaataaataaatcagagacctgcaatgaacaggcatgtatcctgcatgaacagagagctgcatgaacactgaacggacttaacagagacttacatgtagtatgtgtgttggtaagcaggttagcagtgaccgctgggaagcaatgagtgtacaggacgatgtaaacttggctagaaacaattctgacaagcagtgggtcagatgtcaaagtttgaaatggaggtcattttattgcataaatgacctggaaggatttcaaactgtcatgtttctgatgtataagatgcatgagggatgatcatgaaaatgtacaagataaatttgacttgtggttgaaactttttactatattatttttttcttaacatgattattgatgattatgttgtagtttttttttaatttttaaaaataaaaaatattgtacttattgctgctcactttcatggctcattagagaggaaataatttatgtctggaccccatttctttcttattaccccttcaacaagcagtagaaatctgtattttatc

SEQ ID NO: 20426 - DNA, 2014 bp, Glycine max
  Clone ID: PAT_MRT3847_11844C.1
ccagcgtccgctattccacttcattgaaagctagtcccacttgagctttctttcccaaatctctctttgcatatcttcaatgaaaacctgagtgtcaccaactccatctttcagtttcatctttcacacaaacacacttaaaaatccacttcttcttctagtgcttctaatccaaaccaccaccataaacaaattcatattgaaactgtgtactctttgtttgttttcttgtttgtttgttactctaccaatctttagaagaattcagcctttgaattttggtgtccttttttatcaatcaaggccaaactcaaaatcccaacttttgtaaatcaagcataatggaatctgaaaatggagtcgctatggaggacgagaaacacgtcattggggaaacaaccaaggagaatataaacaaagaagctgaaaacagttgtaattctgaaattcagaccaagaatgaggtatctgaagctgttgtaaaagttgaaggtcccaaatctgcagcaagtaaaatctcaaaacttgccaaggaacatggtggcaaaggtggtgttgcttcaaagaacaacaaatctgccaccaaagacaaacccaatttgaagtctacaacttcatctcagacacacaggccaaacctttccaagagcctttctttgccagccaaatcagctggaggagatggcatgaagaaaagcactaatggaactctcgcgaagccagaaactaagcatgctaatggggctaaagctgaggcttccattcgccgtttaagcaggctgacgaactctgaagttaactcaaaagaggcaaaaacaaacactggaaattctaaccagaggacttctttggcatccatgattagccttaaaacctctgagtctggaatatctactccagtgaatgcggttaccaagagccttacatctgaggaatcattacgtgttgatcagatttcaattccagcaaaaactgaaaaaccaaataaagaggaagatgatgctcattctacaacttcaagtcatactcctcgtaggaggagcagtggttctggattttccttcagattggaagaacgagcagaaaagaggaaggagttcttctcaaagttagaagagaaaattcaggaaaaggaggcagagaaaactaaccagcaagagaaatcaaaggaaaaccaggaggctgagatcaagcaattgaggaagaccatgactttcaaagccactccaatgccaagtttctacaaggaacctcctccaaaagttgaattgaagaagataccaataacgcgcccaaaatctccaaagcttggaaggcacaaaggatctgctgtgaacaaatcagcagacaaatcttgttctagtccacatggaaagcaacaacagaatgattcaaccaaggcaaaggcaaagggtagtaataaagaagtgattccaaagaaaccaatcagaaaatctcaagccaagctgcagtctcaggaaagtgcaatcagaaaaactgaaaaggattctgtgaagcctactaaagtcgaccaagatgcaaaagctggcacaggaaacaatgaagaatgccatgatccatcagttaacaattctgaataccaaaatgacatggagcaagaatccaaaaatgatcatgatcagaatggtgcactggtcttgaactcatccccacccgagattgtatcatgaggttgctgttggagtgtagattcatatatagccggagagtatttatataaaaacataggactccatgttacgagttatttcattattgttgtgaatatagaggttgcttcatgttcattataaatcttgtattgcatttaaagataggttgcttgttgttatattgaagtgtttctgtttgtaacgaatattttgttaattcatcatttaccaaacagttcatgtgtttgccctctgatcaaataaacattagactacaagacaatttctctttgtacttcctatgaaggaaatgcaagaaggttctcttccaagttaattgt

SEQ ID NO: 20427 - DNA, 443 bp, Glycine max
  Clone ID: PAT_MRT3847_118450C.1
tcttatattcaaatttccggtttattctacgacggcagatacaaattctggtctaaacacgagaaatattttgctttgacagaagaagaaaagatggatgtgattagaaatagaggcattcctgctgatgttcttgcaaagcgagctcatgaatttgaaaaaacatgttgcttattgaagttataaggatcaaattcctgctgttgacaagttgtattctactaaggattttaagtttgcaaaaattatgaaccttaaacaaagtggtggtgttgatctaaaacttttttactgaatgggaaagttgtatgaggttaagcatatatctgtatctaacattagtgcaggggaaaatcatgtaatccaaataccccttaatggcacaggaggaaattctgttttttatttgaatgtgattccaaaactgtaatggtgaattaaaa

SEQ ID NO: 20428 - DNA, 375 bp, Glycine max
  unsure (1)..(375): unsure at all n locations
  Clone ID: PAT_MRT3847_118451C.1
ccatcttgactctcttctcttgctactgatgctcaacccacacaccaccctgtgagcgcannnnnatggtgtaccctaccataactgcgcccttctcaaaggaaccattaccgctaactctattatggtacgggagcttcaccccaattcaacgatccacactcctggagttcattatctcgctaagtgccaccgcgggggccccacttacctccgttgcatcatggcggatgaccacggacaagtacaaggtgggatccactacactcattcaaaggaaacaaattcttgaacaaacttactccctcaggaactacctcaactgatcacaactagtctctctctccttactctttgtccacctcaatgccatca

SEQ ID NO: 20429 - DNA, 399 bp, Glycine max
  Clone ID: PAT_MRT3847_118452C.1
ttcatgtttctgaggtgttttgacctttgtgttattagggtgagatgcttttttgcccccaggaaaagtacttcctttttttacccacaggggcccaaattaaatttgactacttggggcccaattaaagcttgaaaaccgcccatatttttttttcccagggggaaaagccctccacatttttttttctttgaagccaaacttcctccgggatggaaaaggggaaccttacccttctttatttaggttggggggggccaaataaacacttttaaaacgctgggggggagcaccccccccccccccacctttacctttcaaggaaaatttaccacccttccattttggtgccaccttagcggaagccttttccacacctttaaattaaacaccttgctt

SEQ ID NO: 20430 - DNA, 298 bp, Glycine max
  Clone ID: PAT_MRT3847_118453C.1
cttgcgcaacatgtgtttcaacatctggttctctctttcaagaactctatggaagtctccctttttttatgtgggttttcgtctcaattttgtcttcttgcttcgagatactcaatcttttttgatgtgggttatcatagcgatctacgaatcttttgatcgaagctgtggaaaatgtagaaccaatctgaatctacgttcttttggctccaaatgtataaccaatgtgtcgcaacaccctccatgcttatgaatgcatactacaacttatggaatgaaggtatttcttgtacctcag

SEQ ID NO: 20431 - DNA, 244 bp, Glycine max
  unsure (1)..(244): unsure at all n locations
  Clone ID: PAT_MRT3847_118454C.1
ataaaaaaaattaataattttttttccgggggggagnaaaaacaaancaaggagacgggcagggaactaagagtatagcgaaagacaaaattgaaaactatgctaataagaaaacaaaaaatatgttggcaaagcagaacctagagggggagacccctatttatataactccaaagaatggacaagctaagagcgtcaagaaaaaacttaactagttggacaagaaaactgcatctattgcaaa

SEQ ID NO: 20432 - DNA, 536 bp, Glycine max
  unsure (1)..(536): unsure at all n locations
  Clone ID: PAT_MRT3847_118455C.1
cccacgcgtccgggctagaaagtaagaaatattaaatgacgacatatgggggccgtatgttgaggaagttattaacgggggagagttagtgttaaattttgatgatttcatggaccattgctggcaggaagcaagtggggtttggaccatttctgatgaacaaagagagagcaatatcaatattgtggttgggaatgaaaaagttgatgacgacatgtgtacgaacgtaattatgtcgagtggggatcatgatcggttgcattcttcctcttccattgcttcggacttggatcaaaacctcctcacttggctgtgggaagatgaagattgggagaaggatcttcagagccttggagagattcatagtgacaaattaaaagctatggttgattggtttctctcttcaagttaaggacctagcatatgttctcttctctgtcattntttctttccctttttgggatgtgaaactatggacatggaaccattttgcatgtcttagggtagaatgtaaataacgtacgtgtttgcattta

SEQ ID NO: 20433 - DNA, 268 bp, Glycine max
  unsure (1)..(268): unsure at all n locations
  Clone ID: PAT_MRT3847_118456C.1
gccactgtggaagggtattaggcaacaccgtgggaaggtgttggctgcatttctgaaggcaattgggtttattattccgttgatggaagccccgtatggccagttactatactnaggaagtcatgctcattctgattcgtgaattccagtcacctgatgaagaaatgaagaaaattgttctgaaagtggtgaagcagtgtgtgagcactgagggtgtggaagctgaatatattaganatgatatcctgcctgagtttttcaggaattc

SEQ ID NO: 20434 - DNA, 675 bp, Glycine max
  Clone ID: PAT_MRT3847_118457C.1
atcacattttgctcttcagaacaatgccagtcatcgccgctaagcgcacattgagatcccacccctcatcgccccctcgcaaatcgccccgccgatgcaccgccgcaacccccaattccactccaacgatgaacagattcggcgccgacgaaaaccgagctgacccggaagctgcgaaacccaagtggaatcccaaagacggtgagcaattgaagagggtgaagctggcattgcacttgtccactgcgccgtcttcggtcgtgtgccgcgaggaggagcagaatgtggttttggagttctgcaaggggtgcgttgagcaccagaaggccgggagtctctacatatgcggctgtcccggaactgggaaatcgttatctatggagaaagtgaaagacaaattactcaattgggccaaggaggcaggtcttccacagccagatgttttgtctgtaaattgtacaacctttaccaacacatcagatattttcactaagatacttgggttaaaccaaacacagggtaaaaaggtttcggctacgcccttacagcaacttcacaacatgtattctcagaaatcgtctaacaagaacatgacattgatagtagctgatgagttagattatttgataaccaaagacagaggcgtgctccatgatcttttcatgctcaccacct

SEQ ID NO: 20435 - DNA, 148 bp, Glycine max
  Clone ID: PAT_MRT3847_118458C.1
cgcgaccgggcggaaaataaatgcctccaacttcagtgttatgcatgatataaatcttgatagacaagccatttttataaagatgttttacccatcaatgcaattctaagccactccttctttaacaaaaaaaaaaaaaataatattc

SEQ ID NO: 20436 - DNA, 397 bp, Glycine max
  Clone ID: PAT_MRT3847_118459C.1
acatggatgtttgaaaaaaaaaagaaaaaagggtcaagttgaataagtaagtagtttcaaataaaaaaaatcggtacagcttttttgaaaagttgtttagaaatgttttgtaaatgtatacagtcaaatgataaaagtaaacaaggcttgaaaaactggagagaatgtatgtgaacaactcaaaattagaaaattcactctctatttaataaaactctcaaagcttagtattaatgtactcaatatttaggcgagtcactatacgaatgattcaagcgagaatggaaagagctgacgattcaagttgaacgaaaaaaacccaaattttaaattatatttgatcctgtttgttcaattgaatttattaatgcagaatatacatttataaaaataaacg

SEQ ID NO: 20437 - DNA, 322 bp, Glycine max
  unsure (1)..(322): unsure at all n locations
  Clone ID: PAT_MRT3847_11845C.1
ggagagancacaaccaaggccaacgnnggacangagaaganngngcgngacacangcaggaacannggnnnngncncnngagangnnggncnnngagcngacaacngcaagggccncgncaacanngaccaacanannccngnnanngcncaaggggngcacggccaccncacaaagaggccngaggagaaaggngcnggngaccaaggncanangnncggcnangccacngacaagacncccgagcncangccccngagccagggccccggcccgaagcncggngcccagcccaccgnggnncggaagaacgggacacgcc

SEQ ID NO: 20438 - DNA, 510 bp, Glycine max
  Clone ID: PAT_MRT3847_118460C.1
ctccaagttcttcttggtgctgaaggctgtaagaattattgaaagcttctgcctcacttagtatcgtctggggcccagcacccagcaataactctaataatgtttcttaatggtatagcctcctgagattaaatgtaaaatcaaaaattaggaaatcttggagggagtcctcaagttgtattgctttgctgtgcttttggaagaagggacgacctggaggacacaggctcatgtgtgggtcttcatcctgcctgaccggcagatcttcctctacaccttgggcaaagtctatgcgaagatggtttcttagctctccatttgccatgattttcctcccattcatcatgaaggagtttctcaaaccaggagtttatatttattttttagaaaatacacacttttcaggagaaaccctgacatgattttggattctgcacctccccccagtctctgcacctgggattcagctcaaagattcagagtcttcatttttacaaaaggtcccccaag

SEQ ID NO: 20439 - DNA, 324 bp, Glycine max
  unsure (1)..(324): unsure at all n locations
  Clone ID: PAT_MRT3847_118461C.1
gttacaataaaaaatttttttttaanaataaagaattttaattgagtttgggttaatttaagctattgtaaaatctgtttaaacaattttttttttacaaaggggcaaaccaatgtctggggtataatgaataccaatcaatgcttccttccaaaccctttttttttcctcccaaaacggaaacgaagagattggaataaaaccttaaataaacttaaattatatatgccacttcactttctgcttcacgagaatttacaaaatttttcccccgtgccccaggggggtggcaacatcttaccattttgaaagttcttcttctta

SEQ ID NO: 20440 - DNA, 251 bp, Glycine max
  Clone ID: PAT_MRT3847_118462C.1
gtatgtgcatgtgcatgtgcatacacacagtcctaatgtaaaacatgctgtttactctatttttcttttcaagttaaaatgatattaatgtgacttgctatattttacatatatgtctaaaagttctatgttttacttttaacaataaaatctatctcatgaatgttttatatgggtatcatctttgaatggttaaggcatttcagtttccaagtataaatgccaatatattgatgatgtacttgatgtta

SEQ ID NO: 20441 - DNA, 473 bp, Glycine max
  Clone ID: PAT_MRT3847_118463C.1
gaggtggcggtgataaataaggataaacaggttgagcgggtgagtgatggggtggcggagagccgtaattatgagcaggtggtgtaggggaagaatgtggcggtggcaaatacactggagaaggaggactatgaacaggtgaaggtgtcacaggtgtcgtaggtgaaggaaagggtgaaggagtagaaggcgatggaggtgaaggtgttacaggagttgtaggtgaaggaaatggtgaaggtgtaccaggtgacggaggggaatgtgaaggtgaaggtgttaccggtgttgtaggtgaaggaaatggtgaaggtgtagcaggtgacggaggggaatgtgaaggtgaaggtgttaccggtgttgtaggtgtaacaagtgacggaggggaatgtcagggtgaaggggttaccggtgttgtaagtgaaggaaatggtgaaggtgtaccaggtgatggaggggaatgttagggtgaa

SEQ ID NO: 20442 - DNA, 124 bp, Glycine max
  unsure (1)..(124): unsure at all n locations
  Clone ID: PAT_MRT3847_118464C.1
atcngctcattngaccatgngtccggangttcgttacngcatctgccatacccncataggcgatggaaatccgattgaaagtnggtgcnncggcancatnnnntgngacgnnngtcttnatgcg

SEQ ID NO: 20443 - DNA, 316 bp, Glycine max
  Clone ID: PAT_MRT3847_118465C.1
aatacagaaaaacatttgtctggtttggtatgctattaataaagccatgcccacacaacgagtgattcatcaccacatttggtttggggtgcaattgccagggtattaaaaacgcatttttgatctgagcagctcgaacttataaaaagcgaggcccacccttttacaatactaaagtgctttcgatctacataagtggcgattatttacaaaagggtcttgcttagcaaaaacgataatgtgttgtacactattttgccgaataccgaagctcagaaaagtggacaatcaccatgctgctttgtttttgatcttg

SEQ ID NO: 20444 - DNA, 232 bp, Glycine max
  Clone ID: PAT_MRT3847_118466C.1
tttttggattgaaaatccacacctaccctctcctatgattggttggaccattttttatcccctcattattctccttgtttttcattttctttattttttagcctcttctgtccattctccatcatttaactcttttcacccctcttctattttcttattcacttttgtaacccatgctttttcacacttgttccaccgttttctttttctcattttttgtgactttattccc

SEQ ID NO: 20445 - DNA, 1896 bp, Glycine max
  Clone ID: PAT_MRT3847_118467C.1
cgaggcgtaccctagtcaataagcggtgttggaatttctctccatagcatcgtttcctagctctacactcgcgctttgctacttgagctccccattcatcggaaactccattcttctctttctctctctatttttccgtttcgtttaccgatgccccttctcgatcgcggcgatgtttggaagagcaaggcgcgatccttgcagctacagctcagggaccgtttccgtgtcgccgtcgaccgccattggcgccgccgccacaaccaccacacctttatcccctccgccgatggctacttctcctccaccattcaacgctggctcagccgatttcgtgatttccgcagagactcgttgccgtcgtccacctctttttatcgcaaacgagtgattaaggatttcagttctgaggaagattcaactcttgttcgtatgatgcaagctgttgcggttcctgttcttggaaatgtctgtcacgtgtttatgaacggattaaacagtgtgcaggtatatggtttagaaaaactgcactccgctttactgcaaagacctaaaggaaaacctcttcttacggtcagcaatcatgttgcttccatggatgatcctcttgttattgcttcgctgcttcctccgagtgttcttttggatgctaggaatctcagatggacgctttgtgcaactgataggtgttttaaaaaccccgtgacttctgcattctttcgatcagtcaaagttttgccagtttctcggggtgatggcatttatcaggagggaatggacttggccctatcaaaattgaaccatggtggttgggtccacatattcccagaaggcagtcgctcccgggatggtggaaaaaccatgggctcttccaagagaggtgttgggaggttagtcctggatggagatagcagctgcgagatgacgacagtagggcatacagggatgcaggagattatgcctgtaggtgctaactttcccagaataggcaagatggttacagtgctcataggtgatccgatcaattttgatgatataattgaatttgacaaagacaaaggctcaaatgtgcccagaagacgactatatgatgcagtagcatctagaattggtgatcggttgcatgagatgaaggtccgggttgacactatcgcaattgatcaagaaatgcagctacaagataagtcctcacacagcactgaacgaacatctaaaatactgcagcaggttgattgggaattatttggaatggatagcttcatgtctgtagaagatgattccaagcagagacaagaaacagttgccctctcaaatgttagtgtttctcagcatcatcaacaatctcatagtgatcagagttggagagctgggttctcatacaggatgcgtggttatattgatcagatggagcttgtgtctttcgctgcgagaggtatatttctgaataatgatacaaagaactctgctcgccctagcagagagatgggccccttaaaggcatggaagcagtttttggaagctaatctattaaggcagtggaattacgtccattactgaaaaaaacatagttctatagagggtgtaaattcaaatcttcggttttcaattaaaataattgagtttttgttaaataaaacagttaaatgcagtagaattgttgagaatttgtgactcaaatagctaacattttcgtttagtttgattaagtttcagggttgaaattatattgttgcacgcggtcctgaagatagaactgtataagccctttcatgtaatatatgcatagttatttactaatgtatacagtatactcttattttttagagaatatattttagtaagttgtaattttcattttctaaaaacataattaagttgaaaaagtgactatgttag

SEQ ID NO: 20446 - DNA, 676 bp, Glycine max
  Clone ID: PAT_MRT3847_118468C.1
atttggaatggatagcttcatgtctgtagaagatgattccaagcagagacaagaaacagttctcctccgaaatgttagtgtttctcagcatcatcaaaaatctcatagtgatcagagttggagagctgggttctcatacaggatgcgtgattatattgatcagatggagcttgtgtcttttgctgcgagaggtatatttatgaataatgaaacgaagaactctgctggccgtagcagagagatgggccccttaaaggcatggaagcagtttttggaagctaatctattaaggcagtggaattacgtccattactgaaaaatatagttcctatagaggttgtaaattcaaatcttcggttttcgattaaaataattcagttttttgttagaaaaacagttaaacgcagtagaattcccgagaatttgtaactctaatagctaactttttcgattagtttgattaagttgcagggtggaattatattgtggcacgcggtcctgaagatagaactgtaaaagtcctttcgttgtcttttctatttgaaaaaactatggaaggcacctaggaggaggacagaaataaaattcatgtaatatatacatagttatttaccaatgtatactcttattttttagagaatatatttagtaagttgtatttttcattttctaaaaa

SEQ ID NO: 20447 - DNA, 1067 bp, Glycine max
  Clone ID: PAT_MRT3847_118469C.1
caagcttagtgacactatagccaatacaagagtcaatgttgcagatgccattagagaccccattgtttttcccccttggttagataaatccgttgctggtttctagaacgctcttcttcaaggcgtgccgcatacggctgcgagaagatacggctgcgaggtagtatatttttgggaactaaaaaaaaggcactgcgtatggatttggtttagggtttagggtaaatccgtggctggtttctggaacttttgcatccgaatctccgtttgttttggcagaagcacaggttctccgccgtattcctctcgcgtagatctgttccatttcgccggtcagccatggccgatgacttcgacttcgcggacaaagttcctccttcattcgatcgcggtggttcaaaagggttcaacccagctttattgttctcctgcttttggtgggttgctgttgacgttccttgttggaaactatgctctctacacatatgcacagaagaccctccctcctagaaaaagaagccagtctcaaagaagaagatgaaaaaggaaagactgaagcagggcatatatcacctggagatcgaacctctcctcactataaatctgtgttgataaattatattctataagaaaaaatttatcgggtgcttgggaaatgtgatcaaggattctggatccaaagggttcaatccaggattaattgtcctcctggttgttggtgggttgttgttgacattcctcattggaaattatgtgctctacagttatgcacagaagaccctccctcctagaaaaaagaagcctgtttcaaagaagaagatgaaaaaggagagactgaagcaaggtgtctctgcacctggagagtagactttgtactcagtttttgttctatgtttaaattgtactatttagatgaactttcttgttctgtagtggtgtgtgcattacgttgattttcatcggtttatactgtgtattactgatagaaagcttagccacataaattagtgctttggtaatatatgggacgggctatttaatggttaaatcattattttgcttccccg

SEQ ID NO: 20448 - DNA, 396 bp, Glycine max
  Clone ID: PAT_MRT3847_11846C.1
aaattattgcatagccatttactaagggcgaacaatgtcctttgagaacaggaaatctctactttccatccctaattattcaaactagttttcagtcaaaaccagaaattgatctatacgttgcatttaataccaatgactccatggcgtatatgggtctacccataaaacgcatggggggaaacagaaacagaaacttgattatattcatcattctcccagactatgaatcgaataaacccactttaaagagcttccttatttgtgcctatttgttaaacttctcactaaataaatttaaagctaaccacgttcaaagccaagctgggttctttaaggatgtaacaactggcttcacttgcaagtaaaaatagagactgaattcttttttttgtc

SEQ ID NO: 20449 - DNA, 629 bp, Glycine max
  Clone ID: PAT_MRT3847_118470C.1
tacggctgcgcagcatattgatttggggggacttggttagataaatccgttgctggtttctagaacgctcttcttcaaggcgtgccgcaaacttttgcatccgaatccccgtttgttttggcagaagccatggccgatgacttcgacttcgcagataaagttcctccttcgttcgatcgcgtgggaaatgtgatcaaggattctggatccaaagcgttcaatccgggtttaattgtcctcctggttgttggtgggttgcttttgacattcctcattggaaattatgtgctctacacatatgcacagaagaccctccctcctagaaaaaagaagcccgtttcaaagaagaagatgaaaaaggagagactaaagcaaggtgtctctgcacctggagagtagagtttgtactcagtttttgttctatggtttaaattgtactatttagatgaactttctcgttctgtggtgttttgcattacgttgattttcatcgttctatatactgtgtattactgatagaaagcttagccacataagtgcttttttttttttcggtgaaggccactaagtgctttggtaatgtaggggactggctatttaatggttaaatcatcattttgcttccccgc

SEQ ID NO: 20450 - DNA, 402 bp, Glycine max
  Clone ID: PAT_MRT3847_118471C.1
gctggccggcctgattttgcaaacgttcagcatatattcatttcacttgcggaacaaaaccaaggaatttttagtagacttgcgtactggcatgtccacatcccatttgtccaagatatcctttaactatccctacgacagatttttggggcctacataagtcaggtgggactccaggcttttggaaaacaagcctgaccaaaagttgtcaagtcccggccccatgaaaaatcccaaggctttgaaaacccaacaacccttttttgcacccaatatagaacattgggtcaactaatagctttttattccccggggttgcaaaatcgtccctgggtacacagttgggcttttttaaaaaaaagggactctttgggtgccttggccaaacacccttttttgggg

SEQ ID NO: 20451 - DNA, 1517 bp, Glycine max
  unsure (1)..(1517): unsure at all n locations
  Clone ID: PAT_MRT3847_118472C.1
atttgttttggcagaagcacaggttctccgcgtcagccatggccgatgacttcgacttcgcggataaagttcctccttcattcgatcgcgtggtacacttacaaattccattgcaaaccttntattctattatcgtttattacttagatctgatcttaatcaattcctgcacaatgttaaatgctcctccttccacgtttttcatgaattaattaggtcttggagttatggatcgaaccttgcatgtgctcctgccgtgttttattttcagatccttggaatcattaacaaattttgcttctttttttcttcttctatcttcctgatgaacatccgtccgagtttttcaatgttacaaattcttagcgattctaatgttatgaattcagtgaaaatcaaattaggaatcctcttttattttttaatttattgttcagctcttcagctaggattttgatctggtaaatgttcatgttcagatttaacgatttaattatgattattgaattgtttatttttatgaattatggctattatattaggcaatttaatggttggttgcattactattgtgaatttgtgatgtgatggagcaatgattcgttgagccttgttgtgtaggttaaaatttattatttttattcaatgcatatgttgatgccaatccatgttttggattttagatgatcgtgatattactgaacaaatggtttgtggttaggttcaacttcaaacaacacatgtggtttaaagaagtcgaaatggttttaatgatttacacaccctcataagttcattttagatattttgttttggtctcagatctcaatcaaatgagatttgcacacccactgttaagcccaatcatttgattgttctttgagcaataattgtattaagatcagaagaagttgcgcattgtagtcattcatcaattgttcacatgaatggattgaagactcacccttgaagagaactataattgatgttattgtgcaggatgaccgactctgaataacagttgttattggtgataaattgcatttgttttttcatcttaaaataagtgcatttttattgttttttccgattccatttttgccaagttccccttgatatggccattattaagtgcctttttttgttgttatactcagggaaatgtgatcaaggattctggatccaaagcgttcaatccgggtttaattgtcctcctggttgatggtgggttgcttttgacattcctcattggaaattatgtgctctacacatatgcacagaagaccctccctcctagaaaaaagaagcccgtttcaaagaagaagatgaaaaaggagagactaaagcaaggtgtctctgcacctggagagtatagtttgtactcagtttttgttctatgggttaaattgtactatttagatgaactttctcgttctgaggtgctttgcattacgttgattatcatcgttctatatactgngtattactgatagagagcttaccacataagtgctttt

SEQ ID NO: 20452 - DNA, 389 bp, Glycine max
  Clone ID: PAT_MRT3847_118473C.1
ccttgtagctgatgtagaaaggtaactgggtaagagtgttctagcttgcattttttatgggcattgtacatattttttttttcttcaatagttcgataaaacttactggctccatctggctatcatcctcctactcttcttactgacactagaggtattgctacgaaaataaaattgtattctaaatttctacttgcatgtgcggatagagtaataaagacagaagaggactaccaaaaaatgttcaaaggagaaaaggaaacaaataaagaggcaagatattttgacatgtttacaacgatcaaagtcttttctaccgagaagaacgatgcaagcatatttatttgttacttataaaaattcaaaactcgtgtaaattgaataccact

SEQ ID NO: 20453 - DNA, 257 bp, Glycine max
  Clone ID: PAT_MRT3847_118474C.1
agcacataaatcatggggggtgttatattaaaatatgcccgccgttacacacactttgtgtaagataagggggggcaaaccgaaaaaaggacccatttatggaaaaaccaccgggccccgtatgggacccaaaccaatctaaatttggccactagaataagaaaaaagcccccaagaaaaaaaaaacccccagggcacttaaacccccccgccccccaaggggctgaccccccaaaagggccgaggggaactggcca

SEQ ID NO: 20454 - DNA, 428 bp, Glycine max
  Clone ID: PAT_MRT3847_118475C.1
ttcatcgtccggaaatgtggaataaccgcgagcacaggttgcagaaccttaaaaccggaaacaaaagcagagatgactagatgacatgaatatgtaaatttattgctactggctagagcaccaagtattaagggcaagaaaatcactatctgggctggtcacagacttcgggaatcattttcttttccactcttagtttatttgctgaacactctcctatttgatataggacttcgcgtcagatttaaacttcttcttgttctttctcagatctctgttcattttcaagttatagctggtgaatttttgggtctgtgctcttttttttctttatggtacaggacttttcttttatgactttcctttttcataaatttacttttactctttattttttactttttatctaatccttaatttgtttactc

SEQ ID NO: 20455 - DNA, 166 bp, Glycine max
  unsure (1)..(166): unsure at all n locations
  Clone ID: PAT_MRT3847_118476C.1
ttntcttttttttttttttttttttttttcgcgtttcacccacattttaatagctctgaagggacgttctaggacattttagacaacttccccataatctgtaaatttcttgaaccactctttcaagtgttgaggcctttccttaacaagcttcaataccacatta

SEQ ID NO: 20456 - DNA, 486 bp, Glycine max
  Clone ID: PAT_MRT3847_118477C.1
atattgcgtagtttacttcctgaatcttatgggaaaaaaagtgttttaagttccttctcacgatatgaagttaaattacgtgtaaaaattaagaaataaatacatggattaaaaacatctttttatgaagttcagagataaaattgtatgatatgaaaataaaatgaaacggtatgaattcttttttctctactttttgtataagggaaatagtagtgtgtgagtatcttgaaataaggtgtaaatgtatgatttgcttaaaaaaaggtgtaaatgtatgattattttttttatctaattcgaattttttggctttaattataagttaaaaaaaaacgttctataagatatttttataatttgtaaatgtataaattatttattcttaaatattcttaattaatgattgtcctgtaaattaacacataagtagtgaattaaaaaaaaagataattgttaaactatgggataaattattgattatta

SEQ ID NO: 20457 - DNA, 441 bp, Glycine max
  Clone ID: PAT_MRT3847_118478C.1
attaaagatggcaccatacaggattatgcaggtgattacgatgtaagttaatcgatcccttgatctcttctcttaccctaccctttctgtggctcattgagtgtgatagtatacaatttattttatttttatattttaggattagagttagtttaaaaagggttaagtgaactttattcatgacgcaattgatcctaggaactcattgatcatttgtacaatgcgttttttagttgtactattttcttataaacttttttatgtttgaatcattggcagtattttggtgtttaatattatctagatgcttaggatgattttggatacctgactgcacttgatcctcaattgttttatattatcccctgcttgattctcaattctcttatatgttatcccagttaccccctactcgatgatctttttcatgtctagtctcag

SEQ ID NO: 20458 - DNA, 279 bp, Glycine max
  unsure (1)..(279): unsure at all n locations
  Clone ID: PAT_MRT3847_118479C.1
acgcgcnggacgccaccgggcgggccaccaacaacaccgggggccgcacctaccagcaggcgacctacgacgtcaacacggggaagcccgcctacgacgtgtgggacgacatgctgggcacgctgtacgacctgcccggcgagggcgagacgtacgccttcgacatggcgctaacgaccgagatggtgctgaccgcagcccggggtacgagttcggcctgaggcgcgcgcccacgctgctgctgatcggngcgcgcgacaataccgctatcgggaagca

SEQ ID NO: 20459 - DNA, 168 bp, Glycine max
  Clone ID: PAT_MRT3847_11847C.1
cgcctcgacatggattccgataattcctccgccgatgcgctcttgcaaggataatatcttcagaattcagaatctttcatatcattttggttatgaccacccactagctattggaagatatttgattctgaccatgcatctttttttcttattttcaaagtttggatc

SEQ ID NO: 20460 - DNA, 448 bp, Glycine max
  Clone ID: PAT_MRT3847_118480C.1
actcactggccggccgtcgccctttttttttttttttaagatgccgtgcgaaccaaagtaaaatacgtacacacattcgtagaaggttttctttgcccatgttgcggtgatttgtaggaacaaaaacaaatatattttggttataatatacatgcaaaggatgaggggccacaacgttactttgatgattaacatgccccactataaaaataatacatgtttttctgatagggacttgtgatatttaacctaaaggtaatgtgcaacaacccccaaaaaatcatgaatcttaaaaaagctggatcctattgacgtatcaagaacacgcgagatcctggaggctaatgcaaaatgcatacttatccttgggaaatgatattgcttgaggaaggcttagaatgacaccaaccttgggaatttccgggtgtgcgggtgacccgtttcgaga

SEQ ID NO: 20461 - DNA, 354 bp, Glycine max
  Clone ID: PAT_MRT3847_118481C.1
cacacgcgtttgcagctgcgatattacgacataagggcgcatccaccacggttggcgttacctatgaattgggtaggagtacctgtctcactgttccattcagaagatctcagacctgaacagaccttggatcgtagctctacctttttctactgtaccttcactgcttcttttatagcttaacttgcgttcccggttcttgaaccattacacaatcccgtacggttgaaatacttctgagttgagaaataagaattatcaacatttaaattttcctgaccaattagaaatgcgtccaatatattattatacaaggagtccaaatccatcgtctggtgtatgtaaagaagcttt

SEQ ID NO: 20462 - DNA, 513 bp, Glycine max
  Clone ID: PAT_MRT3847_118482C.1
cttgggggggggggggggccacaaagagcttaattaggagattagactaggaaaaagggaaaattacgcgaagcgagataccgattttatgaaaaaacgataaacagacacaggagacgtagtagggtgtaactagtaatctgaaaaccccataaaaaaaaaaaaaaaccctccgtctttgggggggggccgggggcaaataaaatccataaaagagtgtagatacctgccgtactataatccacggaggaataatctatgggtgaagcggctttaatgaacacatctagcaagacaaaacggaagtataaaaaaccacccaaggcgattgaacaaaaggaagagtctggcagagaaggaaggtttcatgtcacaaaggacccgcaaaaaaagcaaacaaacactacagcgaccgactgaaacccacacgtagagctataaagcattactagatggtaacagcccaagtaatctattgcacagagcacggcttagaatgtgtgttaatttgat

SEQ ID NO: 20463 - DNA, 404 bp, Glycine max
  Clone ID: PAT_MRT3847_118483C.1
aaaaccaacaaaactaaacttttaatgggtccccaaaaaccccctttttttttacagggcccaaccccccgaaaggggggtgggaaatttgggggaattccggaagccctcaagatcgggggagggtgggctttttccatttaggaaccgggtgggttggaacccccccaacattttttagctggccaagggtttccgggcggggtaaaaaacccaacagggggggggcccttttttttaaaaccggggttaaaaaaaaaccccgggggctttttttattgggaaaacccagggcttatgtccccttgggaccttaaaagggccagccacaaacccgtttaaaaaaccgggctaaaaaaatttagggccgggttgaaaccctctttggccaaaagggggggggg

SEQ ID NO: 20464 - DNA, 325 bp, Glycine max
  unsure (1)..(325): unsure at all n locations
  Clone ID: PAT_MRT3847_118484C.1
gcaggaaggcaggccgagggagcaggaacgaaccttggtaccatnccgangggggcggcgaagggagggccccaatagagcagaaaaaaacgcgcaaccccccgggggncacgggcacaaggaagaagaagcagaaaaaggaagaaagagagcgagaangngagacnncgncagacgacgaaacagcagagaaaacagaaagagcggccacgagcgaacaagaaaaaggagcagagaacagcgacacgnacacgaaaaaaaaagccngnggcagcgaaacaagcaggaagaaaacaaaaaaagaccaacacaaaagcggaaaaag

SEQ ID NO: 20465 - DNA, 497 bp, Glycine max
  Clone ID: PAT_MRT3847_118485C.1
ggacgcttgggcggactcttggttttacctggtaattttggacggccccgggggggcccccggggttaaccaggaaaagccggaccggacccgggggggaacacggtttaccctaaagggggggggaaataaggatgggggaaaaatgggacaaaactgacccccgggaaaaatagagtgccaacccaggggccccaaaaaagagagcccggaaacaaaaaggggaaggcccggggggcccaatgggggggcgaaaaaccatgaggggggggggcctaaaggaccggttcaaagcggggaaaaaggggggccccaataagaaaaaaaaggggcaaacccctgggaaaagggggacgggcaataggggaccgggggggatttttttgccccgagaaagggggaaaagggggaaagcctttttcgccccggccaggaaaaaaccggaaaggggggccaaacggggggacccaaaagggaaaaaatccggtttggggggg

SEQ ID NO: 20466 - DNA, 387 bp, Glycine max
  Clone ID: PAT_MRT3847_118486C.1
gacaatgtaaaaagttttacacggtcatctaatcataacccatcatgtatgataagtttattgacttttaaaataattattttaaaatgatttaaatgataatttgttattagatgacggtgtaaccgttagtacatatacattaaattcatgcaaaagtattagtaagatataaaaaaaaattgcaatgaatttaacataggtagccccaacgttgaagatggagtaaaattgtaaaaatgaagagattttcatgttttcagagaccttcacagttcacacttggtagagccatagaaattagaaaatgaaacagaataggtcaacttcaatcctttgcaagaatgaagtagatgcaaaataaagaattgcaaatatcataatttt

SEQ ID NO: 20467 - DNA, 575 bp, Glycine max
  Clone ID: PAT_MRT3847_118487C.1
ggcgatatatggcaaggagaacctactggctcctatactactctataaaaggcatacttatgaagatacagaggatgctcaagtgcgaatgaattgactccaaggactggaagagaagttggtgaaaaagttagtctagaagtagaaaaaacaccacaacatagccaaacttatcctataaagtggtcacttctcgctacatggtggtgaccccatcaaatctatgaaaccaaaattcaacaggaccattttggatattcataagaatcagatgatataagtgcattttttacattgcattactaaatggctttctataatgcactaaattgtgccccctatcttattgcactgtctttggctattacagatttcgttaatactgaatctctatgactatagaatattatatattgatgtaactaaaaaaaaaaaaaactcaggggcccgtcccatccctaatggcaatacccgctatgccgctttcactctgacggaaactgccaccactatccctcaaatccttccactgctaaacgaagcctacacgcttcacatccacatagcaatgaccc

SEQ ID NO: 20468 - DNA, 321 bp, Glycine max
  unsure (1)..(321): unsure at all n locations
  Clone ID: PAT_MRT3847_118488C.1
aatgnagacgcgcgggaaagaacgccacacggaggaacatgccaaaagctgcccccccaacgcgccgacaaaccgcaggagaccacgccaccgacagcccaaagacgaccccccccgaccacaaacgcacagacacccccagcaaagccgccggaaacacggccgaggacaccaccaaccacgaggccacaccccacaagccggcgcagcctggagagatccaggaaaaagtagccacgaacaccccacaagaggacaccccctacagcccggccaacacaggggcgaactgcaacaaccaccgctggccgaagggagccc

SEQ ID NO: 20469 - DNA, 443 bp, Glycine max
  Clone ID: PAT_MRT3847_118489C.1
gcttaactgataaatgttaatcaaataatcctactgagtaatgatgttcgataaaaaaaaatggaacttagggagggagtcttggattctcaaatgaattcattaagaatgaaagttttgatgattcaaagagtgaatgggagactgaataatgaagtccttagaatacaagtatctatcatagttaaggcattgtttggttggggaatgctgtgaaaagcatggttattatttaagagaaagtaaagaaaatccttttaaatactatttcataaatcatgcagatccttagctacttcttgtgtcgtttctaatcagaattagagtttgacttcataattcatgttaatatttaacgtaatctttattatgcgcattatggaaacgaaacttcaattttgattggtttaaatgtttcatacttttatcaaccgaagacacat

SEQ ID NO: 20470 - DNA, 273 bp, Glycine max
  Clone ID: PAT_MRT3847_11848C.1
ccctcgagcgagtcggcccccgcatgctcatactgtgtgtgaaattgtcaaggcccgttggggcgacttctgcgcacattgtttctcctcattttctgcttcttgacgaatataattgtgacggctatgttgctcctcggtggttctgcggttgtaaatgcattaactggagtgaacctttatgctgctagctttctaataccacttggagtaattgtctatacactagcgggtggactgaaggccacattcttagcaactatatccattctg

SEQ ID NO: 20471 - DNA, 308 bp, Glycine max
  Clone ID: PAT_MRT3847_118490C.1
tgccatgcgcctcaatttcttgtacatcacccccgctgtcaccgtccagacccaattttccgaccaagttcattttaccggaaaatcttctatgtagactatcgtgttttttcctttgcaattgggcgctttaaaaaagggggttttccagtgtggagcatcatcactgaaaaattgtagcaccatcgccgattcataaaacagaagaggaatgtaactgagaagttctggatccttcgcgagaaaggaaaacgattaaattctcattctttttcttaatttttccaattatttgctttctctgctct

SEQ ID NO: 20472 - DNA, 156 bp, Glycine max
  unsure (1)..(156): unsure at all n locations
  Clone ID: PAT_MRT3847_118491C.1
caattttngtntttntntttcaatttttaatctccnanccctttttttaattttggaatcgaaatatntaatctaaataatccaaaaattcactcttaatcttgacagtgatatacgtggtatatgtaaatcctagangtaaaaataggcggnctt

SEQ ID NO: 20473 - DNA, 171 bp, Glycine max
  Clone ID: PAT_MRT3847_118492C.1
gacacgcgtacggagattccaaacctcttggattggctgcaactagccttatcctaagggagacaaaggagtacctgaacaatgtaagccgcataatgatcactcattgctcgcgcaggataaagagtaggacagtcctatgaccgctaaggcgaaggccaagaagcacac

SEQ ID NO: 20474 - DNA, 490 bp, Glycine max
  unsure (1)..(490): unsure at all n locations
  Clone ID: PAT_MRT3847_118493C.1
gacccacgcgaccggggcatgtggacaaggaggagcaaagggggcngcaagggaaccggggcagccaggctaacaccccaagaaggcgaaaagccangcatcggatgctganaacgaggannancagagaaagcagagaagcggaggaacaggcgacatagaggggaccgctacaacnactaccaaggatcctagtaaggcgagatgattacctatttctgccggaatcctgatattcttatatggaactctggcaacactacaagaaattactatggactgccaatcatataaccttttttttttcaatccgcggactaacagangaaggaaaccggccacaacctctccttgatagaaacaggaaagcagcccctgcagaggaaatcatagattacgaaagacattggtctcatgatctatgagaatgaccaatgaccaaggaagcaaccatcggtataaaaactattcaaattataagcatatacca

SEQ ID NO: 20475 - DNA, 620 bp, Glycine max
  Clone ID: PAT_MRT3847_118494C.1
gaattccaggccgacccagcgcgtcaggcgagacgacgatagagcggggtgtgcttgtgtcattcctacctatccttaaccattagaaaacaatgctgcgctcggaggactaccacgcccacatatcaaaagttcataggacacagagtgttctcacagatgtccctcgctaccccaatgctcacctagccttcagcaaccaacacagccatcacaacaccctttctaatgaaagggttgagtatgatgaaaccactcctgagactgagggtggtgaagttgtggatgttgaaagggaacagtgcatcgccaagaagaacaagggtggctttgaattgcacaagtggaagacctataggccttaagaaagcttatagccacaagcctagtttgtcataaaaaaaaaaactaccaaatacatacatcaaaatcagcaatatgattgtgtgaaataaatgcctgcatagccagccattatgtttgcttaaccccggagtgttttatatatgtagtagtacattagtactaaactttcccatgaactattaatgaagcatatacatcggtatatctacagcttatttttattatagcatgccatggtttattactttattatt

SEQ ID NO: 20476 - DNA, 649 bp, Glycine max
  unsure (1)..(649): unsure at all n locations
  Clone ID: PAT_MRT3847_118495C.1
cccgcgtccgcgcagattgttccttttcttaatactctttcattttccatcacccgcgaattcaaaacttcattcctttatatctctttcccctcactgatcactggatttctgtgattgaattttctgggaaacccaagtgatggaaaataatagtgaaggcttcttgaaattgatattttcttggtctcttggggatatactcaacaatgatctttacaaagacaaggtgaggcaaattccaacagcattctggtcagtaagtcactatctgaaatcatttatttttccacttattgaggaaactcgtacagatttatgctcaagcatgaagatgttgtcagaagctccggcgtgtgaaataactgacattaatttgtctgaagattactcacctccacatgatttgttataccagatagaaatgaaaacaatagtagctagtgataaaaaaggggatgtttatgagcctgaggttggacatctcattgctttgactgataagaggccaacatgcattgatgatttgaacaagcatggaaattcctatcttattgctttattaggaaggttagaaagaaaatgacatgaaaatgtttttgaggntcaatactagcctcacagcccattaattggaaatgtactggca

SEQ ID NO: 20477 - DNA, 212 bp, Glycine max
  Clone ID: PAT_MRT3847_118496C.1
tgcttcacagatcgaccttacaaagaagggtaaatgacgacatcatcctatgtcatgcggaactgatcgatccatgtcaaactccccatatatactgagctagctttgtagagcgcgcacatctggaagaggctaacagggtactggcttaatcaccgtgatagaaacagatcctacaggcagggctaatacaagcaatagatactccttat

SEQ ID NO: 20478 - DNA, 195 bp, Glycine max
  unsure (1)..(195): unsure at all n locations
  Clone ID: PAT_MRT3847_118497C.1
cgccctcatttntggaggggtttttttaaatatttgcccttttccaacacccaaaaagaaactggccctgcctcctaatcaaaggcttatacccaaaaacattaaccaccaacatggggaaagcaaaacctggttggggtataaattcttaaactgggaacctgtttcaccagaaatgacctaaaaacgcttttt

SEQ ID NO: 20479 - DNA, 357 bp, Glycine max
  Clone ID: PAT_MRT3847_118498C.1
tttttacgcaagattagtctattatgtggagaatgagtagagggtagagattcctgactcctgagttcagcatacaaatctgtacctatacaaaatttgagattcacgaccatttctcgcttcctacgatcgcttaataatacaacaaactcttcttacacagattataacaaggaaaagaactgctccatcgtaaaccaactacactttaaatggtctcccataggcttcatgatggagagaaaagaactgcatgacatctcataacctcagcatgcttcaagaagcattccattgtctaaacctgcatattccacgacgattttcagcaaatgagttgcgaatagactgcaacat

SEQ ID NO: 20480 - DNA, 292 bp, Glycine max
  Clone ID: PAT_MRT3847_118499C.1
tggaaaccgttggaaggggttttcacacgggggtactcaacacggacacacggatgtttttgtacacatgcgcttacatcttatacacacaaatcaacatggagaacttgatctatgtatatactgctagtatggttgctactgtgcaacaaaggctttcgaacagaacacagttgatcaaaccgttctagattcaatgagcagctgctccctacaagagtgcggctggtggctctccctcaaagggatcaccaggcttcttcagcatctttaatgagcccatagacaacaa

SEQ ID NO: 20481 - DNA, 2519 bp, Glycine max
  Clone ID: PAT_MRT3847_11849C.1
ccacgcgtccggttcctcgccatgcaataattaagaaatttgctggtgaagaaatatatgtcttgatgaactaatatcagttctttctaagctatccaggggtgctcgagtaccattggaatatataagctacatggatcgtcatcgaaggaagtctgtgttagtgacggttgatcggcatgaatggtatgcaccacctcagatatacactcgtgatgacagtactggtctttggaatgctaagcctgcttttaagcttgattcccccttcctatcattgggtgctaaagatgttgacaatctatctagacagtcagtttcactaactggtgagcatgcttgtgggggacatgtgtttggagataacaatcaggagtttgttgatggtgtcactagcatggaaaccaattgtgaagatccctcagagtgtgtatctcaccacaatgcatctgatggtgtggtgaaaaaacgaaaagtggatgaagatttatcagctgatggaaatcttgttgctgatttttccttaaatgatacaagggaaactaagctagaaaaatcaagtattatacaggatgacatgttaatggactatcagggtgcaactgcagctacagcaaatgcatcagttgctgaacgtgtgatcgagcctacacttgtgatgtttgaggttcatgttcccccatcttgtatgcttgatggtgttcattcacagcacttttttggaactggtgtcataatttatcattcccaagatatgggattagttgcagttgacaagaatacagttgcaatatctgcttctgatgtaatgctatctttcgccgccttcccagttgaaattccaggagaggtggtatttctccatcctgttcacaattatgcccttatatcatatgatccctctgcattgggacctgttgggggttcagttgttcgtgctgcagagttacttccagagccagcattacgccggggggattctgtttatcttgtggggttgagtagaagtctgcaagcaacttctaggaaatcagttgttaccaatccttgtgctgcattaaatataggatctgctgattcccctcgctatagagcaaccaatatggaagtaattgagcttgatacagattttggcagtacattttcgggtgtgctaacagacgaacaaggaagggtccaagctatatggggaagcttctcaactcagctgaaatttggttgcagcacctcagaagatcatcaatttgtgaggggtattccaatttatgcaataagtcaggttcttgacaagattatatcaggtgcaaatgggtcacctcttcttataaatggtgtcgaaaggcctatgccacttgtgagaattctagaggttgaactttatccaacattgctttcaaaggctcggagttttggattaagtgatgattggattcaagcacttgttaagaaagatccagtaagacgtcaggttttacgtgttaaaggttgtttggctggatcaaaggctgagaatcttttagaacaaggggatatggttttagcaatcaacaaagaaccagtcacatgcttccgtgacattgaaaatgcttgccaagctttagacaaatccgacgccaatgatgggaagcttcacttgactattttccggcagggacaagaggttgaactttttgtgggaacagatgttagggatggaaatggcactgctcgtgcaattaattggtgtggttgtattgtccaagatccacatccagcagtgcgtgctcttggatttcttcccgaagaaggtcatggtgtatatgtggcaaggtggtgccatgggagtcctgtacataggtatggtctatatgctcttcagtggatagtcgaaattaatggaaaaccaactccaaatatagattctttcgttaaagtgacaaaggaactagaacatggcgagtttgttcgtgtaaggacaattcacctcaatgggaagccacgagtcctaacattgaagcaagatttgcattactggccaacgtgggaattgagatttaatcctaatagtgcgatgtggcatcgcaatataatcaagggattgaactgcagttctgtatgaaatatgaatgatcagaccatgtaattctttctaattcctatgtacgcagctacacgggagtatagaaaaatctcgtggaaggcatcttccaggttcagaattatggtttaccagtgccctcgttgcaaatttgaggcaaatttgatgctttgccgttaaggggtctacttcaattggttgaacagatggagagagatactataaaacattttgtccaaacatattgtattgcattgccatgattgataagttatgaggcgttcgattcaggctggcaattatttattcggatctgtaccgcaacatataacagtaggctaattatattggatcctggaaaggttggataataaaagaaaaatgaaaaatatttatagtttatgtattgaaggaaaaaaaaaaacacaccttttctttggtt

SEQ ID NO: 20482 - DNA, 641 bp, Glycine max
  Clone ID: PAT_MRT3847_1184C.1
aaccggccaaattaaactcatacatgtctgaaaattgatcccgagttatgaatgcaactgaaagccttatttttaaaacaatgacattagcaggggctgtaacacttgattatgggaaaatttgtcaacaggggaaaatgattaggaaatgcttaaaatataaatacagaagtagatcaggatggcttatagtattttgggggaacaaagggcatttttgaaaggactccttcattgggttttcctcaaaaaaaaatctttactttggggcctgccttgggcaatccaaatttcacatatcccatggctatgttcttttggaggcaaggactgaatccaccactggggatttccccaaggggggggcctccttcattttgaatctcactggggcttttgggagggggcccaaaaaaaaagaaaccaccccccctgattttaggacctttttcgagctgtttaaaaataacatcagctcctaaaaaaccaccttggggtctcctccttttccctaaagcccaggggagccctgcctcaatagggggaaggggctgttccatgtcatttccatataaccacaatccagtttcaaggcgcaaactatctttagctcccaatcctgggaatcttaccttccctta

SEQ ID NO: 20483 - DNA, 1345 bp, Glycine max
  Clone ID: PAT_MRT3847_118500C.1
gtgacttcgtgcctatgcgtttgacgtcggtaattaactgatttcttgttcattttgttgtgtttttgaaggctgtgatgttgaaaactacctattttatgagggaaaggtaaattgttccttcgtgattacataaactaccaatggatcctactgagccttcaactcttttcttatgaagttattcgtctcgtttgattatttgtatgttgtttctagatatatagattcataataatgcttgcagcattcccttgaatttttcaaatccatccaaagaaaatgaaaagaaacgcagttgaatgggaagagctattgaaccacgcgtccggttttccgaatttttcagtgtcgactttaaaaaacagactacaattatctgatctatggcactcccattcttttccatttttgttactttgtacttgcatcttaccctctttcttttgaaatttagattcagagcacgtattatcattaattctcttttgctgggaataattcatttgtgaagaagctgaggaacgtatatgtactcctgcatttaatttttctttcaagttttcaattatttatcatttaattttataaaaaaaatatgtaaataattaataagagtataattgacaaaaaaaaaaagaattaatgttatcttggattttgaaaacacagataaatacaaataattttttgttgaaaatctgacaattaaaaagaaacggagggattactatgttattgtggtaagaataagatggttacatctatttaatttcccaaaattaatggccagaagtcttgaatcattcgaagagaattgcaatagtttttcttgtttttgtgaaaggcgatacttccatttaatctaaccaaggccaaagaatttcccatttttgaagattttttaataagttctaaccaatatcatttatcttgttcaaattgaactagacatattccaatggtccaccaatgacgtcaacccacaagcattccttattgatctattttgatttttacagacagatgatacgtgcagaaagctttatgaggttatattgtaaacaatcccttcaatgtctatccacgaggaacaaatacaatactgttcagaacatctgttgagcagggagacattgcgggatctacgaaatggattgatcattcgtctttggaaaatataataatactgggcacacaaaattatttcatttgtgtatgattattgtaattgtgctatttccttaaatatatttttgcattccttttatggtcttaaaaaaaaaaaaaaaaaaaaaaaaaaaaaaaaaaaaaaaaaaaaaaaaaaaaaaaaaaaaaaaaaaaa

SEQ ID NO: 20484 - DNA, 407 bp, Glycine max
  Clone ID: PAT_MRT3847_118501C.1
cagtttcaaaatgcaatttgggagtgaaatcctttttcaatggggtaggcagatgctgcatacactgacagatgcttcgatcttattgttgttgattgagtgagaacaaaagccccacttaattggtcctcaagccatagccccagtttctagcttcgtagtcttctgctgtcatcttgctccttttagagtttcagggtcttacatagtgtcccacgtctccattaaataactttttccttaacatttagtgcgccaacgactatactagtagtaattaattaagtctacgaatttatatatatatatatagtatgatagcctctaaaaaggaaatggcaggaagggtaacatatgcatgcatggaatacttgttttttaaaacaaatgttgctttaaaaagttag

SEQ ID NO: 20485 - DNA, 530 bp, Glycine max
  unsure (1)..(530): unsure at all n locations
  Clone ID: PAT_MRT3847_118502C.1
gtgatctcattttatttagcataggagcagcacgccactcggttgtcgtccgtgggattcaacttggttcccacatctcgtacatgtacaaatactcctccactctacaacagagccaacaagcaagacaacgccagaacagatgacgccatcatggtagacgcatcgctgacaaattggccctgttcatctgcgttgctcgagtgcttgacggcgtcgttgccggttccggttctggtgattgaatctccgtcgcacgactcgatctcgttggtagacgccttggaattctgggaattctgggaagtagacgtctgaggtgcagattcagaggtagacacgactggagatgcatccttggaatcggatgtcgatggcgtcggatcgtcgggagtagagttgggtgcagaggtagacgccggagcttcggtgctggaggtcgaggtcgatgtctacgtcgacgacgatgtcttgactgcggatcccgaattggaggccgaggtagacgtcnatgtcttggcgttggatgt

SEQ ID NO: 20486 - DNA, 356 bp, Glycine max
  Clone ID: PAT_MRT3847_118503C.1
gttcattagactctcacagacctagcatacatacacacatggctgccatgaactatggcggattggcctgcatctatgccagatctgctgcagcatgctacgagctcaatgacaaggtcactaacgaggcctctgacgcatactctggctacaaagggccatagatcaaatgtgatgccagagttcccacataccaaagaatccgaaggaaggagaggtgcccatgttctgtaggcagctaccctagtcatctatgcagcctccaattctatctgcaatgcatacatcattgatgattaccatcagaggagcaaagctaacaaggaattgaatgacaacaagaggttatgtactac

SEQ ID NO: 20487 - DNA, 311 bp, Glycine max
  Clone ID: PAT_MRT3847_118504C.1
aaaaaaaaacaaataaaaataaaaaacaaaaactactcaaaacagacgaagaatataaaaaaaattaaaaaccacaaaacatcaccaacttaaaaacaaccaccaaaatcttaacaccaataacttaacaaaaaaaaccacaagctaagacctaatcttctcaccatcaaaaatataataggtggggtgccccccaccttataccctcctccccccattattaatttcacccctgtctcctactgatttcccttttttcatttaatggtccactcttaactctagtgaaaatttgcgttccatgctttctt

SEQ ID NO: 20488 - DNA, 273 bp, Glycine max
  Clone ID: PAT_MRT3847_118505C.1
ctccatttgtccttgaatctaatactcagcatggctaagcttgttctttcccttcgttttctgcttttcagtggctgctgcttcgccccaagtttcagagagcaagcacagcacaacgagtgccagatccaacgctcaatgccctcaaaccggataacagcacagagtcagaaggtggcttcattgagacatggaaccctaacaacaagccatgtcagtgtgccggtgttgccctctctcgctgcaccctcaaccgcaacgcccttcgcagac

SEQ ID NO: 20489 - DNA, 267 bp, Glycine max
  Clone ID: PAT_MRT3847_118506C.1
cgtccgaacaggagtcaggacgatacgaggggataacagaaggagaccataagttaagtgtaagtgattcaatttaaatcatcactcgagtataatgtcagggatcattcacaatattggtgatacccttcatgttcgaaggtacaaaaatgacgatgagcataaggatgagcaacatactgcgtaatacagaggggaggattatagtgtacatacttatgcgtacagcagagagcatcattgtgcacacacaactggttaatacca

SEQ ID NO: 20490 - DNA, 306 bp, Glycine max
  Clone ID: PAT_MRT3847_118507C.1
gttatattaattttttattagttttgatagcttttattatctcttcaaacaatttgggtataacataaatatagagcactagctataaccagccaaaaatgcccacgacgaacggggacaacacagaagaagaagacaactgcaagaaaaaaaggggacccgaaaagcgaaaagaaaggccatttcctgcacaaaggcaccaacagaagggcaagagaagaaaaggctataaaagacaacgatgacaagaagaacccaacgagcaactgaaccataagcatagaaaaagccatactaagaaaacca

SEQ ID NO: 20491 - DNA, 2700 bp, Glycine max
  Clone ID: PAT_MRT3847_118508C.1
caataatttcagtgggagtggatttccttctacctatgcaacttttccagtttagtaaaactaagtctgagaaactgcagtctgcaaggaactattcctgatttcagttcaatagccaacctcacctatctagaccttagctggaatcagtttactggacatataccatcagaacttgcagacaatatgacaactattgatctatccaataataatcatctcgatggatcaattcctcgaagcttcatataccctcatcttcaaaaattgtcacttgagaacaatttactgtctggatccatccctgctagcatatgggagaacgtggccttaaatactaaagataaacttacaattaatctccaaaacaactcgctattggaagttctgggaaatctgaaccccccagcaaatgttaccttaaggctttctggcaatccaatctgtaacaattctaacatacgaagtattggtcaatattgtggacatgttggaggtgaagatgaagatgaagtagaccaaaacccaacaaattcaacaactgcctgtccagtagttctagattgccaagcagataatttctatgaattacatgtcccctctttcccaattccttgctattgtgcagcacctctgacaattgaatacaggctgaaaagtccaagtttttcttactttcttccctatataagtggatttatagcatatataactgagtccttaaacttagacaactatcagttatcaataaattcttgggaagatggacatcgtattaccatgtatctaaaactgtttccttcatacaatgatcccggccagttgttcaatgcaagcgaggtttatcgcatcaaaactatatttacatcatggctttttcctcccaatcatttttttggaccatatgaactcctgaacttcacactcattggaccttatgcaaatgctaaagattcggagaggaggagttccacaagtgcagtcacattagctgctgctttaatagcagctgctgctcttttggcattatctgctataatcattagcttgatttctacaagaaatggaaaatttcagcacttgatttccaggaaatcccctaatgtatctattaagatagacagtgtgaaagaatttactttcagagaattggcccttgctactaacaattttagcagctcaactaaagttggtcaaggaggttatgggaatgtctacaaaggcattttatctggtgaaacacttgtggccattaaacgagcagcagaaggttctttacaaggcaaaaaagagtttttgactgagattgaacttttatcaaggttacaccatcgaaatcttgtctcgctgattgggtactgcaatgaagaacaggagcagatgctggtctatgaattcatgcccaatggcaccctaagggactggatttctggtaaaagtgaaaaggccaaggaaagacaaaattttggtatggggttgaaaattgcaatgggtgcagccaaagggatactatatcttcatacagatgctgaccctcctatattccaccgagatattaaagccggcaacatacttctggattccaaatttacagctaaagtggctgattttggactgtcacggcttgcatcattcgaagaaggaagtaacaatactaaatacatgtcaacagttgtgaggggaacaccagtacgtttgtcagaaaattttggaataatgatttcaatttcaatatttaagaccggagttatattgagaaatttatgatcaaataaatatttcaactgatacattttatgcaattttgacaatttaattatgagatttttcgggcttgtcatattgtcatatcctacccttctactgttgtttgcaaagtttcttcacacctcatcatagtctcaagtgtgggacttccataatagtcaaatcccacttaccatttaatttttagatgtagtagagtttaaatttgttcttatcattagatcagatacattggggtgcggcaatttttgtgtccattctttcctaacactgaaaatcaatactatctgaatatatgtcctcagttgtgaggggaacacagggttaccttgacccagaatatgtgttgactcaaaagtttactgacaaaagtgatgtctatagcttaggaattgtgtttctggagcttttgacgggcatgcaaccaatatcacgtgggaaacacattatttacgaggttaatcaggcttgtcgatctggcaagatatattccattatagggagcagaatgggtttatgtccatctgattgcttggacaagtttttatctctggccctcagttgttgccaagaaaatccagaggagaggccatcaatgctagatgttgtgagggaactagaaaatattgttgcaatgttatcagaaagtgaagctagtttaccagatgttaccttagataattcaggtgaaatggcaccctcatcatctttaggatctaactcagcaagggaggaccaacacacgtacgcgtatgtgtcaggaagtaatcttgtcagtggtgtcattcccaccattgttcctcgctgatatgctatactagtttccttggcgttggaaataattatatctaagattcaatatatattatctaattaattctaattccaataataaagtattgttattttattattatttttatattgttttat

SEQ ID NO: 20492 - DNA, 874 bp, Glycine max
  Clone ID: PAT_MRT3847_118509C.1
tatgatttaagattttgaccaatgtccgctccattcagtgtcggttttcatgatccctaggtctgttgggcaggagcttgaagcaagcctgccacgatttccccccgaaaagccaggtcgcggctgcttcttcgtcatcccagtagaaattgccaatcacgtcccgagtgaacccgatctcaaaatcggttcactttctcacgaagaaattcgcattgttcagtcttcgatttcaagatgattaggtcttttgttgagaagattgaaaagggtctctcactaattgtgcccaaaaagcctgaactcagctacttcaatgaaaatcaagtggaaaccacaacaaatgttgtgccagatgatgttagtaagggatattttgcagttgttgcaatcaaagatggagaaatcaaaaggtttgttgttgagttagactacttggcaaatcctgcattcttgggactgttggatcaagctggagaagagtatggcttcaaacagcagggaactctagcagttccttgtcggcctcaagaattacagaaaatcttagatggttggagagtgataccggacaacatcaaaggtgcaggaagggatatttattttcccaagttcctatgatctatatgaggttttaacttctatagtaaagtttcttttcttcttcttttgggttgaagacgtgtacttttttttataatgatctcactaatgttataacttatcccctcatacctcatgtacattactcaatttttaatatcactaagctggtcccattggttcaataaaattaattttgaagacctgtttgtagatattatggaaaacctaggtttctaatttaataacctaatggggtatttttaagtgg

SEQ ID NO: 20493 - DNA, 1560 bp, Glycine max
  Clone ID: PAT_MRT3847_11850C.1
cggtcgcgtgggaattaggaaaacaaatataggagaaactttgccaaaattttgactgatattttgttgaaatataggactcgtaaattattatgcttcctttttcttgctaaactttgaagtcttttattttaaaggcttaccaagttaactagcttgtgtgtgggtcatggcctagggtgggccatgacatataactttctattttattttttcatttcttgtgaaagggagtgggagtatttatatgatgaaccctgactgaattgtgacatactttttatgtggatgctaaaatcccctgttgcagctgaaatttggttgcagcacctcagaagatcatcaatttgtgaggggtattccaatttatgcaataagtcaggtccttgacaagattatatcaggtgcaaatgggtcacctcttcttataaatggtgtcaaaaggcctatgccacttgtgagaattctagaggttgaactttatccaacattgctttcaaaggctcggagttttggattaagtgatgattggattcaggcacttgttaagaaagatccagtaagacgtcaggttttacgtgttaaaggttgtttggctggatcaaaggctgagaatcttttagaacaaggggacatggttttagcaatcaacaaagaaccagtgacatgcttccgtgacatcgaaaatgcttgccaagctttagacaaatccgacgccaatgatgggaagcttcacttgactattttccggcagggacaagaggttgaactttttgtgggaacagatgttagggatggaaatggtactgctcgtgcaattaattggtgtggttgtattgtccaagatccacatccagcagtgcgtgctcttggatttcttcccgaagaaggtcatggtgtatatgtggcaaggtggtgtcatgggagtcctgtacatagatatggtctatatgctcttcagtggatagttgaaattaatggaaaaccaactccaaatatagattctttcgttaatgtgacaaaggtttggcatttggttaaattatttattgaactagaacatggcgagtttgttcgtgtaaagacaattcacctcaatgggaagccacgagtcctaacattgaagcaagatttgcattactggcctacgtgggaattgagatttgatcctaatagtgcgatgtggcatcgcaatataatcaagggattgaactgcagtacggtctgaatgatcggagcaatgtaattctttcaaattcctatggacgcagctgcgctggagtataaaaaatcttgtggaaggcttcttctggttcagaattatggtttaccagtgctgcctcgttgcaaatttgatgcgcttcgtccaaagatattctattgcattgccatgattgataatttatgaggcattcgattcaggctggcaattatttattcggttatgtaccgcaacatatgacttgtaggttaattatattggatgctggaaagcttggataataaaagaaaaatgaaaaatatttatagctttctatgtaaaaacgacaaaaaaacaaa

SEQ ID NO: 20494 - DNA, 856 bp, Glycine max
  Clone ID: PAT_MRT3847_118510C.1
tagagggattagaaacttggattcttgaagtacgaggagctgggttgagtattcagggttcaaattccaaggatattgaacagtctgccaatgcaatgtctgagaagatgaaagctgcttcagaaagtgctattgctaccaatggagcagtggcttcaaacaaagaattgaataacgtctctttttgtgcggtatctgaacctgagatttctgcccctaatggagtagaaactgaaaatgtggcaatccaaggtgatctaactaggttaggtactgtttgggatgaatcaaagttggtggcaagattgaccgagactttaatgtttttgtcagaaagagtctctgggtttctgagtgaaagtcaatcaagggtgatgtttgccaaatttctagatcagatttcaaaacttttggtggattctccattatatgaacaatacaacgaggtaagggaaaagctttcgactttgtttgaaacaaagcaaaatgctggtattactagtcaaataactgatctgagtcaaaaactagtaaatattattgaggaaggtcagctatctgtttctcctcaattatttgatctacaagcccgctttacttctacaatcgaagattttcagaagcaacttgacttgatggtgaagtatgattgggacttcgatcattacatggaagaagatgttccagcagcgatagaatacataatgaaacaaagcatgcctaaagatggaaaattacttgcaattggacactccatgggtggtatcctgctttactccatgctatcacggtttggttttgaggaaaagatccaacttggctgcagtagttacactggcatcgtctctggactaca

SEQ ID NO: 20495 - DNA, 815 bp, Glycine max
  unsure (1)..(815): unsure at all n locations
  Clone ID: PAT_MRT3847_118511C.1
tttgaggttantaaaagtagatggtnagattagatanaaacatgcgaaatagatacctgaaatccgctagctaaaataaagatcaaccaaatgaatctatatgaaaaaagcccccctaattcctttacaacacgaacacccccgcccccccccactccccccccccccccccccccccccccccccccccccactccccacccccccccaccccctatcacctccccacccaccccactcgcaccatccagaccccgactcaccatcccccactgcgatacccgacccccctatccccaagccccacccacccccccccccgtccctccccccctccctcccccccccccccccccccccccaccccccccgccccccccccccccccccccccccccccccccccccccccccccccccccccccccccccccccccccccccccccccccccccccccccccccccccccccccccccccccccccccccccccccccccccccccccccccccccccccccccccccccccccccccccccccccccccccccccccccccccccccccccccccccccccccccccccccccccccccccccccccccccccccccccccccccccccccccccccccccccccccccccccccccccccccccccccccccccccccccccccccccccccccccccccccccccccccccccccccccccccccccccccccccccccccccccccccccccccccccccccccccccccccccccccccccccccccccccccccccccccccccccc

SEQ ID NO: 20496 - DNA, 195 bp, Glycine max
  unsure (1)..(195): unsure at all n locations
  Clone ID: PAT_MRT3847_118512C.1
gtcgcangcacgcntacgtaagcncggaattcggctcgaacnncaggccatgntncanaanntagtactagcatccttnnncttcnanagnncnannagcanacangagtncagggatcactagctctntcattcggtcagantggcnggcagatgacatcccccttgatcatgaagcattngcagtnccaaagg

SEQ ID NO: 20497 - DNA, 336 bp, Glycine max
  Clone ID: PAT_MRT3847_118513C.1
gattttcagggagttccaccaccccggatttaaaaaggaatcggctaattagggaatctccggaatgtattcgacatattcccaaatgtaacatcatcaaaggtttggccgtgtgaagaaaactcgtgtggctggttctactatgttaaactagatttccctttccaaagactggattttttgggccacaaacaatggtttcctccacaaaaatgatggccacaacagaggcccaacatgtgtgcttgtggggggacccacccgccaataaatagttacggatttataacaaaaacttgggcctccaaacaagcatgtggaggcatatagaaactt

SEQ ID NO: 20498 - DNA, 462 bp, Glycine max
  Clone ID: PAT_MRT3847_118514C.1
gtcctaaattcacgggtcgacccacgcgtccgacgggacctcatcagccatggtcagtatgacagaaggtaacattgatgactcgctcattggtggaaatgcctccgctgaaggccccgagggcgaaggtaccgaaagcacagtaatcactggtgtcgatattgtcatgaaccatcacctgcaggaaacaagtttcacaaaagaagcctacaagaagtacatcaaagattacatgaaatcaatcaaagggaaacttgaagaacagagaccagaaagagtaaaaccttttatgacaggggctgcagaacaaatcaagcacatccttgctaatttcaaaaactaccagttctttattggtgaaaacatgaatccaaatggcatggttgctctattggactaccgtgacgatggtgtgaccccatatatgattttcattaaggatggtttacaaatgggaaaatg

SEQ ID NO: 20499 - DNA, 269 bp, Glycine max
  Clone ID: PAT_MRT3847_118515C.1
tttctcaataataacttgactcttgtgggaaataacttctgaatgctgcacacaatgatctcaacagtagttttcaccgtttgttcatagtatgtttatgaaagctccaaggacatagtctattcacattcactatcgtatgcaaatgtccgtcgtgctgcatgactgctactataacatacggtctgtgtatcgaatgtctctggactagatacaggcttaggccccaatggccaaggaattccctggcttgggaccatacctactta

SEQ ID NO: 20500 - DNA, 140 bp, Glycine max
  unsure (1)..(140): unsure at all n locations
  Clone ID: PAT_MRT3847_118516C.1
cgcagaacatcatcatcttcagaacgtaggccattgantgggcttgaacccacaacaattgctgaactgggtttgaaggatgctganaagcttgttgaactnccaaantaattcagccanatcataccttttaaaggccc

SEQ ID NO: 20501 - DNA, 418 bp, Glycine max
  Clone ID: PAT_MRT3847_118517C.1
ggcacgaggggaactttgccaaggatggtcgctgtgaagttgcggttggctgttggatgacttgcccctctccttttctggtaagagtctagtttaaatctctaagctgtggactgtgaaagtgatgatattgtatttgctactcagaatggttgtgctgaccatcttttaccaccaagatctctgacgaatcacagttccacatcaactcatttaactctattcacgactactgtcatgatgacattgtatttgctgcactgaatggttgtgctgacacacaattaccaccaagatctctgaaacagcttagtcgttaacgtaagagatttgtcaaatgatgattactattggtccgtgttgttgatttaatgaaaataaccaccaaatctgatcagacaattttttttagcttcac

SEQ ID NO: 20502 - DNA, 1148 bp, Glycine max
  Clone ID: PAT_MRT3847_118518C.1
gaatgaagaaaagcaaaacaattggctcgggtttgaatccgatttggaatgaacactttgaatttgttgttgaagatgtgtccactcagcacgtaactgttaaagtttatgattctgagggtttacagtcatctgaattgattggatgtgctcagctacagcttagtgaacttcaacctggtaaagtaaaggatgtttggttgaagttggtcaaggatttggagattcaaagggatacgaagaacagagggcaggtacatttggagctcttgtactgtccatttggcatggagaatagctttacaaacccatttgctcccaactactcaatgacatctttggaaaaggttcttaaaaatgcgaatggagtagagtctaatggaaatgaaaacgcagttacccaaaagaaaaaggaggttattattagaggagtcctttctgttactgtaatatctgctgaagacttgcctgcaacagatttcatggggaaatctgatccttttgttgttcttaccttgaagaaagcagaaacaaaaaacaaaaccagggttgtgaatgacagcttgaatcctgtttggaatcaaacatttgactttgttgttgaggatggattacatgatatgctaattgttgaagtttgggaccacgacacattcggaaaggactatatgggcagatgcatattgacgcttaccagggtaatactggaaggggaatacaaagaacgttttgtgctagatggagccaaatctggctttttgaatttgcatctcaagtggatgccgcaaccaattttccgtgattcttaggttttcctatccctcgctatatataagtttatagaggatgtagttgtggctgtggatatctggaccataatttctcagacagacatcgtgtatcttaatagcaattacagttagcaaatgtacatacgtcttgtcaggcatggtaataatggtaaggatatatgaatttctctatcagattatcctataaatgctccattgatgatgggatgtaaaattaacagctcgtggttggataattgtcttttagctgtagttttgatgctcttattgtttcccgtattcagaacaaattatctggcatttattaaatggagtagcactttaaattgttctatt

SEQ ID NO: 20503 - DNA, 501 bp, Glycine max
  unsure (1)..(501): unsure at all n locations
  Clone ID: PAT_MRT3847_118519C.1
atctacatagccactggnatcatgtcacttactagccatgtatgaaagcagttcctcttatacgagatgcagagacttcttaaaatcaacaaaaaatttgcgcaactgacgcacagtgttgagccggagaggcggggactgtgacagccttgagaccttgtgcataacgaatcactcactcatagacaaatgcagataaaatataacctttgggctttaacctgccatcttatgctgaatgctgaatctgaccctgaagcagaactctgtgtggtcttgaaagaacatgtcattattggagttttgatcttacctgctccccataatgattcaaaaagcctatactagtatattagtgatgtagccacagataacgaattcgatacgatgctttatactgatgttattccacctaactaccctggagttactctccatgatatctcagctatcaaaaatgtgcacgatacactgaaagaatcgggtatgacttgctttaca

SEQ ID NO: 20504 - DNA, 4384 bp, Glycine max
  Clone ID: PAT_MRT3847_11851C.1
ttcgagccgattcggctcgagggacttgtaaattattatgcttcctttttcttgctaaattttgaagtttaaaggcttaccaagttaactagcttgtgtgtgggtcatggcctagggtgggccatgacatataactttctattttattttttcatttcttgtgaaagggagtgggagtatttatatgatgaaccctgactgaattgtgacatactttttatgtggatgctaaaatcccctgttggctcgaggttaaacagactctcagctctccgacaagtaataataccatcactcatcgggaaatgggagatccagcggagagcttcggatcggaaggtttggattccgccgccgccgttaagaccgacgacctttgtatggaaatcgatccgccatatcaggaaaacgtcgccaccgccgaggactggcggaaagctctcaacagagtcgtccctgccgtcgtcgtcctccgcaccactgccactcgctccttcgacaccgagtccgccgccgccagctacgccaccggcttcatcgtcgacaagcgccgcggcatcattctcaccaatcgccacgtcgtcaagccaggtccggtggttgcagaagcgatgtttctgaaccgcgaagaggttccggttcatccgatttacagagatccggtacatgattttgggttctttcgttatgatcctggtgctatacaatttctgaactatgaggagataccacttgctcctgaagctgcctgtgtaggactagaaatcagagttgttggtaatgatagtggtgagaaggtttccattttggctggtactcttgctcgtttggatagggatgctcctcattataagaaggatgggtataatgacttcaacacattctatatgcaagcagcatctgggaccaaaggagggtcaagtggttccccagttatagattggcaaggcagggcagtggccctgaatgctgggaggaacgtcatcaagtgcatcagcattctttctccctctagaaagagttgtgagggcattgaggtttcttcaaaagggaagtgaaacttatgttgataaatggaaggcagtttctatacctcgtggtacacttcagatgacatttctccataaagggtttgatgagactcgtcgacttggccttagaagtgagacagagcagatagtacgtcatgcttctccagctggtgaaactggaatgcttgttgtggactctgtggtgccaggtggtccgggttataaacatttggaaccgggtgatgttgttgttcgtgtcaatggagaagtcattactcaatttctgaaactggagactctacttgatgacagtgtaaacaagaatattgaattacaaattgaaaggggtggcacatcaaatagtttaacattgttggtgcaagatttgcactcaataacgcctgattaatccttagaagttaatggggcagtaagacattcactagaatacaattgggatatctacttctgatgcaattctagctttgtccgcctgcccaattgaaaatccaggagaggtggagtttctccttcctgttcacaaataagcccttatattacttgataactcttatcttggcttgatgaagggataacagttctttctagtcgaaggaatggtgcaggagtaccattggggtatataagctacattgatcgtaatctaaggaagaagtggattgacatcctgaagggacatggttcatatgattacattttcaggattaaatataggaaacgctgtttcccctcgatatagagtgaccaatatggaagtaattgagcttgatacagattttggcagtacattttcgggtgtgctaacggacgaacaaggaagggtccaagctatatggggaagcttctcaactcagctgaaatttggttgcagcacctcagaagatcatcaatttgtgaggggtattccaatttatgcaataagtcaggttcttgacaagattatatcaggtgcaaatgggtcattgtgggggacatgtgtttggagataacaatcaggagtttgttgatggtgtcactagcatggaaaccaattgtgaagatccctcagagtgtgtatctcaccacaatgcatctgatggtgtggtgaaaaaacgaaaagtggaggaagatttatcagctgatggaaatcttgttgctgatttttccttaaatgataccagggaaactaagctagaaaaatcaagtattatacaggatgacatgttaatggactatcagggtgcaactgcagctacagcaaatgcgtcagttgatgaaagtctgatcgagccgactcttgtgatgtttaagggaacattttcactagataaactatttaatctaactcaggagctgtcaccaatgaatttcaatgcgtttgcttctagagggcagagtttaattgtgaaggggagccttggtgcaatggttggagttgctactgttcatgttcccccatcttgtatgcttgatggtgttcattcacagcacttttttggaactggtgtcataatttatcactcccaagatatgggattagttgcagttgacaagaatacagttgcaatatctgcctctgatgtaatgctatctttcgccgccttccctgttgaaattccaggagaggtggtatttctccatcctgttcacaattatgccctcatatcatatgatccctcagcattgggacccgttgggggttcagttgttcgtgctgcagagttacttccagagccagcattacgccggggtgattctgtttatcttgtggggttgagtagaagcctacaagcaacttctagaaaatcagttgttaccaatccttgtgctgcattaaatataggatctgctgattcccctcgctatagagcaaccaatatggaagtaattgagcttgatacagattttggcagtacattttcgggtgtgctaacagacgaacaaggaagggtccaagctatatggggaagcttctcaactcagctgaaatttggttgcagcacctcagaagatcatcaatttgtgaggggtattccaatttatgcaataagtcaggtccttgacaagattatatcaggtgcaaatgggtcacctcttcttataaatggtgtcaaaaggcctatgccacttgtgagaattctagaggttgaactttatccaacattgctttcaaaggctcggagttttggattaagtgatgattggattcaagcacttgttaagaaagatccagtaagacgtcaggttttacgtgttaaaggttgtttggctggatcaaaggctgagaatcttttagaacaaggggatatggttttagcaatcaacaaagaaccagtcacatgcttccgtgacattgaaaatgcttgccaagctttagacaaatccgacgccaatgatgggaagcttcacttgactattttccggcagggacaagaggttgaactttttgtgggaacagatgttagggatggaaatggcactgctcgtgcaattaattggtgtggttgtattgtccaagatccacatccagcagtgcgtgctcttggatttcttcccgaagaaggtcatggtgtatatgtggcaaggtggtgccatgggagtcctgtacataggtatggtctatatgctcttcagtggatagtcgaaattaatggaaaaccaactccaaatatagattctttcgttaaagtgacaaaggaactagaacatggcgagtttgttcgtgtaaggacaattcacctcaatgggaagccacgagtcctaacattgaagcaagatttgcattactggccaacgtgggaattgagatttaatcctaatagtgcgatgtggcatcgcaatataatcaagggattgaactgcagttctgtatgaaatatgaatgatcagaccatgtaattctttctaattcctatgtacgcagctacacgggagtatagaaaaatctcgtggaaggcatcttccaggttcagaattatggtttaccagtgccctcgttgcaaatttgaggcaaatttgatgctttgccgttaaggggtctacttcaattggttgaacagatggagagagatactataaaacattttgtccaaacatattgtattgcattgccatgattgataagttatgaggcgttcgattcaggctggcaattatttattcggatctgtaccgcaacatataacagtaggctaattatattggatcctggaaaggttggataataaaagaaaaatgaaaaatatttatagtttatgtattgaaggaaaaaaaaaaacacaccttttttttggtttgtgaatattttgtcaaccatcagttgcttcattgcaatgtaaataaataccctaggt

SEQ ID NO: 20505 - DNA, 952 bp, Glycine max
  Clone ID: PAT_MRT3847_118520C.1
agtcagtccccccattacaagtgaaggtgctagcttgaagctaccaggatttatgggtatcgttagtttccgtttaaaaaaaaaaaaaaaaaaaactcgagtttttttttttttttttttttttttttttttttggacaaaaacacggcgtttccatgtcgccagcctgtggccacggtctgtgacccgcttgtttatgatattaatgtctcattgagacatttataaagttaggaaaaagaatgtcacaatcatgttgctacatatttgtgacctgtttaaatatgtgaacgtgtgtgtgcaaatttattcaactttgactgcaaatactgtatgaacataatggtgaccatcaagccatgttagagacccaaaattgtatccactacgggcctccttgccatagaatgagactttataggtcattctttgaacaccctcagaaaacacaagtttattggggatgaccttcacaaccaatccctcaggtgcaagcacttttgcagtgtatgtggcattaagggatccaacattggtaacttttcttgtgatcacttttgctttttgttgctttttaagtgtacttatagatattgatgggtaattgacgttggagataaggccttcagaggagttctttgggcaattgacgtttgtctcagagattgaccttatgattttctgtgaatagccaaaataacaaaggaatctgagatagtcttccacatctgtttcaaagactaagccagggttgagagctctgagtggattaatttccccaactcccatttcatgtgggccggcaatggagtttgagctgttagtaagaggcttcctcatgttgttgtagtttgtagctgttgtcatcaatgctgatttgatcattgaagaactccattttttgtgtactgacttaatgaatgctgctgcacctgtcacatgtgggcaagcc

SEQ ID NO: 20506 - DNA, 370 bp, Glycine max
  Clone ID: PAT_MRT3847_118521C.1
ttggtttaataagtgtttaacctaatgccactgtggaagatatgccacattctgctcgggaccttttctgctgggacagtgagaaaacttttccaaataattcttgtgcacaactgctctcttgcaaagtgtatactggtactggccaatattatcctgagtggtccccagtcaattgtcgagctcatcgacaaccagattacatcactgtgggaaatcatggcaaacagcaagacgtgagcattggatatgatgcatgtacaattccaaatgattgaggttcattggttgttgccaatgttggaaatcacaaacaaatggctggattgcatgttgctcgaagcaaaggaagaatgggatatgctttatt

SEQ ID NO: 20507 - DNA, 1501 bp, Glycine max
  Clone ID: PAT_MRT3847_118522C.1
actcggacgcgtgggcggacgcgtagacttgaagcattgcattctgctatttaattccactacgtacacgcacattctcctcaaagacaacaatggcaccaacagccaagactctgacttacctggcccaggagaaaaccctagaatcgagcttcgttcgggacgaggaggagcgtcccaaggttgcctacaacgaattcagcgacgagatcccagtgatttctcttgccggaatcgacgaggtggatggacgcagaagagagatttgtgagaagatcgtggaggcttgcgagaattggggtatattccaggttgttgatcacggtgtggatcaacaactcgtggccgagatgacccgtctcgccaaagagttctttgctttgccaccggacgagaagcttcgttttgatatgtccggcgccaaaaagggtggattcattgtctccagccatctccaaggggaatcggtgcaggactggagagaaatagtgacatacttttcgtacccaaaaagagagagggactattcaaggtggccagacacgccagaagggtggagatcggtgactgaggaatacagcgacaaagtaatgggtctagcttgcaagctcatggaggtgttgtccgaagcaatggggttagagaaagagggtttaagcaaagcatgtgttgacatggaccagaaggtggtggttaattactaccccaaatgccctcaacctgacctcactcttggcctgaagcgccacacggatccgggcactatcaccttgctgcttcaggaccaagtgggtggacttcaagccaccagggacaatggcaaaacatggatcaccgttcagcctgtggaggctgccttcgtcgtcaatcttggagatcatgctcattatctgagcaatggaaggttcaagaatgctgatcaccaagcggtggtgaactcaaaccatagccgtttgtccatagccacttttcaaaacccagcaccaaatgcaactgtttaccctctgaagataagagaaggagagaagcctgtgatggaggaaccaatcacttttgctgaaatgtacaggaggaagatgagcaaggacattgagattgcaaggatgaagaagctggctaaggaaaagcatttgcaggaccttgagaatgaaaagcatttgcaagaacttgatcagaaggcaaaacttgaggccaagcctttgaaggagattcttgcttaattaataataattacatatgtatcatttgcatgcccccttggtgtttttagtattttttaagggccatgaattaataatagtccttacctttgtgcttttgtacgtcttatgatttatcctttgtggggatatcatgtgttgtgttcagttgcctatgtcttattagctagctggctcatctatgtataccttatatttgcctctattataaatgaaaataagtggcactgtctttattattggctgcaaaaaaaaaaaaaaaaaaaaaaaaaaaaaaaaaa

SEQ ID NO: 20508 - DNA, 238 bp, Glycine max
  Clone ID: PAT_MRT3847_118523C.1
cgggcgctttttgggtttttgtgtggtttttcttttttggcctaacatttcaaactagaatttataacaataataatccgtgccttcatattacctaaacaggaaaagtggggtgaaaacaagagtccataatccaaccattataaaaaaaacgaggaaaattataaaggtacgcggggggcgccaacaaaagggtgtcattttttccgcaggggagaacatgagccgagccaaaaac

SEQ ID NO: 20509 - DNA, 442 bp, Glycine max
  Clone ID: PAT_MRT3847_118524C.1
actatatgtaacaatcttgaaaagaatgaaaagtatatgaattccgaggatgtatttaaggatgttcaatacgtgtgggacaactgttacaagtataacaataagggtgactatatcttggatcttatgaggcgagtaaagaagaactttatgaagtactggacagcagctgggctatacagtgaacaatcaaaagggaccaagggtgagacatctatgtgtgtgtgtgtataatatatatacacaatccttcccttttcctttgcaagtatgaaagatataaagcatttagctatgccagaatgaagaacattactttgcatacataatcttctgaaaacaaatgattttcatttcatgtaaaatactttactgtggtattctgatagcaatatgggtgtatgttttcattatgaatcacatacagagaggacttcagcag

SEQ ID NO: 20510 - DNA, 393 bp, Glycine max
  Clone ID: PAT_MRT3847_118525C.1
gaagtacaacaatgcgactgattagattgggaggacccatttggcacatttggtcaatgaacacttttatgatgaaaaatttaataatattggcacaattggtacttcagctttgcatcgacatattgttgcgcacttggagaaaatgtcattatggcacaaagccattttgagtggaatgggacattgcttgtatgggaaaagctgaaaaccatggtattttgggatgaaggagaaattagtacaaatgattaagagcatctatgaaacataagtgtcaagatgtccagtaccactgaaaaacatttgtggaaccactctcgcaacactttttggaacaacactttggaaactctattccttttttagagacgctggtaatgggggtgcttt

SEQ ID NO: 20511 - DNA, 310 bp, Glycine max
  Clone ID: PAT_MRT3847_118526C.1
ccacgcgtccggcttactttaagacgtttcgtgacactgccaaaaattgtgcaagcagactatcaaccacgaagtccccaggaaaaaacagcctagatcactgtataagattcccactgcactgagggaacttttctagaattacaccttcttgtatgacttgaaaagtcactctaaagccacccgaaaatatgacttgaaaagtcactattatagccaaccgaaaatatgacttaaaaagtcactcttatagccaaccgaaattatgacttaaaaagtcactcttacagccaaccgaaattatagagcg

SEQ ID NO: 20512 - DNA, 611 bp, Glycine max
  Clone ID: PAT_MRT3847_118527C.1
aaacccaaactgaagcccatcatcaagctatatataaacccctttttcccaagtcacttccaagggaaaaaaaaaacacactttttacatatgcaaccagggcacacatacagaaccagtataaaagtattagatattacagactagcttttaatccagggggcttcatttaaaaaggacaattattctaaggttctggcccaggctattacataactaagctattacaggcattttatagttgccccagggctcactcacatcaggaaccgacatagttacgggtggaaaatataaaatgggccagttaatccgttcacaaccacaaaaacaggaatctgagcatcagggctaagcaccataatcgtccggggggttaaccagttcacattcatcaatccactcactgaataggtcaatgggctctgaaaaagctgggagggaagggctaaagctcttttggcaaatcccgcaaatagcttcccctataaagttcttaatgtcaagggggaattcaacgctgctgccatgattgcaaaaggggcagctgaaaacggaatcaagctaatccattcgtttttttggaggaggctttgcctttgccttccttt

SEQ ID NO: 20513 - DNA, 315 bp, Glycine max
  Clone ID: PAT_MRT3847_118528C.1
caacaacgcccgcacgcctacccaagcagagcactcccgctcaaggtcaacgcttaaccctcaagaacgcacgaggcgcaaaggacacatatgaaccgaaacgacacgccaccataccaggcccaccctgaagccaaagcaaaccagaccggaaaaccacgctggaaccgagctccaaaaccccatagtgaaccctaaaaaaagcctaatcatccaacagctggcacctgagcaaaatcacaatacgcccaacacgacacacaacaacccacccataagcagaaaaagaacagccgaagctaccaacgcagccaa

SEQ ID NO: 20514 - DNA, 724 bp, Glycine max
  Clone ID: PAT_MRT3847_118529C.1
agggtacggctgcgagaagacgaccttagggtttggctgcgagaagacgacagaagggggattaagaaatccatgttgagaggtggcaacagagaaaccctaaattgaagagaagagtgaagattgagagttagggtttaagcgaaatcagatcagagaagaaggcatcatcatgtttccaggaatgttcatgcgcaagccagacaaagctgcagcactgaagcagctgaaatctcacgcggccatgttcggggcatgggttgttgttattcgagtcaccccttacgttcttcactttctcagcaccgagaaagaggaacttaagctcgagctttagcttctcactcttcctcggcagagtggattttgaggagttggatgtgtccttgggttcgggacaataatggagtaatgtatttatgtaacccttgaaattgtgaggccatgatgatatagagtttaatcatatttccttttgcatttgtaatataaatgtgtttgggctagttgtgaaacgatagacaatttcaatagtcaattatagatatactcaattattgttataattgattacatggaattttatcttggaaaaaaaaaaaaaaaaaaaaaaaaaaaaaaaaaaaaaaaaaaaaaaaaaaatataaaaaaaaaaaaaaaaaaaaaaaaaaaaaaagttcgttttcgtccctttaagggggggtaaatgggcccgttgggggaa

SEQ ID NO: 20515 - DNA, 275 bp, Glycine max
  Clone ID: PAT_MRT3847_11852C.1
gctggtgcaaagtaatgctatgcccatgaatctgccaaatgctgtgctttcaatgtggagatatttcgttagggatgcccacgctgaaggagctaagaagacttattcctacattaaaaggacacaatgtttgttcataacgtttggatattagactgatgataccctcaattttgcagcttttccccaccagctggtgctatttggagaaattccagaaaaaggtgtgttggaatgttttacaagaggaatttgttttcggttggacaaattat

SEQ ID NO: 20516 - DNA, 369 bp, Glycine max
  unsure (1)..(369): unsure at all n locations
  Clone ID: PAT_MRT3847_118530C.1
aaaaaaaaaaaaaaaaaaaaacaaaaacaacaaaaaaaaacaaaaggggcggccgaagaaaaggaaccaacctggctgacgcttttaagcaacaaaatggggggcgccaaagaggagcccaaaattaaaccccgaaatccctccctnagggggggtnaaaaaaaaancactattttaaaaaaaaaaaaccccctncagaggggggcgggggggaaaaaaaatgtgaaaaccacaaggcccgcgcccggacgcccgtcccaactttagcacggggagatagaaaaaagggaccccccctaaagcgctgaacaaaacgcggcgagggggggagggaaaaggaacagaccccctgaacagggcattaaccca

SEQ ID NO: 20517 - DNA, 214 bp, Glycine max
  Clone ID: PAT_MRT3847_118531C.1
gcgttcacaaataacgtagacgaggacactgatttactaagaacaataccgcctatgagaaaggcggagacatctgcactctaccataaaagaatgccgggtatctataatccgtaccacaaatgaccacatcaatgcgccatacggacaggaaggtggatacgatcgagaataacatcatcaaatgaagaattcagccaaaaacgaccactat

SEQ ID NO: 20518 - DNA, 393 bp, Glycine max
  Clone ID: PAT_MRT3847_118532C.1
ataaatgacgctgttaatgtaaccaagctccagacattgctaataaacaactttacaacacaatcatataggcagagcacctgatgttcatacttaacgaagatgttccttgtgccattgcatcagattgcagtagctcatacactcaggtaaataatgagatggttacacctatatttgaactgacatctatggaaggaggaccacagacctctctcaatcgtatgcccagtaacatatctgaggtgcaccattcaactgctgtaacggggagctgttaaaataaatggatggagacagaaagcaatttattgaatcatgatctgaatgtgaacgcggctgatgctatgaacatgggggagacagatatgatgtcaactgttctaaatgacg

SEQ ID NO: 20519 - DNA, 448 bp, Glycine max
  Clone ID: PAT_MRT3847_118533C.1
gaaggtgtagtccgctattttttttgtgagaagtctttgcttgaaatgggctttttattcacaagctctttgggactttcctggagaagcgagtagaaattctcaggatcaatagagacttgtaggagttggactaaggtctctttcaattttcgatcgggcatagttgcaatcttattccacttaatcttcctcaacttttcagatacctaaggcggcgaagtatagctaaaaaatgggagggacacaagtggagagagaagagaaggtgtctctggaactctgtgaagaaattcttcagagtatggaagtgggaatgtccttcaaagactataatggtagaataagttcgttggattttcacagggcatccaattatctagtaactgctagtgatgatgaatccattcgtctgtatgatgttaccagtggaacatgtttgaagaca

SEQ ID NO: 20520 - DNA, 398 bp, Glycine max
  Clone ID: PAT_MRT3847_118534C.1
agcacacatacgagaatggaagattccaagtaggtgaaggatagtagttgtacaagatacgaacaattttcgcaaagcgttgagactgcctcccaagaaccctaatcactcctactacaataactacctatcaagggacgaccaatgctatcccgcgttacatcctactggactcaccattgtcactacaaatcacactcgatactgactaattcactatcctggtactgcaccactgatccaagcttcatggtctgaatcatactccatggtacacttaccatgcgtcacaaagtactctggttgattacatatgagagctaatgacgattatcacagatgacagtggcactcactttctattaatggctaatatcgcagaacacaggcccatatac

SEQ ID NO: 20521 - DNA, 851 bp, Glycine max
  Clone ID: PAT_MRT3847_118535C.1
cctgcgaccaaaattcaaaatccaacgaacggtgacgttttgggtccttctgcatctcgtcatcattcatcttcgttgctctctattcgcggtctttacttctaacctttctgcgatttcggagtccagtatcaaagtctttgctctctgacaaaagtgaaattggataatggctaattttgttgctcctggccacctgattatcaaagatgaaaacttgaatcttcattctaaaaagactactaagtcgaagaattctaagacaaatggaaagaaagatggttcagggattgcaggtcgaaaagctctaaatgatataacaaacaaaagttcacttcaccaccctgaagcctcggttaagaaaaggaatttacccaagcaagatattaatgtaaaggaggaaatgttcttgcatgatcacaagaagtgcattgaggcacaaaatgctactatgagaaatttcaatcttgagacagttcttccacaagatgattccatatctatcctagagctgataaaggttcctcattcccctcaatgctacccagaaccagtagaattgccaatgcccaacttttccgattggtttgaccattcaatgcagtggagctctcctccatcttctccgttgtcatgggactctccatcttcccttgcatggcaaaatgaagcagttgaatttgttttgaaggaagaaattgctgtccaagtgtaacctactatttcttttgtcgtgtgattgaaaaagtgaatcccaccgttgtgaatgattgagcctcgtttttggtttctttctgtattgctgcataatcctagtcccttcagttgaatgaatttctagtttttgtcaa

SEQ ID NO: 20522 - DNA, 546 bp, Glycine max
  Clone ID: PAT_MRT3847_118536C.1
cccacgcgtccggtgacacatccgatcactcctccgaccagatatacataggcttattagcataggctaaggccctggctgagaagacgattgctggcatcaccgctactgatgatgctgctatggccagatgagcgcgagcccaagttgtcttcgtcgcaaaatgaggaaagcctttgtcacagtcgacgatcattacatcttgccaagcttgaccgacttctgcaggcctttcatctctaccaacccatacgggtcccgccctatgtacaagaggctggaaatcacctatacgccaatggagtatacgaggacatctacccattaagccctaagagcttaagatgagggtgtttcggggaacagcggcttggaagtggaattcgtgaaaggttccacaacttgggagctgtgcacgatgctgatcgtgttggagctctaggcgctgtatgaattgcacgtcatctcaccttggctagatgatagtagaggatgcatcgtgaaccatccttgattcgacgatacgcatagtgcaggcatctatac

SEQ ID NO: 20523 - DNA, 300 bp, Glycine max
  Clone ID: PAT_MRT3847_118537C.1
gcacgagaaacactaacaaggattgtgcatgtgcttacgcaggggtaaaggttcgagggcgctcttgaaaaaggctcaaacaagaggtgcttgtacatgatgcaagctattatactgccctccaattggagggtccagaggtagtttattttagttttagttttagcttttttgttggaattttcttctttttcattgttatacatctgagtctaaaagacacactaaactgatgttctgattcaaacatattgaaatgcatgtatcaaataattattgtgggctctcagtccgaaaaag

SEQ ID NO: 20524 - DNA, 405 bp, Glycine max
  Clone ID: PAT_MRT3847_118538C.1
gcgagcggtcgcccttttttttttttttttgggtgcaacacgtttttgttggtatttttttccatacaattagattggtagaacatgaagggaaagaaatcggttaacattaaatggaagaaaatgagtaatatggggtgattcatttacagagccgccaagagccaaaaagctaccaaatctagcttttattaaaattcgatgaatgtctaaaggaaaccaaaagggtaaaagaaaaacgctaaactatgccttttttttttttttctcttcttttggtttgataaaaaatacagctttggagtaactgttgattccctgcaaaagaggggatggggggttagtgctccttgcggagataaaacaatactcttgagtcctgtcatctgattttcatttcatttg

SEQ ID NO: 20525 - DNA, 362 bp, Glycine max
  Clone ID: PAT_MRT3847_118539C.1
acacttaacttacttcacatgacagtctaatctaccaatttttgcacgatacaaatttcgggcaaacactacaacatgcatttttaacttatagaaacctgaatatccgaggattcgcacatgcatgttgacattgagaatactgcacaggacataaggtctcagggtgtgcttaacactcctgatccctcgactccatggcatgtggatgcatattctgtaagcaaaaccatatcccactataaacataagcttttctctctcacagatcaaccttgcaccagactcttactttcatatctgagtgtcatttatcctatttttgcttatcacaaaaactacacttgttctaactttaataa

SEQ ID NO: 20526 - DNA, 766 bp, Glycine max
  Clone ID: PAT_MRT3847_11853C.1
ccacgcgtccgcaaattgttatgtagaatgttaatgttttttgagttgatattccatttcaatttctttggctttactccttgacttgtttaggttccaggtggtccgggttataaacatttggaaccgggtgatgtacttgttcgtgtcaatggagaagtcattactcaattcctgaaactggagactctacttgatgacagtgtaaataagaatattgaattacaaattgaaaggggtggcacatcaaaaagtttaactttgttggtgcaagatttgcactcaataacgcctgattatttcttagaagttagtggggcagtaatacatcctctttcttatcagcaggctagaaacttccgtttccattgtgggcttgtttatgtggccgaaccaggatatatgctcttcagagcaggagttcctcgccatgcaataattaagaaatttgctggtgaagaaatatcatgtcttgacgaactgatatcagttctttctaagctatccaggggtgctcgagtaccattggaatatataagctacatggatcgtcatcgaaggaagtctgtgttagtgacggttgatcggcatgaatggtatgcaccacctcagatatacactcgtgatgacagtactggtctttggaatgctaagcctgcttttaagcttgattcccccttcctatcattgggtgctaaagatgttgaaaatttatctagacagtcagtttcactaactggggagcatgcttgtgggggacatgtgt

SEQ ID NO: 20527 - DNA, 436 bp, Glycine max
  Clone ID: PAT_MRT3847_118540C.1
gggaaactaaacattttcttctctttattctttacttcacttactttcactttttcatgatttaggggccttttcaattttcaatagttcaaccgggggtccaaattttgtaaaagtacccacccaatgggaaccttttgaataaaaaataataaaggcaaaaccaaagggggggcctccccattttcacttagcctttaacatttaatatttggcgagattttccttttggggggaaaccaacaaaaccccccgggccccatttaccccttagccaccgaagcaaactgggtggcttttttttacataaaaacaaagctgggaaccattaatttatttttattatcactttttatgttcccccggggggtgggtttggctttttaacaaaaaaaaccgggcactttactttttgtgcacaaggattgctgacccc

SEQ ID NO: 20528 - DNA, 378 bp, Glycine max
  Clone ID: PAT_MRT3847_118541C.1
ctaagaagttgggaggaagaagagagtgagagtgagagagatggaggttggatttttgggtctggggataatgggcaaggctatggcgatcaacctggtacgccatggcttcaaagccactgactggaacgacacccgtgttcaagctgcgaccaactcccggcagcatggtgcttcatccggacgacaacctagcaacttgggagaggatacagcaggcgtacacttgcagggggacccgaccctagggttgttcgatcgggggagtgtgataatgatggggaatttgaacatataagtggacgggggtatagggacctgtcactagggaaagctaaaacatgtgtgctaatgtggctcgatttcgaagcacagggt

SEQ ID NO: 20529 - DNA, 641 bp, Glycine max
  unsure (1)..(641): unsure at all n locations
  Clone ID: PAT_MRT3847_118542C.1
tgcaggataccccggtnccggnnaattcccggngtcgacccacgcgtccggtgaagtgcatgagaagggtttttgtgttgcaccgattttaagtcatgatcaaacagatattaaataggctccaacggaaaccctccaaatcagtggaaaatcatgaaggagggggagcgataacatccccttcaactacttctaccagttcaagaagcagtgatttagcacgtttccattatggaaactcaaccgcttcgcctctttcaggccttaattctaattcatttcctggattaaatcatggtgacaagtttccccatgctgtgaattcaaagcttaatgggagtttggcagcttcctcgtatgaagccttgccaagttttaaagatgttccaaattcagagaagcagaacttgtttataagaaaggtgcaaatgtgctgttttgtgtttgacttcactgaccctacaaagaacctgaaagagaaggacattgagcggggaacattagttgaacttggggattatgtttcttctgctgatgaggaggttacagaaatgctgagtgggggacattgggaaaatggggtggtgtgaatgtgggtgcggacgggggacctggggggctggggggaaaaccgggggggt

SEQ ID NO: 20530 - DNA, 250 bp, Glycine max
  Clone ID: PAT_MRT3847_118543C.1
ggatggacttctcgagatctgatggtccttctatggaatgaacttcggcctcgactactgcaccgccggcatttctggcggacacgtcaaccctgctgcgacttttggcctgttcctgggcatcgaggtgtctatcattccccccgagttctacttggtaacgcatcgccttgtgacgatctgggacgtttctttgtggaatgccttcatgaaaaactcctacaactccctcggtggctgtgctaactcc

SEQ ID NO: 20531 - DNA, 500 bp, Glycine max
  unsure (1)..(500): unsure at all n locations
  Clone ID: PAT_MRT3847_118544C.1
aannagtnccgcgacntctnacnntaatctcggtnatgcnagcttcggaggtntngtggnnatgantgtgnctttaccgacgngctcnngactcngtctgngagttatntgnagagtgttcacggtggngngatngtggtcgtttanttgtgngtgatcagnntcncgtgagtgcggctgntgctgtcgcattgtcanactntgctgtctngacgtatgggtgctnntcncgcagtntgntgtngagtgtgccantctgtgttnntttgtnctgtgnncncgttgtnncncntntgnctnnctngtgnanagatgntgagtgagngtntcagtcncacttngatgtganggngngnttgagtccgnntggcngtcngagtcgggngacgtngtngttcggncnaggttctctagagannnngcgctatcgtcgnngggtgcgnngttgcgantgtggnggnanngannctgncggtctttnccgagatcagngtntntgn

SEQ ID NO: 20532 - DNA, 151 bp, Glycine max
  Clone ID: PAT_MRT3847_118545C.1
attgcataaaaaacacgggcattagggccacattttgtacattatccggactatttcttatcatatacgatattaaacaatgacaatttgattgcccataatatctgacttatccataagccctctcacaaaaagatctatgaccacctcc

SEQ ID NO: 20533 - DNA, 869 bp, Glycine max
  Clone ID: PAT_MRT3847_118546C.1
cactggcgacatcttggggatatccgtgcgaataagccaagtgcagctgaatggcttgatcaattacccaaacaaaaatgggtacaatgctttgatgaggggaaacgttggggactgactaccaatttgtcggagtctgttaattccatgttcaaaaacacaagacatttgtcggtgtcatcattggttgaggagacctatttcaagactgcacaactctttgctaatagaggtcgacaaactcaggcaatgatcaactccggctcacagtattctgaagtcgtcttcgatgtaatcaatagtggtcaacatgaatctaatacacatattgtaaatgaattcgacagacacaatcacacttttattataacagagactcaatccccacttgaaacacccagaccacctggaaggtttagagtaatgttacaatcccaaaagtgtgattgtggtgaatttcaggctaaacatttaccgtgttctcacgtcatggctgcctgtaaatctgtcaatgttgatcccatgacctatgtgccgatgatattcactttacaacacattttgcacatctacgacaactcctttggtttattgccacacgaatcaatgtggcaagaatatgaaggagatcagtggggtcctgatccaaggagaaagaggactgtaaagggtcgtcccgtttcaactcgcattcctactgagatggacgaagccaaaaatgaacgagcaagtagaaaaaaatgtggactttgtcggcaacatggtcatagcagaaataattatcctaatgtatcctcgtcttagtttttccttagacaaatgtcattgtttaaatattttattgatgacgtagtataatgttcttatat

SEQ ID NO: 20534 - DNA, 289 bp, Glycine max
  Clone ID: PAT_MRT3847_118547C.1
ggtaacgtgtgagtacccatgccatgtggagataggcaaccgatgaacacggtgcattcgaacgatgaactgggacgactgtccctaacagcgaagacagtgatgtaaatgcttcgagacacgggcattctggtgggtcactacgatagtaacatcatcaattcatgaggtcagctccaactgctgcaaccacataaaccccgacgaactgtgcatcaccaagtccaagaaggacaactccggagagcagatataagtcttcatccccgacgagacgattgacatcgtc

SEQ ID NO: 20535 - DNA, 288 bp, Glycine max
  Clone ID: PAT_MRT3847_118548C.1
accaagcagacgtccacgcgtgcgtggacgcgtggggtttgtggccataactcgctcttcatcttttgcagatccgtgtcagagcacattatttctatcaccagaccatgtcatgctgatgtggaaacagagaatgcggtggttactgatagtgcggcaaacgctgcggaggctgctatatatacccatacttgagcctcactgagtcaaccaccaacgacaacctggtcatgcaagtgatacctgataaggctcaatttgagggaacccaaatacatatgcccactg

SEQ ID NO: 20536 - DNA, 364 bp, Glycine max
  Clone ID: PAT_MRT3847_11854C.1
aattcggctcgagacggctgcgagaagacgacagaagggagatagagtaatccttgagaaattccttctattatgttgaaacgcttcttccaatctagtaacttgcttcgagtgcaatcttcttagtgttaatgaagcaatatgcatgttgttagaaataaagcaatcttttagtgtgtgtgtgtgacatttatgtagttatgttcagataggaaagcataaggcaatgaatcatatatacatctataacaattactgaaaacttcgttgagccaacttaatgttttcctccacgtacgatggcatcggttggtacatgataattaaaaaatattgtcttaaatttgccttttccaatttaaag

SEQ ID NO: 20537 - DNA, 246 bp, Glycine max
  Clone ID: PAT_MRT3847_118550C.1
ccacgcgtccgcggacgcgtgggctgggactaaaaagtatgttgttagtcgctacctcaagtatcaaatgactaatgataaatcagtaaagtctcaatcccatgagatacagaaaattgctcaagagtcatacatagctgtgataactaagattaatatgattggaggatcagatggatggtgggtagacactggcgcctctcgccatgtctactatgatcgtgctatgattatacacgaatgttg

SEQ ID NO: 20538 - DNA, 1046 bp, Glycine max
  Clone ID: PAT_MRT3847_118551C.1
ttcattgccaccaaaggtgcgtgtagagggaacttaatttgatttggtgcaatgggggatttggagaagaagcaagagagggcaatggcggaagacgtcaaagagaggttggcggcgggcgcggcgcatatatcctcatctacacgctgagcgagtacgacaagcgtactgggaccaagctcacccttgtcaaggtcggcatgggcgagactcacgtcaattgcggcaccaactgccgtgtagcgctcaaagccaaggatggatccgccacggccagttgcgaatccatcgtctgggagaagccctggctccatttcatgaatctcactggcttcaaaccccttcattatcttagacccatacttttcttcactctctctcttatcatatttcatgcgggagctatctctgttctttctcaataaaggtccctgtcatgtgctaacgaacctcaaaatggatgttggatcatggatgcctctattctctcgctctcgggtttttctggaaattttgtttgtggtttctgcttttcaggttttcatatttatttctgtgggcgattcgactttgtaatttcaatgtctaagtgtgtatttagttacccatatcaatttgaaatagtaatttaatgattttgtacctgtaaataaatatgttactcctcttttttcattttaatttaaattgacataaccgagtaaatttttttttaagtgattttgttaatatatttcctattttattccttttaaatgatttgttttcacataattcttcaaattaactatcataaatttattctctcacttttaaagtttgcactaacaagttctcttattggaaaacaaaacgttttgtgagatacaaagtattgaaacttctctccatgcaacaattcatgttcttttggttgattggtaataagtatacccttggattttttaattatttattatctaattttatgaaaaatatataaaataattaaaggatacaaaggtgtaattgagaaaaaattaccttgaaatctgaaaatgacagat

SEQ ID NO: 20539 - DNA, 2682 bp, Glycine max
  Clone ID: PAT_MRT3847_118552C.1
cccacgcgtccgcccacgcgtccgtacggctgcgagaagacgacagaagggggggaaaacaagaacaagaaactaggtgaggttgggtttcttttagagggaacacataaccattaagataaggaaccgcactttattattttatttatttggtttagctttgcttgtgaagttggcttcgttttctgcaattcccactccacaaagccacacccttcatcaccccccagaaactaacacaaaagcaaaaaaagaaaaaaaaaaggagaaaaattataacaacacattatttttattaatattgttgtaattattgttacagttttcatttgtcttgtccctttatttttcgatttgatctgaggctcttcagagttgcagaaaggcacaccaaagttgcttcactttcttggagtgtggtttctctttgctccaagcaaccacacacacacacactcaacttgtggaatccatagccatggaagaaggtttctcgctctgcaatttcgtagccatttttatgctttgatcagtaagtaagaaaaattgtagaaggggattttctcatcaaggatttcttaatggggtctcctgttaatggagtttattcttcatcagaggttcataattcagtttctgtggtagatcatgatcctccttcgacatctgggattccccggtcttctcggcctccattaagagcacctaggaattatggggcttcttccagtcaaaagcattcctatcaggaggctgacaatgtggaacgggacagaatgcccaatatggagaagcagtattacgacgctaacggcaagtctgacaatgcaagcctcaataaagctgttgaaagttgtttaggaaagaatatctcctctatggaaacaaaactaagcatcaagcaaccattagatgcttccaagaattgtgactctggtggcgtgttagaatctgacaattgcaaattaggttcatcaaaaggagttgttgatccaacaaagagttactgtcaatcggagattactttttgtccaagtcctcagaatagtttctattcagaagccaaggaaagttttgtcaatactggagccagtgaatgtgtgagtgttgataagtcagttgaaagtggagaagttactaattcctgtgaatttaatgagagcagaaagaccagcatctgtagagggagtactggaagtgacgttagcgacgagagcagcactagtagtttgagcagtactttgtataaaccccacaaggcaaacgatataagatgggaagcgattcaagccatccgagtccgtgatggggtgttggaaatgagacatttcaggttgttgaagaaattgggatgtggagacataggaagtgtatatctagctgagttaagtggcacaaggacttgttttgccatgaaagtaatgaacaaaaccgagctggcaagtcgtaagaagcttgttaggtctcaaacagagagagagatactgcagtctttagatcatccatttctacccactttatatacacactttgagactgagacattctcctgcttggtgatggagttttgccctggtggggacttgcatgcactaaggcaaagacaacctgggaagtacttttctgagattgctgccaggttttatgtggcagaagttctccttgctttggaatacttgcacatgcttggggtgatctacagagaccttaagccggaaaatgtgttggtgagagaagatggtcatataatgctatcagattttgatctctctctaaggtgtgctgtcagtccaactcttgtgaagtcatcaaactctagcttggagacaaaaagctcaggatactgcattcagcctgcttgcattgaaccaacttgtgtaatacagccagcctgcattcaaccttcgtgtttcacaccgcgctttttctccagcaaatccaagaaagaaaaaaagtcaaaaccaaagaatgatttgcagaatcaggtgacccctctccccgagcttattgctgagcccacgaatgctcgttcaatgtccttcgtggggacacacgagtacctggcacccgaaatcatcaaaggcgaagggcatggcagtgctgtagactggtggacatttgggatattcctatacgagctcttgttcggcagaacaccgttcaaaggttcggctaaccgagcaacgctattcaatgttgttggccagcccttgaaatttcctgaatcccctacagtcagctttgctgccagggacttgatccggggcttactcgtgaaagagcctcagaatcgccttgcatatagacgtggggcaacggaaataaagcaacatccattctttcataatgttaactgggcactgatccgatgtgcaaatcctccagaagttccaagacaggccatgaaagcacttgcagctgaaaaggtgcctggtgtgaaaccttctggtaactatttagatattgatttcttttgatcttaatgtctgttttctcctttgaactaatttcccatcttttatttgtgttgtttgcccatggttctttcctttgtataaaatgatgctactctttcgtctacattgatcaatgcttgtaattgtccatgataaacttctgtaagaaactccaaaatgcattaaattgaggaacaaagtttctggtctcttattttcacaggag

SEQ ID NO: 20540 - DNA, 338 bp, Glycine max
  Clone ID: PAT_MRT3847_118553C.1
atcattcccatctgctattacaacccctttttacaagcctccatcaaactggtctattaaacgggggaactttcaaggagaaaacatggcggttaaagaaagctccttatccaacatgcactaaatgacttcgcacccatcaacgctccttttagcctataagtgcatcttttttcctataccgccctttctctgcttctttgctccattattgatccttgatgagtcacgcatgaaatggtgggagtgtgtctaactgatccttcttgcgatcatgttacttcttccacaatgacgatgagtacatctacgaattctctaatcaaccctgtaataac

SEQ ID NO: 20541 - DNA, 486 bp, Glycine max
  Clone ID: PAT_MRT3847_118554C.1
ccaaaaaaaaggccccccctttttttttggggacaaaaccgggccaaacaagggaattaaaccggcccaaatcccaaagagggcccttgcataagggttttcccccccccataaccacccgggggcgggggccccctgaacccccccccaacccccccctgaaaaaaaaacccgcggccttggggggttaaaccgggggcccctggcccgggattttgattggggggccttttaagggggtttaaaaatggaaaaaggggttttccttgttaaaaaaacccgcccaatggggaaagggggggccaggccctcgagtcaggggcccccttcttgaaaacaccctgggtttcccagaagcacttgttaatgtccccccactttttttggccccttttggcccccctttggacccccacccccaacctccctggggaaattccccccaaaagagggacctgggggcccccttccttcccctcatggggg

SEQ ID NO: 20542 - DNA, 230 bp, Glycine max
  Clone ID: PAT_MRT3847_118555C.1
gaaattaaattacacaaatttgggggagggagatattatgggtatggccatccattattaaaatttaatttattttgtcagttttaaactattcatatgatattttatattatgtgagaactaaacacatgtttttttataccttttatatttactgaaatcattgttttttatttaaagtgagaagagttcctttatttgcgaattattctcaatttcatgtcaatttt

SEQ ID NO: 20543 - DNA, 414 bp, Glycine max
  Clone ID: PAT_MRT3847_118556C.1
gttgatgaggaggattcctttgaggaagtttctgtaagtgcagcacttaatggtgatgagggttaggactatatggaaagaattcctcttgccacatgtgagggttttcctcatgtactatcacgcaaaaatggagaaaacggcaaaaggagatttgtctctggggatggtgaagagatgacactgattccgggaaccagtgttgaagaggctcacaacaagctaatagctgaacttgagacaagtgaacctacattggctggcatcgaatgtcctaatgatgagaaactccctcgccgcataattcttgacaaacctaagacgcgctgcttcactattgtacctatggagtctaatcctgtggcccgacagaagtcattaaatcttgtgaggttcattatgaagaaaagggac

SEQ ID NO: 20544 - DNA, 1197 bp, Glycine max
  Clone ID: PAT_MRT3847_118557C.1
cctcacgtgagaccgaacctgtgggctagatttatcaaacgaatgtacatttccttagaagagtatctatccttgagaatgaaccaaaggataggattgtatcaaatgaatgtctaatgctgttgggttgatgaaattctgttggattttcaaaaccaaagtgcacaactagccctgcaatggactatgtcaatgccagagaaaactcatcaaattatggactgttttagcattagaatggaatcttcaaatttgtcccacgaatcacttcttgaccaagttcaacacgtcaccaacaagatgtaaagagccagtcacaaggacctgaaaacgaactgattgattttgttgcactctgtccctgagccatttgattgccaatggcaatgacgaaaacactgtgctatgttcacaattactggcactcatttccatatcatcttttagttcttcagaaacaatgtcagtacttctacaaaagaagataagattgggagttgggactgaatgcctttaggagaaagttggagtgagacctaataaggataacatgacaaattctccagaagtggtctgatcatgtgaaaaggttgtctgataaaaaggggtagaaaaatatcgaagtagaacttcaagagaatcgttaaacttaccagacaacaaacggtttattgaaatttggttcagttaaaactataaacattattatgtcatttgatccatgtaaccaatcccatctagtggaaaaggcttgatagttgtatgagtttttgataaaccccagtgccattgattgatcatttagccaaccccattgaaagacacagactagaatctgcacctggtagttgccatcaacatctatggttctaactatattccatagctacaaaacaatcttgaataatcactacctttgctgccttgcatgagattttcccaatcgccggacgcgtgggtcgcagtagaaattccggacctcacaaaagaagataagattgggactgcaggtctttaggagaaagttctccgatcatgtgaaaaggttgtctgattaaaaggggtagaaaaccatcgaagcagaacttccaagagaatcattaaactaaccagactataaatggtttattgaaatttggttcagataaaactattaacattattacgtcatttgatccatgtaaccaatcccatcta

SEQ ID NO: 20545 - DNA, 399 bp, Glycine max
  Clone ID: PAT_MRT3847_118558C.1
gctggtttcaaaccagatgatcccacgtacaccatggttattgattgcttttgtaagaagggtgatgttaagatggggttcaagttactcaaggagatgcaaagcgatggacatgtaccgggagttgtcacgtataatgcactaatgaatggactgtgcaagcaaggtcagatgaaaaatgctaaaatgctgttagatgcaatgcttaatgtgggggtggctccaaatgatattacatataacattttactagacggtcatagcaagcatggaagctctgttgatgttgacatatttaattctgagaaaggacttgttacagattatgcttcatatacagcacttgttaatgaatcaagtaaaacttcaaaagatcacctaaagagatgattgctactg

SEQ ID NO: 20546 - DNA, 193 bp, Glycine max
  Clone ID: PAT_MRT3847_118559C.1
ctggatctcttactccgcactattcaaggcggtcaccatcgcgtgtggcgacctactgaggcgcccagctgtcagccgcttatcatctcacaaagcgtgcacttgaagcgctcagcaaccctgagctgcctgttggcagacccgcaccggctaataggacaactgtactgatagctctggtgctgattgttga

SEQ ID NO: 20547 - DNA, 246 bp, Glycine max
  unsure (1)..(246): unsure at all n locations
  Clone ID: PAT_MRT3847_11855C.1
ggctcgcggggtagaagctcattcactcatcactgtccttgacaaaacaaagttctcaggctggagggaaaggtggctcttatcactggagcagcaagtgggattggtgaagagacagtgagatcgccccccgcaacacggcgttttttttttctctacaganagacaagaggaacaagggcaccgagttgctgcttttaaagggtcagtttgcagttttactttcatcttatgtttttttttttt

SEQ ID NO: 20548 - DNA, 383 bp, Glycine max
  Clone ID: PAT_MRT3847_118560C.1
aacaaggactcactgttttagcagcggacctctctgagggtaacatattctgggggagagtacgtccagacgcacacatctaggaagaaaattcacagcgatcatgatgcacgagccaactgaatctggagactcagcaggacaggccttagacgatctagaaaataccaacgatgatctgaaaagagatctgagacaagaacccatcaactcccttgttcacattgatggttctggcagcctaaaggctgactgtatccatgtcccctacagactaagggaaggattccggaagattcaagtcaagcccgacacagaacatgatagaaaagttatggaaaagatgaagcttgatcgccaccagcatactttaaggccaccca

SEQ ID NO: 20549 - DNA, 500 bp, Glycine max
  Clone ID: PAT_MRT3847_118561C.1
cttattttcttttctttcttgttggagggaataaaaagcctaaacttgacttggggtgaacatagaatgcatataactcgttgataaaacaaaggctttggtgatcatcatgtaataaaaaagtgatttgataaatatagcctgggagtgacatccctcaggaacggacgaagagatccttgatctgcctgataaaaaaaagacacttttattctaaaaaaataccaaaggccagggattgaaaagagtttacaggacacattctaattttacactaggtgaatgtgaaccagcagcccccttttaaaagtttttttttttttttttataaaaagctaaccggcttttgtgaccgatcgaaacatatcttgaaaataatcttcccccatcgggctccagttaaaaatcaacttcgtaccgattcgattcttcacctttttaccctaacaattccacacaattgctaattattattccaagattaatacactccatcgttt

SEQ ID NO: 20550 - DNA, 702 bp, Glycine max
  Clone ID: PAT_MRT3847_118562C.1
cttttgtctcttccccatcactccctcacctcactcacacacacacacacactcttttaaaactcccaaaccgcatccacattgatacctcttcttttttcttgtgttccaatattatctctctcactatatatcttcacctgcattcaattcaattcccttcggacgcgtggtactctttgagactctcttacataccccaaatatgggttctaaagcccgttggcgccagagttgggctccacagcctttgacacccttaatggaaggccctggccctgaaatgcaagaggaaggaaccaagaaagagagctcttgggaagtcataagggaatggttcaggactcagaagatctccccaggtggaagcttttcacaatcatcatcattctatggaaccattcatgccaagacacaagatttgaggttgttgcttggtgtcttgggttgccccttggctcctattccctcagcacatgatcccactcttagtattcacatcaaagacaccccatttgaaacttcaactgccaaatacattatccagcagtatttggcagccacagggtgcctaaaacaacaaaaggacacaaagaacatgtatgccactgggagggggaaggtgtgtggcggcgggactcagctgggaaaatgtcagtgttgggacaagaccatgatatggtgctttggcttggaaagctc

SEQ ID NO: 20551 - DNA, 349 bp, Glycine max
  Clone ID: PAT_MRT3847_118563C.1
gaacactgcaaatacaaagttgacatttaataaaccaaagcaacacaacgccacaaagtcctgaaactcggggtgctaaacaaaagtgataacaggggctccgaccaacgcaccacattgaaacacagttaaataaaagcgattttgaccccgcgggctaaaaacccagctttgggaacaacggtctcgagaagatgggggagacttcaaactttgaccgaaaaacaagcctcctcaaaaagaagacactcgagtccctaaaagaacccaccctttattgtaaccaacatcccttggggaaccagccgcgacaatacacttttttttctgggaagcctaggagaccttg

SEQ ID NO: 20552 - DNA, 558 bp, Glycine max
  Clone ID: PAT_MRT3847_118564C.1
atctttgagttacaaaagtttttaatttaccaacacgccaccaacgttcttggtgttaagattaactacatttaaatctttctttaaaaaaaaaactacatttaaatcaatagcttttatgactgaatttggacgttaactttttgaacgttagctcttgaatggtttcaaatgtattcatgattcgtttgttccagtactgggttgttttttaatggcttaaaagaaaacctttttgaagctataaaaagaaaagggagatgaagaacatgggaatgagtagtaggaaaaagatgttttcctattgtgaattttccaagcaatttagagttttttgagggtgtttgtctgtgggattctcttctgagcaaagagggttttggctcatgttggaagaccattttgtcctggggacgacgaggttgtcaactgctgaatacttcaggcagagccgtctgcctgaaaagtcttaaagaaagccttatttttctgtttgtcttttacatttgcagcaactttttgttttttagtttgtatttgatatcttcactggcataa

SEQ ID NO: 20553 - DNA, 348 bp, Glycine max
  Clone ID: PAT_MRT3847_118565C.1
ggtgacattgttttggacaccataatacacacattaattttgaaaagaaaaaggttttagagagaggagaaattatcaactacactagacgccagcaagttgtagaggcaaaattcaaaggtcaacaatttgagaccaatgagaggcttccaaaggaattcaattcttttattaattattattattattaattatgtaaaagaaagtgccaaagctagcccactaactggtttatccaatgtccaaaggaataatttattttctttttcaacttacaccaaagagtgacactttaatttgtccacattctatccgaggtggttactcccctgtataggaaccccctgg

SEQ ID NO: 20554 - DNA, 287 bp, Glycine max
  Clone ID: PAT_MRT3847_118566C.1
gtaacaaatgaaaaccgaagcttgaacactcttagttatatcactacgtgtgcatgaataaatacatagaagctcaaggcttccagttaaaaaaaaaaagcgctatttgcaaaacaagtcagaacttgcaattaaaggtctgacttgaggaggaggaaaataatatggttctaccatatgctgtacttttacaatttgagacaggtaagtgggatctttggtatacgatatgtatacacctgatagttgattggttgggccaaagtactcactgatgtgaaaatggt

SEQ ID NO: 20555 - DNA, 342 bp, Glycine max
  Clone ID: PAT_MRT3847_118567C.1
ggctcgagcccccttcattctctctatgtgtatctttatatatacatgtggatgtaggtgtctatgtgtcgcgagcgagcctgacacaagcaaacggaaacaatatcaacaaggtgaagtggattccttactacacatggagatccaggacacattctacatatgtcatggatcaccaactttgctcatagatgaatgcattcatgccaggaagatccttcagtcatggaagagggacgtgtttcctgagagaccctcttcaacttgtgtcatctctggccattggaaaaccgcagctcccacggtcaacgtctgtgactgcattaacgacagcatctacga

SEQ ID NO: 20556 - DNA, 245 bp, Glycine max
  Clone ID: PAT_MRT3847_118568C.1
gcagcaacttagttatactcaacgaaggaggatatgtggagattaataaataaatgttattataagctgtgtcatttttcaaaactgcagaggctggatgagatataaattaaagaaactaatctaatgaaactaaacatatatggatgggggtgtgggttgatcagtcctataatatatatccgcatctattctagcttacaaaaaaaaaaaaaaaaaaaaaaaaaaaagagaggacccaaact

SEQ ID NO: 20557 - DNA, 289 bp, Glycine max
  Clone ID: PAT_MRT3847_118569C.1
acctttttatttttttgtgtttcgacacaaataacattttgttcatgcgttctcatcatgattgaaacatcacagtggttgtcgaacatagttatttgctatcaaattaagacaccggccttccctgtcccctcatgtcacacataatcttaccccactttaacacgaagtgcaaggctgaccctcgccagtttttatagatgccttccattccaatatcccttatctaaacgcagatgatcccatggcatacttttgggtccagctgcgtgcagtggccgtatacttg

SEQ ID NO: 20558 - DNA, 373 bp, Glycine max
  Clone ID: PAT_MRT3847_11856C.1
gttaatttggtacatttcttccaactggtttatgtcttttaggtatggaaccttggaaccttgcagtggttacagacactaacagagcacacatctgttgtgatgtctgttctctgctgggaccaattccttttatcttgttcattggataaaacagtgaaggtatggtatgctactgaaagcggaaacttggaagtgacatatactcacaacgaagaaaatgttgaaatgatgttttctcagaattgtgtggaatcaattcttacctctgctatcaatgttccagctactactcttttgaattaatggttttagaaaatataagaaatgtgctcaagtttctgatgatgaaattggctcagtattgcataca

SEQ ID NO: 20559 - DNA, 357 bp, Glycine max
  Clone ID: PAT_MRT3847_118570C.1
ggaagaagaagaagattggaatgtgaattgtgtttgttggacttggttggtgtgaggaaagagagatgggtggtgtaacttcttctatggcggcgaagatggcgtttttttccgcctagcccgccgtcgtacgaggtggtggaggaagcggcgacgggggcgttggtgttggaggcatttcctcggcgcgagaacgtgagggtggtgaaattcgggactcgacgtggaagtgagattgttggggtgtatattgcgcaccccatggccaaatccaccatcctttactctcatgggaatgcggctgatatcggacacatgcttgagctcttgtggatctaagtacccacttgcgtgtta

SEQ ID NO: 20560 - DNA, 692 bp, Glycine max
  Clone ID: PAT_MRT3847_118571C.1
atgattcagttgaatcagttctgcttctgggcctgggtcggggaattcactttgttttttctctctccctctctctcttataagtattgttacttttttttttttttaattttaaatatcaaatatgtaataaagagccataatgaatggtttttaggtgttttgaattaaaattagaattgagagaggtgttggtatggacgaggggtttctcgtgtagagatgtgatagacagtcataacataacaccgcggcacagtagcattattatgaggtggatgtggtatcagtgtcacgggggtgagggtagttaaagttggtgtcttaaacattaggattggtttgggggtgggaaatgggatgagacaggcaccacgcagtatcttcggcccctttggcccactccatgctgtgcctcattttgtttttcttaattaaattgaagaaacagaaggagataagctcaatgaaattgaagggctaggtcatgtgaccatcccaaaatcacgtgctgtgatgacgtagtttgaagtgtgagtcgtaataggcaagcaggttgttgtttcaaccattgggcctgagggtgggtgagagtatgaccaattcgttgtcagtgacctcagacacaaacagattcagtgctaatcaggcggagccagtacttgcttttaatattacttactgatactatt

SEQ ID NO: 20561 - DNA, 629 bp, Glycine max
  Clone ID: PAT_MRT3847_118572C.1
tagtgaaaggatttggggttgaggaggaaaaattaagaagaaattatcacagttgacagacctgtcagtaaatgcatggatgggagagaaggcatggcatttcctggtggctctgttccatattacatgcagcatagaggaggaggggttagtgggtctggtccaggaactgggacacagagtggagggtttcaaccaccctctggctttagagctttgtcaaatgtctctccaggttctgcatttaaagtagagtctcattcttattctcattctcagtctcagcctcagcatgctagttttagtcatggcattaacataggttcctctcctgatggtggaggtggaggaccttcttctggtgagcctgtgaagaagaaaagagggaggcctaggaagtatggccctgatggatctgtttcattgatgctctctcccatgtctgccactgctagttccacgccgggatcaggcacttcttcggagaaacggcccagagggcgcccacctggaagtggaaggaagcaacagcttgccactctacgtgaatggatgaacagttctgcaggactggctttttcacctcatgttatcaccgttggagttgacgaggacattgtagcaaagtt

SEQ ID NO: 20562 - DNA, 737 bp, Glycine max
  Clone ID: PAT_MRT3847_118573C.1
aattattatgtttgagatacatgcatccatcttgtggcagtaaattcattgaatgaaactactctttgtacataggtaagaggtgacaactagttaccccaaatccactatggcttaatcatacctatatgagtaagaatcaaatcattaattaaaaaaaactccattatatctgcattttatgtagtacttcctggtgtagcctaccttttgggataataaaatttccactaaccatgaatataaagacatctataattttaacatggggaataaagatctgttgggtttgcattgcaaaagaacaaggtgttgcaaaataaaccaacaaatctagattactagcaagatgttttaagggaattctagcatccacaagtgcactgcatgctgcatttattgcacatggaagaagttacatattaagtcaagaaaaaagagcaaatgatccagaagcataagttatgaactgcatcctctgaatgcatggcattaacagggtgaacaactagtatttccttttggagaaagctgatttgatttggcctttggaataaacttggcacccgatcaagctttttatagcttcttctactaccaaagcattcatgacatttttaaaagattcatagcattcaatcacaacacacttcatatattcatctgcacatatgcatctccaaagatcagagtctttttctcgaaattgagctgccatatccaatgctatgggaatc

SEQ ID NO: 20563 - DNA, 1891 bp, Glycine max
  Clone ID: PAT_MRT3847_118574C.1
gattctttgtcttttcttccccctttcctttccaccaccccactcctacactgcctgcattcctctgtcaaaaccctagattttcaaatctatggttttgttttcttaacctgttaccgacatgattcagaaactcaactcccacccttgctagtttcagttttctcttctcaatctaagcccctgcgtttttttttttttttttacattttccctcgctaacctctgccatggggttttcaatgctgattcattttcacctctaaaaccacttcctctcttaatttcttcaacttttgggcattcaaaactcatcttccttgtggtgtttctaggttaaacgagacccttgtacgtgcattcacttgacaaaatctccgagcttgttacttgaatatctggagctagcttctgggctttagatcctcttctttcttctttgcattagggttaaagatctattttttccatcattgtgaaagctatttgcttttgactagtagaagggtacctagctaaacccctgtttttacatcttcactagtttcatagtttaagaagttagtagcaccagtgaaagggtttgaagttgaggaggaaaaattatcacaattgacaaacctgttagtaaatgcatggatgggagagaaggcatggcatttcctggtggctctgctccatattacatgcagcatagaggaggaggggttggtgggtctgttccaggaaccgggacacagagtggagggtttcaaccaccctctggctttagagctttgtcaaatgtctctccaggttctgcatttaaagtagagtctcaatgcctcaacatgctagttttagtcatggcattaacacaggttcctctcctgatggtggaagtggagtgccttcttctggtgagcctgtgaagaagaaaagagggaggcctaggaagtatggccctgatggatctgtttcattgatgctctctcccatgtctgccactgctagttccacgccgggatcaggcacttcttcggagaaacggcccagagggcgcccacctggaagtggaaggaagcaacagcttgccactctaggtgaatggatgaacagttctgcaggactggctttttcacctcatgttatcaccgttggagttgacgaggacattgtagcaaagttattgtcatttgcacggcagagaccaagggctgtgtgcatcttaacaggaactgggacaatttcttcagtcactctgcgccagcctgcttctactagcatcggtgtcacttatgagggccgatttcaaatattatgcttgtctggttcatacttggttgctgaagaaggtggacctcacaatagaacaggtggcatgagtgtttccctttctagtcctgatggtcatattattggtggtggtgttactaggcttgttgcttcaagcccagtgcaggtggtagcatgcagtttcgtatatgggggctccaagccaaagactaaacaagtgaccactactactacaaaagataccagttcagagcctcagagtagtgataagttagcttctccaggcagtgttcctccgcctaatcaaaactacacctcttctcctcctgccccaggcatttggcctgcatcatcaaggccagtagaggtgaaaagtgcacatgccccccctggtattgacttgacgcgtgggtgaagaccctttattattttataaaagacattgcagttttgtatagagatctcttgttgtaaatgaatcgaatttgtgagcattgtgactcttgctatctttagttcgcgctaacctatgctgtaaccaatggattggggttaagtaacagtcttgactatgcgaaaagtgtttgatggaatggaaacgaaaagtgtttgatgg

SEQ ID NO: 20564 - DNA, 954 bp, Glycine max
  Clone ID: PAT_MRT3847_118575C.1
gaaatttttgggagaaacatcatctaaagctccattcagcacagatgagtctccatcagcagggctattattctcacaatttgagggtgtgatcatctgctgcacggagttagtattttccttacaatttttttctagacattggagagtgctatgaagttctgcctcaacggatgatttacccatcctgactcttgctcgtttcacaaggggcaagggttcatctccatcttgttcaaagcatctttcttttgaatttccacacatattttgtgagctttgactggcattctgcacaccagtctcttcctctggcctactgattggcttaaaagcatcattagctgccctctttctattgggttttctttttttcttattaactacaggttttattttttgattattccctttgttcaactcaacttctggacattcaatagcttcagatagttcaagtttaaaatttgaatccattgtactaccctcattcaagctaaatgtatcagaatcagttgtgataatttcagaactgttgtcatcaatgctaccattcgagacaaaagtggatgactcaaaattatcacagccagaaagatcaggtgatttcctgacatttctattcctttgtgcacatacactctgagctgcagtggttgatgggttaccagcactctttccactatcattacaaggcaacacacagttttgagcacgtgatgaatttctagacctccgtactgaggtatgtctatgtgttacacagccctgcagacacaagtcacccatagatctttttcgagaagagtaagtaactggcttgggagattttaccacagccatcttatcagcaggcttccctaacaatgcctccttattatgagattcatctttaagtacaggggctgagtcatcctcagctgcacataccaccctatgtttgtggtaatagaa

SEQ ID NO: 20565 - DNA, 206 bp, Glycine max
  Clone ID: PAT_MRT3847_118576C.1
aatccccgacaagcggaaacccttgtataaagggaaaagaccctttgttaaaaaaggaaatggtttttttactttacgggttttatttttaccccggaaggggttctaaaaatgggttggggaactacttggcttggtccctgggttttttttttttcaaaaaaaaagggttattcttgattttgcacacttgttgtttaaggaaa

SEQ ID NO: 20566 - DNA, 356 bp, Glycine max
  Clone ID: PAT_MRT3847_118577C.1
ccacccttacctacagcattcaactcgagttgacgttcacgctttcaattttgaagcatcgctcgaataatactctttcccaaattctctctctctctctctctcggtctctctccctgtcggggagggtctctctcactctacacaaccgcttctaccaaaaagaacaagctgaaaagcgcacactcttcacacacactatcaataactgcctaatgaataatgcagacccaactcgattaatgcatctatccaactaaagcctcccatcgcaagcatagacctgccatcttagacccatgtgaacctcactgatttaatccctaaccacaccttccattttatacctataaaac

SEQ ID NO: 20567 - DNA, 252 bp, Glycine max
  Clone ID: PAT_MRT3847_118578C.1
tcttagcctcatccaaattaccctcattcacaaaacctttgatcacggcattgaagtggtttggagagattgcaaagtctgagtatgaccctgataagaacacctactctatcattgttcccttcctctgtgagaagggtgatttcaagactgccattgagatgtgcaaggagattttcaacaaccggtgccgtgttgatgcgacgttgctgcagggcgtcgtggataagctggcgagcgagggcatgatta

SEQ ID NO: 20568 - DNA, 250 bp, Glycine max
  Clone ID: PAT_MRT3847_118579C.1
ctcgttagtacacgatggattggtccggctgccattgggcgacaagcggccatagctgcgattagacgcctgatgggtccttttgcctgaccacgatccatggcttcgctcctcttctgcgaagcggacccactttgtcacttccctcaagacatagcctaaactgatacggtctacccctcattacatcgttgaacaactcgttgcagctctgtcatgtgctgggaactgataaaaccattcccttttt

SEQ ID NO: 20569 - DNA, 383 bp, Glycine max
  Clone ID: PAT_MRT3847_11857C.1
ttaagtaagctaggagggcgggtcgagttctaagttctaaattctcattccatttctttgtgcactttcttcctctctctggggtgtcttactgatttggagggggccatacttagtagccaaagtgcaagagaacaaaagggtgatgtttcgtttgttttgtgagtgttgagagtgtgagacatggaagaagcagagaaagagttagagagaaggagcaagtttctgaacagtttgatacaacagaataagaaagccgccatatattcagagcatgaacattataatagtctcaatgttgatgtcataacttgtgacatgcccctcccttttcagataccttccttccaatgcgcacgtttcttcttggagtctatgccacc

SEQ ID NO: 20570 - DNA, 169 bp, Glycine max
  Clone ID: PAT_MRT3847_118580C.1
aggaaagtgcacaagcaacggcttagcacactccagcgaggacctactgctcaagaggggcctgatggagggcgccgtgaccaccattcactggtacaccggcgaccagaggctcctcaacgcgagccaccagaacctgtggccccccagagcggcaactactaacatt

SEQ ID NO: 20571 - DNA, 324 bp, Glycine max
  Clone ID: PAT_MRT3847_118581C.1
aaacccaaggactaatttcacattttgggggtaatatattgaaatgggggataaaatacaagttttagacccaagaatccaaacaacaaattttttcctttctccaactcccaaaacaaacttttataggaaacatgagatttttccataaaaaaaaaatttgatccaaacttacagggggctataggggttaatagacatctgctgcaggggctgggggagcatcagttgggggagataacacaacaaaggccccaaaaaagaattgggaaaatggcagggaagttgaacaagaaagcctaaaaaccatttttggccaaacct

SEQ ID NO: 20572 - DNA, 267 bp, Glycine max
  Clone ID: PAT_MRT3847_118582C.1
ctcaaacccactgttatggtgcgcgtcgccgtagccaatctttccccaccaaacctcaacatcgtgccagcgatactcactcgaatccaacccccagttgtccccaacgatgtaacccacaccagccaggacttggtttttactacgagctctataagcgatgaccttaaacaacggagcgagtgtttttcctctatcgatctggtttcgttggatttggattgaactctgataatgtggtgtgcgatgggagattccggtggccat

SEQ ID NO: 20573 - DNA, 414 bp, Glycine max
  Clone ID: PAT_MRT3847_118583C.1
tacaacctttttttttcccagaaggaaataatgacagaaagcaagatttcagccatgaatctgacgcacgtacaaatgcaaatgcaagtggatcagtgggtggtgccaaggttggagaccacgaacaaaatgacaggctccatgttggtggacacaaaggaagactgggatatgcactattgataccataagtggagccagttgtgcaagctcaaagggctgaacattactccacatgttacctgacgaggttgataggcaagagggaggtgactcacagaggcgaacacgaaatgaggagtgtatgctccagtgtctgcaaaaactaatacggtggctactccgcaggaatggcacctggaacgaccacgggacaaacatcctagcgaattgactacaactgatgatacacct

SEQ ID NO: 20574 - DNA, 275 bp, Glycine max
  Clone ID: PAT_MRT3847_118584C.1
gtcacacctgtcatatgtttcgtgtaatcatctggaaatgcaagatgcttatcttggcaatgtcgtacatgtgttacgcgagctgtatctgcacagtccatacgaagctcgccaactgacaaggacagctttgtctcatattgaatggctcgcaaaagctgatgtgcctaccatagcacagattgaagagttgcattcgatgcatagaatgatgaatgcttctgattcacatgattatcttgatctactgtacaacattgactagttggctttac

SEQ ID NO: 20575 - DNA, 451 bp, Glycine max
  Clone ID: PAT_MRT3847_118585C.1
ctttctttttttttttttttttttttttttttttttttttttttttttttttttttttttttttttttcttttttttttttcctttttcttttattcttaaaaaaccaaaacctacaatttcaccccaacaggggggaacctttttaaaaacacgtttcccaacccatttaaaaaccaggccaacccccaaatccacccataatacccccccaaacgcgaaccaatcgaaccacctcccttaccccaagcgccccactgtccaaccccccaaagaaaccccggggttctctcccagacccgggcgaacccttctcaagaacccaaccacctgctgaacccacttaatcaccacccatcgaaacttacgccccccccaatgactgctccttagaccccccacatccaaaacccccccccgtgaatcttccaccctaaagggcgccccattcc

SEQ ID NO: 20576 - DNA, 302 bp, Glycine max
  Clone ID: PAT_MRT3847_118586C.1
acgcttaatattcttgcatatacattaaaaactatattgacttaactgataagttcacattcaagggcgacttctccaactctgtaactgctgctacatctttacagatgcttagcttcatataccaacatcattatcccactggctataacttgctttacaattgttataaacgtaatgggaaatgttggacctagaacaatcaagaatataacatgaagagaggactcataaactaagtttgtactacacagtatataaccatcagcttaagcaaactagaattttatctacagcataca

SEQ ID NO: 20577 - DNA, 430 bp, Glycine max
  Clone ID: PAT_MRT3847_118587C.1
ccaatcccttgaacaatccccgcaaggcttagtactgaacttgacagtgggagctgtctgcaagtctttccaggaaaaaagtgaacttttcacaatgttggatgaactggtgtgttgatagtagggtttttattgtgcgttgcactgcttgtaagtctgctgaacttaagatttgggggagcaaagagggggaagggtgtaatgttcctcccagccgcatttttatccgccaaagaataatgggtttttttttttttgttacttttacttgtcagagcttttgaaagatgtttttttatcgctagtatattatgaagtggtacagggatattacggtgtataaggtttgtttaatccgggaaacctagtcttttagatattgataatagtctgatgatatcttaaatgaggaacctggctttttattgtc

SEQ ID NO: 20578 - DNA, 431 bp, Glycine max
  Clone ID: PAT_MRT3847_118588C.1
ggctcgagctcgagccgctcgagcggctcgagctctcaacaagtatcaccgggagacattctacactcatgatccagttgttggttatactgactacccttttcatgctgaagaatccaatgttgtagcatcttagggtagagagaatgtactatgctatgctaactacaataaaagaattggattgtgatttgaagtggattgtgatttgaagctgtcccctaacaagcaacaatgctaacggaattaggcactattgctgggttcctttacactaatcattcaagtatgttggtttggtatgggtgcggactggtctggtgtatactgtgatttgtgatgtatgctggggtgggctgttgttgctatcagagaggctcaacttttaataagcttttctttccctgcaaattcctatttgcaatttggtt

SEQ ID NO: 20579 - DNA, 667 bp, Glycine max
  Clone ID: PAT_MRT3847_118589C.1
ttttttttttttttttttttttttttttttttttttttttttttttttttttttttttttttttttttttttttttacaccccttacgggtttaacagaaaaggggggggggggccccccagggggtaaataaaaagggaaaaaccccttccttaaaaaacccaaaaaaaagggaaaatcaaaaagtttttatttttctttttaaaaccctccggaaaaaacccccaaaaaaatacccgccccagggaaaaaaacataaacatcggccaaaaggagcttaaaaaagggggctccccggttttaaaaggggaccaaaaaaggggaaaagaggaaaagacccttcaccttttaagggcaacggcctaagggggacccgggttccaggccaggggggggggcccccaaccccacttaacggaaaaaaggtttttcggcccctttttcgcccggaggatttggaaacaaaggggggggcctggaaatcaaaagttaaaaaagtttcttttctcccgggtttttcctcccgaaaaacccatttttggaacctaggggttttaggtaaaagaaaaaacgggttaatacccatgggactaaatgggttcaaccagggaaatgccgccggccctggaaatttccccttggcccataaagggcctggggggggttc

SEQ ID NO: 20580 - DNA, 606 bp, Glycine max
  unsure (1)..(606): unsure at all n locations
  Clone ID: PAT_MRT3847_11858C.1
ggaacccttgaaacccttgcagtgtttacagacaccttaacagagcacacatctgttgtgatgtctgttctctgctgggaccaattccttttatcttgttcattggataaaacagtgaaggtatggtatgctactgaaagcggaaacttggaagtgacatatactcacaacgaagaaaatgtatttgttaatttaattactttttcccctggatagttgtttctattttaatatgatattgcttgtccaggttgaaatgatgttttctcataattgtgtggaatcaattcttacctctgctatcaatgttccagctactactcttttgaattaatggttttagaaaatataagaaatgtgctcaagtttctgatgatgaaattggctcagtattgcatacaaccagataggtacttgaccagaaaggggcataatggcatatagatgttgtagcttagtttttaaagtcattccttggtgataatactattctaaatatttccatcctcacaaataatgaggcataggaaccagatacaaaataaaaaatgactcanatctggatatagcaactaaagcagccttgtatagggcagaattaatgag

SEQ ID NO: 20581 - DNA, 173 bp, Glycine max
  unsure (1)..(173): unsure at all n locations
  Clone ID: PAT_MRT3847_118590C.1
cacctcgtagtctccgcagttggggtttagagacaactgcaactccgttaataacaacacaacactcaaaacccaaaacactttatactttcttcacttcgaactcgcncttcgtttccctctctatctctccgccacgcgccaccatgtcagtctctantccgtcnagnttg

SEQ ID NO: 20582 - DNA, 219 bp, Glycine max
  Clone ID: PAT_MRT3847_118591C.1
taaggacccacttttcagaaacccaagaatcaactcacatttgggtttcatttctctctctctctctcccaatcacactgatagaacctgcttgctagatccatttttttgcgcagaacactgacgaaaaaaatggacacaatgctgcctccgaaccaagcagaggaagcaatagtcacaacaagcctcaacgagacagagagtgaagtttgtatgagg

SEQ ID NO: 20583 - DNA, 422 bp, Glycine max
  Clone ID: PAT_MRT3847_118592C.1
aacaaatctcctctcatcccttcacaccatataaccaatacccattcttgttacaccccaaacaccaccaccaccactcctaacacccttaccctaatattccttcaatactcaatctttaatattgctttcaaccctcaaccatttcgtccactgatcatcaaaaaaaaaaaaaaaacttcaaaataacggacacgttttgtgaaaaataagaattctaaactctcgattctaacggctgttttgagagttcacaaacattaaatcaaccacgcacctagaacgaaattgagacctcaaggctccaaccgaaaaagactgaatcttcgatcaggcccacgatgtctaacaagataattctccgacaggcagatggatcgacaaaccggcggcagccgctgctgctgcagcggcgtccctcg

SEQ ID NO: 20584 - DNA, 364 bp, Glycine max
  Clone ID: PAT_MRT3847_118593C.1
ctcatacgtgcgatttgatgtgtggctgagtgaagtgatgagagatgtgaatggtgttggacattttcacggaacatcctacgaaggtgttaccattcatcagctaagtctctaacacagtatcacctacacgggcttacacgcgatcatgtcgatttcgagcttttgctcggcttcagcagataatatgtgtgtatagctctgactactttcttgaaactagtctctgatggatatcatgccatggctgctgattatctagtatatattgaactgctagatcaggaagtacaatttttgatgtctcctttattttggatctgatgcttatatgattactttgatcaatgcaggaccttgagca

SEQ ID NO: 20585 - DNA, 782 bp, Glycine max
  Clone ID: PAT_MRT3847_118594C.1
tgaatggggagtggtagtgaatcggggcacgcaaagggaaaggaaaattaatcccctcattattatatgacatacacttacacgagttattattattatttatttttattttgattcttaaaataccaaatcagaactataacctaatctatctatctagttttgtttcacatatctgaaaaagaaaagaaaaccttaggggaggggaagtaacgcaaaaccgaaacgctcaacattcacattgtaaaactcttcatcatagcaattcccttccttttctccctccctctctctcttggcaatccctttcttcttcgctgtcaggtgcaccttctataataacagtaagtcagtggtggagagttatcagaaatagatgaaacagcagttataaatttataatgtctggactgatcgaaggacttcctgacgctgttgcaattaggtgccttgcacgtgttcccttctacctccacccagtgttagagcttgtctctcgatcttggcaagcagctatttgtagccctgaactatttaaagctcggcaggaggttggttcgactgaggatctgttatgtgtctgtgcttttgatccagagaacttatggcagctgtatgaccctatgcaagatctctggattacacttcctgttcttccctcaaagatcaggcacctttccaactttggcgctgtttctactgctggaaagttgtttgtgattggtggtggaagtgatgctatatgttgatcctttgactggtgaccaagatggttgttttgc

SEQ ID NO: 20586 - DNA, 1030 bp, Glycine max
  Clone ID: PAT_MRT3847_118595C.1
gtgataagcacgtgaagaaggacagcgctagcgagaaacaaaccaaccctgaaatccaaatccgaatccaaccctctccaacgtcactctcaccctctctctgttttctgtctcttctttcttttatcacacaacaacatacacacgccctcttcttcttccttgcatggactaactcagagactaaaccataccaaaaaaaacaacatgtgttccgcagagaaggacgggatcatgctcttcggcgtgcgcctctccgtcgtggataaccaccccacctccttcagaaagagcgctagcatgaccaacctttctcagtacgagtctccaccaccgcacgatcccaacgcagggtatgcctcagacgacgtcgttcacccctcccgtcacacccgcgaacgcaagcgaggggttccgtggacggaggaagagcacaggttgttcctgctgggattacagaacatcggtaaaggagattggagagggatttctagaaacttcgtgaagactcgtacgcctacacaggttgctagtcatgctcagaagtacttcctccgccgtcacacccagaaccgccgccgccggagatctagtctctttgatatcaccaccgactcggtgatggaaccgtggccggagaaggaagaggaacaagtggtgttgccgtcagctaggtcgaaaccggttctgccggtgcctccgtcgtcgaagatggctgagttggacttgagtgggaagtcgctgtcgctgaagcttccggtatccaagccacctatttctaatgagaattttggcgggataccattatcggtgttgcttgaaggttaattaaatgcggtcttgattgaatttttgcatgtaaaattggaaatatactagtattattgaagagttggaatttagaagagggttagagaattattaattattgaaatgtatgtatatatttttctttgatgagttttctcttctttttttttaatgagtaaatgtatgtttatatgaatatgattatgattgctgccaaaaa

SEQ ID NO: 20587 - DNA, 1944 bp, Glycine max
  Clone ID: PAT_MRT3847_118596C.1
aaaagacgtgggcggacgcgtgggagaaggtgcgctttgacaaacttcaagctgaaagcattaggttcatggcaagagaaatactaattctccgcacactggaccacccaaacatcatgaaattggaaggtataatcacttcacaactatcaaatagcatataccttgtatttgaatacatggagcatgaccttgctggtctagtagcttctcctgacataaagttcacggactcacagattaagtgttacatgaggcagctattaagtggaattgagcattgtcaccttaaaggtattatgcatcgagacattaaagtatctaatatattagtgaacaatgaaggtgttctcaagatagcagattttggattagccaatacccttagtccaaatagtaagcaacccttaacaagtcgtgtggtgactctatggtatcgtcctcctgagctcttgttgggatcgacgagttatggagtttcagtggatctatggagtgttggctgtgtatttgctgaactttttctagggaagcccatccttaaggggagaactgaggttgaacaattgcacaaaattttcaagctttgtggttctccacctgaggagttctggaaaaagaataagcttcctctggccacaatgtttaagcctaaggctaattacgaaacctctcttcaggagaggtgtagaggctttcctgcaactgctgtaaacctactagagactttactttccattgatccttccaagcgcaggactgcctcctctgctctcatgtccgagtatttcagcaccaagccatatgcttgtaatccgtcacacctgccaaagtatccaccaagcaaagaaatggatgccaaaaatcgggaagaagtgcgcaggaaaaagaatggaggtaaagtgagagaggctgtgacatcaaaaaggcaaagacaagtccacaaagtttcccatgaccatatcaatttcaaccaaccagctttgaaagagaatgtttctcaaaatcctggtacaaatgatggtagggcatatgttacaaaaggaaaagtagcaggagctatgcataaagagcaaccaaagccttcatatgatgcaaagtcagaggctgcccaagtggtgaatggttgcaatggatacagtgtatactcaggaccggcaccaatctcgggatctagtggctttacatgggctaaaaggagaaaaccaaaagcttcatccatattgtcagatggctcaagaagcaaagtcagtgctctggatccaacctttgcaaaaggtacatatgatttaacagaacatgggatagaagtttcagaaaggaaacatagttataacacaagccatcgggatgagacttccagctatgtatcaaaaaagtaccaggctcctctcgttcaacaaaaatcattcgatgtagctgatacatacaactcaaattattacatggactttgatttcacagataaaatggatgctttgatagacactcagggccacagaaaacatgatgagccagtggagcaatcagtaccgaatatgatcccatcaaataaaaatgaggagttgttgcattggaatgaaaatgatatgcgacaatctcttcgtaaatcaaggttgggaagagaccaataacacaaggatcataggagtggattaatcccacatctacaaaaggggtgctcggccaaacattgtggccattgttgtctgaaccattctaacttctgacttcagctctcttgagttgatatctttggcgacagtttccccctccttttgttcactagactagagttaagtgttcatacagatttatagtacatacatactaggactaacactgaattatgtataggattacagcaacaaattgcaaagcccacgtgtaatgtgatatgtttaaagaaaggttaaattttctaatagaatttttttccttcgc

SEQ ID NO: 20588 - DNA, 337 bp, Glycine max
  Clone ID: PAT_MRT3847_118597C.1
aattcgcggacgactcacgcctctcttcatgcgtccatgtgagtctaatatttgcaatgcccaaaatgtaaccattcctgcacaaagccaaaaactatgatctggataaagtcactaacatgcccaatcctgatgctagtgtaacccaccatgattttaatcgcgtcaacccccacagtgatgactactctattcatggctgtgtttccaacccttattctaatcgcattgctatttgctaaatcaaatactcctgtaacagtgctgtctacgacatagcatgatgcacaataccttacccacagacacttagtgcaagtgacacatcaattctata

SEQ ID NO: 20589 - DNA, 770 bp, Glycine max
  Clone ID: PAT_MRT3847_118598C.1
cctcaccttagttgatcgtgttctcaggatgaagtccaactatgctgccagtggaatacgaacctgcgtggaagctgtcttactgatactgatgggttgaagcgtaagctggcaaggaagctctctgtgaatgaagatggggacgggtcagaatgggaggtgggtgaatgccttggaatgtggtggaggcctgattttgaaacattaatgtatcccttcattccacctaatgtaaaaaagccaaaggagtgtaccaaagtcttccttgtgaagctgccagagagtagaaagttcattgtgcctaaaaacatgagggtgcttgcagttccgttgtgccaagttcatgaaaatcacaagacatatgggcaaattatatcaggggtcccacagctgctgtcaaaattctctttcaacatgatagaatcttgatacctgattgcaacctattttatcatccagggtgaagggactaaggctttgctcgttagaatcctctcctcatgtcgcgtccagactccagacacagacttaaggatcctgtgatgctagaaagaatgcttgggcttctgatcttgacaatgccaaaaggagagtctcgactgattttgacggtttagagaggagatcactgatgctgcgaagggaagtaatgttaatagagttggttgcaatggaggctgtttttggatcgaacttcttagagatagactagtcatgaagagttttttatgtaactcatgtacacaatgttgaaataattagcatttgtc

SEQ ID NO: 20590 - DNA, 715 bp, Glycine max
  unsure (1)..(715): unsure at all n locations
  Clone ID: PAT_MRT3847_118599C.1
cgacaggcgttagttaaacgaagcttgtgaagtgccacgttagagaacagaacactcttcttcttctctctggaaggaacaggctcttcttcacgagaaattattactctctctactttatcattagcttttatttcagtgtttgactttttgcgttgttgcttcgttgtgtgtgcactcggttctgtttggcgtctggacaaaaaacatgggggaagaagaagaagaagaagtgagcgtcaccgctttgcatcatccaaacagcggaaacgatgatcagagcctcgaattcgatatatatcctttgagcagttactattttggatccaaagatgctgttccctccaaagacctcaccttagttgatcgtgttctcaggatgaagtccaagttgaattgttcaaacatcctcatttgttgctgttgcaaataagaaattccatatataaacttcctggtggccgattaaggccaggtgaatcagatactgatgggttgaagcgtaagctggcaaggaagctctctgtgaatgaagatggggacgggtcagaatgggaggtgggtgaatgccttggaatgtggtggaggcctgattttgaaacattaatgtatcctttcattccacctaatgtataaaagccaaaggtacataattccaatggcttggttatacaaattctgatagatgtcctagnttcccagtcttgggttgggg

SEQ ID NO: 20591 - DNA, 208 bp, Glycine max
  Clone ID: PAT_MRT3847_11859C.1
aaaaaatatatatattcttgaaagaaagatagaagcgagggtttcctttatcttgcaacagtttaagtattgcatctctctgctagacgagaggaatgagaattacaagaagacatgcgtggagttagacaagcctaactgtgtatttagtgtgtttggaaacacatcacaaactattaaacgtgaatccccaacacgcttttgcatc

SEQ ID NO: 20592 - DNA, 583 bp, Glycine max
  Clone ID: PAT_MRT3847_1185C.1
ggtttttctttttagaataaaactagcccacgattcatccatgaatttaattacagtctcaaaatacacgtaaacatatgccaagtgactcacctaataatcaaaacgacaaacaatagaagctgaatggcacgttggttcgttcaacttaatatggatccactattcattccctactaactagctttttcgcaacacgacagtacagtttggtgaatctcttgctacgtagtacgtacgtacccgatccacccccaaaaagctaaaaacaagaggcattaatcaaggaaattaaccaggcaacagcgattgatggatagatagcgtttcacttacaccaatgaaatgatccacagtcacagtattgttactgttgcatcatcgatcagcagtaaggagagcgacccgttgcccagaacgtctccgtcgacggcatctgaaccgaattcagaagattcggattcaaaccatggaaaagaggcgctgtagtagaatcccccataagctgatgaggtgcctgcgattgaccaacgccaccgccgccgccaggtgacccaatagaacctcctccctgaagcccaat

SEQ ID NO: 20593 - DNA, 987 bp, Glycine max
  Clone ID: PAT_MRT3847_118600C.1
gcgaaaaaataacgcccacgcgtccggaaacaaagggacagcacatgataaagcattacaagaaatgtgccacttgtatgacattgttcgcattgacaatgaagaaaaaaataaggaagtgcaacaggagtaagtatttccatcagaatgttaatggcagcaaacatcttggtctgtggaaactggcagaagcatggcagcaacaataaatagaaatgtcattggaggatcaacgacttttgtctagttacctccctttactgagagagtttattcctaatgcggctgcagaggttgaaactgatttgattgctcagttggttggtcattccaaagaagaaaattatgtgtacgacctctacaccgtgaaagatgagatggatataaacattgatgattcttcgtgttcatatccactagttcaagttgatgaggaggaggactattatgatgggacacagcattcagattatgaatctgatgactcaaatgatgaggtttctgaagaggatgaagaggatgaaaattctgagaatgaatcagaacgtgaggatggcaacacgagcagtgaatcatcagatgagaatatagaacatggtttttctgaagatgatgctgatccattatatgatgaggattttgatgaatatgaaggtgctcatagtgatgatgttgagcatatggatgatgaaaattggaggtggtcgtaccgatgaagttggctttagttttattttgcaaaatgtaaatctgatggggtaaaaatgttgtaggaacaaaatcaaacctaccatgccggagccatccaactagacaggcttttttggtattataagggatgctttaaggcattttttatggacctattagttttatgttgaaatttgagctagaatgcttacaaaaatggcatttacacgctggtttctttaagttttctatcgttacctgtttatttataccccccccggtaaaagcttgtccctg

SEQ ID NO: 20594 - DNA, 1310 bp, Glycine max
  Clone ID: PAT_MRT3847_118601C.1
cgacaggcgttagttaaccgaagctgtgaagtgccacgttagagaacagaacactcttcttcttctctctggaaggaacaggctcttcttcacgagaaattattactctctctactttatcattagcttttatttcagtgtttgactttttgcgttgttgcttcgttgtgtgtgcactcggttctgtttggcgtctggacaaaaaacatgggggaagaagaagaagaagaagtgagcgtcaccgctttgcatcatccaaacagcggaaacgatgatcagagcctcgaattcgatatatatcctttgagcagttactattttggatccaaagatgctgttccctccaaagacctcaccttagttgatcgtgttctcaggatgaagtccaactatgctgccagtggaatacgaacctgcgtggaagctgtcttactggttgaattgttcaaacatcctcatttgttgctgttgcaaataagaaattccatatataaacttcctggtggccgattaaggccaggtgaatcagatactgatgggttgaagcgtaagctggcaaggaagctctctgtgaatgaagatggggacgggtcagaatgggaggtgggtgaatgccttggaatgtggtggaggcctgattttgaaacattaatgtatcccttcattccacctaatgtaaaaaagccaaaggagtgtaccaaagtcttccttgtgaagctgccagagagtagaaagttcattgtgcctaaaaacatgagggtgcttgcagttccgttgtgccaagttcatgaaaatcacaagacatatgggcaaattatatcaggggtcccacagctgctgtcaaaattctctttcaacatgatagaatcttgatacctgattgcaacctattttatcatccagggtgaagggactaaggctttgctcgttagaatcctctcctcatgtcgcgtccagactccagacacagacttgtatatatcatggctttctagtttctatacgaaaaattatactgtaatgttgaaaatagctacatgtatcatacttgcatggttagtgtgaaattttcttcagagtaatggagttcgattggttctttaattttgcctttgttttcacttgacatgataattgataacataggcatcatataactgttagcattatgcttctaagtttcttggaaaacatagaaggtaaggaggttaggtcttcattaagaactggctgaccgagataacagctagttcatcagcatattacttgatgccatgctagtgtattcagtaaaagactttggacttttc

SEQ ID NO: 20595 - DNA, 501 bp, Glycine max
  Clone ID: PAT_MRT3847_118602C.1
cggggggagtactattatgatgggacacagcattcagattatgaatctgatgactcaaatgctgaaaacaatccactgaatgattatccagatgaggtttctgaagaggatgaagaggatgaaaattctgagaatgaatcagaacgtgaggatggcaacacgagcagtgaatcatcagatgagaatatagaacatggtttttctgaagatgatgctgatccattatatgatgaggattttgatgaatatgaaggtgctcatagtgatgatgttgagcatatggatgatgaaaattggaggtggtcgtaccgatgaagttggctttagttttattttgcaaaatgtaaatctgatggggtaaaaatgttgtaggaacaaaatcaaacctaccatgccggagccatccaactagacaggcttttttgctattataagggatgctttaaggcattttttatggacctattagttttatgttgaaatttgagctagaatgcttac

SEQ ID NO: 20596 - DNA, 162 bp, Glycine max
  Clone ID: PAT_MRT3847_118603C.1
gactgaagtatcagctaggagctagctcatgaggggggggtacttggccttgtgatgcaggagatcgctctcataaatgctgcgcttgtgtgcgtcaatatgttgaatccgaatgattgtgagcactctggagctgaacactttgttcaatggccatccata

SEQ ID NO: 20597 - DNA, 494 bp, Glycine max
  Clone ID: PAT_MRT3847_118604C.1
tcgcttgcgtccggaccgcagtggtatgaacaccatttggtctcaagactgtgaattatggaatgccgcttgcacaaaagcaatgactatgtgatttaatccacactcgtgttctgaagcagggggttaggaatgtgtgcaccgtaccggattctagtgagacatcattagcgtcactgcatggactgacactccaatgcaggatgcgcacgatacaatggattggcacattctcttttaagaacggggaatcaggacctattgcgtgctcaaaacacaagactctgtcgtgttaaacaagtgcatggggaaactcactgtgcccgaaagcactgacgcaagcgggaaaagaatgcgattttatatggggcgcggagcggactgacaccacgctgcacgaaggactaggcccaatgcagtggtttcaatgcggtgatgaatgggtggccagcacctattgggtgttaataacacgacatcctcctgcgttaaat

SEQ ID NO: 20598 - DNA, 223 bp, Glycine max
  Clone ID: PAT_MRT3847_118605C.1
gaccgatatgagggtgtcggagtcgttgcagagctgcgcgttcatctatacgaatggcgaagataaaggtgtactagttgaggaataacaccaatgctgatctactgaaccagctcacggatctcaaggcagaactagccctgccccgcatcgccaacgttaccggcggcaccccacacaagctctccaatactcaagtggtgaggctatcgatagcgcacgt

SEQ ID NO: 20599 - DNA, 442 bp, Glycine max
  Clone ID: PAT_MRT3847_118606C.1
gcgtacgtaagctcggaattcggctcgagtgattaaatctcacaccattttgctatatcttgtcttggtgttggaacagttcttggtagctccttctggagtgaaaggtggaagcatctcattctctggttgcattcagcttcttggcttctgtgcttttgagagttgtgttggcatattctggccatccattatgaagatgagatctcaatacattcctgaggaggccaggagcaccatcatgaactttttccgcattcctctcaacatttttgtgtgtgttgtgctgtacaatgtatgttacacaatctactacttcaatgcaatgcttgagctttaccaatgcagtagtattttcttatctctggttttgactaattgtgtattttctcgatgcaggttgatgcattccctatcactgttatgtttggcatgtgctcaa

SEQ ID NO: 20600 - DNA, 365 bp, Glycine max
  Clone ID: PAT_MRT3847_118607C.1
gatataaatatatcaatttacaggggaggctcctaatttgtaatacactctgagggtatgacccacaattgtccatgtcacaaggccaatgtccatagacaaaatccaatacgtattggcaacaaatgcctgaatgactggccaattaatgcgacctgttatcatatacaaccctccgtgacagcacccttggaattgtgtaatttctataacatattctacaacttgtgtcttactgacgccatttcaataatgccctggactgatgaaacaaaatcatataattgaaaaaaacctctgggtgataacccttactaactcaccaatatgccaaggcagatcttcatgaggaaatatctctaata

SEQ ID NO: 20601 - DNA, 155 bp, Glycine max
  Clone ID: PAT_MRT3847_118608C.1
tcctctatatcggccgcccgtgtttttcttttttgatagtctaaccacatcagcaacttaataagcaaaactgcccaacggatgtagatgtatctctgacaatagtctatttagcaaagacctaagaagactctctcctatccctagttctaacg

SEQ ID NO: 20602 - DNA, 408 bp, Glycine max
  Clone ID: PAT_MRT3847_118609C.1
ggataaatcctcttttcatattgcatattgaccaacaatttaaagtacttgatacacatcatgtctatccaacaacttcccttaccagaaattgttacattcattgctaaaaactatgttgtgctcctgggttactggtgttgttgcatttgcaaatttttaatttcttatctcccttttaccatgatgtacccagtaaaattctgttctctaaagaaaaagacctctcagactgcctgtgtggatgttggtcatatgagccgaactatattaaatctgtgtattcttttgcttcctgcacttttgttaattctcgtctttggcataacataaagaatttaataaatggaaagactcttgattgtcttttctttcatttcatttatgtaattccagatttatgaattg

SEQ ID NO: 20603 - DNA, 395 bp, Glycine max
  Clone ID: PAT_MRT3847_11860C.1
atgataatgttgtttaatctgccaaatatacaagttgaatttgaggagcacgtcttgtctgggtgatgcacagtaaccagaggtttcttgaaatgatcaatgggtagggttaaaaatgggcactagccctgaccaggtaggtgggaagggggcagagtggagaggaaaggcttcatcggacggacctttcgaggcacaggctccgggagagcccctctgagtgagcacccagatgatctgggctggttgtgatcaactcccacagcagctgcctgctggcaccacacccccctccccacactaacgtgcaatctactggacaaatggaatctccttacgccatttcccaggcaccccacccaccccaccagggcccgattctaataacagcaaaa

SEQ ID NO: 20604 - DNA, 4120 bp, Glycine max
  Clone ID: PAT_MRT3847_118610C.1
tactctcaagatatcagaactatataaaatctatgacgcgtgggctaagctagggcacaacacaacacatgaaggaagcaatctactaacacaacacatgaaggaagcaatctactaggatttaagtttttttttaaatttctttttttcccctcaaaactaaaaagtcattgtcaaacgttttcaaaaccctcacttgtagctccaaagccgcttccttttctttcttcttctctctctctctctctctctgtttcgattgggaagaacaaaaccctacccatcatttcccccccgcagtgttagcctcaagttttgttttttcggcgttgtggttgtgttttgtcttgtgggtcggttcccttttgggttttgggtgcaatggtccctggttccagaacggagggtggcactggtacccctcacttgctctctgcgagagtgcgcaaaaccattcaatccatcaaggaaatcgtggggaaccattctgatgctgatatctatgtcgcccttaaggaaaccaacatggatcctaacgaaaccactcagaaattgctcaaccaagatccatttcatgaggtgaagagaaggagagaccgaaagaaggagacccagaatgtcgggaacaagggtcagccttcagctgactcacgaaggtcatctgagaataatagtggtcaaggaatgaagtttaacgccccttctgaacgcaatgttcgaagaacaaactattctcgaaatactttacctggcatcagcaaagagtttcgtgttgttagagacaacagagtaaatcatatatataaagaagtaaagcctcttacacagcagcactcaacatccgccactgagcagttaaatgtaaacacacctgataagggctcatcaatttccaccaatcataggtcatctggctctaggaattcgtctcaagcttcaaatggtccttctgattcacatgctagatacgcgccaaaaaccattgacagaaaaattgtatatgaggataaggataagcaaggcatgatttcaaatgcagcaggacgggtgcaaccaattaagcctaacagcgtccatcaaaattctgccttggtggcatcaaccagttctgctgttggggtgtattcctcttcaacagatccagttcatgtgccctctcctgattctagatcaccaggtgttgttggagccattaggcgtgaagttgggtttgttggtgttcggcgacagtcttcagacaacaaagcaaagcaatcatttgctcctagtagccctcatgttgtgggtaaagatggtacatctgcagattcttttcaatcagttggggctgtctcaaagactgaacaatttagcaggaacaggcttgaactgttgaactcctacagggtttggaaattttgctaacccaactggatatgccatgattactcctggtgtggttgggggtgcaacggctttagaagattcatctcgagtcaagtacaaagataatctttatgtcccaaatcctcaggctgagacatcagaaatttggttacagaatccaagggaccatcctggcatgcaatctactccatactataacatgccagggcaaacacctcatgcggcttacatgccatcacacactggtcatgcttccttcaatggagccacagctcagtcttctcacatgcagttccccggcatgtaccacacccctccacagccggcagccatggctagtcctcaccatttaggaccaccagccattggcaacaatgttggagttggggtggctgcagctgctcctggagcacaggttggtgcatatcagcagcctcaattgggccacatcaactggacaacaaatttctgaaatgggataacagaaaaaaggaaagtgaatttaacctgtgtacaagggactgactgaaagtaggtatagaagaaaagtgccagttttcattgtgaaatgaatgacttatgctttttttgttttttcgttttacaaatgcaatgaggcattaaattttagtctccattgtttgcagtaggtgtgggaaatagagtttttggcttcaaaagttgaaatctcagtcattttctgaaaattccttcagataatgctgaaaagctttaactgataggatatgctgtattttttggcgctgtcccattgcccgcacgtttctgtcaaactaatgtaactgaaccttcattatctggtatgccagttagcagaccatctctgaacaaccagtataataataggccacatcaacaacttgtgggacatcaaagagtttcccagcaaaataaagaatggaagcctaaatcaagccagaagccaaacagtaattcctggagtaataggaaccccgaaaaaggctgctgttgctgctgcttcgcctccagcagaaaattctggagatatagaatcaaataccacagagcttcaagataaactttcccaagtaaatatatatgagaaccaaaatgtgattatagcacagcatattcgagttccagagactgatcgctgtcagctgacctttggtaccattgggactgaacttgattcttcaaggcttcaatctaagtatcacattataggagcttctgaaaaatcaaacgaggaattgactgcaagcttgacagtacctgctccagagttgtccactgatgatgtttctgggagcaaacaggtggatttgcgggatgaacacattagaagttctaggtcagactctccagtatccggcgctgcatctgagcaacaattgcctgacaacaaagattcttcaaacactcagaatctggacaattatgccaatattggattggttcgtgatagtagtccatcctatgctccttcagaaccacagcaacaagattctcatgatatgccaggttttgcggcatatgatcctccagctggttatgacattccttatttcagacccacaattgatgaaacagtacgagggcagggtttgtcatctcctcaggaggctttgatctcccatgcaaccaataatcctcctgcttccacaattgccatggtgcaacaacagcaacctcctgtgccgcagatgtatccacaagttcatgtttcacactttgctaatcttatgccatatcgtcagtttctgtccccagtctatgttccacctatggccatgcctggatattcaagtaatcctccctatcctcacccaacaaatggcagcagttacttgttaatgcctggaggtggttcacatcttaatgccaacaacctcaaatatggagttcaacagttcaagcctgttcctgctggaagtcctacagggtttggaaattttgctaatccaactggatatgcaatgattactcctggtgtggttgggggtgcaacggctttagaggattcatctcgagtcaagtacaaagataatctttatgtcccaaatcctcaggctgagacatcagaaatctggttacagaatccaagggaccttcctggcatgcaatctactccatactataacatgccagggcaaacacctcatgcagcttacatgccatcacacacaggtcatgcttcctttaatgcagctgcagctcagtcttctcacatgcagttccccggcatgtaccacactcctccacagccagcagccatggctagtcctcaccatttaggaccaccagccattggcaacaacgtcggagttggggtggctgcagctgctcctggggcacaggttggcgcatatcagcagccccagttgggccacatcaattggacaacaaatttctgaaatgggataacaaaaaaaaaaatgaaagtgaatttaacccctatgtgtacaagggactgactgaaagtagatatagaagaaagtgccagttttcattgtgaaatgaatgacttctgcttttatttttatttttattttttcgttttacaaatgcaatgaggcattaaattttcagtctcctttggttgcagtaggtgtgggaattaatcgagttttggcttcaaaagttgaaatctcaagtcattcatgaaaacttaagataatgctgaaagcttttcctgataggatatatgctgtatttttctatatctagactcaattctccaagttcctat

SEQ ID NO: 20605 - DNA, 698 bp, Glycine max
  Clone ID: PAT_MRT3847_118611C.1
tgaaaagctaattatttatcggtcgtctcaattatctctaaaccttgtagaaaattatacaatgatgaaacaaccagatgaattaatttgcaaacttttcaaccttatgctgccgtgttgtgaagtagttacacaaaatccgtcatcaagtttcatctttgcagtttagtagtgttgcattgtcaccatggttggaatcacagaccattttccaaatttaactcttgctatcagtgacataccggactgaatttgcttcacttttttatccaatgtcttcccatttcagttgatttttcattgtcttgatcaacattgccacaattaatcctttaccttatgatcttgttagattttacatgcacaggatgctattcttggttaattccaaaactggaagcaaaaatctcaaattctgttcggcgtcttttgtgcttattcttgtgagactagatgccatgctcttatttgatactaatagattctttaaaataagtcatcagagaaaaccaaacaagcaaatagcaatttacaattaaagatttcaaggccagttagggaaaaagataaactaaaattaaaaccagcaactagcagaaataaattaaaattacaaatagcaaattggtgatataaacaaagacataaactcatccaactggagaagtggtgggtaaaagaatgcacaatcaatggac

SEQ ID NO: 20606 - DNA, 377 bp, Glycine max
  unsure (1)..(377): unsure at all n locations
  Clone ID: PAT_MRT3847_118612C.1
ccaaaccgaaacacgccncnggcaccgaanggcgncggcaacgagcncacnncncgnncacccccggcaaacccnnncncagagncnnggggnggagggacncngagggagacgggaggcagcaccannggcaggggnngnggggaggggnnnanccanacagaggaanaaaannggcaaggacgncaagggaagagancncngcgcagaacaaaggcgnncagnacggaggaaggaggcaaagacaagangcanaaaggcggccggggancaaaggaagcangaagggagaagaggagngcngaaannggcgaangggggagnnggcgnacccggagnannaggaggggggaaagcggaggccgaggaacaaggac

SEQ ID NO: 20607 - DNA, 1211 bp, Glycine max
  Clone ID: PAT_MRT3847_118613C.1
ccacgcgtccgatttgttccatatagcagcttaagcagagccccagattacaccaacgttcactgagtgacattcctccgttttaaactttccaaccgcattcccaatggatcctcaagctccggcgacggccaccaccgctcgaagcgccgccgcggaaccctcgcaatctcaacccccaaaaccatcccctcctctccctctccctccaccttccacatcatcaacccctcccatctcagctcctccacagcctcccccaaacactaaccctagccctaaccctaaccccagccctgcccctggcccgggcccaattcaagccccgagccccaaaccccccactcccactcccactaccactcccacgcctccccagcccttcaaccgcgctttgtcgccgccatcgcaaccgcagttcccgcactactcctccccttctccgccttcctccgctcccggcgccgccccgccgccgcggggcggcatggcgactcggtgtgcccgcgcaccaccagagcccctcccctccgttttcgtcctccttcggtcaacattttggggggttgggtcgaaccggagtcaacgtcgctgaatctacctccaattcaagcacctctcaagtgaggacgccggtgcaaggaaaatgaggccaagtggaatcgattcacatcaacagaggtctgtgcaatcgtcacttagacctccaacctctgccccgaataatcaacccgctggttcacaaagcttccaagggcatggacttatgagaccctcatcagtgggatcaacggctactccatctccgagttcatcacaaagcatgcagtcacttaatcagccatggttgtcatctgggtcacaagggaagcctcctttgccatccgcagcttataggcagcaattgaacccactttccggccgccattggtcccacattcctcccagccagcgccccacacccccctcctcccgccagccgcaccaacacccttgccggcctatccatccccggggccttttcggccaccaggttccgccatccagggctcctctacacatgcctcatcagccacaggttacgaggttacaggggccaggaaatcagaaaccttcatctcttgtggcggcacaatctagtgcagcgcagccagggactcaaagtagattaacaaactcagataccgatgaatcttctaatagtattctca

SEQ ID NO: 20608 - DNA, 1383 bp, Glycine max
  Clone ID: PAT_MRT3847_118614C.1
ctcaagtgagaacgccggtgcaaggaatggggatgttagggtctcaaatgatgccaagtggaatcggttcacatcaacagaggtctgtgcaatcgtcacttagacctccaacctctgccccgaataatcaacccgctggttcacaaagcttccaagggcatggacttatgagaccctcatcagtgggatcaacggctactccatctccgagttcatcacaaagcatgcagtcacttaatcagccatggttgtcatctgggtcacaagggaagcctcctttgccatccgcagcttataggcagcaattgaacccacaatccatgcagcaaaggtcacatattcctccgatgcagcaatccacaccaacatcctcgcagcagcagcaacaacaacctttgctgtctaatcaatcacaggagcatttcgggcaacaagttccgccatccagggctcctctacacgtgcctcatcagccacaggttacgaggttacaggggccaggaaatcagaaaccttcatctcttgtggcggcgcaatctagtgcagcgcagccagggactcaaagtagattaacaaactcagataccgatgaatcttctaatagtattctcagcaaaagaagtatccatgagctagtcaatcaggttgatccactggagaagttggagcctgaagttgcagacattcttgtagatattgcagaaaattttctagagtctataaccaggtctggttgttcactagccaagcatcggaaatcaacaactttagaatcaaaggacatactgctccatcttgagaaaaattggaatatgactcttcttgggtttggcggtgatgagattaaaagctacagaagaccgattacaagtgatattcacaaggagcgtctagcagttataaagaaatcaatggctgcaactgaggcagcacatgggaagggctctgctggccaggcatctggtagtgcaaagggtaatcaagggaagacccctttgaatatcattggctcgccaaacctaaaaaattcataggatgcatgccgtgtttatggtttacccggcaatggaggaacccctttggtggagggagatcatcggtctttttgggctgttttccgagcattccatgtactggagaaagagtctgaatttagaagcgttgccgaaaacaagatgaggggaatcaagattgatatgaatcgtcttgcaactgaaaaccgtaaataaagaaagaaaaatgaattggcttcatcaaatgtttttgtattgataatattaagaaagtcattggttgggtaggctgggtcatttattgttataatcgactttttaatttaaatgcaaatagtattctgaaatatatacgcaattatttttcccg

SEQ ID NO: 20609 - DNA, 684 bp, Glycine max
  unsure (1)..(684): unsure at all n locations
  Clone ID: PAT_MRT3847_118615C.1
gtcaatttgtaagaaaccaagttgaggggaaaaggaaacaaacaagattctgcttgcactacttcttaaaaataattgtctttcctgccttttctattcctatttctgtaaatattataccgtgccgtgccatttgtgtttgaatcatataatgtggtacatatggatgatatttgaagctggaaatataacatcataaatgcaatgctgtaaagaatatgtagccaaaacataattgactgttaaattgaatggaatatagctgcatctaagaacaatggattgcaaaattcaaggttgtcctcttgtctggttatctgtatgcatcctcagtgctctagagtagacattaaaattcatgcacttaaggaagttgaccttcagagtttggtttttgctctatttctttttaaaatctacttgttattgggtttattcacataaaaataatattttctctttagtttgttctatgaatattcgttgtctgactgttgctgacaagaaatgtgatgttttagctttttgttgctttgatgtaggtcacaattgctcctagagctggtagggaattgggttatgttcgggtgaagatggattcagtcanatttaatcaaggaatgctcacacgtcaatccctttctgatcatattactgntcaactagctccccgtgcagctgatg

SEQ ID NO: 20610 - DNA, 328 bp, Glycine max
  Clone ID: PAT_MRT3847_118616C.1
cccactcgtccgaacgtttgacttaagcgtctatggctgccgcaacaatcgcggtatcgggatcatcattggctggccaggctataaagcttgccccctgcacccctgaactcggtgttacaagggttagcatgacgaacacagactacacaactgtttcatcaggaagaccatggtacggaccagaccgtatcacgtactcgagcccattctcaggtgagccctcattctatctaactgatgaattcccaactgactattgttagaacactgcaaggctcattcctgacccagagacttctgccaatcaccgtgaactggaagtcat

SEQ ID NO: 20611 - DNA, 362 bp, Glycine max
  Clone ID: PAT_MRT3847_118617C.1
gatttattgggtttatgaggaggacgggttagaggagtttgtattggtggcagaacgtaatggagttggggttgtggactttatggaaagaatgctttgggcgacagacgagggtttgcctcatgtgctttctcgcaactatggctagaatggcaataagagatgttgttctgttgatggtgaagagattacaatgaataggttcacaagggtgaacgaggcttacaacaagtttagtgttgtatattgaataacgagtgctaacagagatcagggatattatgcagcaatgactagaatgtttctagtcgtagatgcagtgacatacctgagacgcgcgggtttactattatatctatgga

SEQ ID NO: 20612 - DNA, 474 bp, Glycine max
  Clone ID: PAT_MRT3847_118618C.1
agcaggtgcgcctgctggtgccgccgcggcgttactggcgcgaccgacgcggccgccgccctcttgggcggccgtacctagaaaccggatacggacgcttgcggtacttgctgccaagaatctctgcatgggttgctactgtgatgggtcctatgtgataaggacaggacaatcactctctgtgctggccacagactgcgtgaatgattgtcttctgcattctgagtgcatatgctgaacactctcctatatgtatatagacttcatgttgagactaaacttcttctgagtctttatcggctgtatgcttaacttgaagtgcaagctggtgaagtctggtattagggctcccactctcctatctggtgtacgacatcgtgcgtagactattctaattctctcctttcattgagtctcttcttctcacagagccgcataggcgctcaaagtgggcttatatgtaaaacacttggg

SEQ ID NO: 20613 - DNA, 389 bp, Glycine max
  Clone ID: PAT_MRT3847_118619C.1
aataatataataatgagggaatggaacattataatctctagcatgagaaactgaaataggcaaaaatacacagcactaatagagggaaaaaacgaaagcttaaatgacgcataaccaaagtaaagtaataaagttcgtcgcttcgggagtaattacatatgccaatctaattgtggaacaccttacattagcctttagaacttgtcatatgcagactgagacaccataataagcattgatctcggaatattagctggcatggaaacaagcatatggatctgcgagtttcttaaagatgtcggtatatccatagatatgattggcccatgtgtgaaaaagtcttcttcaggcaccacatcactggctatgatcaaggtagcacattaggc

SEQ ID NO: 20614 - DNA, 292 bp, Glycine max
  unsure (1)..(292): unsure at all n locations
  Clone ID: PAT_MRT3847_11861C.1
aaacaataatattcttcatccatttatagatttagaaaagtcaaaatcatcctgattactctttntttaggttaacaaatccttttataggccaaccctattctctatcataaaagaggacctttttcaaaaacacctattccttatttatggcaactaatcctaatcatcactttcctagttcttacacaaagctaataatccactcacagcagcccaagttctccaccctggtgagtaataccttgcacttcttttcaccttttttttaacaaatggttacttaatatgt

SEQ ID NO: 20615 - DNA, 512 bp, Glycine max
  Clone ID: PAT_MRT3847_118620C.1
ggcttctgtgttcaaggacgtaagataagtgatgtagggaaaatagatatttgaaggtttcaatgaagaggtatctgatgatttgtgtatttgatgagcttttatattaatttgctatggagattctataaccattttgattattttctacctgtttttagggtctgactcttttaggccagttttatgtgaacatggttgtcttggcagtggcaccaaatataatcagaactttgaatgttgattaaaaaaggatgtgttaggcttgtattttcaacatttgaattataagacactaacttgacttgatctgtgtacatgagttcaaatctattattagcttatttgtaagttctaatcagaagttacttgtagactttaaaagttctaaacaacaacgtaacactttaaaatcttttgatttttcctttcatttcgaaacatattgtggtgtgagatgcctttcttaaggtgtatgctaatgctagtttaaccattcaaaatgctagcta

SEQ ID NO: 20616 - DNA, 351 bp, Glycine max
  Clone ID: PAT_MRT3847_118621C.1
gacccactcgtcctaaaaaacatactttaaaaaaaattttaaaaaacataataaaaaaaaaaaaaaatgtaacgtttaaaaacaaaaagatcatattcaaattctcctctatttacatttccaatcttctttcccttcctttctacctcataccactattttttttctaacttcttttaaaccaattccccatcttaaacaaccttataattttaaaatcccttcagttcccctactttatccttttgggacttaatccttttttccctaatccctttaaactttttaaaccccctcctttttccttttttaatatatttttctaccctaattttaattttcaccctccct

SEQ ID NO: 20617 - DNA, 1627 bp, Glycine max
  Clone ID: PAT_MRT3847_118622C.1
gggcttacacttgtaaaaaaaattcacagcagcctaatcagcaagcaggaattggcactaataatccacagattccaccacctctgcagccgtcaccaccttcatcggtgacgacaggtatcggaggtagtgactatattcaaggctctatcagaccaggatcaatggctgatagagccaggatggccaagatacaccaacccgatgcagcactcaaatgtccacgatgtgaatccacaaacaccaagttttgctactacaacaactacagcctctcacagcctcgccacttttgcaagacttgtcgtcgttactggaccagaggaggtgcactcaggagcgtgccagttggaggtggctgcagaaggaacaaaagaaacaaagggaacagtgctagatcaaagtctcctatgaaaccttcagcaagtgctaattcttcttctagtggctgcacccctgatcatgtgatgatgactcatttgccaactccaataacaccaactcaattcccattcttggcctctttacatcattataatggcgactacgtttctgggggcattggatctcattttggggcgatcacaacacctttggtggctagaaataatggcaacaacactagtgatgttgagtttcaaattggtactagttcagcttcatcacttggtaatattagtggaggggctatgttgtcaaataatggccttggtgatcagcaatggaggtttaacaatctgcaacaagttcaacatcagttccctttcttgagtactaattttgagccacaaattggggtgtttcagtttggtggtggagaaaataacaatgctgaaccgccaagttatgcaaagggtcatggaggccggtttaataatattcgttctaaaatggattctattaattctagtgtaagtggaatagtgcctcagcttaatacaataaagctggaagagaatcaaggtttgagtttgtcaaaaaatctcttgatgactagttcgggaaatggtgtactttggaataatggaagtagtggcaatgcatggagtgaggttcctagtttcattccttcacctaaccacttgttgtgatcattggaattaaactactccaattctactgctttgctttatttcctactcgccacacagatttttatgatcatagaaatgatctaatgtataagagttattagaagaacctattatatcaccttgctaactttggaacggaattctactaccctctatgcatgagtcttgtcttttgaggataaatgggatggaaggataagaagatcagaacactttgtgtaacatcaatgtgacgataaaatggtacgcaactcttcaagtaatttcctttttccatcgttggatgtcgtcgttgatatttttttgttgtactccaagtatgaacaagttgagcaaaagtattggtgtgtaattgtttatatatatgcttgtgttgtgatgacatgagcggttaattagttgatattactaattgtgtgaagctatgtggactagcctagaaggctttttatatgatgtcatttttttttatatttgctcattgttaacgatttgcaccaggtataatgtaagtttaagaaactttacacatc

SEQ ID NO: 20618 - DNA, 456 bp, Glycine max
  Clone ID: PAT_MRT3847_118623C.1
ttgaaactgaaagtgtctgaaactgccctactttgaccgttgatatctataaagcactcactctgtctcagctttttttaacaacaaaggggggatgtgaattgaggcaagaccttgcttggcattagcaatagaaaagctgggaagagaatctaagaatcaaaaggtggagttttaagtgttgtgttaataacagaactccgtgacaatggttttgataagtggcaacaacaaaagtattttacaccaaacaaatgatgagagggccaaagcacaaggtgttacagtgcttcagaattcacatccacaaggaaacaagaatgttgaaagcgggcgtacacagaatgcagtcagcactgggttgaccaaagcaataacaacaatggatgaattcaagtgtggatttccatcaaaaggcttatcaaccacatcaaataaatggtggggaaatactga

SEQ ID NO: 20619 - DNA, 614 bp, Glycine max
  unsure (1)..(614): unsure at all n locations
  Clone ID: PAT_MRT3847_118624C.1
ccagcgtccggaaactttgtgcgtagaggggacgaaacaatacaatggcttacgctgcaatgaagcctactaaggccggcttggaggagcctcaggagcagatccataagattaggatcaccctttcctctaagaacgtcaagaatctcgagaaaggtacctctcgcctcaacattttttatttttcatttatttatttcatactcgaattttttttctcttaattatagtgtgcgccgaccttgttcgtggtgccaaggacaagcgcctcagggtgaagggacctgttaggatgccaactaaagtacttaacatcaccaccaggaaatccccgtgtggtgaaggtaacttcattttctatctgcttcttgcttgctttctacactctaatcagaattatagcttcattattttatttatgtatacgtaccctactacgagttgctgtcattntacttttacacaacgcaccggctgttgtcaaatatttttgatttctggtctgcttaacattnntcaaactcacacttctgagagagcantaataatatnnagcgttaaacatagcaattaccttttttctgactccggatgatactaaagagcanagcttt

SEQ ID NO: 20620 - DNA, 190 bp, Glycine max
  Clone ID: PAT_MRT3847_118625C.1
ggtttgaatagctatgcatcatgtaagatgctactgatgtattagaaacgttgcgtgcaaaatcctatggataaggtattggtgatatatttcaaagctgtgaaatcccattcaagtaggtgcaatttccattttcaatacgcaatgtggatacacagtggatcgagcgcagaatcaaggctactgagta

SEQ ID NO: 20621 - DNA, 976 bp, Glycine max
  Clone ID: PAT_MRT3847_118626C.1
ccacgcgtccgatccattggaattggcctttcattttttcctccactcttcttcttctgccctctctcctctccttattgtgaaccaaaatcatgaatagaaatgcacacaataaggaggaaaaaggttgctgctatttccacccaaaacaagtggttgttggagtgtgccccttgtgcttgaatgagaggctcctcatacttgctgcaaaacaagaccatcataatcatcatcacaggcttcaaagttccactcagaggaaggcttcagcttctattcacaagatctttgcttttggttctcttttcactcgccaccaattgaaatcgcacaactattatgatcaagatgatgcctctcccagcccagaaggaaagaccttattttactcattaatgcctgctttttctattgtcaaattttcttatccttgttatttttattcttcctccgtatatgcttaattagtatgatttttaggcaaatgctagctagtaagcatattggttaaagaatttaaaataaattttttattggatacataaaattgtgtgatcacaatttttttgatatttttgtgtgattttcacaataaatatttttcaccaattaaaaagaagtgaaagatattcttggatgggggatgaaaatatgagtgatagcattgaccgtggaataaaggggttaaaaaacgaaagtgaccccaacacttgctttttctctctctcacccttttgtgggattggggttaccacttactacttactactcctcagcgtggatgtgaagttataacaaacatggtataatactatttcgaaaaaaatagagtcaaaaatagctttgttgatttgatctcttgaaaatgtgctttagatagatgaaagttaaaaaaaatagggagtgctttgcatgctttgaggacttgagaataaggttcttgtaattcttttttgctaggtatttttttttcggt

SEQ ID NO: 20622 - DNA, 508 bp, Glycine max
  Clone ID: PAT_MRT3847_118627C.1
ctgaaacgttttttgctcttcttctcttgaccctttggtgcatagtagcaaaagggggtggttgcataaagcagaaaagttggtaaatggcatggtatatctttaacagttgagcctttttgggttgaatattctgaaaaagttaagttgaaggtgaaaagttgaaagtttagcacttgggagtttagttgttgttgttgttaggaaaaggtgaaaaaggttggaaggagtgaggataataatatgccaactgtgtggttctctttgaagagatctctacattgcaaatcagagccatcagatgttcatgaccccaaaacaaggaagcagttggccacaatcttgaccaaaaagggaggttcaagtaggtcaggttgttcaaggtccatagccaatcttaaagatgtaatccatgggagcaagaggcatctagagaagccaccaagttgcagcccaagatccattggtagcagtgagtttctcaacccaataacccatgaggtgatcc

SEQ ID NO: 20623 - DNA, 412 bp, Glycine max
  Clone ID: PAT_MRT3847_118628C.1
caagaaactaccaagtagcaagcttgattattattatcatcacatagagcttctgaaaatgtgcaaaggtgcagaaggagaaaagcaacatgggttctgcagcagctttctacataaagagagtgcaaccagaagtgctatatgttgtgagctatgtgggttacaggcttcattgtattgccaagctgatgatgcctacttgtgtaaaaaatgcgataaacgggttcatgaagctaattttttggcccttaggcacattaggtgctttctgtgcaacacatgtcagaaccttacgcgaagatatctcattggagcatcactagaggtggttcttccggccaatataaactggaccattagaaatctccttaacaacagaggaatctacagaaagtgttcaagaatgcataac

SEQ ID NO: 20624 - DNA, 1071 bp, Glycine max
  Clone ID: PAT_MRT3847_118629C.1
cgaatcaggcccgagccaagaaactaccaagtagcaagcttgattattattatcatcacatagagcttctgaaaatgtgcaaaggtgcagaaggagaaaagcaacatggtttctgcagcagctttctacataaagagagtgcaaccagaagtgctatatgttgtgagctatgtgggttacaggcttcattgtattgccaagctgatgatgcctaatttgttcaagaaactaccaagtagcaagcttgattattattattattattatcattatcccattgagcttctaaaaatgtgcaaaggtgcagaaggagaaaagcaacatggtttctgcagcagctatctacataaagaatgtgcaaccagaagtgctacatgttgtgagctatgtgggttacaggcttcattgtattgtcaagctgatgatgcatacttgtgtagaaaatgtgataaaagggttcatgaagctaattttttggcccttaggcacattaggtgctttctgtgcaacacatgtcaaaaccttacgcgaagatatctcattggagcatcaatagaggtggttcttccagccaacattaactggaccattggaaatctccctagcaacagaggaatccacagaaagtgctcaagaatgcataacaacctttccctcttgttataacttccatctttctttttttctccttagaatatcttttgtaatagaaaaggttagtgagtaccatctcaggtacatagggaagtgctaaatgtttttattgtcatgatttttaaaaaaaaatggttggtaatagaaccgtgttcaatagaaggagggaatgtccaatgttttttttttctttaatttctggtagatgtagttaattgaaatttgacttctatggttatttttattttaagccaattccaaagcaggagaacgaatttctggcagaagttatactatgttagcagatatacaatatgtcttacaagtgtatgtcatggtaattcctggcatctcatattataacctatatcaataacaattataatggctgatacttactttttgtctccaaaaacc

SEQ ID NO: 20625 - DNA, 209 bp, Glycine max
  Clone ID: PAT_MRT3847_11862C.1
cactagtgctcaaggacttggcaattgacttatcattttcaagctgcttctatggccacaacttatacaagcacaggagttaccgaattacatggcacagggacccatacatgctctgaaagtgatagtcagtaaatgaaataacccataagataagtagaggggtgtggaaaatgtcagctaacttagcatgggatggggacatagta

SEQ ID NO: 20626 - DNA, 383 bp, Glycine max
  Clone ID: PAT_MRT3847_118630C.1
cttacttttttcttttttatgcaccccttcgtcgtcgccctcaaaccaagatggactcattttatagaacctgggggggtttataacaatcatttaatgaatataggtctccaccataatacaggaaaaagccactgaaaacatttttgaccaattttttaaaaacaaattttttgcttaagcgttgaagcaatctcattcgggcaaagaaaactaagggggttgaatcaaaactcattttcaatttcccttgtgcataaaaaatctttttttcaaacccccccctctgttatttattcaaaaaaaatttccttcttgcttaactatggcacccacacaccgtttgatacaggcttattctttttttagttttcccaccccaa

SEQ ID NO: 20627 - DNA, 294 bp, Glycine max
  Clone ID: PAT_MRT3847_118631C.1
ttggggtggcagtccatccagtgacacaaatgatatcgcaatgcaggatgttcaggttacaattgattggtttatcccctctcaggaaagaccttcctggactcacatacatcctgcaacacaacgccggccccgactgcacccatgtgttcttgcccatccactccatccactccaagcaaccactccaagactaccgaatcggcgagctcaccaccacctcctacaacaatatctcttcatcttcgcaccctttcgtgcatgaaagctcctacatcatccctacgaccccct

SEQ ID NO: 20628 - DNA, 436 bp, Glycine max
  Clone ID: PAT_MRT3847_118632C.1
ctcgcgggaatgtataatactatgagctccgtctagacgtgtaccatacgtatacgaacaccatctcatatctagatctatgatatatcggttactgagacaaccgatgataccagaaaacgtaacaatgacgtgtgagatcaggactgaattcatcctgaccatgatgatgaggcaccatacagacctttggtgcctgaaaactatgcatactctgataagggtattgctcagcacactatttctgtgatgcattcaaagccacctaagagaagaagaagctgctgctgtaggttcatgtgttggacactaagcatattgctgattctgatcatagctattgccatcacaatacggatgctataccttagcgttagaccaaagcttcgcatatgctcgatggaccaactgaggatcagctcagtcaatgtttcag

SEQ ID NO: 20629 - DNA, 186 bp, Glycine max
  Clone ID: PAT_MRT3847_118633C.1
acatacgaagagctttattatagtttgcactttgcctgcacgctaaatgttgaaactgcgcgagacctaaagcactatacctgcagaattgtcttaacactactacttcccgtagcattcaatcccccaaaacataacttaaccatacgtggtagattaaggaatcattttccttctattcacttt

SEQ ID NO: 20630 - DNA, 349 bp, Glycine max
  Clone ID: PAT_MRT3847_118634C.1
ctcacgcatggaaaaacgtcagatcatattctataacggagtgaaaaacaaagctatcgatggtatattttgattgagctgggagtgacagttccgcaaggaaatatctgcacacttgtctcagaataaacatgttactatttcacatattctggtgcactatcctgctttagatccaatttacatggtgcgagaatgccttataatctacaggctgaacctactgggactctagaatatatcaaaccagggcatacttgatatctgatactaagactatcatactatcactaaaactcacatctgcattcctttcaatttactaattcattcgagaaactacattgac

SEQ ID NO: 20631 - DNA, 443 bp, Glycine max
  Clone ID: PAT_MRT3847_118635C.1
tccacgcgtgcgcccacgcgtgcgcggacgcgtgggattcaacctgtgatatggggtacctcaagacagaactgtcctcttcaagccagcatcatgctgcagaagaaacacctgtcagtgcagggggcctccaacagactggaacactcatctatgggaatgctagctcccctggcaagagatctgcaatggaagaccttactgagacataaactgatggggcagatggagaacatgctgacccatcacgagctggtgacggccatggtgctgctcttgctgacgctgatagaaagcaaaacctctcaagcaagccgaacagccatactaaatacgagactgacgccaaatctgcgatagcggatgcatatcaccacaccgactgctaatataagcaacatcaacataatgagccacagagatgctagatctactgaatccac

SEQ ID NO: 20632 - DNA, 667 bp, Glycine max
  Clone ID: PAT_MRT3847_118636C.1
ggctcgagggaaaaaatgggtgccaacttacatgggggatgcctttttagctggaatgtctacacctcagcgctctgaaagtatgaactttttctttgacaaatatattcataagaaaattacccttaaagagtttgtgaaacaatatgggataattcttcagaataggtatgacgaggaagccattgcagattttgatacattgcacaaacagccagcacttaaatctccttcaccttgggaaaaacaaatgtcaacagtttatacacatgcaatatttaagaaatttcaagttgaagttttgggtgtagctggctgtcaatctaggatagaggctggagatggcactattgcaaaatttatagttcaagattacgagaaggatgaagagtttttggtaacttggaatgagttgagctcagaggtctcttggttttgtcgattgtttgaatataaaggttttcttcttaggcatgcattgagtgttctccaacgttgtggttgttcttgtgttccatcccattatatcttgaagaggtggaccaaagatgccaaaattaaggaattgatggcagataggacgagaaggacacaaactagggtacaacgttataatgacttgtgtaaacgagctattgatttgagtgaaaaaggatcgttatctgaa

SEQ ID NO: 20633 - DNA, 186 bp, Glycine max
  Clone ID: PAT_MRT3847_118637C.1
ccacgcgtccgctctggattattcttctaacttaatgtctgctgactgatggaaaacgatgaagatggtaacagggtgtattaactacttgggtgggcactgcttggaaactctctctacctattctacacccaacctgagactagcttagaacaaaccactatccttacttaggcgcaaaactat

SEQ ID NO: 20634 - DNA, 2016 bp, Glycine max
  Clone ID: PAT_MRT3847_118638C.1
gctgcgagaagacgacagaaggggaattataaaattggtcattggagtggataaagaagaaacgatggcaagtccaggatcgcacattgttgtccttgcgttcgtgttgctcatttcatcaaaacttgcagaatgtcacaacatagttcgcttccttcctggcttccagggaccccttccttttctacttgaaactggttacgtggaagtgggtgaaactgaagcagaggagcacgcagaactcttctattattttatcgagtcagagaacgatcctaaagggaaccctctcctactttggctaaccgggggtcccggttgctctgctttctctggccttgtctttgaaataggtccactgacatttaaaaacgaggaatacaatgggagcctacctaatttgaccttgaagccacaatcatggacaaaggtaagtagcattatatttgtggatctgcctgcgggtactggcttctcttatcccaaaacagaacgtgctgttcagcaaagtagctctaagcttgttcgccatgctcatcaatttattaggaagtggctaattgatcatccggaatttctctcaaatgaagtctacattgctggtgactcatactgcggcattcctgtcccagttattgttcaagaaatttcaaatggaaacgaaggtggtatgcaaccatggatatacatccagggatacctgctgggaaatcccataacaacatcaactgaaaaaaactatgaaataccatttaatcatggcatggcattaatttcagatgaactctacgagtcactgcaaaagaattgtagaggagagtatcgcaacatagacccaagaaacgcgttatgtctaagagacatgcaatcgtacgaggagtctatttcaggaattgaaactggccatgttttggcacccctttgcgacgagtccgatctgcgtaatgatatggaagtcacttggagaagaagttctcttgctcataaaacctcagcgtttttcagtcctcgtctcacattgccacccttatactgtcgatctcatgcatatgtcctctgtagctattgggccaatgatgataatgttcgcaaagcattgcatgttcggaagggaagtataggaaaatggacgcggtgtaacgatgacttaaaatctaagtttaatgccgatatccctagcagcttccaatatcacgtaaatctcagcagaaaaggctatcgttcattaatatacagtggggatcatgacatggtagttccattcttggctactcaagcgtggataagatctttaaactattccatcgtatctgactggaggcagtggtattacgatggccaagtagcaggttatacaaggacttactcaaatcggatgacatttgcaactgtgaagggtggaggacatacagctcccgagtacaaacctgaagaatgtttagccatgttcagtagatggatatctaatatgccattgtaggaatacccgactgagtcaatgtgatacaatgctacggggcaattgctttatcctaatgtcatgtcaagaaaaactagcaagtttactggccattttgtcattcagtgaatcaatgtgtatttctctcattataacaggaaagctgttggtttttagggaataaaggcagtaaaaaaaacaaagaaataaaattctggagaatataaatattttgagaaacagattgtgggagttcaatttattcaaaggaataaaaacaagttgtccaacatggtgaggacactatctaacattgtatctcgcaagttggccctcactgttctcattgatgctgctgatgttgactataacgttgcacctgctgatgctgcctatcgagaatctgtcaatgtgtttggaaagccaaagacgaacactgacttacttccatacaatgcggatcgattcaaactctcaattacctgaaagtggaacccaagcaaatatgttgagtacccaagttaggttcttatagatgaggacaattttgaattaac

SEQ ID NO: 20635 - DNA, 978 bp, Glycine max
  Clone ID: PAT_MRT3847_118639C.1
gtctccttgctgttaactgtcgtcctgcaagtgcccctctaggggcgttgcattctgagttggcttttttttgatcgccaacttacaacttttcacccgtgtgcaggtttggggttggtgccttgggcggcgtgtgcaggggctttcttccgtgtgcacgccgcacggctgccttgagacgttcttcttgggctcgtcgcgggtcctgcctcgctttgcatgtggcgtgtcttatatatgatttcttgccgaacgggacaaacatgtttcactttcttaatatgtagtgcaggtactcaacaaaacagtataagttggtctaagcgctataaaattatagaaatgattgctcgaggagttctttatttacatgaatattctcgacttaaaattatacatcgtgatctcaaacctagtaatattttattagacgaacatatgaatcctaagatatcagattttggtatggctagaattgttgaaatagatcaagatcgtggaaaaaccaaaagaatagttggaacatggggttatatgtctccagaatatataatgtttggacaattttctgaaaagtcagatgtttttagttctggagtcatggttttagagattattacaggaaaaaggaatataaattcacatgcatcaccctatatgtcaaatggtctcttgagccatgtttggagacagtggaaggaccacacaccattgagcatattggatccaatattgaaagaaagttattcccaaattgaagtcactaaatgtattcaaattggtttactatgtgttcaagaaaataaaaacaatagacctactatgacaaaagttgtttcatatcttgatggccacacactcttgccatctccactgaaaccagcatttttcttgctggacaagatccatcaaaatatagctacacaacatatttctgtgaatgagatgtctataagtacatattgtgctagataataa

SEQ ID NO: 20636 - DNA, 503 bp, Glycine max
  Clone ID: PAT_MRT3847_11863C.1
ccctcgcgttcggcaaaacccagtcctcggccttgtttacgtgctgatcgcctgtttcttgtccggatttgctggaatttattttgaaaagattttgaagggtagcgaagtgtccattctggctgcgcaacattcagctgtcttcgctctcaattcccttcggcattctcttcatcgcagtcaaagaagggtctgatgtgctggaaaagggaattcttcacggattcgattccgttgtttggctttccgtccttttgcaagcaattggtggcctcgtcgtggcagtggtcatcaaatacgccgacaacattttgaaggcgtttgccacttccctgtccattgtcgtcgcaacaattgcgtccattttgctcctgggcaccgagcccaaactgatgttcttcctcggcgctacctttgtaattactgccgttgtgttctacggcgtttttccatatcgggaaaaagaagaaattaccagagagaaaggaggccaaaggaacagt

SEQ ID NO: 20637 - DNA, 381 bp, Glycine max
  Clone ID: PAT_MRT3847_118640C.1
cgattccccaacaacttgggactgcactcttaataaaaacacggggggaaaaaaaaaaaaaacaaaaccccggtggccccatttatatgagactgggcccactcaaaatttcaaccttgtatggggggttacttaacattaagggggtccaaggggccatgccccgggtacttaacattataaaactgatgcttattattgttataagtactacgaagggcttaatccacccctggggcgaactttaacataaaggggggtagccatttcacaccaaagcctctgcacctccggaagaccaaccttcccctctagaaaggggagccattaaaacttgggcaaaagccttcccccccaaaaagacagggggctaaaaccaaa

SEQ ID NO: 20638 - DNA, 1345 bp, Glycine max
  Clone ID: PAT_MRT3847_118641C.1
gtgtttctttactatttggttctgagttcttagaacaatactactatatttcctttgatgaacaacaacaccatctaattaaaactcctactgagtaagtttctttgaagtgtgctatatatcatacattctatcaacacctatcgtttatctgtatctctcttttcctcgcatcatatcacctgtcatacatacactttttttcctttcccctctttataaggtgttgaatagagtttagtgtccgccaaagttttctcgtttctcttgtgttggcttaactaacaggcactatgttggagggacatcaacttttggggtttggcttctttgtaattggtttatggcacttgttcaaccacatcaagctccatgctcttagttccaagtcctacacatcaaccctatggtttcccaccacaatatccagatacttggagctccacttcatcatggcaagctgcacaatcttcattgccatggaactcttcatcgctcccattcatcaccaaccattagaccctgatggaaccattcccaccacccatctccacaactttgaacactcttccatggccatggctttcttggtctatgccatatttgccatagttcttgatagaattaaatgcaccaaagcacagcatgagctaactcacttgctaggagccatagcttttacacaacaatttcttctcatccaccttcactctagagatcacatgggtccagaaggccaataccacttcttgttgcaacttttgattattatttctttgagtacaaccctaatgggaattggcttccctaagagcttcttggtctgctttgtgcgttctgtcagcataatcttccaaggtgtgtggcttatggtcatggggttcttgctttggacaccagggtttcaagccaaaggttgctccatgcaccttgatgagtctgatgaatatgtggttagatgcagtgatcatgagtcccttcatcgtgccatctccttggtgaacattcagttcagcttcttgttgattctagtcaccattttcgccatgtctttctacttgattctggtcagaagatatggtggtgagaaagtggagtatgtttttctgacaaaggaggaacattaccgtgaagaagatggctttgtgaaacctaacaacgacgttgaatcccaatcccaagagaaaagcatgcaagagcagatttaaaataagcactttcttggtgtaaacggtgaattaatcagaaatattatcattcttatgattttcaaataattattgtaaaaaatcaacaaatttactgttatggttaatttattgagcctctgaaaaaaaataaacaa

SEQ ID NO: 20639 - DNA, 1230 bp, Glycine max
  Clone ID: PAT_MRT3847_118642C.1
ccacgcgaccgaacagttgtgtgttggtgtttctttaccttttgtttctgagttcttcgaacaatactactacatttcctttggtggacaaagaacaccatctaattaaaactcctactcagtgttgaataaagtttagtgtctattaaacttttctcgtttctcttgtgttggcgtaacaagcactatgttggagggacatcaacttttgggctttggcttctttgtaattggtttatggcacttcttcaaccacatcaagctccatgctcttagttccaagtcctactcatcaaccctatggtttcccaccaaaatatccagatacttggagctccacttcatcatggcaagctgcacaatcttcattgcctcggaactcttcattgctcccattcatcaccaaccattagaccctgatggaaccattcccaccacccatctccacaactttgaacactccttcatggccatggctttcttggtctatgccatctttgccatagttcttgatagaaaatgcatcaaagctcagcatgagctaactaatttgctaggagccttagcttttacacaacaatttcttctcatccaccttcactctagggatcacatgggaccagaaggccaataccacttcttgttgcaacttttgatcattatttctttgagtacaaccctcatgggaattggcttccctaagagcttcttggtctgctttgtgcgttctgtcagcataatcttccaaggtgtgtggcttatggtcatgggtttcttgctttggacaccagggttccaagccaaaggttgcttcatgcaccttgaggagtctgatgaatatgtagtgagatgcagtgatgatgagtcacttcatcgtgctatctccttggtgaacattcagttcagcttcttgttgattgtagtcaccatttttggcatgtctttctacttgattctggttaaaagatatggtgagaaagtggagtatgtttttctgacaaaggaggaacattacggtgaagaagatggctttgtgaaacctaaagtcactatccaccttgacaataacatccacgttgaatcccaatcccaagagaaaagcatgcgagagcaaatttaaaataagcactttgtgatacctaaaggcattggtgtaaacggtcaatcaatcagaaatatcattcttatgattttcacccaattatggtaaaaatcaacaaatttactgtt

SEQ ID NO: 20640 - DNA, 380 bp, Glycine max
  unsure (1)..(380): unsure at all n locations
  Clone ID: PAT_MRT3847_118643C.1
cctcccctccatgaaaggaangannaaaacgggggccagatgaggtaaaacagccaanccagccacaccaccagccagggcgaagaaaaggccccccagggggcgcgccagcnccgaaagacacaccancagcccccaagacggcgaaccacggaacccggcccgcacaaaagcaaagacganggcagncaaaccaaacccgcgcncngaggcaaggagccgggaanccccgaagcgcaccggaccncacggcgagaccaaccagcgccaccggacggaccgccaccccaaagcaggacgcccagggcacaacagagggggccacccccccgcaggaaggngcccccaggacccacggngagcaaacccacaaaaccccc

SEQ ID NO: 20641 - DNA, 392 bp, Glycine max
  Clone ID: PAT_MRT3847_118644C.1
gccgccctttttttttttttttttttgaccctttttgaatttttattcactagatgcatttgacttttgagttttttacaaaacggagaacaaatgcccagggggtatgcctcgcctttacaaaggccatgtatcccaaataacatttgttttttacacccgctaaagacaacctttttttcaaaatgaaaaatggcgaaacaatcgccccagtacccaattttgcgagacaacctgtttcttcaaaccaaagcacactaacattggtctctgttgcacactatacagatatgcttgtccttcgctttgtccatagagaaaaggcctttaccgcctggaaaagagcccccaccgcagtccctttttgtggggaaaaattaaccgctccagtt

SEQ ID NO: 20642 - DNA, 1324 bp, Glycine max
  Clone ID: PAT_MRT3847_118645C.1
gtcgcccttccgtccgctcggtcgtgggcgacccctcgtcccaagccccttcttctcgctcggtacactcttattgctatccgctggtcacaccctccctctcacatgtcaaacctcaagctacccatctccctctgaacactttttctcccctttcctttttttacacctttcactggtaggtcatattgccagaggattttggctataatgactgcatctgggttgagtggttgtcccacaagatgtccacagctaccttttcatcccatgggatcacgccatgcccgggttatggccttctctgtggctgggagaaataaacaagggatagcatttcgtcaagtggaaagaacgagttttttgtctcctatattaaaatgcaatagacaacttcagttggtcaaaagtgccatggatgcttcatatggtgatatgtcaaatgattctgctgctgtttttccaagaattaatgtgagggacccatataaacgacttggaataagcaaggaagcttctgaagatgaaattcaaggagcaaggaacttcctgattcaaaaatatgcaggacacaagccaagtgtggatgctattgagtcagcacatgacaaaataatcatgcaaaagttctatgaacggaaaaacccaaaaattgacattaagaaaaaaatgagggaagtcaatcaatccaaatttgtgcaggctgtcagaggcagatttcaaactccatctacaaaattcattataaaaacttcaatagcattcttggtacttggagttttgactgtcctctttccaactgaagaagggccaactcttcaggtagcaatatctctgatcgccacaatatattttatccatgaacggctgaagagcaacatacgagcttcgctatatggggttggagcatttggtatttcgtggctgttgggaaccttcttgatggtgtcagtaattcctcctattaccatacttaagggaccaagggcatttgaagtgatctcatcactgataacatatgttctattatgggtttcatcgacctatcttaggtgaagagggttttaaagccgaagaccagtttttgcagaagaagttcacgaaattttatggccgaccttgtttagatgtcaaattatagcttaaaggagaaaaaaaatgacatacattattttgttgaattaacagttgttttgtctttttagattaaatatttgaattagcaaacgtactggaatgttttagaagcggaaatgaatgtgttttttgttcagtttggatatgaaagttttggctttcaaattttacatatccgtttttaaga

SEQ ID NO: 20643 - DNA, 488 bp, Glycine max
  Clone ID: PAT_MRT3847_118646C.1
tcgtaagcatcagatagatcatagatacactgactgaaagagatcagatcatagatggagttttttctagggctatgtggggttcttgttgccttctcagcagcactttgcctcttgttgctcttgatattaacattttattgggttgttttccctaatcaaacacttaagaagcttaagaaatgtgggttgggaggtccaaccccaagttttccacttggaaacattgaagaaatgaaacgaaagaataacattcaatcttcaattgtatcctcaaatttctcgcacgatatacactcgagcgttttcccctacttttcaagctggcagaaatcacatggtaaggttttcgtgtactggttggggacggagccatttctgtacgttgctgagccagagttcttgaagaaaatgtccacagtggaaatggctaagaaatggggaaaaccaagtgtgtttagaactgacagagaccccatgtttgggag

SEQ ID NO: 20644 - DNA, 320 bp, Glycine max
  unsure (1)..(320): unsure at all n locations
  Clone ID: PAT_MRT3847_118647C.1
agcagcgacaccattgacaatgtcaaggctaagattcaagacaaggaaggcatccctccggatcagcagcgtttgattttcgccggaaagcaacttgaagatggaaggaccttggccgattacaacatccagaaggaatcaacccttcancttgtcctcagcttnngtgggtggcatcatcgagccttccctcatggnnctttggctcgcanatacaccaagacaagaatgatntgccgcaatgctttgcctcgctgacctaggggctgtgactgcgagaaaaagatggcggccctattancccgtgagctagaaaaaaa

SEQ ID NO: 20645 - DNA, 578 bp, Glycine max
  Clone ID: PAT_MRT3847_118648C.1
attgaaacatatattatattatttcaaaataatgtcattcgaaatcattatcatgaacatagccaaaagccaagcttaatcttgtcacgtcgtgagttcattcatggttgttgggtctcttaaaagagccctttcctaaaagacttcagtttcagttctggccggctaaatagccggtttcctctctactcttctgtcaaactaaatagaagagcatcttatccatgcgttgctacaaattgagccagctgtgtactaaacaaattctgacaccaagttctggcataaagatctaaaatttgccagctatatactattcaaataagataaaagatgggaacaaaaaactaccaagggtacatatatatatagatatctatacccacgcacaaaaaaagagagaactatctcatccctatggctccctagaggtgctaccgcaccttggtgtgcttaacttgcttaagccctcacattagccttgattgggttcaataagagaggttgccctgtgtttgatgaagagagaagaggaaaaaacaaaaaatactgatcacattgataaacttttttttttt

SEQ ID NO: 20646 - DNA, 194 bp, Glycine max
  Clone ID: PAT_MRT3847_118649C.1
aaacattgctttgttaacagtagctgtataataaacctttggtggttgcactcattgggatcttacgcttgaatcttggcattgatatataaatattatccaaaacatgtgagcgactaacaacccttttggaaaatcatggcatctgcttctgggccatatactttgccttaggttattaccctgacacactt

SEQ ID NO: 20647 - DNA, 384 bp, Glycine max
  Clone ID: PAT_MRT3847_11864C.1
atatattggggggtatttttttttttttttttttctacttttttttttgtatactttgtatattgttttttttacaaacccaccccccacaaatataggtgggggggagaaaaaaacaaaagggggaaggaagagtctacctaggcatagaaacaaaattccagggggggggtcaaaaaaaaacacaaaagaggaaccacgcgctggggggaaacctagatattataagaaatattggaaaaagaacctctcttccaatacgtagaaaacaaaagaggacccagagggggccttattataggaggagagacaactttacacttataaaaaaaaaaaggcttttgaggaaaaagagagccgctgggaaacccaggtatatttttt

SEQ ID NO: 20648 - DNA, 318 bp, Glycine max
  unsure (1)..(318): unsure at all n locations
  Clone ID: PAT_MRT3847_118650C.1
gaacgttagcgagaatcctctagagcggccgctaaaatttttttttttttttttttttttnagcaatctaaatncaccgaaaaaaaaaaaaaacgcgcaggattttttcgcttaaacgagttcaatacatcattttaaaacataataaacagcaccacttaaaccagaaatccaaagcacaattttaagggagacactgaacaaacaaataagacatttgaaaacacttcataaaagggattccccttaacaaccacccccaatgccaaagacaatattcaaaatggatttccttctgaaatatttgtaattttgcca

SEQ ID NO: 20649 - DNA, 1128 bp, Glycine max
  unsure (1)..(1128): unsure at all n locations
  Clone ID: PAT_MRT3847_118651C.1
ccaattcattaattatccaccctaacccatcattccttcacggcgaggcaacgcaaggtgggtaccccttgctctgcctccgccgtcacctacccatcatttcaaatattcatcgacataccttttatagctatgagcgaggaaaagcatcaaaagcatcatgacaccttgtcttcatcttcttctactcctacttgttatttttcctcctcttcttcttcttcttcgccgggcgagtcggaggaggagctgcagcacatgctgctggtgccgccgttgtggaaaaacaaaaagaggctgtcgaagcagttgtcgatgtgcgagaagcctcgggacattgcatgggagagaaggcgcatgcaagagcggaggaggagttcgaccgtgtgcgatgatctcacggatgaggacctgcatgagcttaaaggctgtatagaacttgggttcggattcaacgaggaagatggtcagagactctgtaacaccttgcccgcacttgacctttatttcgctgttaaccgcaggttgtcacctagtcctgtctccacccctcagagccgtgcctcttccctcggatgccgttcttcgtcgtttggaagccctagaagcgacgctgactcctggaaaatttgtagcccaggggatgatcctgaacatgtgaagaccaagttaaggcattgggctcaagccgttgcttgttctgtgatgcagtcttcttgagaaaaaagtgtgggatgtttgtttgttttgtacagagagggatggagaaaaaccagaaaaaaaaaagggtctccgattattcctggacaatggtctatactatagctaattaagcacctcatttttcttcacattttttctcttggtgttgttttaatctcaagctgtctgtctctcgcagggtgtattcgtcgtatagtaattaatttttgggtcacagggtaaaatataattgcattcgggtcgggggggttaggatatggcctctccttaacatgtattgtcaagataatcaacaagagacgtcacatcaatcatgagtatatattgtttagatgagttctacccatctttagcttaggacatcatttgacttgtcgtgactnnactgtaaaacttgcaanntgt

SEQ ID NO: 20650 - DNA, 275 bp, Glycine max
  unsure (1)..(275): unsure at all n locations
  Clone ID: PAT_MRT3847_118652C.1
gttggaattgtgagtgttccttctcgcttatttgaagcaatcacaaagtttagtattgaccantcatagcaaaaaaattattattactaatatatgggtgtctagttgtgaggaagtagtttaagttggatgctgtatttgattgttgttatccatgagattgagtggatagtaaaatattagatttttctttattaattaatctattggcttttttttttttttttgaacggccaaaaatataatatattaatttaaagatagaagatacaaag

SEQ ID NO: 20651 - DNA, 450 bp, Glycine max
  unsure (1)..(450): unsure at all n locations
  Clone ID: PAT_MRT3847_118653C.1
ccctttcgcctctctctatcgcgtctagcggtggagagtactatttttccaaccctctctctttctctcatcatcccccttttccttctttttcttcttcttcttcttcctcctccttgcgccactccttatagggggggggggaaatcactctgaggggaaacactataatcaatcggtggggggggctcacagggggggttgtggtcttcttttcttccatgctttttgcgtggcttccttctgcctcctccagaaactgtggccggataccctttcaggaggggtacncgccccttgggggggacagcaacttagggatccgtggggggggggaatggggggatctttcactcggtgagagaacaggggggaggggttggggggggatgggagtttgacgctgggggggggtggggggggggtgggggttggggggggggggggggg

SEQ ID NO: 20652 - DNA, 751 bp, Glycine max
  Clone ID: PAT_MRT3847_118654C.1
ggtgccatgcggcacccattccgacccacgcgtccggtgacgtacaattctcttattgatgggttgtgcaaatcagggaaaattacttctgctttggatcttatgaatgagatgcaccacagaggtcaaccagctgatgtagtcacctacacttccttattagatggtttatgcaaaaaccaaaaccttgacaaggcaactgcactattcatgaaaatgaaggaacggggaattcagccaactatgtacacatacacggcacttattgatggattatgtaaaggtggaagacttaagaatgcacaagagctttttcaacatctcttggttaaaggctgttgtatagatgtctggacatatactgtcatgatcagtgggctttgtaaagagggcatgtttgatgaagctttggccattaagtcaaaaatggaagacaatggttgcatccctaatgctgtaacttttgaaatcattatttgttctctttttgagaaggatgaaaatgataaggccgagaaacttctccatgaaatgattgctaaaggcctattaggttttaggaattttcatggtgagcaccaatgtttattgcgtttgattggttcatagattatgctatggacatttcatttgattaaaaatcataaattggctaatttattttggtattgtaacaataactttcattaatttttttatttattgttttaatgttgtcataactcatacctacactttttcttcctaaaaa

SEQ ID NO: 20653 - DNA, 489 bp, Glycine max
  unsure (1)..(489): unsure at all n locations
  Clone ID: PAT_MRT3847_118655C.1
aactcctcctcattattgaggctccaaatcataaccaggatatataacatacacaccaaaagtacaggagcccagagtgcaactactgcactatagttattttgagctgcatagatttgaatatcttagacctatcttgattatcagacttgaatgccatttgtgtaatctccccaaattcaagttcttcgagtaactgtttgagctaaatgatttcacacatagctgatcccatccctttttttctctgcttcagcacttgatcttgcaaacacaactttttcttacttttctaggtgcatggttagcacttctcttgtcctgtatgctaacatggttctgttggtatactccagtacttttggcattttagttgaagtttatatatgctcttttgttttggtaaccagctctatttgaggaaatattttgttgatatctatatggtgaggatattagttntctatgacatggagtgccatgattagt

SEQ ID NO: 20654 - DNA, 220 bp, Glycine max
  unsure (1)..(220): unsure at all n locations
  Clone ID: PAT_MRT3847_118656C.1
cctaaacacctttttggggcggcttaccaagggacacgcnaccaataccgtttttttcaccttcaacaaggttaacccagtgcaaccaaacattatgctccaaaaagatgcttgtatttcatcctgtggggagttacaacttaccaaaggtggcagcaactgtgtgcccacctcgggaactatcggtcgagccctttacgcttgcccaagacaaatttgg

SEQ ID NO: 20655 - DNA, 1773 bp, Glycine max
  Clone ID: PAT_MRT3847_118657C.1
ggaaaattgaaagtgaacgtttccgatgcgatttcagagaaggttgcggctgggaatggacggtgatggcgaggagttgacgccggagaagaccgctttgtatgagcgtttaattgaattctgggagggttgcggctggggatggacaggtgactgcgaggagttagacgacgcaagagaccgcattgtatgaccgtcaaattagggtttggggagctgatgctcaaagaagattaagcaaatctcatgtcttagtctatggaatgaaaggaactgtagctgagttttgcaagaatattgttctggctggagtaggtagtctgactttagtagatgaccgggctgccacggaggaaatgctttcctccaactttctcatccctcccgatgagaatgtgtatagtggaaagacccttgcaaatctttgttgtaattcgctgagagtctttatcgctatggttcacgtttaccattttgttgtgttatttttaaagtcttgatcttgaattcctcagcaagtttgatgaatgttgacgtctgttgttgcgcgctttagttcataaacttgactgatggggattcctgtagtgaatttatccttgatgcgcaggattatgattattgaaagaaaaaaaaggatgaaaatcttgtatgattttatgcatttgaatgattcgatgattgaggagaaatattttgtggtgtgcagcattataaatattcaaagaaaaaataggatataagtgttgtggacgaccttaaataggcatatgttgaggatgcattatctgtatcttggagagaacttcataggagaatgtcaaagcagtacgatgctaggagaggtctattacacagtaaactgtagatttctgattagtgagtaaaatacataatgtgaaaatcaatgaatctaacccatggtaaaataatacttttagttaagaatagctgccttagtgattgaatccctagactgtgttaccagagaagagatagagcttgagaccattgtttacatcttaatgcttttggttgtgacttgtgtttgaaataaatctttcttctttctttctgcttggcatggcattatagaccagatctatagaaaatttttaagtcagttccgaaaaattgtcaatttcaataatagaaaagtttgaataggctgagggacgtagcacaggggaagtttcgattgcagatttctctggtcttctcaaactgaaaaaggagatttgtactgcacagtctctcaatgaatctcaagtgcctgattctcttctaaaaagattggtgacaaatgcaacagaatttccccctgtttgtgctattatagggggaatccttggacaggaggttatcaaagcaatttctgggaaaggagaccccctaaagaattttttcttttttgatgcttttgatgggaagggcattatagaagacatctctccgaagtgattaactaatggccgaagctttggcaatataaagtagggatgtaaccttttggcaaaacagcacagaaaactagtaaatttcgaaagatatcttaagaagaaattgacccttcacccttgttaactgctcatatagcttcctagttgtatgtaatttatctagactaatgacagtttaggcttaggatcttctcgtcatgtaatcactagacactcatcaacattccctttgatgttatgaatatgaagtgtttgtggtactctactgggtacatgtggcaaaaaaaaaaaagaaaaaaaaaaaagaagcgaa

SEQ ID NO: 20656 - DNA, 1432 bp, Glycine max
  Clone ID: PAT_MRT3847_118658C.1
tatcttacggctgcgagaagacgacagaaggggaccgtcaccgattgattattctcatcgccgcgctcttgaaagcttgaaccgagatacgattttttttttaaagcgtttaggcgaattcagcgagagttgcggctgggaatggacggtgacggcgaggagttgacggcgcaggagaccgctttgtatgaccgtcaaattagggtttggggagctgatgctcaaagaagattaagcaaatctcatgtcttagtctatggaatgaaaggaactgtagctgagttttgcaagaatattgttctggctggagtaggtagtctgactttagtagatgaccgggctgccacggaggaaatgctttcctccaactttctcatccctcccgatgagaatgtgtatagtggaaagacccttgcagaactttgttgtaattcacttaaagacttcaaccctatggttcatgtttccgttgagaaaggtgatttgtcaagttttgatgttgaattcctcagcaaatttgatgttgttgtcgtcagttgttgcacgctttcagccaaaaaactggctaatgacaaatgcagaaagctatcaaaacgtgtagcattttatgctgttgactgcagggattcttgtggtgaaattttcgtcgatttgcaggattataaatattcaaagaaaaaacaggatgaaactgttgaatgtgacctgaaatatccatcattcgaggatgcattatctgtaccttggagggcacttcacaggagaatgtcaaagctgtactatgctatgagagtaatagaaaagtttgaagaggctgagggacgtagcgcaggggaagtttccattgcagatctttctggtgttctcaaactgaaaaaggagatttgtactgcacaatctctcaatgaatctcatgtgcctgatactcttctagaaagattggtgacaaatgcaatagaatttccgcctgtttgtgcaattatagggggaatccttggacaggaggttatcaaagcaatttctgggaaaggagaccccctaaagaattttttcttttttgatgcttttgatgggaagggcattatagaagacctctctccgaagtgattaattaatggccgaagctttggcagtctaaagtagggatgcaaccttttgccaaaacagcacagaaaactagtaaatttcaaaagatctctaaagaaattgacccttctcccttattaactgctcatatagcttcctagtctgtatgtattttatctagactaataacagtttagggttaggatcttctcgtcatgtagtcactagacacactcatcagcgttccttttgatgttatgaagcccaattgtccttttatgtttatgtggtggtactctattgggtacatgtggttatcagtcttttttaattatggatttccatt

SEQ ID NO: 20657 - DNA, 549 bp, Glycine max
  unsure (1)..(549): unsure at all n locations
  Clone ID: PAT_MRT3847_118659C.1
attaatcttactccttttatttttctgtcccagttctcttaagncgaacgcctaaaacggccagagaccattgaaaagctttggcctcccccccgtagggagaaaaagcattattaccataccgggggaggacaaaaattttgatagggcccccccgcctatggggggtccccaaaaaaatccccggaaccggccccaaaaaggggccccctttttaaaaaaaaaaagttttttgttacccaatttgaccttttgggggttttacccacccgggcttccgaccccaatttcgctcttacccccccgggttaacaaagaaaaaatttttttttggggccccccaaaataaaatcgggggcgcgtttttaacacccgggggagggggaaaacccgggggccccccaaaataaattcccggggaaaaaaaccccctttttaaagggggggaaaaaaaaaaaaggccccccgcggggccccccccccaaaaaatggcccccccataggggggaggggccccccccctttaggggaaaaaaaaggggggggggg

SEQ ID NO: 20658 - DNA, 132 bp, Glycine max
  Clone ID: PAT_MRT3847_11865C.1
tactgggtgccagaagacctgcgtagggatgagagaaaactctgcacacatgtgtggtttatcaggacctacttacaggtgctgagcttttctcggactcattccggtgcaatgaagtagagagaggaatgc

SEQ ID NO: 20659 - DNA, 334 bp, Glycine max
  Clone ID: PAT_MRT3847_118660C.1
tttccgggtccgaccacacccttccgcccacccgtccgtttaactccaactttgcttccaataaataccatcggcatcagagaatggacaaacttgtattccttaactgccacaccacttcttttttttttttattttaataacaccactttaaagccaaacctaaccctttttttgggggcaattccaccttttaggccattttccttaccctgaaaaagaaaaacttgtttaacttcaaaagccttattttaatccacaaataagaatgtcttaaagctttttaacataacgtctagcttttaagatttccttaggcttgcaaattttaatt

SEQ ID NO: 20660 - DNA, 208 bp, Glycine max
  Clone ID: PAT_MRT3847_118661C.1
attaaaacattggccttttgtttgttttatttttttacgcccggggaaagcgcacgagtggcccagcattaaccattcacaacgatagccggctgcctttggccatcgaaatataatgcttggactaatggagggtagcaagacgagctatattcctatcttatgtaacaaactcagagggaaaagagaatcaaatcggacccgtggg

SEQ ID NO: 20661 - DNA, 133 bp, Glycine max
  Clone ID: PAT_MRT3847_118662C.1
gcacgagatgatcccgaacgcgttatttgccacgtaatctctccttcctattcaattctcaacggagtaaaagccctagaacatacatgtcttgtttcattagttttggaattttggaattgaaagctggacc

SEQ ID NO: 20662 - DNA, 541 bp, Glycine max
  unsure (1)..(541): unsure at all n locations
  Clone ID: PAT_MRT3847_118663C.1
cgcaagaaaccctcgattgctctctcagggtgtatggggaattaaggaantaaatattaagcacgagaataagatcaaaagcgatcaacgtagtatctgattatcaacgaacagcattaatatgtaccacgacgactgtgacatttaccatgggaaccttaacgttgagggtatgggcaactcttttaagaagacgagtttgaagactatgaaantaacagatggaagttcggaaaggaaaagctattagacgactggaggtgaaactgcgaagactggaagtaatggcgagataatacttaagtggagccctagtgagctttcggtgatgaatcctaacaagaaaacctctggttgaaatgatgtgggataccggttaattccancaatcccaactcatcgtgttctcacagataacgagtatgcacggatacatagcgcttggagcaattggaatatataagtcactgcatacgatgggacttagaagtagnctagtagacggtacgttgatcacaaccggagaaatnatgctttagcc

SEQ ID NO: 20663 - DNA, 319 bp, Glycine max
  unsure (1)..(319): unsure at all n locations
  Clone ID: PAT_MRT3847_118664C.1
atttttaaaattttaaaaaaaaaaaaaaaaaaaaaaaaaaaaaggaaaaaagatataaaagggacagaggttaattatgggttgtntgcttaagtaggtctctattgtacggtcgcacctatgctacatcctctctcctgtttagtgccccgtccatcctgtccatgccctggccttaccaaccccgtgcgtgtcgcaccccttcccgctcccacctcattcccctttgccaaattcccctttccccacgtggttcaaaaccgatgggccccccccccgtcgcccttcccgaccctgcacggcacacttcctaatggga

SEQ ID NO: 20664 - DNA, 550 bp, Glycine max
  Clone ID: PAT_MRT3847_118665C.1
gcttaacaacctttttttttaaaaaaaaaatgggcaactatggcacattttttacaacccctactaacgtcaccacccccaaagaaatgacaaggacccccccttcctttccctttattaaaacatttttgaacttgccatcaccccttttattcctttactagaagggccaccattatttttacccaaaccattgctgggctaggcggtgttcccattgctcccacaaaaagacgaatgctaatcttttccccagcctttttttcctgaacccattccaaaacattcaccaccagttttccattaaccgacttcccttggttccccccagtttcgtgctcccgtttggacacccactgttttccaacaggactcctctggcgagctgaaaatctcgccaccttttcaagggggtgctttactaaaatttcaattacactttgccccccgggtgttttataacccccagcagcaatttctaaccaaggtatcccgacctttttttttgacttggagaatctatgtggtttttccctacccccccttattt

SEQ ID NO: 20665 - DNA, 711 bp, Glycine max
  Clone ID: PAT_MRT3847_118666C.1
aaaagcaaaactagtttgggatttaatttatcaaactgtgagcatgtttcaacagaaatgacataaatagactctacatgcaaaccacggtaccaaactcttagcaaaagtccaacaatggacaaaaacagaaaacatgtagataatctggatcaacctaaggccaatttcaagatcaacttgaggcatttgtattactcatagatccaagagtgctgggagctttgccagttagcagggccctcagggaaccacaatgcaatttccttgttagcactctcaactgaatcacttccatggataacattccttccaatgtcaatagcaaagtcaccacgaatagttccaggctcagattgagctgggtttgtggctccgataatctttcggccagttgtaacaacattcttaccctcccagatcatggcaacaacagggccagagacaatgtaatccaccaaaccactaaagaaaggctttgcagacaaatcagcatagtgcttctcagcaaaaggacggtccacagtaacgagtttcaaccctttcaagtaaaaacccttcctctcaaatctgctaataatctcgccaatctgaaacagaaccacttttcagtcaaatattaacaaaccacaaatcacatgcataaccttaaattcaaaaacataaaagatcaaattatcgacccagaataactcatcaccaaaacaaaca

SEQ ID NO: 20666 - DNA, 1144 bp, Glycine max
  Clone ID: PAT_MRT3847_118667C.1
catggattttcaaaaattgggtgaatgtttgttttggtaataagtttttctgggtcaataatttgattttttatgtttttgatttaaaggttatgcatgtgatttgtggtttgttaatattgaactaaaaagtggttctgtttcagccaacgcctccgtcagaatattcgtccgggaaattagggttagggttgccgctcactcacaaacacacactgaactaaaaaacatcaaaagagacatggctgagcaaaccttcacgctctctcactcacaaacgcacactgaattcaaaaacatcgaaagagagaggcatggccgagcaaaccttcatcatgatcaagccagatggcgttcaaagaggccttattggcgagattattagcagatttgagaggaagggtttttacttgaaagggttgaaactcgttactgtggaccgtccttttgctgagaagcactatgctgatttgtctgcaaagcctttctttagtggtttggtggattacattgtctctggccctgttgttgccatgatctgggagggtaagaatgttgttacaactggccgaaagattatcggagccacaaacccagctcaatctgagcctggaactattcgtggtgactttgctattgacattggaaggaatgttatccatggaagtgattcagttgagagtgctaacaaggaaattgcattgtggttccctgagggccctgctaactggcaaagctcccagcactcttggatctatgagtaatacaaatgcctcaagttgatcttgaaattggccttaggttgatccagattatctacatgttttctgtttttgtccattgttggacttttgctaagagtttggtaccgtggtttgcatgtagagtctatttatgtcatttctgttgaaacatgctcacagtttgataaattaaatcccaaactagttttgcttttaccttgttgattgttaatgtttttgcatatgagccattgatgaggatgcaggtgcagttacattatagtcttccattgtcatctcaacttcccagttatcataaataaattggcacttgttaaaaagccaaaaaaagagggaagggcggggctgggggccgcactgtgggtggcttgggggggggg

SEQ ID NO: 20667 - DNA, 577 bp, Glycine max
  Clone ID: PAT_MRT3847_118668C.1
cacgcgtccgatttgcatttgaaaaccaaaaccttaaaacttgctaccaccctaaacaggcccttagctaatcatgataattacatgtgattggtgtaaactcttttggtgctgatggaagttgaatgcttggtgatttggatattgtgtgtcaatcggtgtaagctgactttcatgaacgatgaacaagtgccctcatgtgaaacacatataatgccttacgactttaaaacgaatcagttacatagcagttaacttataagaatatataattttgtcagttattgtcaatataagttttcctaagaagtcatgtgatagaaactagttatcttacgatcagagcaatttcctcatttgccgtgaatttatttattcttatactttggtgtttaattgttgtctcttgcaacatgcagcaacattccctttggatcttgtaaggcgcaggaagcagttggagggtgctggtggtcgagcacgtgtctacaataccagtttgtttgggacattcaagcacataattcagaatgaaggggtacgaggcttgtatagaggtattttgcctgagtactac

SEQ ID NO: 20668 - DNA, 522 bp, Glycine max
  Clone ID: PAT_MRT3847_118669C.1
gagccactgttcatttatcactataacgaaatgcctcagcatcctaaactttctcaccaaatcatccttcagtgctttgaccttcgccagtcactacatagccaatcaccaacaggtgcggggcttggcgtccccgacttgacatagtactcgggcgcatcaccaaagttccaagctgaatacacttgaacccgcagttacaatggtagatctcgttttccatatgcaaattaccgatgcattctcatgtccatccctcaatcagtgccgtcgcccaatcgcatagtgctcagactcgagctgcgaaccttctgaatgtggcctatcgcctcaattagatgtgggacgaacagctagggattttccgtcgcacggaaatgtcccagaccaggcatcgtcttatgcatagcgccaggaatcttggcggctgattactgcgacatctcaggcgtgatggaccagtcgtacttgccggagagcatatgcacagggcaactctgcgtatcaatcgacgccacgcga

SEQ ID NO: 20669 - DNA, 229 bp, Glycine max
  Clone ID: PAT_MRT3847_11866C.1
ggctcgagtgatgccccacgtgctgtgtttaccagcattgtatgttaggctaatcacactgttgtgatggttggcattgctcagacagatgcatatgtgggtgatgagggacaatctaggacgggtattgtgactataaagtacccaattgcacatggtattgcgatggagtgggatgatatggaaaagatacggcgtcataccttctgtaatgagctgatggttgccc

SEQ ID NO: 20670 - DNA, 726 bp, Glycine max
  Clone ID: PAT_MRT3847_118670C.1
gtaactcaagagttgctgttttttttcctcgtgacttctgatttgatttccaccttcactcaagttttaattgggaatctgatataggctttggaggttcttccacttccaaggatgctttcaattatacactacagaggatttttcagtgattgagtgagtggatatgaacatggaaggatcttatgattcatcatgcaatggagaagctggtaacgaaagccttcagatcattaaatactctccttataaaccctgcaccatgatatcattatcatcaccttggtttgttctaagagtgttttatgtgagagtgtgtggcattcaggttgatgaatccaccccagagtttctctctctcaaccatattcctcttagtcctgatacccttttagaggtgaatggtgttaggagcagcatttactctgatggagaagagtcttcagttctgagaagggatagagtggataagaaatctgaggaagctacctttgtgaacactgatagtatacgttttaccgggagcatgaagtttgaggtttatgataaggagaattgcattctctctggggttctggagacgtctaatagcaatggttttgttggggaatcaagaagtggtgtgaagagatggagtatgaattgtcaaacagaaatgtcacctgggctgtggcttcttcaagggaaaacatgttgctgtccctgaattgccttgtcctgaaattg

SEQ ID NO: 20671 - DNA, 1568 bp, Glycine max
  Clone ID: PAT_MRT3847_118671C.1
ccacgcgtccggtttttttcctcgtgacatgatttgatttccaccttcactcaagttctctttcttctttcccttcctttcatttatttattttgcctatgtttctttaaattttaatttatagttttataccatgttatgttaatgtcatatgtgcgatttttcttatattttgtacaagatttgttgattcaattatctgagaattccaagtactttgttgattgtgatttgtgaagcaggtttcaattgggaatctgatgtaggctttggaggttcttctacttcccaggatgctttcaatttatcaattataccacaccacagaggattccagtgattgagtgagtggatatgaatatggaaggaccttatgatttatcatgcaatggagaagctggtaagcaaaagccttcagatcattaaatactctccttataaaccctgcaccatgatatcatcatcaccttggtttgatctaagagtgttttatgtgagagtgtgtggcattcaggttgatgaatccaccccagagtttctctctctcaatcatattcctcttagtcctgatacccttttagaggtgaacggtgttaggagaagcatttactctgatggagaagagtcttcagttctgagaagggatagagtggataagaaatccgaggaagctacctttgtgaacactgatagtatacgttttaccgggagcatgaaatttgaggtttatgataaagagcattgcattctctctggggttctggagatgtctaatagcaatggttttgttggtggatcaagaagttgtgtgaagagatggagtatgatttgtcaaacagaaatgtcacctggttgtggctttttcaagaggaaacatgttgctgtgcccgaattaccttgtcctgaaattgaggtttatgttgctggttgcttctcaggaacacctattatcttaactaagacactgcaactcaattgccggaagaagcataacaggaaatgcgccttggattccattccagaatatgaaacaactgagtgccagaaagatgtttctgatcatggacttgatttgcaggtagttgactgtagaagcttcaaactggaacaagaagaggattacaacagcatgtattggccaagaacagtatatgtagatggggaagatggtgaactatcatggtttaatgctggggttagagttggtgttggaattgggcttggcatctttgtaggagttggtataggggttagcttgttaggacgctcataccaagcaactattcgtaattttaagaggaggttcatataacccttaagagtttgaacttatatgctcatcagtggtatcccccccccccctcataagcctttaaagaatgttcttgtttcaaaggatggcataagtgtcaaattttgtcatcatcatgggttgacatccattgtgtgattgattgtgtaggttgtaagtagcaaataaaagcgtgttcatgtaaatggtcaaaaaatgttgctaccagaaatggcttttaatttttaaagttgaagaggtagtttattttttaacc

SEQ ID NO: 20672 - DNA, 1836 bp, Glycine max
  Clone ID: PAT_MRT3847_118672C.1
ccacgcgtccgaaaatccagaaagaaccaggagaggaaagtctttcagtctttctagttctaccaacaacaagtacgaaccaatactaataataatattattattattctcacgggtaaataaataaataaaatggtgcgtgcatagtaataggctaatagggtagtagtttcttcatgttgggtagttggaactccttaagcagcttcagagtctgagaagtgagaagcggaagaagaagcgatgcgtttttgcccgtgttttggatccgaggaggccaagggggtggcggatcgcgacccggtcctgctggtttcgggcatgggcggctccattgtcaattccaagcccaagaaattcgggttcaccactcgggtttgggtcagactcctcctcgctgacgtcgagttccgaaacaagatttggtccctttacaatccccaaacaggttacactgaaacgttggacaagaagtctgaaattgtggtccctgacgatgatcacggcctctatgcgatcgatattttggatccgtcatggtttaccaagtgtatacatttgacggaggtgtatcattttcatgacatgattgacatgcttgttggatgtggttacaacaagggaaccacactctttggatacggatatgatttcaggcaaagcaataggattggcaaggtaatggaaggtcttaaaagcaagttggaaactgctcacaaagcttctgggggaagaaaagtcaatttgatttcccattccatgggaggaattatgatatcgtgtttcatgtcgctttatagagatgtgtttacgaaatatgtgaataagtggatttgcttggcttgccctttccaaggagccggctcgagcatcaatgattctttattaactggattagagtttgttgatggctttcaaagctatttttttgtgaaaaggtggactatgcatcaattgctagtggagtgtccatcaatctatgagatgttggcaaatccatattatgaatggaaaaagcaaccagaaattctagtttggcgaaagcataccaaggatggggacaataacatcaatttggaatcttatggaccaacccagagtatctctttatttgaagaagcactgagggacaatgaggtaaattataaagggaaaacgatatcactgccttttaactttgatatccttgactgggctgttgaaacacgtcaacttatagctaatgctaaactgccagatggagtctgtttctataacatttatgggacatcattggacacaccttttgatgtttgttatggttcggaaaactctccaatagaggacttatctgaaatatgccacacaatgccactatattcttacgtcgatggagatggaacggttccttctgaatctgccaagggtgatggacttgaagccactgaaagggtgggagttgctgcttctcaccgtggaatattacgagatgaaacagtgtttcaacatattcaaaaatggttgggtgttgagccaatggttggcaagcattctaaaacatcaaaagtggcagatgctcagcctatggttctatgaacttgttattttcgttcctcattgaccaaaagagaatattattccatgcttttctttttcttctttttttaagagaaaaagaaaacaagcttagaaagaccttagataacattgtttgtgcaataaacaatttggcgtatgttcaggtaatctaaattacctgagtgtaatgtaatttcattatgctccaatattatagacttttcattgggccgtgtactaaatttggtggtcaaaaagcaattgcatctttcgcttgtc

SEQ ID NO: 20673 - DNA, 451 bp, Glycine max
  Clone ID: PAT_MRT3847_118673C.1
atacacgccacacggatagctgttacaacagtcttgtaattataggaaagcctaatgaaaagaattcaaatgttccatcgttatcttgctccatatacttagtcttgtatttattctagttaataacgagtcttaggaacaggactgcatgatgttgagcctaagagactaagcactcagacgtgtgcgtctttcctataacgacagacaaatcacggatggattgagatggcttcaagactcattttatgctagaaaggatgaccttgctagattaagaaagagaaagactggtcaatgtgagtgctggatgatgtaactatgtgatgagaaggaaacatcatgatcgccttggattaaacagataaattgttgtacgaggatataaatataacaccgctaccactgagagatctgcgcgagatatagaaaaacagaactgtgactctta

SEQ ID NO: 20674 - DNA, 565 bp, Glycine max
  Clone ID: PAT_MRT3847_118674C.1
ttgtcgggtgcacgcgctcactagctgggggtcggccttgtgtgcgtgcatagtaataggctaatagggtagtagtttcttcatgttgggtagttggaactccttaagcagcttcagagtctgagaagtgagaagcggaagaagaagcgatgcgtttttgcccgtgttttggatccgaggaggccaagggggtggcggatcgcgacccggtcctgctggtttcgggcatgggcggctccattgtcaattccaagcccaagaaattcgggttcaccactcgggtttgggtcagactcctcctcgctgacgtcgagttccgaaacaagatttggtccctttacaatccccaaacaggtccttgcttaacacttctgttactactaccacaccaccctatgcatttcaatttttcagttcaatcatcattctctagcaaaattggcacggcctttcatgttacactgaaacgttggacaagaagtctgaaattgtggtccctgacgatgatcacggcctctatgcgatcgatattttggatccatcatggtttacccagtgtatacat

SEQ ID NO: 20675 - DNA, 412 bp, Glycine max
  Clone ID: PAT_MRT3847_118675C.1
ggggtgaagatatagtagtattaaatttaaccatccaggtgtttctgggcctcttaacaaaattggcccaccatttgcttttccctcttccttctctaaatcaccttccgaaatccccaaccaaggactaaaaggggggggttaaacaaatttttgggctcaaaaatgtttctccccccttttagggtttaagggaaaaaggggttttttcccaaatttgggcctccacctgggggagcgaatttttttttaaaaaatctttgggggacaacttatttaaaaaccccaaaagttcctcgggtaatccttcttaaagaatggcttttttaaaaaagggttattgagcttcgggggggggggactctttttttcccctttataggcaaaaaataaattggcccccattgggtgg

SEQ ID NO: 20676 - DNA, 143 bp, Glycine max
  Clone ID: PAT_MRT3847_118676C.1
ttctagatgccataagtaccacaaaacggggcccttaattatgtggttagtttttataggaaaatcaagggaggaaacctcttctttccgctcgcgtgggaacagtatttattataactccatacactattagaattccacca

SEQ ID NO: 20677 - DNA, 325 bp, Glycine max
  Clone ID: PAT_MRT3847_118677C.1
ggctcgagcactagcgtacatggggcatctgggttttctgctacggatctggatcggggcctgggggatgttagggtgatggctatgatacattggactgcctttgcactggcgaatctggcaactatgggccgtcgtgccgcctactttactgtgactgcacactgtctggatctcgggcgagacgttgaggtggatcagtcctaccatgaagacggcccagaatatagcccccctttatcaggagagggtgcttgctggcatggaatgaacccaggagggaggcagctttcatggctccatgatggggcttgtggaaaatgca

SEQ ID NO: 20678 - DNA, 163 bp, Glycine max
  Clone ID: PAT_MRT3847_118678C.1
gagaaaaaaaaatagatgttgtgcgtgtctgtgaaaaatgtgccccacacatttgtggggggagtgacagttatgttataaaccccaagtatcttgtagagaatggatattattttttagcccccagggatgttcgcaaacgtgttcggttagactctaaatg

SEQ ID NO: 20679 - DNA, 105 bp, Glycine max
  unsure (1)..(105): unsure at all n locations
  Clone ID: PAT_MRT3847_118679C.1
gtaacagtggcaggaccgaagccatagcccaagacagcatnanactcatcaggaatctctggttctgcgtctgtgtgttcagtgtcttaatgttcaccgtcatag

SEQ ID NO: 20680 - DNA, 251 bp, Glycine max
  Clone ID: PAT_MRT3847_11867C.1
ggttcaaattcgaatcaagcgcttcgcctatgcttttgcctactgttcacactgtcactaccactgttcaagttctaactaaacacttcggcgcagtctgtggttctgcacatgatgtccctggcagtgatgggtccgaacgatgtcctgatgaccaaatccggtgcaattcgcatcatcatcatgctcgctagtggtccccgtgatatcatccttaccaaactcggtcacactcgcatgatcgagatgca

SEQ ID NO: 20681 - DNA, 453 bp, Glycine max
  Clone ID: PAT_MRT3847_118680C.1
tccgaaacttaaaaatttataaacagaatgaggcatttgaaggatcgagtgctgtggcgtgctccaatttaggaagcatggcaatgccatgacttacaatatgcagcctctcataatggacactgtctatcgggcgcagtactctcggaggggaaaagcgcatgttggaagctcgctgagggagcacacaacaaaactggctttgataccattcctgaagagcgcggtgcaacagcaaacgaatacatccatggggaacaatataaatcatactgcaaaacagctaaccaacaagcttacttttatgccagagaccgtgaacttcattccaaggacacaaaagcgtacagtagagatggcgccggaccctgtaatattccatactacaaaaaacatggatatggggtggaaaaatttaactcgacctcgtgagaagaatggggtaacaagggg

SEQ ID NO: 20682 - DNA, 867 bp, Glycine max
  Clone ID: PAT_MRT3847_118681C.1
ccacgcgtccgtgccatgtcaaagccaagtctccaccgcaccccacgataaatagcgtccagccacatgcacccaaagatggcggcctccatagttgcttcctcctcctcattctcctctattctcaccactcaatttctcactccctcttcattttcttctctctttctcaaaaccctcactttaaggtcctccacgccgtttcagcgtctttcttttgcgtcacaaccactgcgcaggctcatggctcgcgccaccctcggcctcactctcccagccaacaccgaatcccttaaggtttctttcgcggcaaaggagcttgacgtggcggaatggaaaggggaccttctcgccgttggcgtaacggagaaggacgtcgcgagaaacgtggaatcgagattcgagaacgcgattctgagcgcgttggactccaagctgggcgggttgttgggccaggtctcgtccgaagaggacttcagcggcaaacttgggcagtccacggttctaagaatcgcttccggactcggattcaagcgcgtcgccttgcttggcctcggcgcctccgcgtccaccacctccgcgttcaagtccctcggcgagggccgttgccgctgccgccaagtccgcccaggccggccacgtcgccgtcgcgcttgcctctcccgacgcactctccaccgagtctaagcctaaaacagcgtccgcaatcgcatctgggactttgctgggaacttttgaggataacaggtacaagtcagagtcgaagaaatcagggcttaattcggtggatattatcgggcttggaactggacctgaattggagaagaaactaagtatgcagctgacatttcttctggaatcattctc

SEQ ID NO: 20683 - DNA, 2624 bp, Glycine max
  Clone ID: PAT_MRT3847_118682C.1
gtccagtcacgccaagccaaggcgctatcatatcaattcctcttccccaaaccaacatcacacgcaatgccatgctctagtcttgcccgcttcaaatattcattctttttttctatataacgatcatgaaattgtaattattctgtcgaattgctggttctaataaacccacagaaacccagagagctagagaaaatggcacatcagcggcggcgccaacactattaccaacgcttccgtcacatgattccggtgttttccgccgtcgccgccgcgctattctttctcttcgctctcctttcgtttttagctccttctcccgtcgaaaccgatcgtatccaccggagacgccaacacacttcggttaacgttcaaaaggatgaggcgattgaaaattctgcgttccgcgttccgagtgatggaggaaagttgggacgcaatatctggagttctcgaaattcagagcacttctatggatgcagcaattccagcaacaagtttcaaaaagctcaagtgattacacagccgaatcggtatttgatgatcacaacaagtggaggcttgaatcaacaaagaactgggattacagatgctgttgttgctgcgcgaattttgaatgctactcttgtagttccaaaattggatcaacgatctttctggaaagactctagtaacttctcagagatctttgatgttgattgatttatatcatttctgtcaaaagatgtcaaaattatcaagcaacttcctactaagggtagtaggaaagcattatctgcatacaatatgcgggttccaaggaagtgtaatgaaagatgttatataaatcgcatattacctgtactccttaaaaaacatgctgttcagctcatcaagtttgactacaggcttgcaaacaggttggataccggaatatcagaagctgagatgtagagttaattaccatgctttaagatttaccaacccaatacttgcaatgggtgaaaaattggtccatcggatgaggatgagaagcaagcattatattgcactgcacctgagatttgaacctgatatgcttgcattttctggatgtgattatggtggaggggagaaggagcagaaggaactgggtgtaataaggaggaggtggaagacattacataaaagcaatcctgatagggcaaggaggcagggaagatgcccattaaccccagaagaagttgggctcatgctaagagcattgggatatgggtctgacattcatatttacgttgcatcgggggaggtatatggagggaaaagaacattggcacctctcagagcattatttcctaatttccattcaaaagagaccattgctaccaaggaagaattagaaccattttcttcattttcttctcgcatggctgcactcgacttcattgtttgtgatgaaagcgatgtttttgtaaccaataataatggaaatatggcaaaaatattagctggacgaaggagatactttggccataaaccaaccattcgtccaaatgctaaaaaactttatcgattgttcttgaatagaagtaattcaacatgggaagcttttgcttctagtgtccgtactttccagaaaggcttcatgggggagccgaaggaggttagaccaggtagaggcgggtttcatgagaatccatcgacctgcatatgtgaagattctgcagcagccaaagtggacaaaaattcacaatctagaaaatataggaaggataatacaacgaagaaaaatgtagcaaatgatgaactggatgttggcaatgtgtctgagtggccagacatggatgatgatgatgatgatgatcagaatgatctagcagagaagggtacatttaatgaaacaatttcggactatgatgctctgacttcgaggatcctgagttggaggaaattatatcagattagtgaaggtgccttattcagtgttgatgtacctgttgacttattatggctctttgcccccatcacttaagcagctcgatttgacagctgcttataaagctcaaaaacaggaacagaaaaggcacgtctttctcaatactggccgaactatagtaaaaagacatctcaaaaatttaatcgtacgatcatcttctgcatttttaaggacataatggtctcagtttgatgctgaatttttggagtgtttagacttgtacgaatctgtaaagaggttatcagaagtgagcaagtagagttagacgacaaccatccgaatatagctgcacacaaaattgagtttgttaagtaggaaaatctgtatatcttgaggaaaatcgttgcagttgatagactgtacacctttgttcctgtctttctttgacatcgaagcagtcaacttcacttttagaagcaactagatgccaactacagtttttgtgcctaaaggtaacatatcaatagtgatgaccagacactttagccgttttaagaacatggataaattctttcatataagcagtcactataaaaagtagatttgatttcgcaaattgcgtgcgtgttgtgtgtgagggtgtaaaatgataattgagtgaactctggtccctgtctgactgaggaagggaaagcaattcaagatctgaaagggctggcattttgatacc

SEQ ID NO: 20684 - DNA, 324 bp, Glycine max
  Clone ID: PAT_MRT3847_118683C.1
aggaccactgtcacacaaacgagacatactcttaatcgtgaagctgcattgaaatatcgagcgtgagtaactaagagacaccagggcgcgaaaggcaggcgtagtaggcgatatcagacgagagcagcatctgcaacgacccttgatgcgcgagggctgagcacatgaatcgctgtcagatcatactcaatagcataggagacgcaagagacatgatcaacaagacccctgatatcaacatcatctctcatcagttactcgtcatcaaaacgagctacaaatgagccgtatgcatacatagaccagttacattacgaagcactg

SEQ ID NO: 20685 - DNA, 475 bp, Glycine max
  Clone ID: PAT_MRT3847_118684C.1
atatgagactacactggcatcgtctagctatctcgatcgaactgtccaaggtcctgtcacatctattaactcaactcaaaactctgggtgaatggaacgcagcctcaatctctgcaacgggtacttggcaattctagtaaatgctagtgggcccgcaatgtgtgttatgccttatgttttgaaatgaggggcagcaagtaaatttgacttttgtgcaagtggttaaggtttaagtggtggtgcgggtgtggaattatgatggtatgcattgtggtcaaggtcatgttaaattttaaagaagtcattgttaaatgtttaaaatatgaatggtagtgtacaacaaattgtaaggcaagtccaaattcgtgtggtgaagtgtgcggttaaacaacaattcacgccagttagcggctccactttcgagttcaagtttcgcagccatgatctctcacaattgcttctacaacaagtatga

SEQ ID NO: 20686 - DNA, 128 bp, Glycine max
  Clone ID: PAT_MRT3847_118685C.1
ggggaccaggagaaaagttaataatgttgaatggataattaagtgtaagttctgatgggacaggaagaaccatgtaacggaggtcaactcgctctaaacttttccttccgtccacgcgcctcgctcat

SEQ ID NO: 20687 - DNA, 499 bp, Glycine max
  Clone ID: PAT_MRT3847_118686C.1
gctgcgagaagacgacagaaggggacgaatgaattgggaatttggaattgtgtctgtgactgagactaagctctcaacttaaaacccttgctgttgttcactgtcgccgtcgaaacggggttcctctgtggtagttggaaggtcgcaccgtgccactattgcaccaggctgcctcgtcatcggagggggtcacggtgaagtgtattctgcttttgtgttataatttcaataggaattcagatcttataatcctcagtttgatcctatgaaggacagacacttgaagaaaagaatcaaaagattgaaagacatggttgagccagataaaaattgcgagactagggttgaagatgttgcttggccttgctccctttcagagtctgagattgcttggctaatgtattccgatcacattgggatggcaaacgtgtgcttattattccaaaatgtctaaaaaatttctgacgataagtattcatatctaatcatggtagttgag

SEQ ID NO: 20688 - DNA, 432 bp, Glycine max
  unsure (1)..(432): unsure at all n locations
  Clone ID: PAT_MRT3847_118687C.1
agnggggatgaaaanattggcatgtcacacatcacatagagnnacttcatgcatctagcgtttatcactncangaaaaccaacatttgcatnattcaaagggggtttcngtttcanaatactnggcctagnggcagngggatatatcctanccgngcattgacccctnctgcttncccnacgataggctnanacctnanctaccatcacctnctggtnaacaaaggccggggtgttaangtggccccgggcaaatnggatgattggatnnatcgngannnccccgttgnaaaccaganaaacttgaagttccaangtcgcntggacanntnaaaacccncgttccaaagtnntcngcacataagttntncatgcccccngnttcaggcagngatctnnactaggangccccgtggggcaaagtagatcccnc

SEQ ID NO: 20689 - DNA, 1263 bp, Glycine max
  unsure (1)..(1263): unsure at all n locations
  Clone ID: PAT_MRT3847_118688C.1
agcatttttcacagtagaaccttcactctgctatccccgaaccttcactctgctctcacccttattcctctctttcctttctttcttctgcaacaaaaatcatgtctgggtccttgggattcttctttgtgggtcttacgttgttgttgttggtcggggtggctaatgctgtggccaacacttccaacaaatttgatcaactcttccaaccaagctgggcttttgaccacttcattcatgaaggggatctcctcaaactcaaactagacaatttttccggcgctggttttacttccaagagcaagtatatgtttgggaaagtcaccatccagcttaagcttgtggaaggtgactctgctggaacagtcactgctttctatatgtcatcggacggtccaaaccacaacgagtttgattttgagtttctaggcaacaccacgggggaaccatactctgtccaaaccaatgtgtatgtaaacggagtgggcaacagggagcaaaggctcaacctttggttcgaccccaccaaggattttcactcatactctatcttctggaatcaacgtcaagttgtatttttggtggatgaaacgccaataagggtgcacacgaacatggagcacaagggaattccatttcctaaggaccaacccatgggtgtgtacagttcattatggaatgctgatgattgggccacgcagggtggtcgtgtgaaaacagattggagccacgcacccttcattgccacatacaagaacttcgagataaatgcgtgtgagtgtcccgtgtcagtggctgcaatggataatgctaagaagtgcaccagcagtgaggggaataagtattggtgggatgagcctaatttggctgaactcaacttgcaccagagccaccagcttatgtgggttagggcaaggcacattttctatgactattgcactgacactgctaggttcccagtcacgcctgctgagtgtgtccatcaccgtcacacctgagcagacttagtgattagtctaaactttattttgttataacttatgggaagttatgaaaataggattggggcataagaaaaaaatggtgggtggtgaacaaagttgtggaacatgtccttcatgtttctgattgtaatatatattgccacaacattaatgtgaattgttggtttttcttcttgtacagccacagtataactaatgtgaattattggtttttcttcttgtaaaaaaatcgacgatcggnactccaggncttaacgga

SEQ ID NO: 20690 - DNA, 339 bp, Glycine max
  Clone ID: PAT_MRT3847_118689C.1
gcacgagattcaaagtaaaaatgtccccctctctttctaacaaattaaacatcaagcaatataacagtataacatgttctgattttgagtcaaagtcggaagccttcccgttacaagcgacaagcctccaaggcgagtccataggatggtcgggcaaagttttagattttgaatgagaaagatgcacaaaatcggtactgcacatacaacatgtacgtagatggaaaaaaaagaaggtaaaagcgtgtgctgcgattttcatttttatcaaatatatatatatatatatatatatatatatatatatatatatatatatatatatatatatatatatat

SEQ ID NO: 20691 - DNA, 218 bp, Glycine max
  Clone ID: PAT_MRT3847_11868C.1
ggcaaaagaaatactggtttattacaacgttacaacaatcatgtttaaaattaactaatccttcttatgttaattaaaataaaaccccaaggatataaaattgataattttcatactcttataattaaaccaaacctcatgccttgttcaaaatagtaataacgcaatatgtttttcccataatttacactattataacgtatttttacaaaatgtcg

SEQ ID NO: 20692 - DNA, 1169 bp, Glycine max
  Clone ID: PAT_MRT3847_118690C.1
agcatgtctcgtcgtagaaccttcactctgctatcccccatattcctgtgtttcctttgaaaaaaaaagaagaagaaaaaacatgtctaggttttttggattcttctttgtgggtcttacgttgatgttggtcggtgtggcaaatgctatggctaactcttccaacaaatttgatcaactcttccaaccaagttgggcttttgaccactttattcatgaaagggatcttctcaaactcaaacttgacaaattttccggggctggttttacttccaagagcaagtatatgtttgggaaagttaccatccagcttaagctcgtggaaggtgactctgctggaacagtcactgctttctatatgtcatcggacggtccaagccacaacgagtttgattttgagtttctaggcaacatcacaggggaaccttactcggtccaaaccaacgtgtatgtgaacggtgtgggcaacagggagcaaaggctcaacctttggttcgaccccaccaaggattttcactcatactctatcttctggaatcaacgtcaagttgtatttttggtggatgagacacctatttatgcgcacacaaacatggagcacaagggattccattttcctaagaccaacccatgggtgtgtatagttcaatttggaatgctgatgattgggccacgcagggtggtcgtgtaaaaccagattggagccacgcaccattcattgccacatacaagaactttgagatcaatgcttgtgagtgtcccgtgtcagtggctgcaatggataatgctaagaagtgcactagcagtgagggcaagaagtattggtgggatgagcctaatttggctgaactcaacctgcaccagagccaccagcttatgtgggttagggcaagacacattttctatgactattgcactgacactgctaggttcccggtctcgcctgctgagtgtgtccatcaccgtcacaactgagcaaaaaataacttattaaaattagtcttccatattttgttctaattttaagggaagttatgaagataggattggggaataagaaaagaaaatggtgggtggagaacaaagttgtggaacatgtcctccatgtttctgcttgtaatatattgccacagtataactaatgtgaattattggtttttcttcttgta

SEQ ID NO: 20693 - DNA, 338 bp, Glycine max
  Clone ID: PAT_MRT3847_118691C.1
agaaatttgacggacactgctactttggaatttcttgaaatgttgaatgaagaactttggctagtatttcattgatgaaatgatattttgtccaaagcttataatcactatgagtgtaagggcaataaaattgaatttaaattgtaaaaagtacaagtctaaccggggtaattcattagggtgaacatatcgtggttaccttccattctttttgaatatacaaatcgtgcgatgtattttgatctttcaatattgctagttatagatatacagcgcacttgaatgatcaatttttgttcaattcacatcccaccgaattcagctggcctcattgagta

SEQ ID NO: 20694 - DNA, 531 bp, Glycine max
  unsure (1)..(531): unsure at all n locations
  Clone ID: PAT_MRT3847_118692C.1
gtaagcncggaatncgnnnaagcggacggtccaagccacaacgagtttgattttgagtttctaggcaacatcacaggggaaccttactcggtccaaaccaacgtgtatgtgaacggtgtgggcaacagggagcaaaggctcaacctttggttcgaccccaccaaggattttcactcatactctatccaccaaaaatacaacttgacgttgattccagaagatagagtatgagtgaaaatccttggtgggtgagacaccaataagggtgcacacaaacatggagcacaagggaattccatttcctaaggaccaacccatgggtgtgtatagttcaatttggaatgctgatgattgggccacgcagggtggtcgtgtaaaaacagattggagccacgcaccattcattgccacatacaagaactttgagatcaatgcttgtgagtgtcccgtgtcagtggctgcaatggataatgctaagaagtgcacttacaatgagggcaagaagtattggtgggatgagcctaatttggc

SEQ ID NO: 20695 - DNA, 517 bp, Glycine max
  Clone ID: PAT_MRT3847_118693C.1
gcactctaagaatgcgttactgatacactatggaacccgaactacattgatagcttggtataaatggcaccaagcaaggaggaagaacgcagattgatggaacataaagatgattctgctaccaaacttgggcctgctgaaaaatttttcaaggcaaagcttgaagtacatttcgcatttaaaaaggtggaaacaatactttacataggcaattttgattcccaagtgtgaaatcctaagaaaccctttcatactttgcaggctgcctgtgaaaagctgccaaacagttcaatgtacttgaaacttctagacgctgtactcaaaactgggaaccgtatgaatgtgacgaccaaccactgcgatggacatgcatttaagcttgatacgcttctcaagctgtgagacgtctatagtgcggacagcaaaaccactctactgcacttagtggtactaaaatcataagaactgaaggcgcacgtacctcaagagctaaacaaacaccgagcactaacttgaa

SEQ ID NO: 20696 - DNA, 715 bp, Glycine max
  Clone ID: PAT_MRT3847_118694C.1
gggtatgatgattgagtttgcaaaaaatatggctgattatcttgctggtagtggaaagaagcatattgttgttctctccagcttagattttggacaatggcaaaaagttgacatgtcaagtggtttgcagatttattaccttcctagttccaacagcaatggaacagatgaaaattgtgaacagcttgggtggaagaaacttcaagagtatgacccttctcaaatgcattggaaatatcttagtgatttagctgaaggaaatgtaactgtggaagatattacttcagtagaagatgagctagaagaagaaaattattatgctagcatgccttttgctgcacttttttcttttctcaagaaggggacaacatatcggatgcttttcagttaggcgatgcagtatgtaaacttctccagctgagtcaccctactactggaattgaaggtggcaaatggcgagttcccctttcttggatgagtgtatatggaccccccccagatgtgtccatcttctaaggttggatttatgtactaatttgtaaaattaaatggctgctgaagataaaaattatagttttagaatattctttcttttttggaatcaaacagcgatgacctgcatgcattgatgtgcgtttagaggtgaaatgtaacaatatatttttacgcagtgtggggattttgtcttctgaaggttatattaattataattttc

SEQ ID NO: 20697 - DNA, 1181 bp, Glycine max
  unsure (1)..(1181): unsure at all n locations
  Clone ID: PAT_MRT3847_118695C.1
gctgcgagaagacgacagaaggggacagctgaaaagaatagcaaaggcagaaagagctgaagcttcttcgtgtgtgacaaagtaacaaatttcagcattagcttagaaaatggagttcgttcctgaagaaggcaagcaccttcacgaggattgctccactttgattttgcctgctctgtcgattggcaatgtggggcagctagttgcagatcttttgatttcatcaatgggttctgagagagttgggtatttggatgatcctaacgttttgccctgtgttggcaatgatgcttatggaccctttcctcaaggagacctggctcttcctcttgaagcttatgattccccttctaatgctctcactatcatccaacagagatcaccggtggttaagggtatgatgattgagtttgcaaaaaatatggctgattttcttgctggtagtggaaagaagcatattgttgttctctccagcttagattttggaaaatggcaaaaagttgacatgtcaagtggtttgcagatttattacctttctagttccaacagcaatggaacagatgaaaattgtgaacagcttgggtggaagaaacttcaagagtatgacccttctcaaatgcattggaaatatcttagtgatttagctgaaggaaatgtaactgtggaagatattacttcggtagaagatgagctagaagaagaaaattattatgctagcttgccttttgctgcacttttttcttttctcaaggctaaaggtttgaaggtcacctgcttgttatgttattgctcagaaggggacaacatatcggatgcttttcagttaggcgatgcagtatgtaaacttctccagctgagtcaccctactactggaattgaaggtggcaaatggcgagttccactttcttggatgagtgtatatggaccacccccagatgtgtccatcttctaaggttggatttatgtactaatttgtaaaattaaatggctgctgaagataaaaattatagttttagaatattctctcttttttggaatcaaacagcgatgacctgcatgcattgatgtgcgtttagaggtgaaatgtaacaatatatttttacgccaaaattgtaggaaacagcacaggatagaacaaatgcttcaaattttgttactnnnagtaacatnnnnannnnnnc

SEQ ID NO: 20698 - DNA, 287 bp, Glycine max
  Clone ID: PAT_MRT3847_118696C.1
gcgagccgggctgagattgctcacattgatattgatgcaactgacattgggaagaacaagcagccctatgtgtcggcttgtgcagctgagagattttcattcaaggggatctaatcgcgtgttacacagcagaggggttgcacggatacttgattctagaggtgggagggaataactgcatgagcataaacgatagtttcctttgagtcataacacttctgagaaagagatctttctcagtatgccatacaaggtctcgacgaactaaccactggggaaagtattgt

SEQ ID NO: 20699 - DNA, 318 bp, Glycine max
  Clone ID: PAT_MRT3847_118697C.1
tatccattcgttcgtccactctttcgtactagatgatactaagaaactgctgtgtaaaaatgagcaatttagataacagacttgtctactgaaacagctcatacacattaagcccattaaaaaataaaaaataaaaatccaccgtataaaccctaatgtttatgaaactcattctcacactagtgataatactgggtaaacttaggctacgagaataacccttccaatttttcctcctattggttctgaaagcacagaaccctcttgggttgaccattatgggggaaacaagggataccatttttacaacaggcaccc

SEQ ID NO: 20700 - DNA, 232 bp, Glycine max
  Clone ID: PAT_MRT3847_118698C.1
cgacacagctgactagtactgcggcctgctcgaatctacttgataatcattgaatagaacagtgaagccagaacagccttgagatcgatggtttagctcgctttgctgttgaagaacacagcaaaaaacaggtttttctttctttactcccttaaaaaagatgaaagaaaatgttaattatggtgtgtattgcatatgtagcttgtcgagaaaatcctatgatttggtttga

SEQ ID NO: 20701 - DNA, 415 bp, Glycine max
  Clone ID: PAT_MRT3847_118699C.1
gatatgttgatttaaagtgagcataggcgggagcataggaagacgggcatcaaaagcggtagcaactggattccaagattgattcaatgaatttctacttttttgtgtactatttcgtgtgggaaagaatatgggtatgtgagctggtctctgagttggcgactgactttgtgaatcattcttagtttaattgttaaacaatttgctatacgatatacgacttgatgtaagacttaaagtcagactgaaactttttcagttctttgttcaattctaagttcaagctgaagaaaaagctgatgaaagctcggactatcgtatccagtataggacttggtggagggactcgtggatagaccttcttatttttactctctctttcacactgatccgcatagtgagtcaaagtggcgtt

SEQ ID NO: 20702 - DNA, 301 bp, Glycine max
  unsure (1)..(301): unsure at all n locations
  Clone ID: PAT_MRT3847_11869C.1
cgctangaagcaatagagatgacaatgaaagtncttgtntagntngangcnaacagntttgggnagcncatgaatggcnatgggctcngactagcagnagttccntctccnngantgaacaagctggggtttggtggngcaatacagcaatgaggtggcatgtgncagttggaggnttggcgtggaaggcaaacancgtagtcaagtggcaaactgttcctgcagcttgnggagagtacataggctgactacgttctaggagaccaatatagatcagattccaaaacagttaaccaacaag

SEQ ID NO: 20703 - DNA, 405 bp, Glycine max
  Clone ID: PAT_MRT3847_1186C.1
cggacacttggggaaatgatgataaaacgcgataatatggggtcataccttagtacgggaaacacaagccctcgagacttgatgccaagaggctcaaaaggctttactactatgtggtgaacaaattgctaaggggaagaaaattcactctttgctttggccacagcctgcactaatgatttgatgtcctatactaattcaatatgctgaagactcaactatgaatgtaggacctatgcgagatcaagctacctctgcagcaatggagtgcctggttaattgcaagctacatgctgtcaacacatgcaaaagagataacactctgctatctgtactaggacttcggggtcagactaagacatttcttgacttggtctcaatgacaaagtctgactgatccacatc

SEQ ID NO: 20704 - DNA, 673 bp, Glycine max
  Clone ID: PAT_MRT3847_118700C.1
aaatgcttgtacagcaacacccaagtcagcagtgcaatcaggccctggagagaaatagagcttgtggtgtgagaagtgtcagaaaacctgtccataaacgcttttcagcagcagatgagaaaatgactcccaagtacttgaaacactctattcaatctgcacttcctgagaaaccggattctcagaagaaaaccaagttggagaaggacaacagagcttccatgcataacttaacagcaccaccccctgcaaaagtaagctgggttctgtctggtccgggggggttctggagcccttcccttgacgattccattgtaccagaatctgaaaagctgaaatggtccgaagcatttgtactatccatccataatgatggagttactaatagctgagctttgcagagttcacaatggagatgactggaaatattgatgagcatgtgctgataccatgtagcttattttgtagatgggaataggattatccaagtgacgtatgttaccctatatgcagatattgtgctatttcactgattataatgatttaggttctatcactataatcttggtacttttaactttttcggcaactcactcgaaatctaatctctggaatttgtgacttgtctgtcctgtaagaacacaaagttgaaggcatacgttgattccatctc

SEQ ID NO: 20705 - DNA, 254 bp, Glycine max
  Clone ID: PAT_MRT3847_118701C.1
gccacgcgtgcggatcactattcacttattcgcataatcggccaaaatgtagactcgcctaggggctcatgggccactaactgaagattccgatcagtgggctcctaagactggtcagagtcaggctctttgtacaacacaacatggtgggcctaaggctacagatggcgcacataataacactgtatgaggaaactggcactatgccctgaacagacctggttctactcctgacaaagaacatctaatgaaaa

SEQ ID NO: 20706 - DNA, 1164 bp, Glycine max
  Clone ID: PAT_MRT3847_118702C.1
cccacgcgtccggttcgtgttgtgttgtgctgtgtttcatcattcatggcttcttctacaactcccacactccctctggctgtcccccagcgacatcactctgtttctcaccgtcaagttctcttcttcgccaaattcagtaacaaagtttcgctctcttcttctgtggcttcgaaacggagttgtaaatcaaagtgcttttatgcaaaagtgcaaaacgcactcaacgaggaagcggttgaaactcagagttcggagttggaggaggatacccaaagtaccccttcttcctccaaactggtcggacgcgtgggtggctccggaggcgttgggcagctggtagtagcatcactgcttcagcagaatattaagtcacggttgatacttaggaatcctgagaaagccacagaattgtttggtgaacaagataaggagaaactgcaggtattcaaaggagacacaaggaagcaggaagatttggatccatcaatatttgagggtgtcacacacgtgatttgctgcacaggaacaacagcttttccttcaaggcggtgggatgatgataatacaccagaaagggttgattgggtgggactaaagaatctagtatctgcattgccttcctcagtgaagagagttgttcttgtgtcatcaataggtgtgaccaagttcaatgaattgccatggagcattatgaacctatttggtgtcctgaagtataagaagatgggggaggattttcttaggaattctggccttccatttaccataatcagacctggaagaatgacagatgggccatacacatcttatgatctaaatactttactcaaagcaacagctggacaacgacgagcagtccttataggtcaaggagataaactagtgggagaggccagcagaatagtggttgctgaagcttgcgtgcaggcactagatcttgaagtcactgaaaaccaagtatatgaagttaactctgttgagggggaaggtcctggaaatgaagctaagaagtggcaagaattattcgaggctgcaaactcccgctaattggactaccaatgaacttttatagcatttcaagccatgtgtgccaattactccccaatataccaaacacactaaagaaaacatgtctaaaggaggaaaaaactaccaatgaac

SEQ ID NO: 20707 - DNA, 693 bp, Glycine max
  unsure (1)..(693): unsure at all n locations
  Clone ID: PAT_MRT3847_118703C.1
ggctcgaggcaaggactggttcagaggatgccaagtgttctgattttttttcgngcatgtcctcaacaatgactacacccactggatgatgtacgcaattggtggaagctcagggccaacaattctgagccaaggaaaccgtttcatagctccgaacaacaacgccgcgaagctgatcacacacagggactatgctgaaccccaagtgtggaagaattggcagtggcaatcagaaatggacttgttcataaacggtgcacagttcatcccttcaggctcacccatcaagacgacctacaaaaagggtctcctcatgaagccaagagatggaactcatgctagtagattgacacgaaattccggtgccctaaactgcatagttggtaggccttgttagacaaattagttaacattaattgttgttgctgttggtttttttttttcttcctccatttttttaaaatgttagaaagcatgcacccatgcatgcatgcacagaagattcatgtcagctaggatgaatttgtttcttctgcaaaactagcattgttggccttgtaagagcgagaaaaagagagaatttgttgcttgggttcaattgagaagaaataaagttccaacttatttgtaannnnnnnnnnnnagggcggccgccgngagtgagctgtcgacacagaataattcggacggtcc

SEQ ID NO: 20708 - DNA, 270 bp, Glycine max
  Clone ID: PAT_MRT3847_118704C.1
ctcgagccggcccccgcaggcgccaaggcagcaatgtctgacaacccaaacaaagcagaaagtagaagcttcacagaggacaatgcaagaaggcgaactgaagggaggaggaattgaaatgataaagtcaaattatttgtcactgttactcttgttatccttgattcactaccaccatgtggctactgtttccgacgacccattcgtgggcgttaacatcggcacagacgtatccaacctcttgcccgcaccggacctggtcaacttcct

SEQ ID NO: 20709 - DNA, 381 bp, Glycine max
  Clone ID: PAT_MRT3847_118705C.1
agttctagagagagaaactcagaaatctaattcataccttgctccgctagtccctacgagccaaagttctattttagggctcaatttcaattgatccctaactagcaagtgtgagttccttcgattcgacgacaaattctccgtttaggatccattgattgattcatccatggcagcgattgaggacttgttagaactctctgatttgatgcgccaagccatgacactcctccccgacgaagacgatgacgaatcctccaattcctaaagacttccactttcctcaagatcgttgcactaaaaaatgttgccgctagggaatgcgcagttctcaacagtttgattagacatcccgttttggttgaagaaaatttggatgga

SEQ ID NO: 20710 - DNA, 892 bp, Glycine max
  Clone ID: PAT_MRT3847_118706C.1
gggaaaagtggcggtgaaaaatgaaagtgactgggaagaacaagcaagaagaaacgttgtttacccacgttgacacacttcactgaccttccctttgagcataatcatcaacaacactccaacaccgacgctgaagatggcgcgcatgttcccgacgccacacaattggctaacgaatttcaagctcaaggagacaagcttgctatggatgggaagtaccgggaagcactaggtaaatgggaagctgctcttgcgttggcgcctgatgttccagttgtgcatgaacaaaaggcccaagttttactagaaactggagatgcttggaatgctttaaaggctgctactcgagctactgaattggacccatcatgggctgaggcatgggtcacacttggcagagcacaacttaattttggtgagcctgataatgctattgaaagctttgaccgtgctctagctctcaagcctgattatgaggaagctcaagatgataggaaaactgcatcacgtcttgttaagaagagaaagcaacttcactcatctggcctgagtgccactcaaaatcgttatatggttggtgaaaaggatgaaagcccgtgaaggtacacaaaaagaggtgaaagttatgttaatattccaatgtagtacatgtttggaaactcgtctataagtaagaatcacatcaatttggcccaaaaacgtggaagatataactgttagcttctggttaaaaagtaagaatcaatcgattgggcaatgtcgtaagtcacatcgacaacgtgcaaccaaacacgttagtaatatttgattatctaaatttctgttgataggaaacttcatgttatatactgttcagaagctcaatgctaaatgctcaacaaagttggttagg

SEQ ID NO: 20711 - DNA, 316 bp, Glycine max
  unsure (1)..(316): unsure at all n locations
  Clone ID: PAT_MRT3847_118707C.1
ttctagatcgctggatttcctttattctagttgttgtccttttcctagtacatttgctagtttatttttccgttgagacattttcttcatagacatgtttacagggaaagagtttaagtgagtctaactcaattatatcagttgctgattaatttattttacagaaaatattgtcagctaaaaaaaaaaaaaaaaaaaaannnnnnnnnnnnnnnnnnnnnnnnnnnnnaaaaaaaaaaaaaaaaaaaaaaaaaaaaaaaaaaaaaaaaaaaaaaaaaaaaaaaaaaaaaaaaaaaaaaaaaaaaaaaaaaaaaaa

SEQ ID NO: 20712 - DNA, 337 bp, Glycine max
  Clone ID: PAT_MRT3847_118708C.1
ccacattggaatccatacctggccgttaatattaaaggaacgtttataggcggcttcccacctaccttaggccttcccccagggctcgtgttgaaccaccctgtgggggcctcgaccattcccaacctggggtggccggcattggctaaggcaggaaatgcggggggctccatggaggaaaggcctcaaggcaattcaattatagggatgggggcatccttgttggcagttgtatttgccttaacctttttaggcccagccttggttttggtggatgggagcctatcccctgaaggacccggccttcctttgggccttagcaccaacccctttgttt

SEQ ID NO: 20713 - DNA, 141 bp, Glycine max
  Clone ID: PAT_MRT3847_118709C.1
gcgaaaagatagtgtacggtacagattgccaccaactatgtttttcaaaactccgtacaggtaaaaaatgcacgctgtctcgagatgaacacactattttttagtaacaaaaccacagctagttgctgctaggagagaaca

SEQ ID NO: 20714 - DNA, 310 bp, Glycine max
  unsure (1)..(310): unsure at all n locations
  Clone ID: PAT_MRT3847_11870C.1
nacnntcanncgtacgtnanctcggaattcggctcgagtanggcttcgagnagacacagaaggggaccacattccnnaacacnagcnacatanattgtagtancacntntttctnggnatntgttcttttgaggtatggcaagcttanaggttnncaggtgacngttntgatatgcntngctntgntgagtgcaccaatgatgntgcaagncgtgtcatncaatgntgtntnnntaaacctancaccgctcctatcttancttatgcacatgnagatgtttccannancgnnctgtannggngtgaggaa

SEQ ID NO: 20715 - DNA, 406 bp, Glycine max
  Clone ID: PAT_MRT3847_118710C.1
caacaaacaaatgcatttcatattattatctatctctaaacgaacagtcctcttcatcatcattaaagttggcgctcttcggtgccattgatgatgatgatgatgatgatgatgatgatgatgtttctttttgcaagctctgtgttacttccatcagaattatttaagatcgacttttcaagcctccggagttagggtgcttctttttgcaacttttcaggcttttctttttctgatcagttactacttcccagctgtttgatgcatgatgttgaagttccaagtttggacgctagctagctcaacctccttttttttttctcccattatttttcatcactaccctccttcaattaataactcttgcctcaaaatccaacaaggcttcagcttgatgtgtaatatt

SEQ ID NO: 20716 - DNA, 1090 bp, Glycine max
  Clone ID: PAT_MRT3847_118711C.1
ttttcagaaacacacgtcacatagcaaatgcatcaacacaaaatgtataactcagtatctatctcctcagaacctgttcatgttgccttgccctaaaaaaaactagcatataacgagagaagagatgcacatagctggggtggggatttttcttacgttttctatatacttaaaaaaaacaaaaaacaatgggagcccaattcataacctgaatctcggattttacattgaaaagtattgcgattacagaatagacccattcaaaagtagaaactatgaatcctttggtgaggggattgaaatgaaaattacacagacatattaagcagtgggaagaaccttattaacaatctcctggctaagggctgcgatctgggaatcaagggacttgatggtttcttccttttgattctccaaggcagccagagcctcctgcagctcagcctccactttcttcctcccctcagcaatcttttgttccacctcagcctgcgtctccttcttcatcgtgttcagcgccgccgctatctcggcccgagaagccgccatgacagcattggccttctcctccagctgcttcacctcctccgacgtgtccttcacgctgctcagcttctccctgatcgccgcgtccctctcgtccatgaatttcccaagcggggtgaaccatatcttgtccaaggcaaccatcagcagcagaaactccaccattattatgggaagggtgaggttgaagtcaaagagtgctgctttctcaatttcttctgcgagggagggtctggccaagaccagtggtgctatccctccaaggagggacagcatctggggctttgaaatcgggagtttcagtttcaaggttggggctttggggagtgaaatttggagaatggggactttgggtgtgggggaacgggaactggtgcagactggaaccagaggtttggtggaagccacaatcatgtttgccatggccaacgctttgtgattaggatgtgtgtgtgtgtctctgctcagtctgagagggttggatttgagagcaaggctatctaaattctttgccacacaaattgatgaggttgtgttgtgttgt

SEQ ID NO: 20717 - DNA, 433 bp, Glycine max
  Clone ID: PAT_MRT3847_118712C.1
ttcatgatgtccgcatagaatatgatgcatgtacaattccaaatgatagtggatcattggttgttgccaaggatggaaatcacaaacaaaacgttggtgagcacgatgctggaagcaaaggaagactggtatatgctctattgataccatatgttgagccagttgtgcaagctcaaagggctgaaggttactcagacttctatccctgtggaggatgatagtcaagagggaagctctcacattggtgaattgaaatctggagtctatgttccactgcctacaaaaactaattggatggaaactcccaaggaatggcaactggatctacctcgtgacaaaactcctagagtcttgactacaactgaagagagattggctggcacagaacatgaggcatatgatccttttcttggtggaaacactaatatgccac

SEQ ID NO: 20718 - DNA, 338 bp, Glycine max
  Clone ID: PAT_MRT3847_118713C.1
aaaaatctccttatgcggcgttttataatatcaggggcgaattacgagcccgatgggcatggcctgagcgcctttatcaccacccacgagttccaagtttgtgactcatacggcgaacggatcccacaagttcgtgatcgagatatactccatgcccaaagggatcggagtggggaagcacattgccagcgacgcgttcactgtgggagggttccactgggcgatctacttctaccccgcttgcaagaattccgaggacaatttcatctacgtcttacgcttcatcttgttcgcgagcgaaagcaccgacgtcagggccctcttcgagctcactctcc

SEQ ID NO: 20719 - DNA, 140 bp, Glycine max
  Clone ID: PAT_MRT3847_118714C.1
gacattgccctaatatccattaaaacattggtgacaggggagtttactaacaagaaggggacgcgggccccacccctgaactccggaccgcgacgaggggcataaaaaaaggccccataagaacacgagccccggggggg

SEQ ID NO: 20720 - DNA, 193 bp, Glycine max
  Clone ID: PAT_MRT3847_118715C.1
gaaaaaccctcagcttggggacttggatgtctttctcagtgttgtggatatgaacgagggatctctttttctgccacacttcaattcaaaggccatagtggtactagtgattaatgaaggagaagcaaacattgaacttgacggcattaaagaacaacatcagaggccgcatcaggaatagcaacctctggag

SEQ ID NO: 20721 - DNA, 306 bp, Glycine max
  Clone ID: PAT_MRT3847_118716C.1
ttgttttttcttttgttttttttttaaaataacacatacttaacacgttgtttctacaagtaaatgaggtgtggaaattatatcataggcatatcatactcagcaacagggtcttgccaagtttgctctattgatttacccactccgaacaagcaaaagaagacagaacttcctactcttggagggcgataccccatttgcaaaatatctggcagaaaccgggggagaaaaaaaagcgggcataacatagtaaccggggtgttcaaatacttgagagattccccatagaatttgagaatctgtata

SEQ ID NO: 20722 - DNA, 455 bp, Glycine max
  Clone ID: PAT_MRT3847_118717C.1
gttgttgtagtcgaagctggcgaaattgctgcttcctcatgagtctatttctagccttctctgctgcatcagagggactttttgcctttttcttgaaatgagtcctccaataattttttatctcattgtcagttctccctggcaagctccttgcaattgttgaccacctgaagtttatggtttagcaatcaaggccttggaatatgtatgttgccatttatggaaacatgcaagttcaagagaatgagaaaataaattttacctgtttccccaccttgcatgcaactctagaattatgctctcttcttgtggtgttatctgtcccctcttgagatcaggtctcagataattcacccatctcaatctgcagctcttcccatttcttttcaatcctgttaatggacaacaacaataatacataattaatcactttgatacataatcactttaccata

SEQ ID NO: 20723 - DNA, 510 bp, Glycine max
  Clone ID: PAT_MRT3847_118718C.1
gaaaggatcagaggcaaggggtttgggttgtgctgtatgaggaaccaaatcactaaaaaattactatgagcagagaattaaaagtgttttgggggtgaagggaaaacatgctgaaaagcttgtgttctcggatctgaagggttttgacttttgaatcactctagtgtatgcttttggcatacctttatacgaagttatactctgaagcaggagaagatggaagatacggtgcagtttcttcctcaagtttggcaacttttctggttattttgccatctgtggttggatgctacatgctatgctgttgtttccactgatcctttttgaagtttcatatgagaaatcttagagagatttgaaaatgaaactttgtgtagaagagagatagagaaaaggttatatgtaatattgtttaatccaagtttttatgttgtgttgatacaagaataccgtgtaatataccaagtttttatgttgtgttaatccaagtttttatgtttgcgcctgatt

SEQ ID NO: 20724 - DNA, 228 bp, Glycine max
  unsure (1)..(228): unsure at all n locations
  Clone ID: PAT_MRT3847_118719C.1
ggcttagtgaaattattataggcaccncttttgactgggagtncccacaatgatgagttctanctagatgaacatggaaacacaagaacaagaacaaatcgctctgggggatacaggtatttgtgctgttctgtaattactaattagttgtttctagatatgcactatatcagtcacatgtctatatttgttttacttatattatctgtattgacaatcagggtggaa

SEQ ID NO: 20725 - DNA, 287 bp, Glycine max
  Clone ID: PAT_MRT3847_11871C.1
acggctgcgagaggacaacaaaaggggggtatcgacttgcggaggtgaataggtgggccaggctcaagtggaagagtgatgcttcaactacatctagctggtgtggtagagagcgatacaagaaacgccagaattatgattggggttgcgaattatatagcacgaacgggggtgactattcgacaacaccaagagctgtttggtcacctgcataccataaaaggtatgctgacttatgcagtcggacaatcatggaaagggaacatgtcttggacgcattttaccaa

SEQ ID NO: 20726 - DNA, 476 bp, Glycine max
  Clone ID: PAT_MRT3847_118720C.1
tattgtgtaatttgtattagcagtttaataatgacaagtatcatctgccaagagaatggattcttgttgacaaggacaaccaatgaagatattgaaaattctacacaactaatgactgtttgtttgtctctaaaacatcccctttttattttggagatgtctaaatatgtatctaggggagggagaatgagatacagggccatgctaacgtatttctcctttagctatacatctgagctctctgcatccacgtaagaagatagagcattctttgttactcatgatgtgtgatctttcactgtgatgtgatgtaaactgtgtctagagtgatccctagtgggttcccagtttcttcttctagtagaactagtaggttcccagtagattttaggagggatcggggtatatgataccatttctgtgaaggtgttccctgtggtgtgtggaaagatacccaatatcgaccgataccttga

SEQ ID NO: 20727 - DNA, 275 bp, Glycine max
  Clone ID: PAT_MRT3847_118721C.1
caatatcctagacaccttaataaataatttacagatactatgttgagagcacggttcccattactgttgctgggacttgacttcctggcttcagtttctgtctcattcggcattgcgtactgggattgagagatgcccaaacacaacaagtgtctccacaggtgcaatagcgagagagtctcgtacaggaaccaagcatgccacgctcgttatcaacctccttaaggtggagtagaagtatgtgaagatggtgaaattccacgaccacgcccacg

SEQ ID NO: 20728 - DNA, 183 bp, Glycine max
  Clone ID: PAT_MRT3847_118722C.1
gttcaagtttacataccatagtcacaattgaaccctccggaattcctaggggtggatctatgcatgaccaattgtcaacactatataaacacccctgcagattccgaggtgtcaagtttacataccatagtcccaattgaagttccaccgtagatcgctgtattattatttgtgccgagaact

SEQ ID NO: 20729 - DNA, 2457 bp, Glycine max
  Clone ID: PAT_MRT3847_118723C.1
atttaattgcccgcaagcctttgtttgactgccacaacaatgtgaagatgtacatgaataccttgacttacttatccagtgacgcattctcatctatcccatcagaactggttcctgacttgcaaaggatgctttctccaaatgagtcttcaaggccaacagcaatggattttacaggctcaccattttttaggcatgacactaggttgcgtgctctacgcttccttgatcacatgcttgaaagagataacatgcagaagtcagagttcttaaaagcattgtcagatatgtggaaagattttgattcacgtgtattgcgatacaaggtccttccaccactttgtgcagagcttaggaatgtggtgatacagccaatgattctaccaatggttctaaccattgccgagtctcaggacaagaatgattttgagcaatcaacacttccagcacttgtccctgtctttagttctgctgctggtgagacactattactgcttgtgaagcatgctgagtttataataaacaagactagtcaagaacatttagtttcacatgttcttccaatgattgttcgggcctatgatgatactgatgctcgtttgcaagaagaggtcctgaaaaaatctgtatcccttgccaaacaactagatgcccagctcgtgaaacaagtggttttgccccgtgttcatggattagcacttaaaacaacagttgcgacggttagagtcaatgcattgttgtgccttggggacatggttagccgacttgataaacatgctgtcttggacatcttgcaaactattcaacgctgtactgctgttgaccgctcccctccaacccttatgtgtaccctaggggttgcaaattctattttcaagcagtatggagtagaatttgtagctgagcatcttcttccattgcttatgcccctgctgactgctccacaattgaatgttcaacagtttgccaaatatatgctctttgtcaaggatatgctccacaaaatagaagagaaacgaggagtggctgtgactgattctggaacgccagagataaaacttgctcccatggttaatggccatcaatccgaagccatgcggacaagcagcagctctatacctgcttcaactaaaagcagctcttgggatgatgaagattggggtcccaaaccaaagggcactgcctcttctatccagaattctattgatgtaaccagtcaatctatggcaggcaaccctgtgggtcaagtaacatctttacaaaagcatttgtccttagcggctttatctgctaagcaaacaaccaagccatgtccctcagtggatgtagaatggccacctcgtgcatcttctggtgttaccctacaatttggtgatactgaaacgcagacaatagcagcaggaacttcatccccatctaatcttgaatctgatgatccttttgctgattggcctccacgtcctaatggctcagtatcaggtggatctggaatatccaacaatggtactttaggaatgccactgaacaaagttgggtttaattcaatgagaagcacttcaagcaatatgggtccccaaactagcaacagttggcctgttaattcccaaagttctgcagagtccattagtttgaactcaaggaatcctatttcaacaatgggtagcctgaatagtggtggccttggacaacagaaatctcttgggtttgtaaaacaaggccaagctttcccagcatcaattgtttcatataataatgttcagtcaacagcaacagatcttggatcaatattttcttccaacaggaatgaacaaattgcacctaaacttgcaccacccccttcaaccactgtgggtagaggacgaggaagagggaggggagctgcttcaaccactggttcctctcataccaagtcacacgctgagcagccaccccttttggatttgttgtggtagcttgcttctattattgttcatgtattagggtgagttactgttgagattgtacattttatgcaacatcctatgttgagtgcttggagacatttattgtgaagggagatttcaaaaaatcttgccaggtaacatgttttaagggacggctactctttgtaaaggttttgttgtatgttgcttagtctatagtgattttgcaaaatttggcttaatattttttatttttttgtcctcgcatcatacttcattcttagggcatcaggcaaagtgtattcaaaaaagtcctgattactgtgactgggttgaaaataataaaggctgtcatgaagtaacttctgtaccaaggatttgaattccgttatgtacgactagcataatacagaaattgtttgtgggtgaagaaacgatctctacccatatcttgctcttaagatctcatctactggagaactgagacgcataaaaaaaaaaaaaaaaaaaaaaaaactcgagactagttctctcc

SEQ ID NO: 20730 - DNA, 982 bp, Glycine max
  Clone ID: PAT_MRT3847_118724C.1
cttgagcccgggagaaaatggggtctctaatggcctctcttactctcactcttgtattggcaatagtttctctaagcttgtgctctcaagcctcagctgacaagtacgactattcatctccaccaccaccagtttacaagtacaagtccccaccaccaccctacaagtattcatctcctccaccacctcctaacaaccattacccataaccatcacctccgaaaccatactagtatccatctccacctcctccacactatgtctatgcatcaccacctcccccataccactactagatagtgattttagtatagcgccccatggatctgaagaacttgtgcaaataaaggagagggaagaagcaccatgcagtttatacagtgaagagtggaacttgcgaaacccgtagtgcctaactggcttcccattactatatctattttgtcccataatacttgaaatctttaaggccccgatcaaatccgaaacacttctttccaccacctccatcatactcctaaaacaacaactccaccactacctaagcaaccaaacacttatctacctcaacttcctcataactctgtctttccataaccccctccgcctaacaaatcctagcatcgtgatttccactaaagcaaccaaaggatctgaagaatttgcgcccaccaagcagtgggttgaatcacccttcagcttatccagtgataggtggtaagtattttgtgaaagcagtagtgtttatttggtttccctttattattgtgatgtaggaagctccatgctgtttattcagtggagagtggaacttgtgaacgatgtagtgtttattcggttttcttgtactatactatagattatgtttattttgtacttttttaaagtttcaattgcactgttatcattgcatactgatccacgtcttctcaagttatattactatataataaataaataccatgatttttttttctctttg

SEQ ID NO: 20731 - DNA, 257 bp, Glycine max
  Clone ID: PAT_MRT3847_118725C.1
tgtgcgccacgctgtgaatccagtgggcagatactgttagactggagccaaatgaaaacagaaccacatcttgaaagggctgaaagacaacttgctacccatatttctatattcaatgaaaggctcttccagaatgaagacaaaatgatgacattcagagctaaacaaaaactaacagaactcatcaccagaagactcatacttgaagaaatgttacagaaagttactcatgtcgaagaaaaatgatatcagatgga

SEQ ID NO: 20732 - DNA, 794 bp, Glycine max
  Clone ID: PAT_MRT3847_118726C.1
gttttgcactgacaacaaaccaaaaaacagagctagctagcaagactaaaatggcagaaactgcagtgtccttggcaggtcagcaggcgcttccaaaaatattggaagctgtcaaaatgttgagagatctcccaaaagaagttagagacattacagatgaacttgaaagctttcaagatttcatcaatgatgctgataaagtggctgaagctgaagaagatgatggaaggcgtcatagaataaaagaaagggtgatgcggctgagagaagcagcttttcgcatggaagatgtcatcgatgaatataacatctcctgtgaggataagcaacctgatgatcctcgatgtgcagctttactatgtgaggctgttgccttcatcaaaactcaaatccttctccttcaaagtgcgtataagattcaggatgttaaatcccttgttcgtgctgaaagagatggtttccaaagccattttcctttagagcaaagacaaaccagttctagaggaaatcaagatatcacatggcagaaacttagaagggatcctctctttattgaggaagatgaggttgtggggcttgatggccctagaggtatattgaaaaattggttgacaaagggaagagaaaaacgcactgtcatctctgtggtgggaattgcaggggtgggaaaaaccactcttgccaagcaagtttatgaccaggtgcgtaacgattttgagtgccatgcgttgatcacagtttctcaatccttctctgctgaaggattgctgaggcatatgttgaatgagctttgc

SEQ ID NO: 20733 - DNA, 271 bp, Glycine max
  Clone ID: PAT_MRT3847_118727C.1
gagagttagtctatcgagcttactagtatcattcagatacaaaggaatgaacttgtgcgtgcgtgttgctacaacagtgacagtatagcaatgccatgcttacgatatcaatgcgtatgaaaataaacactgtttatcagagcctacctcaccacttgcagagcacaggttgattgttgctaaagaacgcacacaatagggagctggagacacataatgaagatatcatgactgacatacggatgctatcaaagctgcattgtatgaacct

SEQ ID NO: 20734 - DNA, 258 bp, Glycine max
  unsure (1)..(258): unsure at all n locations
  Clone ID: PAT_MRT3847_118728C.1
cttgtgtctctacctcctgtctttcctcttccagtaacttaggtacatgatngttgatattagaaactcacaatgcaatgtccgtgccaaggagactatctggaactgtaaatagatgattgtcattcatgtaagcggatgtgaagtaggtaaagtctgaggtggcgatcgaactggaatgagctgatggttatactatggttgaagtggacgagtatagtctgtctaaacaagttctgatggcgtctaagtctcata

SEQ ID NO: 20735 - DNA, 656 bp, Glycine max
  Clone ID: PAT_MRT3847_118729C.1
tcctctagagcggccgcttttttttttttttttttttttttttttttggcatgtttataatattaattgatcatattttgtttatttgtttcaacaaatttggttgcaacaaatttgattgtagcaaagcttattgcaagaaatgagtttgtaggaaatagtattgattcagactattatagtaaatctcgttaaaaaaaatattatttgtattaatctattttagaatattatgttgatggtattaaattaatcaattttactactttcagacatttaataatactatgttaattgtatttgatatttggatgaatcatgatataaaatagtagttctaaaaaaaaagatcaaatttaaatggataacccgttgactcgaaccaaaccaaaccattcatgaatggattgagttgggttgagtttcaaaaacaaattgtgaaacgaaccgaaccaaaccgatcaaatttgattgggttaagtcctgaatttagctaaaatcccgcgaacacccctacttaccaggactaaattcatatctaagcctaataaaatgttgctcacgcaattaaaaattgacaaccttgatataagcaagttaaaaactgtgcacagcaaaaaaaaaatatccaacatgcatgaactcatgtactaatg

SEQ ID NO: 20736 - DNA, 267 bp, Glycine max
  Clone ID: PAT_MRT3847_11872C.1
ggggcgaggggtgagagacccaggatagggcaatgtagcaaggaatgaatgtttcgacggctggaagaataaacccgggagggatggtaatgcaagggggggggggcagcctacttctgaaagaggagctggagatatcgatgctagtaccgatgagcttggcaatgaacctttatagaacgatgaagctagacagcctcttgacaggaaggtttctattgcatctcctaaaataaagccatagcggatggggattatgctgcggct

SEQ ID NO: 20737 - DNA, 1160 bp, Glycine max
  Clone ID: PAT_MRT3847_118730C.1
cccacgcgtccggaaaatgtgtttgataacactttttttcctcctaatgaataacactagatctgccctatgaagcacgggcattccagtcctttgtcgtgtttagtgtccgacacgcgtccgtgtcagtgttcgacaccgacacgacacccgtattacgttctatattttagacattataggtgtccacgtgtcaatatctatgtcgtgtccagtgtccgtgtcgatgtcagtgctttatagtatctgctcccttctttggaaacacacacaaacactttgtcttaaaaatgcacaatctgataccaattttatatgtaaatgcagccaaacaatggatcagtatattgaccaactcgttacgctggcagagaagttatctgagcttatgagtgaaaatcttggtttggagaaaaactacattaaggaggcattttctggaacaaatggacctgctatgggaacaaaagtggccaagtaccctcaatgtccacaccctgaactggttagaggacttagagaacacacagatgctggtggcatcatcctattgctccaagatgaccaagtgcctggcctagaattcttcaaagatggcaagtgggtggagattccaccctccaagaacaatgccatttttgtgaacacaggtgaccaagtagaagtgttgagcaatggcttttataaaagtgttgtgcacagggtcatgcctgacaaaaacggaagtagactctccatagccagcttttataacccagttggtgaagccattatttcccctgctaacaaactcttatatccaagtaattatcgttatggagactatttggagctatatggcaacaccaagttcggtgaaaagggtcccagatttgaatctatcaagaatatgaccaacgggcactgcaatcttaaaccttgaataaagatcaaacatatacccttcattctagttaattttacaagtcatgtttttcgcgttctccttaaaagtagtcaagaaagaaatacgtaacataagtttttttttttttttttatggttttaatatcaataataacaaagaagaaaacacaagttttttctttatctatatccatccctttctttctgtactttttataaactttcagttattctacatactagtttttatgaac

SEQ ID NO: 20738 - DNA, 396 bp, Glycine max
  Clone ID: PAT_MRT3847_118731C.1
caattcggctcgagtctagatggtctgttatacttcccttaagttgggtcaaagccttctggattccgctcatctctaatggggcacatgcaataggtttgcaagagaagaactggatttcatgtgaaatggggctaccatttttcccttcagatttcccagattgtaaggcatactcttgcttaatggaagccaaagctgctgcatttaataaaaaagcagaactctgtcctcttgtgacaaggcatttaagagttcccatactgcctccatggggtattgttcgcattacttttgacaaagtgattaatgcaatggagactcctgatctttcaactagggaagatttgatcaatgctaattcattaccaaacccttgccatggaaactttgaaa

SEQ ID NO: 20739 - DNA, 163 bp, Glycine max
  Clone ID: PAT_MRT3847_118732C.1
gccaccgtcgttttatcctctgtaaaaaaagacttccaatagccttgacaaagttgcgtttacccaggagagtcctaacaccactggtaatctgctcctcactttccagctacagcagtctcgcatcttcttcctgctttgtcgcctctacatatctgggtct

SEQ ID NO: 20740 - DNA, 278 bp, Glycine max
  Clone ID: PAT_MRT3847_118733C.1
ggcggagaacattcgtagagtccagcataagcatttcggcgccaatcataaagcctctgtctgagtctgaccattaattttaacatttttcattcgttcttatgataaaattaaaatcgtgcacaccaacaggaaacactatttgagttgaaaccatattggactgagaaacgattaagtgagcaacagaacactaaccagtactcatcattatctccttctccatctccatggcttccttacccagttttgctccttttgtacttctactgcatgta

SEQ ID NO: 20741 - DNA, 259 bp, Glycine max
  unsure (1)..(259): unsure at all n locations
  Clone ID: PAT_MRT3847_118734C.1
tcccactcgtcctcagacacttaagataacccgttttcattctacgtctctataactatcttcgactgtaccctttctttaaacccttcagaatccttccaataccacaatcttctatccaccaccaacctcatttccccaccatcacctatactatcaaaccttactacccttcatacctctcttttattcatgaatacactcttccatgataccaataaaatcccaaccacaacaacaacaacaacaagcgtcntct

SEQ ID NO: 20742 - DNA, 222 bp, Glycine max
  Clone ID: PAT_MRT3847_118735C.1
aattaaactacatagaaaaataaaaccaaacctttcttcctactactcccattgcgccacatgttacgagcaacatccgacgatcgaccttcgacatgtccgacggcggaggcaatgggcgaggacttcgacttcgccggcgccaccggcggcgacctcgacggcagcagcagcaaccccatcttgaaggtcggcgaggcgaaggagattggaaaagagggt

SEQ ID NO: 20743 - DNA, 207 bp, Glycine max
  Clone ID: PAT_MRT3847_118736C.1
cgcagaccgaggcgtttccagttcgaaagggaaatgaaagtgtctttgttgcagcagggtgggtgagtgatactcatgcagaatttcattacatgttcaagtttttgttcttttgctaagttttcttcttatgcacatttctttacatcttactccctttccgtttttagatgctcggttctcgtacctaacctttaatttttcttc

SEQ ID NO: 20744 - DNA, 335 bp, Glycine max
  Clone ID: PAT_MRT3847_118737C.1
tcgttattacaagaattgatcaaggctctgggacggagcgggaccaaaatgcttaagggaaacgacaaagactctacgtgctggccatccctcttacttacacaacccccagatccaatgaaaagcctctgtggaactccctccaaacacgacagacccaaccgttgtagatacaaacttggaaccgcgtcgtaaagcaacttcgttgcaaagctaacgttagaaccgatgcaaaccactggagcattacccccccctgccgatggtgatctaattgaacgaacctgacatctgtttgtcacaaaagaggaagggttggaactctaagaagacat

SEQ ID NO: 20745 - DNA, 249 bp, Glycine max
  unsure (1)..(249): unsure at all n locations
  Clone ID: PAT_MRT3847_118738C.1
ggttgttgctgctgttgctttctctgtggacctatcttctgagcttactgatccttctaaggctacggctccgtatacacgctcatttcggggcgtatgatatctatgntggtttttcagatgtcactgcagccaagtccctggaggagtagctcaaatcttccgggatatcatatgaagttcacatataccctggatgttcgcttgccttcatgaacacttcgcctgaggcactcaagggaagaaggg

SEQ ID NO: 20746 - DNA, 104 bp, Glycine max
  unsure (1)..(104): unsure at all n locations
  Clone ID: PAT_MRT3847_118739C.1
acccaanttgccaacatcatccattttggcaaaagagaaaaccttttcgtctggatcccacccaattaattgctttcttgctggaaagaaaattcaatttgggg

SEQ ID NO: 20747 - DNA, 386 bp, Glycine max
  unsure (1)..(386): unsure at all n locations
  Clone ID: PAT_MRT3847_11873C.1
ttgttcccgcccncncacgccgcacacaacgcgaaccagccccaagagaaagacccgccggagggcacccccccccctgaaacaaaaaccacgctccagaatggaaaacgcccccccacaaaagcccaatcccgcacggggaaaaaccccccaacacgacacaaccggcgccggcccacattctccagaagatctccctgaaaaggaaaaccaagaaaaacccaaaaagattgatgccagaccgagacaaagaatagacccccaaccccacgaggctcaggctcagatggaaacaaacttgccacaaccgccccccgacgacgccgaaacccctaaaggctccatggcggaccccaaaaccccccaagccaaacaagccccccccc

SEQ ID NO: 20748 - DNA, 414 bp, Glycine max
  Clone ID: PAT_MRT3847_118740C.1
cttacaacttctgttacactcggcatatgctccacctctcactcaagtaattactcctaagggttatattagtcttcaaatccgtatactctctacactgacagaaacccttctgtttctggtcatatggtctctttcagaacctgctctcttttctctgttagtgtcttctgatttatacagatccgatccaaactatagagaatgtcagaaacaccccataggaagacagcgagccttaccccaaaacgaggtcagatcaaggctcaaatgattactagccttgtgaattcatcggtctccactatctcatatacaggggaatcgcttcgaaacgtgattggaaatgcagccggctcatgttctgcatctgttaccccacccacaagtaatggctacaactctgaagccaac

SEQ ID NO: 20749 - DNA, 404 bp, Glycine max
  Clone ID: PAT_MRT3847_118741C.1
cgctgctccagccaccagcccgaacgtggcccaaccgagacgccaagagcctgaaaagcccagcttcatgcagaagctgtccagcattctgtgctgcggtggcggaaaatagtactgctcgaaatatttgcctttgtcatctttgtgttgcatcctggagttcgttcattgagcgacaattttccatcggtcacgtttgcttcctgtataggtatcttgtaatgattgatagacggatcgaaaatctccttccctgggcttgataggcactcgtcacgaccaccagccgaccgatcacatctgcgccaacgtggatctcactccttaccacatcctcgttctcttctctcccgatcccacccaacccgacactttcgcgttgcgcgtatacacgacctggcact

SEQ ID NO: 20750 - DNA, 581 bp, Glycine max
  Clone ID: PAT_MRT3847_118742C.1
aatcatagatacattagcttgcgtatttcttgttcaacttttaagctcactacacatcaaaatgctattctctaataaggatcaagatagacgtagctcaactcgttcaaattataaaagggatatatcttgaccctattaccataagcaactcattcttttcatataactcaaaaagcacaaaaggctaaacttctcttcctctagcaccataagcagctaacacagcctacaaaatcgaccttgcctaggatatcatagaccacaagctcttactcttgtgtgcctcacccacagatgagatgagcgaaacatgttgctgcttcatgtcatacaccgtctaatacgtggttgtgaatgccctctttattgcatgacgctcctgaccatatgggtgaatttcctccacatgattcccataggacgccagtttctcaccacccctttacttgtgtggatacacacttgcaccagcagaggatcctcaacaatgccagcgcttacggttgaattgctgcgccaaacttgaaccttggcattcacaaactaggattcctttctagcctcggagagcataccct

SEQ ID NO: 20751 - DNA, 237 bp, Glycine max
  Clone ID: PAT_MRT3847_118743C.1
agaagatggtgtccttgaagcttcagaagcgcctctcccctagcgtactaaagtgcggaaagggctaggtctggctttgatcaaatgaagtctatgaaatctccatggccaattctcgacaaaacataaagaagatggttaaggatggggttattatcaggaagccctcttaaattcactctcactcccatgctcttcgaatgaatgaggccattacaaaggggcgctcctctcttt

SEQ ID NO: 20752 - DNA, 155 bp, Glycine max
  unsure (1)..(155): unsure at all n locations
  Clone ID: PAT_MRT3847_118744C.1
aacttaaactacaatatatttttgcatattcctgccgtatctagcaagaaataacatgcctgcttanaataatcagagggaaaaanagtgatatttgcacccaagagggacaccaagnaatgtgcannattaaagaactttcatacnnaatgtaa

SEQ ID NO: 20753 - DNA, 623 bp, Glycine max
  Clone ID: PAT_MRT3847_118745C.1
ggaaattggttgtgcatactctcatggtgggcacatgttaaaagccagttgtcttgtatttgtggaggaggataggaatgtaattaacatagagagaaagatttgaccaatgttcaatctctccactgtcattaaaaggagtcaaggatgctggatatgagaaaatgacagttgtgcaggaggctactcttccagtaattctcaaaggtaaggatgtccttgccaaggccaagacaggcaccggaaaaacagtagcctttttgcttccatcaattgaagttgtggcaaagtcacctccaagtgaccgtgatcataggcgtccaccaatttctgttcttgtcatatgcccaactcgagagcttgcaagtcaagctgccactaaactgctgaagtatcatcctaccattggtgtacaagttgtgattggagggacaagacttgctttagagcagaaacggatgcaggcaaacccttgccagatccttgttgctactcctggaaggctaacagatcatactcagaatactgctggttttgcaactaggctgatgggtgtgaaggtcttggtgcttgatgaagctgatcatttctagcatagagttgtcgtgttagggcgcgcattc

SEQ ID NO: 20754 - DNA, 353 bp, Glycine max
  Clone ID: PAT_MRT3847_118746C.1
gtcactagttcctgattactgatgcatctctatcaagatcatgaaagggggaggaacaggaccaacagcacaagcacgatttggatgcgaactaatgatagggagggatatctggcgaaatacatggattatgctgctgctgaacctcgaccttagtgactggttaccttcaactacgacctaccggattatgcctgctgatgatctacttgctacaggtattcagagatctgttcttgctgctgaagtcttgaatgactataggatctctacgactgctgaaatcgaggagtactctatcgaacctatccacacaaatcactataacgaagggctctacaaatgcgatatat

SEQ ID NO: 20755 - DNA, 394 bp, Glycine max
  Clone ID: PAT_MRT3847_118747C.1
aatcccaaaaaaaaccccaggggacctattgtatcgcctctgaatataagagtaaacggggcgggtttccatgcctgctggtccaaaggcaaagatttttatttctggggggttcacagggctcggacataaaaaaagggtttctggcttcagatcacaatgaataatgccagccttttttagtggagcccggccatataaaatctgcttaaagaattgctggacaatcccaagggataatcccctaaaaggattcattttgataagctcatacaaggttgggtcccgcatttcaaagcaaatgcccaaatggcggtgatttaccaaataatcttttttcccaacaaagggaggcctatcctcgggaactatctttttttttaacgggggtaaa

SEQ ID NO: 20756 - DNA, 577 bp, Glycine max
  Clone ID: PAT_MRT3847_118748C.1
tcgcgaatgaagagaacaaccaatcatacctccatgttgcattttttgcactcagacacattccgccaatgactgagttaacatatgattatggacttgcccaatctgatcatgccgaaggtagcagtgcagccaaagggagaaagaaatgcttatgcggatcatcaaaatgccgtggttcttttggttagagttgctcaagaccggcatggtactggcaatgctttcatggctgaaaaggttttgagatctctttcatgtttcaaacctcctatagtcattcagatttgacattgtaataaacatgtgtgcctctctttgtcgctttctatttatcttttttaagaaacaaatcgttttgtataatttgtgtaatagtttttagttgggaatggccatgatgcgccagagaagcatataggtagtgctatgcattcacatgttttatctgtggttttttcctttttacgcgattttgttgtgctgtaatatatgtagctaagaagattagaattgtttttattatttatttgttttattattattattattattattattattattattattatta

SEQ ID NO: 20757 - DNA, 259 bp, Glycine max
  Clone ID: PAT_MRT3847_118749C.1
gaaggcgtcttcataaacgcctttcttctccgtttgcgttgcctcgttcgaattcgctgtttgatctgcgaaaatgagagagcgcatctcgatccacattggtcacgctggtatccaggtcggaaatgctcgctgtgagctctactgcctcgagcacggcatccgtcccgatgggcaaatgcctagtgacaagactgttcgcagccttgatgatgccgacatgacttccgacagcctgactgaatccggattgcacgtt

SEQ ID NO: 20758 - DNA, 729 bp, Glycine max
  Clone ID: PAT_MRT3847_11874C.1
tactcacacaccactaggcttttgttttgttgatttacaatggccttccatggctatgctgcagcaccaacaattgcagcacttttctgctttctatacttcttccacaggagactatgttgcagacacccccttttgacagactaccccatcctcggcatgctgccacaattactcttcaacctgtggcgtgcccatgattttttcactgagatattgaaactgcatggaccaacaggtgagttcactggaccttggtttaccaacatggactatttggtcacttgtgaccccatcaacgtccaccacatgctgagcaagaatttccacaactacgtcaagggacccgagtttcgtcacatttttcaggccttcggagacgggattttcaccgctgattttgaagcatggaagtacaacagggatctcttccattctctctttaaacagaaaagcttcgaggtgtttttagtgaaaaccattcacaacaaggtgcataatggtctccttccaatattggatcatgtacagcaacagggaagagttgtggatcttcaagatgtcttcaatcgcttcaccttcgataacatatgttctatagttcttggaaatgaccctaattgtctttccattgatttttctgaagttgcaattgagaaagcttttaatgaagcagaaagagtccatatttctacagaacttgtagtgccttaagttgtgttttggaag

SEQ ID NO: 20759 - DNA, 373 bp, Glycine max
  Clone ID: PAT_MRT3847_118750C.1
gtgtgcgaacacaaccgatatgacctcagaagggaacacaaacacacacggggtgggtgcatacgatgatgcatgtgttcaattcattaatacttaacaccgcactactacatcatcacattattactctaactacctactatgtaacttttttcattagctagtacaaagcttgtatcacacactgatgtactcttcacctcactctgacatctataaacactaatggaacagaacataagacttgcctatttacttgccttatcacaaatcacctgagaacgtatgtatcttcttttgacgtctgcatggatgcatgatatcattggctgcccttcacaattcactaggagtatggacttgatacatcttc

SEQ ID NO: 20760 - DNA, 403 bp, Glycine max
  Clone ID: PAT_MRT3847_118751C.1
aaacaaaggaaaagggctttttatttgggggggaaacaaaataggggggggccctggttcatcgaaacaaggggcaaaaggaaggggggggaacctaaacaaaccaaagaaacagcaggaatctctaaggggacagggccaaaaacaatcctgggttacgggtcaccctcccaaaatcaccggaactgaggaaaacagcaacctttttgtacagccagcttatttcctgtttaaataagggttccgggccaggaaaaaagacattggggggaaaattttttttttccctccttaaaatagtccctttggagccttttccaagaaggtttgaacccttaaactaccctttggggccaggccaaatactccaaaaccttgaccatgtttttggggaaaaggcccc

SEQ ID NO: 20761 - DNA, 253 bp, Glycine max
  Clone ID: PAT_MRT3847_118752C.1
ttcgtccgtttacgcgttcggcctgttaatgtgacaattggatgtacccaggaccataaggtttgttttcccaaggcctatagtgttttgcatccacagcctacttctgaggtggagtggtgactgagaaatatgtctttcaacctcggcacttccctgtcagctaaaaaactgccaattttgatagggggcgacaagacgggctaatactgttatcgtaatggataacacactttctgattttactatgagg

SEQ ID NO: 20762 - DNA, 395 bp, Glycine max
  Clone ID: PAT_MRT3847_118753C.1
ggagagaaagcctgaaattagcatatattcttgtgggtaaattaaacatacatgcacggggctaaagcatcatgggcccgtgcaaactaaattgaccatgttaaaaacatacaattttgtcgctagatccaactatgtggccttatatgagggggtattataaaattagggcatgaaaccagggctgtggtaagtattttgggaccgaacaaacatttttgcttgggaacaaatgcaacctgatcctggggcattaagttgctaatttgaacagttcctggatgaaccctaaacacttgaaatgctaaacgcttgggatttcacttcgatgttgaagaatagcacactgtacctagcttaaccctgcttcttcagcaccctgcaatgggacaaaa

SEQ ID NO: 20763 - DNA, 257 bp, Glycine max
  Clone ID: PAT_MRT3847_118754C.1
aatagaggtaggggataatatcaggaaggggctagatccctaaattcaacacaaagtataaatatcgtaaaacctttagataccctgtttaatgcttatgaataaaaaaaattatgatgttaaaaatctagaaagcgacttgaatcaatataaataaatttgtgaatgcaatcacagtttgaatttcataacaaaaaaaaatgaacaacacaacgaaagaaaaaaaaaaataacagctatcataaagacaacaaaaa

SEQ ID NO: 20764 - DNA, 521 bp, Glycine max
  Clone ID: PAT_MRT3847_118755C.1
cccacgcgtccgcccacgcgtccgtgctgggctaataatggcaatgcttttgatgatgccctcctcatccgtcgctaaaaaagatgaagaattttcagtgttcataacgtattgtggaataacatatgccgttcaagtgaaggccacggacaatgtggaaatattgaggcaaaaaatcgggaaagtgattgaaattgagcccggacaaattggaacaattagaggcttccaaaaagaacttacggacgaaaaaacattgaaggattatggcattcaaaaattcacaaacattctcttggaatcaacattgaagtgcgcacagagaaaacaagaaaaaaacaacaacggaagattagcgaaaatgtttcccgttgatcactgatcagccgccctttttgatcgattcaaaaacccttttttgggcttatctgtctttcttttcattggttcattaatcttggctatctgtctttttggtggttcaaattttcatcgaacgtctaatccactagagatcggct

SEQ ID NO: 20765 - DNA, 599 bp, Glycine max
  Clone ID: PAT_MRT3847_118756C.1
gtagctcgaatcgctcgatggaaaaaggaagtaccaaaatggccgccgttacccagcccaaggacctcgttaagaagccgaaggatgccaagtccttcgccatcgacttcatgatgggaggtgtctccgccgctgtcgccaagaccgctgccgcccctattgagcgaatcaagctcttggttcagaaccaggacgagatgatcaagcagggtcgtctcgctaccccttacaagggtatctcggactgtttcgccaggacctacgccgatgagggtctcgtctcgctctggcgaggaaacaccgccaacgtcatcaggtacttccctacccaggcgttgaactttgccttcaaggactacttcaagtccatgttcaacttcaagaagtccgagtcttacgccaagtggttcgccggtaacatcgcttccggtggagctgctggtgcctcgtccctcctcttcgtctactcgctcgactacgcccgaacccgtctcgccaacgacaacaagtcggccaagaaggggtggttccaggcagttcaacggtctcatctcggtttacaggcagactctcgctaccgacggtatcgcccgtctcta

SEQ ID NO: 20766 - DNA, 1366 bp, Glycine max
  unsure (1)..(1366): unsure at all n locations
  Clone ID: PAT_MRT3847_118757C.1
acaaaccatcaattcttaattagaaaaagtattatcgttaaaaacaaaaaaaacagcaataattgttacagtgataacatttgttaactagatacgttaacaccaaccctcccgaactgatactagacgcatgagatgaggaatatatcctcaaatctaggaaacttcacacaatcattctatttaagtttccattatcttatattctgccttcatcaaagcgacaaaaatgaaatagaaatcttctcacagcataatatccacaaactaataggactctattgcccatgggaactactacaattaaaatttagaagtatcaaatctcaattatagcacacaattgtcaagcgtactgacacgtggccttgtgtaaactgacattcattataattgtctttcccactcttttcctattggtttctctggtgttcacgcgtcctttgggtgtaagactagtcactttcaggtacggaacaatatggttttagtcctcttcacaagtagcatcttcagggctcnnncctttatcccttcagcatacattgcttgccaatatctatgcctaacatccaaatcaagaatgtagaagcataaatgtcaacatacccatcatttatattacaaagtggacacaaagtttgtcattgtccaccacatatatttcaactctgtgttaacatcctcaaaacagaaccagaataaaataagaaaattgacatgttgagttactcataatacacctactttatatatagccaagtattggatggaatttggtttattttaggaattgtcttcgatttagtacaaacattgtctcacttcagcattctaaatgacatgttttatgaagcaataaaatcaaaaagttcttgataatttattgagtaatgaactgtttaatactctgtagactggtctaacattttgtgtgcaagggaattaaggaacagttcttgacaatttaaacataacgtaatctttctctacattgtgagtgcgtgtgtgattgagctatattctttatgttttcatcacattgcaaggaacattaatgcctaaaaaaggaccaagaaaatttaagggaagaaatgaacaagaaggagaaattctatatttgaaattgtaaaacatgcccctcttaatatctgacaagtacaacaaggactaaattcaatgaaggataaacctccatttgacacaagttcagaagcaaagtaacgacaaaagggagaaaagcacaggtgccaaaccatcaaacaacttcccccatctcaacaccaccagagaagtatagcaagaaaatataaaagcaaaaagtgcatgcatatataactgaaaaagtaagatgaggaaatcttac

SEQ ID NO: 20767 - DNA, 902 bp, Glycine max
  unsure (1)..(902): unsure at all n locations
  Clone ID: PAT_MRT3847_118758C.1
gttaataatgagtattttttgaaaagccaatatgatacaagcatttatctgcagaacttattcttatatggatatggagctatattcaattttcttgggatacttgggactgttgttgtcaaagggcctagcagctttgatatcctacaaggtcattcaaaagccacaatgcttttgatagcaaacaatgctgcccaagggattttatcctctttcttcttcaaatatgcagatacaattttgaagaagtactcatcaacagtagcaacaatcttcaccggtatagcatctgctgtactatttggacatactttaacaatgaacttcgttattggcatttctattgtgtttatctcaatgcaccaattcttttcgccactttcaaaagttaaagatgaacaaaatggtgtgctggaactgcatgatgttcatgacaaacaaaggtcaaaggaatcctttataaatatggcagctggagcaaatgaggaggccactcatcgtgttggacatgatgagagacagccacttcttccctcctagattgatctactaaaggcatgaaacttgacttcgggagctggtgaacaagccttgactttcagttgctgaagattttgatagaacttagagaatggcttcgcaagagcttttggcatgtcaatgtggattttactgtattacattttttttttatcttggacattttatttctcttttttaattttgtttcatggtatatttacctcatcctggtctagaactattgtgttattatttacatttattacatgattttgtcatttcatctttatgaaattatacaggtaaataaagaaattgggttcccttgtagaaaattatatttgcgtgcatataatgcaatgggnaatgatattaacatt

SEQ ID NO: 20768 - DNA, 628 bp, Glycine max
  unsure (1)..(628): unsure at all n locations
  Clone ID: PAT_MRT3847_118759C.1
tccgggtcgccacgcgtccataatgattgctttccatagtctattagttttgaacagcaaagcttattgtataatattggtaaaggcagaaaccggcaagcccacgcgtccgaaacgtctaaagtaattgaattaggagagagggggtgcagccacactgacacaccaaactacaaatcctcctttgagacgcgtcactcccaaacaccgtttttgtgagtgagttcaaagcaaacaaatactaaaaccatataaggaaggaggaaggaacgaagctgaatctgaatctgaatcggaatcgctttgtctttgaaattcgcactctctctctctctctctctctctctctctctctctcgtgtctctatattgagccacttcgaatccgtcgcctcagctgcagatcacatcgagtttcacccgaatgctctttctggactcgatttagatcgagttcttcataccctgatagtgtgggaggatatacatgaagaacgggataatggaatgcagtgtttggcattccaaattggtttccccctccgccaaaactatatcaagggcttatgatcgccacanaagtagaatatcgtccaagcaacgtgcactcaacgtctttttgggcggt

SEQ ID NO: 20769 - DNA, 447 bp, Glycine max
  Clone ID: PAT_MRT3847_11875C.1
ttttgttaacaccgatcgcagaaatggacacctgggattagtgaccggaaacatgaatggtttttaccgacagaaaaaaaccatcgccaccaaaaaattttcgtttctttcccaggccatcatctccctgggtgggaaacccgacctataatatcagcgcacggagagcgaggaggtgctgccgaaattaaacctgaacatggcgtacgggccttgcctagggatgacgaggctcgcacggtgggagcgcgcacagaggctccacttgagccctcctcacgaaatggataggctttagactagcgggaatgtacagaccgattccttgtgggatgggggcatatatgaaccctttgggtgcgcatgaacaagacaagcgaagattaactcctgatcggtccttgcgcagtgtttgggttttattgacgaaaaacaacttcggtctga

SEQ ID NO: 20770 - DNA, 2113 bp, Glycine max
  Clone ID: PAT_MRT3847_118760C.1
ggctcgagctcgagtcgaatcggctcgagctcctttgagacgcgtcactcccaaacaccgtttttgtgagtgagttcaaagcaaacaaatactaaaaccatataaggttctctcgctcttgttaataattccaaattacaaacaacaacgcagtcctctctctctctctccctctgctaatttaaactccgttttccatttccttttataggaaggaggaaggaacgaagctgaatctgaatctgaatcggaatcgctttgtctttgaaattcgcactctctctctctctctctctctctctctctctctcgtgtctctatattgagccacttcgaatccgtcgcctcagctgcagatcacatcgagtttcacccgaatgctctttctggactcgatttagatcgagttcttcataccctgatagtgtgggaggatatacatgaagaacgggataatggaatgcagtgtttgccattccaaattggtttccccctccgccaaaactatatcaagggcttatgatcgccacaaaagtagaatatcgtccaagcaacgtgcactcaacgtctttttggtcgttggtgattgtgttctagttggcttccagcctatccttgtctatatgtccaaggtggatgggaaattcaattttagcccaattagtgttaattttttgaccgagattacaaaggttttctttgctattgttatgcttcttctccaggctaggcatcaaaaagttggggagaagcctcttctctcaatttctacatttgtgcaggcagctcgtaacaatgtccttctggcagttcccgcacttctgtatgccataaacaactatctgaagtttatcatgcagctgtattttaatcctgctactgtgaagatgctaagcaatttgaaggttttagtaatagcacttctgttaaaggtgattatgaagcgccggttttccatcattcagtgggaagctcttgctctactgctcattggtataagtgttaatcaactaagatctttacctgaaggaactacagctttgggtcttcctgtcacaatgggtgcatatatctatacattgatctttgtcactgttccatcattggcatctgtttataatgagtatgctttgaagagcctatatgatacaagcatttatctgcagaacttattcttatatggatatggagctatattcaattttcttgggatgtcaaggggcctagcagctaagatatcctacaagttcattcaaaagccacaatgcttattgatagcaaactttgctacccaaggatgctgcccaagggattttatcctcatttgtattcaaatttgcagataaaattttgacgaagtactcatcaatagtcaccgcaatcttcactggtatagcatctgctgtactatttggacatactttaacaatgaacttcgttattggcatctctattgtattcatctcaatgcaccagttcttttcaccactttcaaaagttaaagatgaacaaaatggtgtgctggaactgcatgatgttcatgacaaacaaaggtcaaaggaatcctttataaatatggcagctggagcaaatgaggaggccactcatcgtgttggacatgatgagagacagccacttcttccctcctagattgatctactgaatttcaaaaaaaaaatatttttggtgttattgctggtagcatttgaccaccccacacagttttaagtaaaaaaagaaaaaagaaaaaaaaaagtaatttctgcctttttgggatagcttttttctgatgggttctctctacttggttcatgaagaaaggcatgaaacttgacttcgggagctggtgaacaagccttgactttcagttgctgaagattttgatagaacttagagaatggcttcgcaagagcttttggcatgtcaatgtggattttactgtattacattttttttttatcttggacattttatttctcttttttaattttgtttcatggtatatttacctcatcctggtctagaactattgtgttattatttacatttattacatgattttgtcatttcatctttatgaaattatacaggtaaataaagaaattgggttccc

SEQ ID NO: 20771 - DNA, 558 bp, Glycine max
  Clone ID: PAT_MRT3847_118761C.1
cttttttcagcttatcatgtggcaagctctttgaaggaaccccacaacaggttgttttaaactgtacttgtccttttttctttctttttttttttcttttaaggtttgagatttctatccagtaataggttgttgcatcttcggacgtgtcttattttttatatcttgttttatccccttgccagaagtgcttgaaattttaagtacccgcacaaagcaacttgttattgaaattactattacatgaggactttgtaaaatatggtatgattatttgacttatttatggaacaccttatctaaaatcaggttaggacttaggaaagtattttccataactgatatatatatgtttttgttcttgagttacagatatagaatttcctttgacaattgcccacaattttgttctattattttttattagaatttcctttttttattattttattaaaaattttctttttcacttcttgatatattgatgactacatcttaagacagtttttgaaaaaattattttaaaatcttcaatatttttaaatttttatataaaaa

SEQ ID NO: 20772 - DNA, 680 bp, Glycine max
  Clone ID: PAT_MRT3847_118763C.1
ttagagcgttgataacatgattcacgtgggcgcgtgctccgtgttcgcgaagatcctgaaagaaagtcctatgaaagtgcaagctagggtggcctgggctgtgtcggaactcgctgccaattaccctaagtgtcaggaccttttcgcccagcacaacatcataaggttactcgtcggtcaccttgctttcgaaaccgtcgaggaacacagtaagtacactattgtcagcaccaaacccacttccatccacgccgtcgtcatcgccaacaacaacgtcaagaaggaagatcattttcacgacaatgaaaagaaagcacgaatgcctcatcccttgggtgataatagaccacgaaatctacatagagtaatcacaagtacaatcgcaatgcacgctgccaccaagcaaggaaacgaaccaaatcataatcatcagaccaatggcaatggagttgataatgatgccaagcaagggaatcagaatcaccagcgaaactattcacattcggggataaacatgaaaggaagggatcatgaggatcctgagactaaggctaacatgaaggaaatggcagcgagagctctctggcatttagccaaaggtaactcgccaatttgtcgtagcattactgaatcaagagccctgttgtgtttttctgttcttcttgaaaaaggaacagagg

SEQ ID NO: 20773 - DNA, 462 bp, Glycine max
  Clone ID: PAT_MRT3847_118764C.1
gacaactctaaccctagtattggtcccactcttgctgcctaccatacagtccctaatccacgcatgtcatccactgcgtggctgcataacagcagtcagatggctgcacccatgatcagaagtggatccacaccagccatgactgcaccccatcatcatactcacgagtatcatgacgtctctaacttgggctcacgtgccgacactctcgccgccgaccgttctacatcgacttctattgataacaattctacatcaagcagccattgctaatcataatcaccaccatggagcaatgaagcccatgctaatcttgttcatggatactctgcttgctctgttaccaatgatgatatgacttctcactgtggtccacacgacgatattggctcctatttctaggatgcatcgactgataactcatacacactacatgccaacgattactcacaatgacatggc

SEQ ID NO: 20774 - DNA, 688 bp, Glycine max
  Clone ID: PAT_MRT3847_118765C.1
atatagaagatgttgaggaagctgtcatgaaacaaataggcatatatgatcaactggcaaaggatactgaagagtgcacatcctcatcttcggacacaagcacgatgcagttggaaaagcaaggaggacaaacgcaaagaaaaaagctaacagaacaagctcgaagaggttctgaacagataggaaggttgcagtttgaggtgcagaacatccagtatattctgctcaaactggctgatgtgaagaacaacaaatgcaaaaacaaaaactctagaccaacaggtgtgttgctgaaggactttattcgcattggaaggaaaaatagcagaaggcgccgtaaggggtgtgtttgtggatgttcaaggccttcaactaatgaggactaagtcagatacagtatgttgtgagtacttttttcgtttgtgatgttttctataacattgttaacatagctagtaaaattgaaggtttgtcataagaaataagagatcaatcagtttaggcttatctggatcatagcaacttctttcacatctgtatgtatgctttagcttccgaagaaatttgtactgagtgacttgtatgaagaattgcattgtaacagttaataaaactctcggtgcaataattattttgccccgtataaaaaaaaaaaaaaaaaaaaaaaaaaaaaaaaaaaaaaaaaaaa

SEQ ID NO: 20775 - DNA, 339 bp, Glycine max
  Clone ID: PAT_MRT3847_118766C.1
tactgtgatttcattaagtggatgtgaatcttttaccttttgaattttttaaagtaaatgtgttttaagaaaaattaattaatttcgcatggttttctttccttttattattatgtgtttaaaaacctttaaattaattatgtatgattttatttccttttattatttatttatatttgtgaggggtaggggtggttctggcttccagaacccttcatcttcatcatctatctcgtcgtctgtgtctccatcatgttcatcgcaggaacaatccaaatcacacatttcaggagcaatatcccaaataaagtgtccttccactttattcgtatgtatcac

SEQ ID NO: 20776 - DNA, 323 bp, Glycine max
  Clone ID: PAT_MRT3847_118767C.1
aactaaaaatgctaattgaagttcatgaagggggctaaaaaagatgcaaagttgttcataaaacccattcgcctcagaacaaaattggtcatacttcagagaacctatggacatcaaacttacaaagcatttcgcaaatttaagaccttggtttttccttctttttcttgaaaagagccagaagagagacaccagataccttcacaaccttaaatttgacaccagagaatatttccaacagtatgaccctttttgtccaaatccaggggttagaactttttcattctcttgaatggggttcaagcaaccatcattagggacaa

SEQ ID NO: 20777 - DNA, 328 bp, Glycine max
  Clone ID: PAT_MRT3847_118768C.1
ggcttcctcaatgatctcttccccagctgttaccactgtcaaccgtgccggtgccggcatggttgctccattcactggcctcaagtccatggctggctacaccaccataaagaccaacaatgacattaccttcattgctatcaacggtggaagagtgcagtgcatgcaggagtggccaccaattggctagacgaagtatgagattctttactacctgtcagaccttgatgatgcacagttggcgatggaaatagaataccttcttacgaaaggatggattctctactaggaattcaattgggagcactgtttcatgtaccgcgagcac

SEQ ID NO: 20778 - DNA, 468 bp, Glycine max
  Clone ID: PAT_MRT3847_118769C.1
ccctggcgtcgaagcttgccaatttgcttttctgattctgtttgaacagccacctgtgttccataactaggcatgcgagactgagcatttgaagcatttttatcagacttcaataccaataagccatgatgaatagaatcaacaatctcctttcgatgcaataaaaaaatttgcacagtttcaaatgcactatcgccaacaagatccaacagatctccagctatcttttcaccaggcttttcggaataaagaacccgacaaatggccattgccaattcatcttgggataattgggaattacaattcttaactattttatcacatgcatctcgtaaccaagtcaggttgaacttttccctgttaacaacagaatgatctgttgggacattatggccatactgttctttgagaaattctaatgaaacagggctttcaaaatccatcatatccccatcatctaaggataca

SEQ ID NO: 20779 - DNA, 199 bp, Glycine max
  Clone ID: PAT_MRT3847_11876C.1
tcttgccgatgctgcaatcggcggggcggctgcgcacgccgttcggcgagcgcgccttctcgatcctgctgttccaggatctgtcgatcgtgcccttgatcacgctcgtcacgatcctgtcgcgcaatccggccgatgccggcggaccgccggggtggctgctgttcctctacaccgtcgccgcggtggcgggactggt

SEQ ID NO: 20780 - DNA, 573 bp, Glycine max
  Clone ID: PAT_MRT3847_118770C.1
aattaacatcctgcgtgttgttaattccctcacaattcatttgcaattcttgtgtggaaacaatgcttctagagctagagacttggacagctttggtttttttgtttttgcttgtgttgattctaaaggagtcgatcatgggaggtaagagttcaaaacggtctgaaagaaggcatgtttcatcatatggatctgctggttcttcatcttcacgggatagctatggataccctcaatcaccaaatgcatacccacaacaaaatccttataatacgcctcttcaccaccgtgcaccagctccattccacgactattcacggccaaaaaggaggttagataggagatattcaagaatagctgatgattaccattcactggatgaggttaccactgctctttcacatgctggcctggaatcttctaatctcattgttggcattgattttacaaagagcaacgagtggacagggaagaggtcattcaaccgaaaaagtttacatcatataggaagtggtcaaaatccttatgaacaagcaatctcgattattgggaaaactttaagtgtttttgacg

SEQ ID NO: 20781 - DNA, 301 bp, Glycine max
  Clone ID: PAT_MRT3847_118771C.1
atcgatttgcattatcgacatatactgatacactcagaggatcatccttccagggtgaaccactaccttctcctatacttatctctccttacttcaacactcattatatacttcactcatgccattcctttcaataaacaattgtacacgctcatctccatcactataacattaatttcaccaacatcacttcctacaactctatataaaccggttattattctctttataacattctccatcttacctaataattgtactttcattaatccaattcttccttatgtcctatcttcttatc

SEQ ID NO: 20782 - DNA, 250 bp, Glycine max
  Clone ID: PAT_MRT3847_118772C.1
gcagtcattcaagactttgtggaaggacttgaaactctttttaaacgttttatcaaaattagagtttcccttctcaacatcctcaatcactaattgtacatcggtgggaatgttttgtaattatgtcaaagaaattggcatctaatatacacttttagaataaaaaaaaaaaaaaaaaaaaaaaaaaaaaaaaaaaaaaaaaaaaaaaaaaaaaaaaaaaaaaaaaaaaaaaaaaaaaaaaaaaaaaaaa

SEQ ID NO: 20783 - DNA, 412 bp, Glycine max
  Clone ID: PAT_MRT3847_118773C.1
cttacgcgttcgatactatggtttagaccaaagcttcatcataggaatcatcctcagtggatgccactgaggtgatcacagagttgaatgctctgtgggacgctctcgcaatcatgtccactggacttggttatggaggtgctgctttactagctgctagtctatcgagcactcttgagtgcgccatctactttgcaaagttgcttgcaaagattatgctattggtcactctagggtacactgaatggtacgtctaccgataccttatgattaagtctatcgctacagacctagctacactcattgagtcactgactgagactgtttctggagctgaatacagtggcgatagcaggtacatagtctaggagctctactgggagcatgagttctgtttatcggacggattata

SEQ ID NO: 20784 - DNA, 325 bp, Glycine max
  Clone ID: PAT_MRT3847_118774C.1
cattgaaggaactccccgtcattactgcatttgatttgatggaaaaatagatacataaataaatgtgagacttggtaaagtcgctcaacaatagtaaaccctcctattattacaagaatcctgtgggatatatgctcaactacatgaatgtagcacacgtactctgtttaggttcctaagcacattttacaccatgaagagtgataactttggttcgctttgtggacctcgcatagatgatgtaaaattgcttggggttcgttatttcacacatgcttgaagatgaggtttcaatcaaaacatctacatttgtttcatttcatgt

SEQ ID NO: 20785 - DNA, 393 bp, Glycine max
  Clone ID: PAT_MRT3847_118775C.1
ctctcttaagctccttagtgctgctccttgcagctctaattatatcccctaaagtccttgcaaactatgagagtccaccattgtacaagccggggactgataaaccacctctttataaacccacattttaaaagccttctatatacaaacctcctgttaaaaaccctccaatttataatcctgcctttgagaaaccaccattgtacaagcccccagctgagaaacccccagtttacaacaccccatctgaaaaacctttacctatcattaccgctgtcgataaaccaccagtatccaaacccgcaactgaaaaaccaccacttttcaagcccacagttgaaaaacccccagtgtacaatccccccattgacaaaccaccactttacaagcccc

SEQ ID NO: 20786 - DNA, 517 bp, Glycine max
  unsure (1)..(517): unsure at all n locations
  Clone ID: PAT_MRT3847_118776C.1
aattcggcaccagggtggctggagcattttttgaattgatgccaaaatcatatagctattaaatggtagtttatgtctttatatagatgattgagaattaaatgatacccacataaatgattgaaaaatactataccaatcataattatgtacacaaactagtttaaaatgcgagtcttgcattgcttagtggcatcagttgttgaagacttgaaaatgtgagtcacgtttacttttccaaagaggcactcatgtcaagccgtggaaaatcatctatttctttttttcaatcacacaaatacaaaaattaatgaataatactaagttgatctcttaaattagaaatatcagttagcttgtggttaatatacaaaaagtatcattttaatgtttaaaagttaaaaaggtaaaaatgtaattntcatttaatttctctgattntaaaaacatgtgattntgatctttccattaagatgcttccggtgaccggcaggttataaacgttgaccaccctaat

SEQ ID NO: 20787 - DNA, 683 bp, Glycine max
  unsure (1)..(683): unsure at all n locations
  Clone ID: PAT_MRT3847_118777C.1
aattcgacctcgttacccggggatcctctacagtcgacctgcagctgttaattatttccagaccagatttactgaacaggattattctagaccttatttggatggggtcccctttaaatctatttctcaagggcaaagagagcagatgactgtccccttctctgaccaagagatcaaagaagctgtatggagttgtggaggtgataaatgccctgggccagatggccttaacttcaattttatcaagaaattttgggatatcataagtccagaatttagaagatttgtggatgagttctatgctcatggcagctttcctagaggcagcaatgcttcctttgtggctttaattcctaagatgaaccatcctcagtccttcaatgactataggcctatatccttgataggttgtatgtataaagttatagccacgttgctgtctaacagattgaagtctgtaatggatgggttaattgatgaaaggcagtcagcctttattaaaggaaggcatattcttcatggtattttgattctcaatgaggtggttgaggaagcaaggagaaataagaaacctgtgatgatcttcaaggtggattntgaaaaggcctacgactcagtttcttggtcttttttggactgcatgctgtntaggttgggattttgcccaaatcggagatcatgga

SEQ ID NO: 20788 - DNA, 547 bp, Glycine max
  Clone ID: PAT_MRT3847_118778C.1
gaaacaacaattggttctagaggcggaagacaactcatgattattggatattggattttcatgtgcaacttggcacatgactccatgttgagaatgattttgcacttatgaaactatcttggaaggatttgtgttcatggggaatgatcatgccttggaaattgttggggtcggaactatcaaattaaaaatgtatgatggtatcgtacgcacaattcaaggggtactccatgtaaagggtttgaagaagaatcaattgttcgttgggaaattggatgacctcgagtgcaaaatccatattgaaggtgagatcttgatgggaagctttatgtacgtcatgatttgtactaaaccaaacattgcacaagccatgagagcgattagtaggttcatggtagatcttggtaaagagcattggagtgttgtgaagaggatccttagatacatcaatggaacctcaggtgttgcattatgttttgaaggatccaaatttattgtcatgggctatgtcaattcagattttgtaggtgatcttgattagagaaaa

SEQ ID NO: 20789 - DNA, 2244 bp, Glycine max
  Clone ID: PAT_MRT3847_118779C.1
atatgcgaagaggaagaagacgaagaagaatccaaaagcaatcccatctgtgactatgaacatcaaaattgtgttcgaacaactgtaaaaagatagaatcagaatctaattagtactctgaattggtttgcacctctttcttgattttcataatctactcggcaggttgattcttattcaagctttgcaggcatatcggataagtcgtctttatggattatataaaagcccgtgactgatagcatagccggatgatagaagagaagggaccttccaccgatgcagactgtgggagggataccataaggtttaggaacaaaaagtaattttgttggtatttggtcgtattcagaggtggccaaacaacccggcagaattggttaagctagttctttttaattagtacacagggtgaagtccctttagaagggaatcaaaatcaaagcattggagttgcatatgcagagagtggctcttcttaatttgattgctatctcattaggattagttttgaagccaggaacattacaagaagaggatgaactacctattaagcttgcttgtcaagaagacacaactgaacaatcttctgcaccattttactccatccactgaaagggatttccagcttgtacttcccatacttattggtagttctgttcaactgaaagtgaaatctgctcatgaagttttctctgaaagtgctttgaacatgcaatctactttgacctcagcacctggcaagaagtagctgtgtctggaaaagctgctgttggagcagaaatcacaatacacaaaacccataacactgatttgtgagatggggaacctggttttcccaggaagcttgggtcttgcaggctcaacttccaaaaactgagtaaaaaagggcaaaagaagcaagagggttatggtattcatggccaactttgttaaaaaaaaatggagggaagagtctgaatggtgtctttatgatgatgagcagaagcaagagcttttgctttgttatgcttagctttcagcggattaggatagggacaaagggcataaataaaaactgctgggtttggttaccacaggagggggtgattaaacatacatatttatatgtatatttatatatatatgtgtatatatatatatatatatacatacatagacactcacacacacttctgtgctagctgactttgaaactgagatatatggctgttgtatatgcagccagagaataagggagtttcttatatttccaaaaagcttgtttaattgccagtgtttttgcagcagaaagagaccaaacaattgaaaacctttagtctttgtttagttaattcgtgtcgggctcattggatcttggaaagtttatgaatatctatagtattgattcatgaatatgtaactaagttggaattctgggtttgtgaggcttctaaccaagatgtgggatatcacattaaatcggccaaaacaacttaccaatgaaatcagaaagaaaaaatcatgtgggaattctccgaaaacaggctcgcctcccgtggacattgtcgatgttagatcccaacccagcttctcctctgccaatctcacaaaccgagttgcaattctaggtggtctactcgacggcaacaaacccctccgcaatcccatccctcggtttgaacatctggagggtgggctggcaaaagttgagttgtaaggaaaacgcctttgtgagagtatttatgaaccaacagccctaaagatagttgggttcgcgcctttaggaagcattactggggatctacagccgatttcacatccctagccgtcgcaccacaaagttcctctgtcaagaggctctgcgggagcgcgcgggattagactatcatcatattgtttatggacaacggtctggttcgccgtcatggtggcccctcataggctggcctactaaacctaccattacatgagcttacatagtgttgcaaccgagtgaatcaaacgagtttatatgtggcaattaggatcacctgcacactagccctgctcagcaacagttgggtgtcacttcggacctctgcgaacgccaggctctaattccaagcttcattattgaggttgaatgattgagatatcattaggctttaccaacatggtgtggaatggtcattacttcccttaagattaggggttcaatccctaagtcaagaacatctattgaaagatcaattctttaaataaatttctttattttgaatgatt

SEQ ID NO: 20790 - DNA, 1113 bp, Glycine max
  Clone ID: PAT_MRT3847_11877C.1
cattattaggaattatggagtccttgttgacaaccacagaactagatgagctagtgtacaagattgacgagactgttggagatgcagctaatgcagctgttgaggatataaagagctttgctagttctgttgttgtcaacaaggactccgtaattcctaataataataaattcctgacggcctatacaaatattgtgccaaagctaaaaaatgctaacctctcagtttttgtagaaacattcagcaatgagtttgtgtctcaagcatgggatttcttctcagatgccaactgttgagattcaactcgtatattgagggagcacaaattgatggtatcatcacagacttccctaaaactgctgacagatacagaaggaacaaatgcttaggtttgggtgacaacaaacctacttacatggaacctgttcaaccaggtagtctttttggactcattaccaaagaattcttgcctccagccgaggctccgcttccacccttgacagaatctgaagtggcagagtcacctttgcctcctgttgctaaaatagccccagcttccagcccgaatgccagaaccaaatttccacagggaaattcacagcctaaggtcactgtctgcttcttcttgtccactctggctgtgtttatagcttctcttctgctttgagtaaaatcatctctaaacttccttctaaggaaaaacaaaaaaaaaatggagaaaaggttgtttttggtggtttcaaccctctatttccacatctcttctaggtttgagtggcattgaagcttttggcttcaagactagatgaacaatccacattttttttgtgttcttcttaaaaggagcaaattctttcaatcttatttgttgtagctacgcttgtccattcttagttcctcaattgcttctcgggttggatctatgagcacaaaagcccgcgtggtatatatttatgaattctttttagatgtgtattttgtatcttttgctgtaagatatatttatatttaatacttgttgggggtgcatttggcattaggttaacaattttcccgagaattttccagagcatatacatgggttgattgtttcaatataaacaatttttactc

SEQ ID NO: 20791 - DNA, 370 bp, Glycine max
  unsure (1)..(370): unsure at all n locations
  Clone ID: PAT_MRT3847_118780C.1
ctcgagccgcttcgagccgttcgagccgctcgagccgctcgagccgattcgactcgagagaaaacacctttctgtaaaagcacagccctcccttntgccactattgccactgcaaaatggctgagggaaggaatcaaaccccgtccaacctggtgggactaacaaagaacagctgacggtgctattattgtggcgacgctgccattacaaaaacaagccacctggcgactgggacgggtttccttttttgaaaaacccctccctgttgggggaaccccaatggttttttccacaaaactttcctaagtttaggcctggaaagggccatttaaaccccggggggggttccccccccagggaccggccaacc

SEQ ID NO: 20792 - DNA, 672 bp, Glycine max
  unsure (1)..(672): unsure at all n locations
  Clone ID: PAT_MRT3847_118781C.1
acgagaggccatgaaaagaaaagcatattgtaaaacaaaatttgtgcgttcactaatttgtatcttcgcccgtgctgcaataaagaaagggtcaaaattccaggaaggaatcaaagccagggactgagggcatcagccaccctattagaagcctagatttatgctctatgacaaatgtgaactattgtagatatgcatgccaagaagctcatgacatgcagaaagatttttcaggctaccaattaagatattataaggcatcatgatcagtgaaaagaacaaattcacggtggaaaagataatggtgtcagtgtttgaatgcttgaaatagggcataaagttccacatgcataagtactatagcaaagtttagcccaaaaggtttcttgctagaaggcaattggacgattggattggctcaaaacggcaccaataccaaatttagaggcatcatagtgaagctccaaatgggaacgaaatcgatgcattgagaggcggcgaattggaccggaggagganggttatggttngggggaaaaaaatcagactaatgttgggacanaccgacntgatgttaaanttcaaccacatccctgacanaacacttccagggggtttaaaaacccncnattatcttttgttganttttggtggggaaaaaaaaaaaggttt

SEQ ID NO: 20793 - DNA, 454 bp, Glycine max
  Clone ID: PAT_MRT3847_118782C.1
gaccaataacgtcttctgttttccttctgagtgtaattatgagggggtcctgttcatttgggtgaacagatttattggatgtactgtcatcattgtcttaattgaaccatatctatctacagataaaataagaattttgcgatgcaatacaacaacgccacatcgctcaagaaggctatagatcattagaaatctcaacccaaaaggttttatttatgggatgtaaagccgttaaaacatccagctaacctaaccaaattctacaatgttcaacaagatcacattctattctattctctgagatcaaatcaatcaatatacaaaggcactgttgtggcacagttacaaccagcatgaccgaactctagtgcccatggaccaaaaacctgcagaattcttcacaacaagcttgcacattaatagtgcaacgggcctttcttttccaaaggattta

SEQ ID NO: 20794 - DNA, 383 bp, Glycine max
  Clone ID: PAT_MRT3847_118783C.1
agcgcactgaatgggggtcgaggttttattttttttttaaaagaaagagcatttgaataaatgaacacgtttatctggccgcactaaacgcaccgtatccatgctgaagaaaacaacacggttctctatacaactataaacccaacccacacccttaaacttagaaggactcccttctcggttgcttccaaagaaacgttacgctccgcgggcttagccacacttttaggacgtagaactcagacattctgtgtcacacacgctcaggttgatgacctcgttataagaccacaaagctgaaagctaacacctcaatagtacaccacagtgcttaatgagaactcctataccgaggaaacagatctggctgatgataagactgc

SEQ ID NO: 20795 - DNA, 281 bp, Glycine max
  Clone ID: PAT_MRT3847_118784C.1
gaagtgacgatggagcaagagttagatccctctgtttccttgttgtcagcatctgctttcctggcaattcttagcgatggaaaccttcccgagtgcttaattctcccacggccagggcgtgtggcggaggctctatcaccgaccaagttcaacaattcatctcggatcattgcctttccactcctggtgattttcatgctccttacttgaagacttttctcaagaaactcatcactcaagttgagttcgaccgtggctgtgtgttggaccacttgtacgaa

SEQ ID NO: 20796 - DNA, 360 bp, Glycine max
  unsure (1)..(360): unsure at all n locations
  Clone ID: PAT_MRT3847_118785C.1
cccccactctnnnatcgggaataggacttctcgggtagacttttctatttctcttctatccttcactctctttcttttcacttgatccgcatatgcccgtacaaagttggtccttattttgtaaacaacacctatgggaccgttgggtggcaaattgctaaggctttcgcttaattttctcctcgtggaagaacaaacagtgcttcacctgagtaaaacaaattttcttactttgccagaggagtttggagcctccttgcgtttgttttcattattacaaatagccaactctaatttaaggaaaatttcctcacccgcaattaccattagggtgggcactctgatattacccttggttag

SEQ ID NO: 20797 - DNA, 130 bp, Glycine max
  Clone ID: PAT_MRT3847_118786C.1
cccatgcgtccgttgcaatacatgtgtaaaacttagcgataggaaattggcttaattttgtaacattccagagcttgatatagcttttaaaatggtttatgaccaagttttttccatcttgatttgtttt

SEQ ID NO: 20798 - DNA, 171 bp, Glycine max
  Clone ID: PAT_MRT3847_118787C.1
gtagcacatctgacaggagggatcgatggaaagctcgcgcaagatgtcaacggcgcagtggcgttgatgccaaaggatgtgtgcgacttcaacgctataaactccgtcggcaaacgcagtaatgatgacaccgccagcgatttcttgggcacatgctttgacgcataggtc

SEQ ID NO: 20799 - DNA, 536 bp, Glycine max
  Clone ID: PAT_MRT3847_118788C.1
ggacaaaaaaaattttttttttttaataaaaaaaaaattcccaccccaaaacaaaggggggaaacagggcaggttttggaaaaggaacggcatcaggaaaagtcccaccggatttttaaatcttcatggcctaaaaaaacaatattcatattttgggaaaactaaaatccaaaaattaaccagctttaggggttaaattggaaaaaagggacgggggactctttcgggaaggatggaaattcgggtattggcccaggcaaggcataggaaaaaaatcgggataaaggccccaataaattttggggggggggccaaaaaatccccatagcagcttggaacaagaaataaaaggctttttttatgcaaaactggaattttgggtaataaacgaacccctttaggggtctcaaggggattcttattactttcacaaagctaaaaatgggtagggcaacattctcagggccaccaggcggggggaaatacaaaccacttatgggatgattggccaaaggcatttggtccattggcccaaa

SEQ ID NO: 20800 - DNA, 248 bp, Glycine max
  Clone ID: PAT_MRT3847_118789C.1
tcctctagagcggccctttttttttttttttttttttttttttttgctgaaaagccccttattttattcgcaaggactatacagcttagatatagctgataatttatttgcttctcataaaggataccaattcctttgcttttcataaaggatgtcataacctacactgcccctgaccataatgaaaaagactatgtgccccttttgtcaacttctcgcagccgaacagcctcatgggtcgacccgga

SEQ ID NO: 20801 - DNA, 131 bp, Glycine max
  Clone ID: PAT_MRT3847_11878C.1
cccccgtccgtaggttgggatttcggttggggttttgagcaaatgttttttcagcgggggttttcaaaacaaggcaaggttgtggtggtttaattccaataccaggaattttaacaaggatttcccctggc

SEQ ID NO: 20802 - DNA, 456 bp, Glycine max
  Clone ID: PAT_MRT3847_118790C.1
gtggggaacaatatttgggctctctaatacttgaggaagttttgccattaacacactattaattttcttacaatttgactttcattaaaccccaaatataaactatgcaacaaaatgtcccaaaaagttaaaaaaaaaaaacaaagtttacctaaatccaaacccatcgtagactatattttctttataaatgcttatcattttccacgaacaacgtccagttcattattaacctttggtatgatatgcccccaattgggaatgaaaaaccagaacaagcttttgtgtttttttcaacttttcataaaggccaagagggattactgggctgaattgggcccagaaacgagccagctatgaaaaaactggtttattaacgtgaaaggagggaatgttaccaaatattggttttttcacacgcataaacataacatgattgtccaaaaacaataaaaa

SEQ ID NO: 20803 - DNA, 253 bp, Glycine max
  Clone ID: PAT_MRT3847_118791C.1
acaggaagacgggcctcaaaaccggtcgcaacttgattccaagcttgattcaaagacttcttacttctctgtgtactactttttgagggaaagaaaatcgcactgagagctggtcacagacttggtgacagattttctttaccactctctgtttatctgctgaacactctgctatatgctatacgacttcgtgtaggacttagacttagtctgtaactttctcagatccttgctcaattctcagttcaagctg

SEQ ID NO: 20804 - DNA, 375 bp, Glycine max
  Clone ID: PAT_MRT3847_118792C.1
atccaacaacactatggctttatgtgctcctgctcttcctgagacatacagaggctcacagttctgacagatagcagacatacccctagatcaccggctgacccgtcaatttcactggacatgctcgacttggcatcctgataacaggtccttcatgttaaacattgatccagtgattattgttatagacttactagttaatcagctgtgactctattataagacatcacagctatgctcctaatgaaggaagctgaagaacttacatacaccttgatgtccatgccataatattaatactggcaatattttgcaatccatactggcttactgatcaacagtgaaagcatgattgccaatctctacatattgcat

SEQ ID NO: 20805 - DNA, 1219 bp, Glycine max
  Clone ID: PAT_MRT3847_118793C.1
cacgcgtccggcatcatcttgttgttgaggattttcttggggaggaagtaaagaaaagtgatttttatggatctgtatcatcaatattgaaggtaaatgagcccaaggtccgtaatctgtttgcaggccagagaattatattgagattcccatcctctgtaaaggcatcaaaaccagggaaatctgatgcaactccagctaagggttctctgacctctgaaaagctgaatgttatgcaaattgaccctccttcacctcaaactgaagtggatcatattctttcagctaagttatacaatgccctgcggttgttgaggaaaagtcttgttacagaagctggagagggtgtcatgcctcaccacatatttggtaatgctacattgcttctgataagcaaaagagtgccgagaacaaaagaagaactccttgatatcaatggcattggcaaggctaaggtaagcaagtatggggatcagttactggaaaccattgaaaaaaccgtaaatgaacattacaagttggacaaagtcagtagcggcagcaaaggaagttcagattctaccaaaaagagacgactgtcaaacggaaatccagatgcaaatgctgaggatgatgacgcccccaccaaaagtacaggtcgttcaaagaaaaggatggtaaagagacaaaacagaaaagctgtaatatatgattctccagaggaagattattttcaaggatgccctgatgaagacctagattttgacatcatagaaattgatgcattagatcaagtgacttgtaaaaatgctgcaggaagagtactacctcaatggacagcatcttgaaatgatatatgacgatcatattattattagtcatttgtcatgccccttcagaatatgtatgttgtcatggtaggacttttggtgtatcaaacttgtagttatttatcgttgttgaaagaactttgttcaaacggacgagtggaagatgactactatatatacgcagatcaacgaaaaaagctctggattacttgtattctaccaccatcattgttgtccagtctaactattaaggtgaaaatgtatgaaaaactttaacacttttatgtgtaaagaatagaagaattattaaggtgacattcaactggtcaatatcagtatatgtcaatgtataactttgaaaatagttttgtattttgtttgtaagggttgttaacctgtgctaacaacac

SEQ ID NO: 20806 - DNA, 607 bp, Glycine max
  Clone ID: PAT_MRT3847_118794C.1
gtacgttagcaattcggttggaggtgcgagtaaatgtaaatttaatcagcaaacaataatatacaaatgctaaacattgtgtatttaatctcatttcaatttacaagtcataccaagttgatataaatcagtgcaattttatctactctaattttcaaatttgtccaaaacagaagttcatatttaaaccaaaaatcaaaatctcattagtataaataaagtgaacaaaagttgatgatgagccaccacgagctctttgaccgaacaagcagagtcatggcctagcaccaacaatatgattgacccaagagttactaacctggtgcataggagcccaacactgttactgtagcttctgttggtggaccaaagaaccagattgagctcaataaccaaaggcctcaaagaaaaaaaacacattgcgaatgattgaaggattacatgcataggaggcctgagttttgaagttcctgaataaaataaatatttgttaaaatcaattcttttattagtgggatcctctttatcaccatgtctctagccttagtgtctttcttcatgtaaggtcagacattggaatggttcaagatttggaccttcatttgtg

SEQ ID NO: 20807 - DNA, 139 bp, Glycine max
  Clone ID: PAT_MRT3847_118795C.1
acggccactcgtccgtacatcgttggtgaatgttataaagcctgacaagatgtttggccctcggtagagttgacaaaggtccaagacgtacataatgctacataatgccgtgaccagtgactaagctgacctatctatc

SEQ ID NO: 20808 - DNA, 455 bp, Glycine max
  Clone ID: PAT_MRT3847_118796C.1
gagaggggcttgaaacccccccaaaaacttcacaggtttttgggttttaaaccccccccattttttatgccaaaaaaaccccccccccggggccgccccctgggccgccccctgggccgacccctgggccgacccctgggcggacccctgggtcccccccggaatttccgcccgggtcctggaggggtaccaactttccttttaagggggcctattaaaactggggggaaacatgggcaaaagtgtttcctgggggaaaatgttttcccctcccaattccccccaaaataacaccccgaaaactaaaggggaaaacccggggggccccatgggggggcccccccccatttattggggggggccccctggccccttttcaagggggaaaacctgtgggcccacctgtttaataaaacccccccccccccgggggagggggttttccttttgggccc

SEQ ID NO: 20809 - DNA, 278 bp, Glycine max
  Clone ID: PAT_MRT3847_118797C.1
gttttgttgtctcgacaattggtttttgcatcaaatgcaaagtacgtgttcaactcgttggattggattggatttatattgtatgtgctagagtttgaggatgtgggtggagcaagttgtttaacttagatattagagagattgtatatggttgacttgttggcaatattttgatgatattgtaacttgtttggggttatgcttttttgcattatgctcttgatacagatacttttttcttcgatatagcattcctttgtctgcctcttgtatttgga

SEQ ID NO: 20810 - DNA, 369 bp, Glycine max
  Clone ID: PAT_MRT3847_118798C.1
ctgaaacacatgattttgttatctaataataccgacttggtttctttgatgatctcctctagaactgcatccaccgtcaaacgtggccgtgccggcttggccgctcctttcaccggtcaccaattcctggctgattcaaacacgaggctgacctacactgacatttcctccgtagctactaccgtcggcagagtacaatgctcgccggtgtggccagcggtcgaacgcatgacatccccgactctgctatacttctcacaccgggtttatgccgggttggattctgaaggaaactgccttgtcaggagaggatggctcatttgcgtgccattctggtgggcgcacggccacgtgtaccgtgagcacgac

SEQ ID NO: 20811 - DNA, 603 bp, Glycine max
  Clone ID: PAT_MRT3847_118799C.1
gtccggaaaaacccgtcgacccagcgtccgctcaaattatctcaagattcagtaattttctttcctcagtcattcttctttttggctaaaaaaatcaaattaagacaattgtcaacttttcaatgataagaattatatatatatatatatatttacgagatccgtagtgcattacatggttgcattgtgggtagtactgagtgtgaaaagattggaagtgataacagccatgctagtatagatttgacctttaaatttgccacggccccactgaatctttattttcacatgatcatgaatagtttttttttaagatcaaaagtatttcatttataaaaaacaatattactgaaactagatattattattatgagtaataaatttctctttatatatttaggcagtatttggtttaattagactttaatacatgatgaaactatatttctctttattgtgagtaataaatctttttattaactttgaagataactttttttaaattagaaaaagtgttgaaagtaactaaaaagattatggggtttacacttctaaagttattttttatcatattttaaaaaataataattaaggagtaatttg

SEQ ID NO: 20812 - DNA, 389 bp, Glycine max
  Clone ID: PAT_MRT3847_11879C.1
gctgagtaaactgactgtcccccaaggcacttgccgttttgttaaaagaacgcctctttctatagggggaggagctggagcaaagaatgctattctcatgaatatgccaaatgcttgtcttccaatgtggagatatttttgtggagatctcgtctttgaagtttctaagatgacttctccctacattaaatggacagcctctttcttcatagcgtttggaaatctggctgacgacaccatcaattttgaggcttttccccacaagctggtgcatcctggagagattcacgaaaaagttgtattggaatttcccccagaggaacttcttacagcttggtcaactcaagtgcgtacttgcacaacctttgtggctgatgggtgcccatatt

SEQ ID NO: 20813 - DNA, 345 bp, Glycine max
  Clone ID: PAT_MRT3847_1187C.1
ctcaattcatactattctcacccttgcactctcacatggttgggagctgtttcagctggatataaacaatgcctttttaaatggagttcttaaagaatcaatgtttatgacacagcctcctgactttgaagttggggataggtttcttgtttgcaaacttaacaaggctctctatggcttaaaacaagccccaaggcagtggtttgataggttaaagtctactcttcttcagttaggttttgtgggcagcaaatgtgattcttccctgtttatatacaagcatcagactcacactgtctatcttctagtttatgtggatgatattatcatcacaggttgttctac

SEQ ID NO: 20814 - DNA, 478 bp, Glycine max
  Clone ID: PAT_MRT3847_118800C.1
gctgagtctcgagcaactgcgtgaagccttgagcaccgttcgccaggcaagctcgcgcccgattaacgtgaatttcttctgccatcaaccgcccgctgcggatgcggtgcgtgaccgccactggaaggcgttgctggaaccttattaccgcgaactcggcgccgattttgatgcgccaacccccctctccaaccgcgagccgttcagcgaggccacctgcacagtggtcgaggaatttcgtcccgaggtggtgagttttcactttggcctgcccgaaaaagccttgctcgaccgggtaaaagccactggggccaaggtgctgtcatcggccactaccgtagaagaagccatctggctggaacagcatggctgcgatgcaattattgcgatggggctagaggctggcgggcatcgtgggttgtttctcagcgacgacctcaatacccagatcgggctgatggcactggtgccgcaaatt

SEQ ID NO: 20815 - DNA, 635 bp, Glycine max
  Clone ID: PAT_MRT3847_118801C.1
ctcgagccgaatcggctagggatagagggatcttttggggaggagcggtgcaacaacacgactgatttaattggttgagcaagatgtcgacctcgacgaacgtggtagtcctggacaacggcggcgggctgatcaaggcgggcatcggcggcgagcgcgacccctccgccatagtcccgaactgcctctaccgccccccgtcgtcgaagaagtggctccacctccactccggcgacgaggacctcacctccgccgccgtgcgccgccccatggaccgcggctacctcataaaccccgacctccagcgcgaaatctggtcccacctcttctcttccgtcctccacataaacccttcccagtcctcgctcctcctcacggagcctctcttcactcccccctccatccagcgctcggtggacgagctcgtcttcgaggacttcaacttccgggccctgtacgtggcccactccccctccctcgtccacctccacgaggccagccgcaacaacgccaacgggctcctctccaaggcccagtgcagcctcgtcctcgacgccgggttctccttcacccacgcctcccccgtcttccacaacttcgccctcaactacgccgtcaagaggatcgacctcgga

SEQ ID NO: 20816 - DNA, 166 bp, Glycine max
  Clone ID: PAT_MRT3847_118802C.1
gccctctcgagcatacataaattgggacagtgatacgtgtcgttcgtggaacacacctctgtgggtacaatcacatgatataacttgatagttccacgtccaggcctaagctgcgataatctagacgagcgattatagggataacagtaaccattatattagtcta

SEQ ID NO: 20817 - DNA, 532 bp, Glycine max
  Clone ID: PAT_MRT3847_118803C.1
gaggaaaggcgtctaagaaaggaacattccccactaaaacatcttcctaaacttgattcaagtcacgtcacttgcattgaaagagtgtgtggtcttggtctgaacccaagaggtattcgacctccaaagctacaaatgaattcgataaacttggtcatagatcttccaaaacagatttgagagatgtggactttcttatacaggattaagaactcacgggctagttaatcttcactcatacacttcttgttatttatgttttttttttttccttctttttcatcttcacctattttttatacccttttgcataggtttgttgatattttttgtttttttgttttttgctgtttgtgtcctgcattactacctaaatgttttttgcactttaacctgtttagtcttttatgcatgttatcttgatcacctagacatgcatgggaacaacattatctaggtccatcttagtcgtctttcttcccttattttcctaagagtcaaatatttcatttttgttgcttactcttgagtt

SEQ ID NO: 20818 - DNA, 253 bp, Glycine max
  Clone ID: PAT_MRT3847_118804C.1
gagacaccattttgtgtgatttcaataaaataagggcattttttgaaagaataacaatttttttacaacagaacctcggcaaaatacattgttagaagatagacaaaaattctttaaattcattttccacttaaacagctttacttttttatgctgaaaagggaaaaaaatattgaccattttttatattcccactctctattgttcctttctattcatcattagaatcatgcgcctctttttttatcatttt

SEQ ID NO: 20819 - DNA, 334 bp, Glycine max
  Clone ID: PAT_MRT3847_118805C.1
aaagaacctactaaaccttttaaggggattacggggcagggaaccacatcttattcaccatttaatcttgaaccataacaaaacaagtactcaacaccttcgacctccagaacacaaaataactcaagagaaaacataatcctactataaacaacacctacggacgtgcggaaaccttcaaataacccattaaaaatcattccttatatttatggcaaatctgtgaaaaaaaatattcccacataaccccaatggatttatctcccccaaaaaacaaagaaacccggacttatttttaatggcacaaactgtacttccattcaaaccatattaa

SEQ ID NO: 20820 - DNA, 342 bp, Glycine max
  Clone ID: PAT_MRT3847_118806C.1
atggatattttgctagctgagcttcatatggcttgcatatatatcgtcctcccagcaaatcaatacacagctgtttcgcttaatgctaaggttaacaaattctacttttgtcagatggctggatttgctctctataaaagatataaatctcaattcttaaagatgctgaacgtcgtctctgaaaactttttagttgatctgaaatcacggaatataccagaattgacgaggacggttacggagatacagacttacatagaagataagaagttccttcaagagccagaaagatggagacagcagcctaattacgcaccaaacggacgttttaataattattga

SEQ ID NO: 20821 - DNA, 441 bp, Glycine max
  Clone ID: PAT_MRT3847_118807C.1
ggaattcggcacgagggaaatagtatacgcaaccgaattacatttcagccctgctattaagcctatacaggcatctatttctgaataatgcagcatgtgccttcattcatttgtcatgtgccttcattctcatccatctatcagaatgttgccttatgttcttccttttctaatggttctgtctgatggaatttgtttcctttgttatctgcccttgtttttcaattcaaagtaatcaaaggagaacaatatttggttgttttattaagcaacgtatcatctttgatactgttcagctgcttaatgtgatcattgcatgttatttttttttcttaaagtaggacattccaataagcattcaaagattaagttaaaaattgatgctctataaacctcacgaggtacattcaaaaaccacaacttaccaggaaaagacactaa

SEQ ID NO: 20822 - DNA, 687 bp, Glycine max
  Clone ID: PAT_MRT3847_118808C.1
cgacaatggccgataccagacttacctacaggcgccgccagccgtacaacacggtctccaacaaggtccgcgttatcaggacccccggtggcgagcacaggtaccttcacatcaagaagaggggtacctcccccaagtgcggtgactgcggtgtcaagctccctggtattcctgccctccgtccccgcgagtacgcccagatctcccgccccaagaagaccgtccagcgtgcctacggtggctcccgctgcgccaactgcgtccgcgaccgtgtcgtccgcgccttccttatcgaggagcagaagatcgtcaagaaggtcatgaaggaggccgagaagaagcagaagggtggtcgttaaatcctctttttcactcaacgactaagctgcacggatggcgcattttgggagggttcatagcgtgcgttctgagcccaagggctgggactgctgaatgagagcgacttggccgttcctgcttcaccaaaacacgtgcctctagtgcgtgacagcaactcggcgcttttcctcggaggcatggacatggcgaatgtgggcagattcgaaagcttgcgctgcagcccgccgtgcctctgccgagcaatgcatatctcagcatcgaccaggcaaaaacaattggtggacagcacgactatcgcaacagaatgcaatgcgtaacgcttgaaaa

SEQ ID NO: 20823 - DNA, 478 bp, Glycine max
  Clone ID: PAT_MRT3847_118809C.1
gttaagctagcttccattcggtttgatcgttctctctgaacaaccccagccatgggaggaggaaatggacagaaggccaagatggctcgtgagagaaacatggagaaaaataaacctgccaaaggtagccagttagaggccaacaagaaggccatgaacatccagtgcaaggtgtgcatgcagacattcatatgtaccacatcggaagttaagtgtcgagaacatgctgaagccaagcatcccaaggctcatctctacacttgctttccgcatcttaaaaactgactacttattatattacattgcaaaaccataacttgtacttgtagatgcacatttcattgtaaaaccactctatttaatactgatatatgaaactatctatcaaaaagtcctcaaatgttaccttcggaagttgatttgggattatgattatgattatgattatgaatgagtttgattcccttaccccccaaaa

SEQ ID NO: 20824 - DNA, 2831 bp, Glycine max
  Clone ID: PAT_MRT3847_11880C.1
ttttcttaaacatgctgaagctgttgagaaagatcttcctgcaagggagcttcatgaacttttattgctttctctgcaatggctgagtgggatgataagtctttccaaccttgtctgtccattgcaacttctacgtgaaattgaaaccaaagtatggctcctagccgttgagtctgagactcaggtgaagagtgaaggagatttcaattttaccttttctaccagggagagtggtatcaagaacgaccccagtattattgaccgaactgctagtataatagcaaagatggacaaccatataaatacaatgaggagtagaattgtagaaaaatacgagtccagggaaaataacctattcctcccacaagaatcaagtgatggatgctggtctttcaactacttttggtgggaatacaaagacaaaaagaagggccaaaggatacatggcaccaagacgcccacctcttgaatcagcagataaaagtgctgatactgatgatggctctagtaccaatagtttaaaaaatgagtttcagttgcaagaggaaaacgtaaaagtggaaatgtctttttctaggtgggaagaaagggtcggagcagcagagctagaaagggctgtactttctttattggaatttggacaaattgctgccgccaagcaactacaggataaattctctcctgggcaaataccatctgagtttagacttgttgatgcagccttgaagcttgctgctatttcaacacctcctagcaatgtatcagtgccaatgcttgatgaggaagtgcgttcagttatgcagtcatacggtataatgaatgataagcactatgttgacccgctgcaggttttggagagtttggtgaccatttttattgaaggcagtgggcgtgggctgtgtaagagaataatagcagttataaaagctgcaaacaccttgggcctctcattttttgaggggttcaacaagcaaccaattgaactactacagctgctttcgcttaaagcacaagattcctttgaggaggccaactttctggttcagactcatccaatgccagcggcaagtattgctcaaatacttgcagaatcttttctaaagggtgtgttggctgcacatcgtggaggatatatggattcacagaaggaggaagggcctgctccattgctgtggagattttcggacttcttgaagtgggcagagctttgtccctctgaaccagaaattggacatgctttaatgcgtttggtgattactggacaagaaataccacatgcgtgtgaggttgagcttcttattctgtctcaccacttctacaaatcatcttcttgccttgatggagttgatgttcttgtggcccttgctgcaactagggttgatgcttatgtcttggagggtgattttccatgtttggctcgcttgataactggagttggaaatttttatgctctcaatttcattcttggcattcttatagaaaacggtcagttggatcttcttcttcagaagtattctgctgctgcagacacaaacactggcactgctgaggctgtcagaggatttcgaatggctgttcttacatccttgaagcatttcaaccccaatgaccttgatgcatttgccatggtctacaatcattttgatatgaaacatgagacggcagctcttttagagtcacgtgcagagcagtcatgtgagcagtggtttcaccgctacaacaaagaccagaatgaagacttgttggattccatgcgctacttcattgaagctgctgaagttcactcttcaatcgatgctggcaacaaaacacgtaaggattgtgctcaggcttcccttctgtcccttcaaatacgaatgccagacttccaatggctttatagatcagaaaccaatgctagacgagcgttagttgagcagtctcgatttcaagaagctctgattgtagctgaagcttataacctgaaccagccaagtgagtgggctttagtactctggaatcagatgcttaaacctgaagtaatggaggagtttgtggctgaatttgtggcagttttacctcttcagccttcaatgctgattgatttagctaggttctatagagctgaagttgctgccagaggggaccaatcccatttttctgtctggctcacagggggaggattgccagctgaatgggctaaatatttaggaagatcattcaggtgcttactgaagcgaacaagggatttgaagttgcggatgcagttggctacagtggcaactggatttggggatgtcattgatgcatgtacagaagaaatggataaggtcgctgacaatgcagcaccactagttctgaggaagggtcatggtggagcttacctccctttaatgtgaaagtttctactgtagatcatcataatgattggataatcacgatggacaggaagttggttcttgaccttgaaccattgattagggaatattgctgcaagcattgaagatggcaagcagaaaccttaagtgttgaccaaatgaaaattggatggttacttggtgaaagtgagaagtataatttttggttgagtaaatgcttgatggttgtatattaggccaactgtatttatagctcattcttgtaaaacaccattctagttttggttttctccattttttttgcagggagaggatagtttattgtcggttttgaggctagtagaatagaatgccccattgttttcttttttcctctttttttccccctccaaaatgtatagttcctgtacatcaatataaaaaatctatttgccatgttttacaaaaaaaaaaaaaaaaaaaaaaaaaggaaat

SEQ ID NO: 20825 - DNA, 1023 bp, Glycine max
  Clone ID: PAT_MRT3847_118810C.1
ggggggtgctagaagcagctgtatagatagagacctttgcttacttcacttccttcccttcccttccctctcttattatctctaccattttccttcttctctctaagctaagctaaagagatatggggaattgccaagctgtggatgctgcagtgcttgtgatccaacacccttgtgggaagatagagaggttgtattggccagtcactgcaagtgaggtcatgaggactaatccaggtcactatgtttctttgataataccattgcctgtgccaccacaggagcagaatcaagagcagaaaacggtgcgtttcacacgcgttaagctgctccggcctaatgagactctcaaccttggccatgcttacaggcttatcaccactcaagaggtcatgaaggtgttgaaagctaagaagcatgcaaagacaaagaagccactggctgaggccgccgagaagccgcatagggtgcagtcggagaagcagagttcagctagtgaggcacacacagcaggagagtctacacatcagggaatgagagcagagagacacaggccaaggacggcttcagcaaatcctgctgtagtgaggtcaaaatcctggcgcccttccttacagagcatttctgagtcagcaagttgatttattggtgcatactgcaaagttgtgacatgtatagtggctcatagaatattatatgattagcctctatgatgtcacatgttcctactagatgattcctgttacatgggcatcgagattcaacagatgattaaaaccaagatttttctttcatcaccaatcataccctcagcagcaaaaccatgctccagtggtaacatgtttgtatagcaccaacaagaagaaaaggaatagagagtaatgaatgtaaaaatctgttagaagtgagtttttgtgattgatatagttacagccctcacctcttttcaatttccttacttattgcttggggcggccccccgcttacgtacgacgacccgggaagaacttttttataacaaaa

SEQ ID NO: 20826 - DNA, 655 bp, Glycine max
  Clone ID: PAT_MRT3847_118811C.1
tcattttatgggggtcatgcatagggaccttaagcctgaaaatttcttgcttgctaataaggatcctaaggcacctctcaaagccaccgattttggattgtccgtcttcattgaagaaggtatagtgtatagagaaattgttggaagtgcatactatgtagctccggaggtgttaaagcgaaattatggaaaggagatagatgtgtggagcgcaggaatcattttatacatccttctaagtggggtgcctccattttggggcgaaaacgagagaagcatatttgaagctattttgggaggcaagcttgatctggagagcgcaccatggccttcaatttcagctgctgcaaaagatttgatcaggaaaatgttgaataatgaccctaagaaacgcattacagctgccgaagcccttgaacacccgtggatgaaggaaggtggtgaagcatctgacaagcctttagacaatgctgttttgactagaatgaaacagttcagagcaatgaacaagatgaagaaacttgctttaaaggttatagcagaaaacctttcagaggaagaaataaagggtttgaaacaaatgttcaacaatatggatactgatcgcagtggcacaatcacattcgaggaactcaaatctggattgaccaaattg

SEQ ID NO: 20827 - DNA, 143 bp, Glycine max
  Clone ID: PAT_MRT3847_118812C.1
ggttttaaagggaacatcattccaactttttcaagaaacgattgcgatgtacagtgttgcatgatctgtgcctgagttcctggtgaatcatatgaatcgtacatacgtatgtttgtgtacttttttctttttgtcagagaaga

SEQ ID NO: 20828 - DNA, 238 bp, Glycine max
  Clone ID: PAT_MRT3847_118813C.1
ggggggtccgatcgccatgagagaagttttgagcttgccaagcattggcatacatgcgcagtttatcaatttcacgcatgggaaaaaccaggccgatacccatataagcggtcgagaaacgattccccttaatagagtgggtataatagatatgagcatgccgcataaggctttgacgaggactattacagccgattgggctattgtgaatccccatgacagaatccttgatttgaga

SEQ ID NO: 20829 - DNA, 189 bp, Glycine max
  Clone ID: PAT_MRT3847_118814C.1
actccgataaatcaatccaaatttcactgaaacctgatcaattttacaaaacaatggcattcatatttcatatgccaaaagccaagcccttaaacaagggttaacaggtgaaccctttttttttttaataaggccaaaaccaattctccttcctttcttttgaacctttccccccgtcccttgaagggt

SEQ ID NO: 20830 - DNA, 1357 bp, Glycine max
  unsure (1)..(1357): unsure at all n locations
  Clone ID: PAT_MRT3847_118815C.1
aaaaataacaccacctattcaatccttaccttagtgacttcaatcagcacaacataagtgctagtgcagtggcttcaatcagcacaacataagtgccagtacagatacaagttcaccactcattcaaatctcatcccttttgaagatattactaaaacgctcaaaattagacagatgccagaagtgcttttacatgataatccagaaaatatcaattacagttgtgaaatgtacagttatagccatttcaaaatcacaaactacggttttaagagacctaaagccaaatccctggctgtaattaaaaatgatagaaggcaacatgataggcaaggatccctatgatgatatatatgcccaatttgatcatgttggaaccacagaattataatgctctcctagcccaaaagcatgcttgtgataagaaagcatgatactcgaattagacaagccagtgccaccatcagatttatactctttgcccatctccacatctgggaaggaccctgaaaatatcataatatgcttcttcaagcagtgagtcaaggcaccaagttctagttgtcccccccatgtagctgtggactccacttctttacaataattttcaaacttctgagcaaatgattcattggaatcatcttcaattaaattctctgacaggaaaaatggaaggaaatcagatgtatgatttctcatgtaagcagccaccatttctcgaagttcttggtatgtataagaggatctaccccccagagaggatggccagctgatcctcaatggctctatagaggcagtgcccatcaggctttatttcacaaacagtcaagccaagaggcttcaacttcttttccaatttctcgttctcaatcacacgatcacttnataatgtcactctgctctgcttggattctctgctccctttctgcttcttgttgagctcttttgtctcgcctctgtttggccttgctgacctttgtatgttcaggttgactagtaacagatactccagctatggccttcaccagactgtccaaattgctcttttcatttccattaccactgatatagcctaatgcagtcagttctttggcttggttctccttaagcttagcagaaagttgagaaacctcttcttccacttgcttcttcttagctttctgctcagccttgctacctctagctgcagcctttttcatctcaacttcttttttctgcagttgcaatatctctttcctgtgtcgtgaaagaatttcatcaagagtttcctgctgcttctcaaatgttttgtctgaaatcacttctttgtgtgcttgctcctcaatttcttgggtatcctccattggagcaacccaag

SEQ ID NO: 20831 - DNA, 367 bp, Glycine max
  Clone ID: PAT_MRT3847_118816C.1
ggttctcacatcatttttttggttgaattggatggggccccccaacattacaaaaccagaaacggattggcctttttggacgattccaaatctaacacttattctggggttggcaccaacattaaatatacggccttgcgcggggaggcgacaccatttaatggcctacccaacgctcagactgaaacctattttttagccaaacacaggggatctcatgggccacccgtgggtccaaacaaggctgaacccatgggggacccaatgtttctttccaggcttgaccccaagaccggcaaatttatcctgcctgtctgaagcccaacacccttttaatttcaccacgtcttacgcctttcacttttct

SEQ ID NO: 20832 - DNA, 425 bp, Glycine max
  Clone ID: PAT_MRT3847_118817C.1
aaaggggaaccatgggatttactccccccatagctaaaaaaaaattttcaaagaagggttaaaccctatttaaggcacctttaaatttatccccgccctaaaaggaaaaacggttcccagttccatccaaaaaccgatcagggggcccccctttgttctgaaattcccttaagaatacgggaaaaacccctttttttttttaataagcctaatgcaggacactattagccctgacctcatgaaaggaactttaagtttgggcagaatatgcaaaaactaccccccctttaagggcattttcaccactaacattttgttccaaaaccatggcaatggttttattcccaaaatttaagaaaaatttctcttgggggaacacttgttttaattaaaaaagcctggaaggcttaaggaccttgggcaca

SEQ ID NO: 20833 - DNA, 1342 bp, Glycine max
  unsure (1)..(1342): unsure at all n locations
  Clone ID: PAT_MRT3847_118818C.1
ggctcgagctcgagccgaggctgacagtaaacgacgacgtggaggaaggtgaacctcgtcgtatcatccgcttcctccacttcctccacttccctttccttcccatttcattcctttcctgccacactcattcatcctccctgagaaatgtcgaagctgctgcttctacccactcctcccctcaccacctccattcaccgcttcaacacttcatcttcggcttctgcccttcaattccaatgccgattctccctttctcttctctctcgtctccaccactctcccacttccttccgctccctcgtgcgtagaacaagagaccttccccttcgcgctttcgattcctcctccgatgccaatagcgaagaaaaagaagaagtaaaggaaaatgaagagggcgttgacaaccggagtggaagtaggattgccgacgaggattatccgagcggccagtttgacttcgaaccggttaccggatggagaagcttcctcgtcaagctcaagatgctagtcgcgttcccttgggagcgtgtccaaaagggcagcgtcctcacaatgaagcttcgtggccagatatctgatcaagtgaagagtaggttctctccaggactttctctgcctcaaatttgtgagaattttttgaaagcagcgtatgatcctcgtatttctgggatctatcttcatattgatagtttaaattgcgggtggggtaaagtagaagaaattcgaaggcatatattggatttcaaaaaatcaggaaaatttgttttggcttatgttcctttatgccaagagaaagagtattatcttgcatctgcatgtgaagagatatatgccccacccagtgcttacttttctttgtttggattgactgttcaagcctcattcctcaaaggcgttttagataacataggaattgaaccacaagtggaaaggattggaaaatacaaaagtgcaggagatcaactagctcgaagaaccatgtctgaagaaaattgtgagatgctgaccacgttacttgataatatctatacaaattggctggataaagtctcttctgccaaaggaaaaacaagagaagatattgagaacttcataaatgaaggtgtttatcaagtagacaagctgaaagaagagggactcatatcaaatataaactatgatgatgaggatgtgaatacatctccaagcaaagacggttaanaggataagaaacattaaatgttttgcagattactgccatgttgaaggagagacttggagtgaaatcagataaagatctgcgtatggtggattacagganatactctagagttaggantggactgttggaataccagtg

SEQ ID NO: 20834 - DNA, 252 bp, Glycine max
  Clone ID: PAT_MRT3847_118819C.1
taatggtactgctgcaaggaagattaacagaaaggcaccactattttgcctttttttcttccttattcattggcataaggcatcaatgttatcatactgagagataagagatctacggagggaaatttgtggttgttgttgcaatgacatttatgaacgtctgaaacaaaaacaattttcatattccaaattattacacattgttccattctgaaattgtcaaatgaaaaactgccccttaataatttcatg

SEQ ID NO: 20835 - DNA, 217 bp, Glycine max
  Clone ID: PAT_MRT3847_11881C.1
tgggatgtattcacctgatttcgtccgcaaatccagctacaaatggagcgccaagcaacattcctgtaacattgaggccttcgccgattccaccttcaatctcctacggaagctcgtgcaatccgctctcgccgttgatttctccggaggagttcagtcctctatttctactgagtctcttacctacgatatagtccaagtgattgtgggtggttca

SEQ ID NO: 20836 - DNA, 400 bp, Glycine max
  Clone ID: PAT_MRT3847_118820C.1
gcacgagtcagacctaacagcttacactcgatactcgcccaaaaggaaaaaaaaaaaaaggaaaaagatagctagctccccccaaaagaaaaagaaaaaaaaaaaaaaaaaaaaaaaaaaaaaaaaaaaaaaaaaaaaaaaaaaaaaaaaaaaaaaaaaaaggaaaaaacaaaaaaaaaaaaaaaaaaaaatcttgggggggggcccgggcccaaattccccctataaggaagtgtataaacccccctaactgggcggtgtttaaaaacggtgggaatggaaaaaccctggggttccccaatttaatggctttggaaaaaaacccccttttccccggtggggaaaaaagaaaaaggccccccccgatccgccttcccaaaatttggcgacccttaatggg

SEQ ID NO: 20837 - DNA, 385 bp, Glycine max
  Clone ID: PAT_MRT3847_118821C.1
acaaaaagacaaagttttggcaattggcaccccccaaactttggttccctcattaaatatttccccttttgggaaacaccgggtttaaatctactaaattttttttttgcccaaccttcaatttactaaaaggggcaaaaacctagtccaaataattttaaaagcaacaaaaagactacttgggcttttatttatttatcaaactttccaaatttttgaaatttaccagatgacccagtcccttggaacctttttgtaacttgggacatagggactttgaccataagggggggttatctgaaaataaaggggaaaggcttcatggggctttaaaggaactgggacttttgggggctccaaattttcctttttctccttttttggg

SEQ ID NO: 20838 - DNA, 425 bp, Glycine max
  Clone ID: PAT_MRT3847_118822C.1
ttttttttttttttttttttttttttttttttttttttttttttttttttttttttttttttttttttttgtttttttttttttttcatagtcacacaaggctcgaggttctagatcgcgagcggccgccctttttttttttttttatcacaaccaattataaaatcaaaccaacttaatcaaattacatggataccaaaaaaaaaaagctgttgaaagttgaaacgaattgatttcacattaacagaggtattgctaacagtcactaactttgacaaatttcataaatgtggctaatctacacttttcactatacactttgggaagaacttttcctacccttcacaaaaacattgttagttaagattcctccaaaatgcaccaaccagttcctcaccctccaaagaacaatagattgttgaaaa

SEQ ID NO: 20839 - DNA, 470 bp, Glycine max
  Clone ID: PAT_MRT3847_118823C.1
aaaaaaattatactaagttttactcttaacttgagtttataataaaacacccaaacatcactttaaaatcaatttcaaccaaaattaattttattaatgcccatccaaacatgcactaaatggtatcacaaaacaagctttgcttgctagtactagaaagatgtttgccatctaaaaaactatagggatgaagctaacacatttcttcaatttgattggcagctcatatctttgtctgagaagaaatggtggcagtagatccatctattactgtgatgagttggtaagagactcaaagcacagcccaatgcgctattgtttccggaggtggagtttttcaaggatgctttacgttgatagaactgtggaaggaatgtgttaatagtaaattatcactataactataatatatatcaacttttctttcatccttagcttataaatttccagcattatattatatatactat

SEQ ID NO: 20840 - DNA, 242 bp, Glycine max
  Clone ID: PAT_MRT3847_118824C.1
atgggagggaaacggatgtgatgccctttctgatgagggggaacatgagaggattacaaaagaagctgcccttctcaggactactgtacttgttctacacagagccgagcaacccaatcccacccaaaaatattgtcatgggggcctatacagaaactctgctcttctaggatacaagaggaatggtttgcttcgccgaacgagcggaccgaaacagatattcggttggactttcctccaca

SEQ ID NO: 20841 - DNA, 504 bp, Glycine max
  Clone ID: PAT_MRT3847_118825C.1
gcgggccccgggccggaactgccccggaaacccacgcgtgccccacatcatccgaccaacataatggaaatttccgggaggatcaatcaataaagaaatgggaagtgaggcggacaccaggaaatctcaaccctaaagagctccgaagctcaagagggcagaccaaagattcgggacttcatcgacaacagggcgcactgaatggaagtcggcgacaggggctgacaaacttcaagtggatcacgattccgagctcgaccaagctctcgacacattatatgagaacaggggagccaccagggagaacgcgatgacatagcacaatgacgcaatcgatagcagcaagcaacatgagtgtgaggagaacaaactggctaccttaccacaacaacggcctgctgcaaaaaaaaagggacccaacaaggcaaccgctaaggagaacagctgaggcatctcaagccacagggtgatgggccttgactgaccgatgcggagaccaagccc

SEQ ID NO: 20842 - DNA, 452 bp, Glycine max
  Clone ID: PAT_MRT3847_118826C.1
cccacgcgtccgcccacgcgtccgtacggctgcgagaagacgacagaagggggattagggtgggagaggtactatgatggagacccagacctctaccaatttcacaagcactcttcaattgacctaatttccctcccaaaagatttctccaagttcaactccatcaatatgtatgatatagtcatcaagaaccccaatgtcttccatgtccgggataagtgagtcttcatttgttgatgtgccactatagtagctcctctccattcaccttaattcctttttttgttggtggacttttttttacctttttttttaatatcggtttttattggtctctacttcctcatgttggtgtgttcttctatatagctagctagagtttgaggaaactctagtaaactcttgttgggtttttctttttctttttttgggggggattttttgtttataag

SEQ ID NO: 20843 - DNA, 530 bp, Glycine max
  Clone ID: PAT_MRT3847_118827C.1
tgtcttttatctctttttgtttttgtttattgtttgcaaaacaaaagatgagaccggtttttcaattgaccaatacttgggggggagaaatcacaactctaaagactatgatagtctcacgcacgcacgcactggataatcgatacgagttgacaacagtcacaagaggaagacatatggaagcgtggggcatttcgctaacatccagtgctaggacggagctgaggaccattgggttgatggatcgaacaaaacccaccataatatgctccacaaggaggctgtccgcctttacggatggatggaatggatcccaaaaagcatgcgagtttttgtttgggcacaagttaaacaggggcgtgcataaccctatcccattggagggcccttgcccacaacaagcaattcgaaatgaagaaaatccatatgctggtggggaactaacgaaatcattgggcataagggctgtattagcaacaataaaaacctctttgccaattttcttggagagtccttgcatcatgactgct

SEQ ID NO: 20844 - DNA, 243 bp, Glycine max
  unsure (1)..(243): unsure at all n locations
  Clone ID: PAT_MRT3847_118828C.1
gttcgggccggaccagctcacaggctagtngccttnnnttataaaagaaattatggactgctgaaatggctcaaacgtttgcngtccaaatagtccaaacgcatgcnagctagacaagaccctcacagcctcttgacttgaatctcatnnctgcattctcttgaatctcttctctcgagcccnctctcncaagacccttacccttgacctcgagccctcacccttctctttcgatttcaaacc

SEQ ID NO: 20845 - DNA, 156 bp, Glycine max
  Clone ID: PAT_MRT3847_118829C.1
aaagattaaatagactggggtaattaaaccacatgtcggatatatatgatctaaaattgtactgttaatgtaaaataacaaaaaataaaaaaagaaagaaagaatttgaaaatggaaacaagaaatttctcatattttatggaatttgcccccaaa

SEQ ID NO: 20846 - DNA, 277 bp, Glycine max
  Clone ID: PAT_MRT3847_11882C.1
tgttggatctagtcgtctaggtgtgaaagatagtgatgtatatcattgggaggattcgctcagcgtctgcttgtccagtgcgaggcggtgttatcagttgatttcttcgcccccaatactgaggttggtgtggacaatctgtttgagatgatggaccgcatggttgctcacaacccctcttttttcgacatcacttgtgggcgctggaggtacaacggctgatcttacattgggaatggccatctatatgcatgacattgtctgtgtggaggccatt

SEQ ID NO: 20847 - DNA, 363 bp, Glycine max
  Clone ID: PAT_MRT3847_118830C.1
ctaatgctatcatcatgatgaccctcacttatacaacgagtgtgcattgtcatctgggcatgcaagatgctgaacaaagtacagctgacgccatagcagctcgaaaggcttatgtgagtacaagtccttcaatgctactgatacacgcttttcgttgaggacacgaaggagtttgacgagatgcgaaaataatccttgtcacaccccacaatatgtctactccatggcatagcgccacgcgtgttatgctttatcgaacacactagctacatgcacggctcaaatttttttatctggtctgggccgataccatggatgactcctacagatcctgtgcaaatctaagatgtactgaacaggatt

SEQ ID NO: 20848 - DNA, 350 bp, Glycine max
  Clone ID: PAT_MRT3847_118831C.1
attccctcgtcgacccactcctccgtacactcctagaaatatctctttttttttatctctcatccatatccataaacatcaacatttcttaacttcagctagccctcccactccactacaacagtccatgtccctacctaatctcaaacatccagcaacaccactactatcatactaattatttcacacataacgtcaccttctacaccttaaagccataacctcaccttacataatctcaaactcttcttcctaacctacacaaccctaatctccactcttctctactcctttcacattatatccaacattccccataattactaaatccttaaaaactaacaccattt

SEQ ID NO: 20849 - DNA, 273 bp, Glycine max
  Clone ID: PAT_MRT3847_118832C.1
gacaccatccacgactcttctgagttccagcacagcaggctcttcatttctcggacactttcgtttcattcaccgttaatgtcaccagatttcacacattgggacttcccggaactcatacattccactaggatcactttccgagccattctccgcgtcatgctcatcatcctcatgttcaacctgctcttcactcatggcgggcttccatgggcctgggcacgggccatacacatcatacctggcccagtatctgaccagttccggatcatt

SEQ ID NO: 20850 - DNA, 252 bp, Glycine max
  unsure (1)..(252): unsure at all n locations
  Clone ID: PAT_MRT3847_118833C.1
gtctactacgcngagaacaacttcaaacggctatcttgcacaaactgcttacaaaaacagcttacacactgcagggaagcgggcaaaacctgagacagagttgccatccagagctgttgaaaaatacaggacatgtctcttctctgaaataatgacaggaccaatgtgtaatttaaacttttcaacggcactaggttactgcacgtcttgtatcaaccactgattatgatttgttaagcgaaaaaaaaagag

SEQ ID NO: 20851 - DNA, 136 bp, Glycine max
  Clone ID: PAT_MRT3847_118834C.1
tagttttccacaagggcacccccacgagcagggagacctttcaaacgaaggggcggactgtaatgagcggccagatgactagggggcaagagactgcatggaacaagtccaaaggctaggaggttttgactaaaga

SEQ ID NO: 20852 - DNA, 678 bp, Glycine max
  unsure (1)..(678): unsure at all n locations
  Clone ID: PAT_MRT3847_118835C.1
ttcggtccggaattcccgcgtcgacccacgcgtccggaggcagaaagcacagaaagagtgaaggataaggaggaaaaagacaagtctaaagaattggacagagagaaggaaaaagaaaaagaaaatgacaaaaagggagaaaatgaaaaagacaaactcagaagtgttgaagggacaaatttggatgctctactgcagaggcttccgggttgtgtgagccgggaccttattgatcaattgactgtggagttctgttatctaaattcaaaatcaagtcggaaaaagcttgtgagggctttgttcaatgtaccaaggacatctctggaattgttaccatattattcacgcatggttgccactctctcaacttgtatgaaggatgtctcgtccattcttttgcagatgttggaggaggaattcaacttcttaataaataaaaaggatcagatgaacattgagacaaagataaggaacatcaggttcattggagaactttgcaagttcaaaatttcccctcctggcctagtcttcagttgtttgaaggcctgtttagatgattttacacaccacaacattgatgtagcttgcaatcttcttgaaacatgtgggcgntttctgtatcggtcttcagaaactactatacgtatggctaacatgtttgagatactgatgccggtg

SEQ ID NO: 20853 - DNA, 326 bp, Glycine max
  Clone ID: PAT_MRT3847_118836C.1
cccacgcgtccgcccacgtttccggtttgggattggacttgcgtcttatggtattcgccttcacctcgtggtttcggtttttttttttcacttttccgccgttgcccagtcggccactctcatggccaccgatcaaatcaccgcgtcggcgccctcggagagaggcgccggaggcaaactccgaaaaccgccgccgagaaagccgcttcctagcccttactcgcgtccgccggaggccacccgccgccgttggatttcgaagctcgtggatcctgcctatcgcctcatcgccggcggagccactcgtattctcccctctttcttct

SEQ ID NO: 20854 - DNA, 158 bp, Glycine max
  Clone ID: PAT_MRT3847_118837C.1
ttttccctacaaaaggctcctttttactgtgaccatttggtgcatacatgcaaccgggaaacacatccccaggttaatattgataggctagggtgtgtcagtatgatcacatccttccacaagctgacagtgatatacgagactccacctatctctaa

SEQ ID NO: 20855 - DNA, 348 bp, Glycine max
  Clone ID: PAT_MRT3847_118838C.1
ggaaacccaaactcaacccggggggtttttccacaaattatttttttggaaaggtttttccaatttttcctggaccaagccaatacttctttttaaacaaagtttttttttgggcaaagggttttttcctgtaaaccttttgggagtccccaccttttgatgggccaagggttttacaaccttttgtcgacccctctccgatttccaattcggttttttaaactaaaaaagggcaatggaccccgtagggatgccaaaaatttttttccttgactgatttcctccctagaaaacctcattttttctcatttttttaacttccacctactttttggcgtgcattttatt

SEQ ID NO: 20856 - DNA, 372 bp, Glycine max
  Clone ID: PAT_MRT3847_118839C.1
gtgccgcctgcttgggggggggggggggggcttatggcaaagtaatgagtgaggatgggtaagggcggtggatagaaatagggtaagacaaaaagaaaaaggaggggtgccgacaagaagcagcgacggagtgcatattgggtgtcgcgttaatgaggtggggagacaaataaaagcgcgagcacccctgctgtaagctggtaggaggaaaactttttgacgggagccatgagccactaagaagtactacaagaagtgcatgagcgataatatggctacttaagggtggggagggataggtcggggtctctaggtgccgctagcgggctaggtgcgagcgcgccaaggtaatggtataaacgaaaccccgcg

SEQ ID NO: 20857 - DNA, 1190 bp, Glycine max
  Clone ID: PAT_MRT3847_11883C.1
gcgtttacccttctgctgccgcggtccaagccgcgccccgacggctgcgaagacgacagaaggggagtagcagagaaaagaatagggttttgctatggagaagctagaagcagagaacgttctggtccttccctctgagcaacccaacaacaataggccaaagccaaaaccaaagcgtttcgtgaaaaaccaaatcccagactcaatccttaacaaccctcttctgagcgccgcaatctctgtgctcccttccaactacaacttcgaggtccacaagtgcgtctggcgcgtgctctccacgggagcaaaacgcgtggctctccagttcccggagggtctcctcatgtactctctcccactctccgacatcttcaccaccttcgccggcgtcacccactgcttcgtcctcgccgacgtcacctacggcgcttgctgcgtcgacgaccttgctgcctccgccctcggcgccgacctcctcatccactacggccacagctgcctcgtccccatcgacgccaccacaatcccctgcctctacgtcttcgtcgacatcaaaatcgacgtccctcacttcgtcgacaccctcagcttaaacctcctcgcccaaaccaaaaccctcgtcgtcgctggaaccattcaattcgcctccgcaattcgcgccgccaagccccaattggaggagttagggtttagggttttgattcctcagtccaagccgctctccgcaggcgaggttctgggttgcactgcgcccaaggtatctcgtcgaaattgctcggtgatgatggtgagagtagtgttttggtttttgtggcggatggaaggtttcacttggaggcgttcatgattgcgaatccggggattagggcattcaggtatgacccttacatggggaagttgtttctggaggaatatgatcatttgggtatgaagaggtccaggaaaaatgcgatttttaaagccagggaggaggctcggagttggggtctggttttggggacgctggggaggcaagggaatccaaggattttggagaggttggagaagatgatgagggatagaggctttgattatactgtggttttgatgtcggagatgagtcctacaaggattgcgctctttgaggattccctggatgcttggatacagattgcgtgtccgaggttgtccatcgcctcgtgccgaattcc

SEQ ID NO: 20858 - DNA, 849 bp, Glycine max
  unsure (1)..(849): unsure at all n locations
  Clone ID: PAT_MRT3847_118840C.1
cccactcgtccggtttatggaggcgaataggatgaaagctaattgaagattagcgccagtgttctattggatgtcccacgggactctttgattatgaatgacgagatattttgtcctttacttcccatcctcacggttgataaaatacaagaaagctttgacgtaatcaattcaggatcaaagcctctcgctgcatatatatttacaaataccaagaagcttaaggagcaatttgttatgactatttcagctggcggtttggttgttaatgacactactttacatcttgcagttcatactttaccatttgggggagttggtgagagtggagtgggtgcataccatgggaaattcacatttgaagcttttagccacaaaaaagcagttctatatcgcagatttattggtgatgcaccagtaaggtacccaccatacacaaatacaaagatgagattgctgaaagctctcataggtggtggcatacttggtattattcgcgccctgtttggttggtgataggctttaattttaattatattggaattggaatcttgatgctatagacggcttttaatctggcttccttgtattttaatctccagttaatttttttatgtaatactcatcaaccttgacttttggatgatagtaaataatcatgtattgatattcgtttcttttgtcatatgattgttttaagatgcccggtggacctgtgtttgttctgtcctatcagatgccgtgctaatacggatattacatgtgttgtgtgttggcatgtttctagcatgccatttaaggaaatatgactcattgagtaacacanattaaaaacatacataaatgtct

SEQ ID NO: 20859 - DNA, 101 bp, Glycine max
  Clone ID: PAT_MRT3847_118841C.1
agtcatgttacacaatgacagttgtgccagctatatgactgaatgatactctcatacagcaaagaactgtaggatgtactacttaactgtaaactgtaccg

SEQ ID NO: 20860 - DNA, 535 bp, Glycine max
  Clone ID: PAT_MRT3847_118842C.1
gtcgacccacgcgtccgattcgagcggccgctttttttttttttttttttttttttttttggggttatcacgctctagggtctggataggaggaactaaatgggttacaggaaaaagcgtagttagacataacaataagtggggagcatttttttttttctaaaaaactttaagaagaatcttaaaatgtaggtttgacctatctcaaccttaaaaaatcagtttgtaaggggaggattgctcctcacttggatactctattttgacactatctttaaccaatgggggacttcaacacacccactttttgcctatgggtacctgccaatgtgggacttcagcacacccctttttggccacgggtacctgccacaactaaggggggctaaggatgaccacaattaaagggggttttcaacactccccacatgctcaagggtattcacctagagcggggtaaacaccaagaaaaagaaatgtgggggtttgtgaaacaccaatattgggagaaatcctatcagggtaagtaggattt

SEQ ID NO: 20861 - DNA, 356 bp, Glycine max
  Clone ID: PAT_MRT3847_118843C.1
acctcttgtccagacactagacagttttttttttcgactctttgcgacacaactatgggaggtgacttagaacgcgcggctgtgtatttaatcttttttgaactgcgagaacaatctctatcattagattgtcattcgtgtctttaattctaagcttgaacctatataatgcacagcttgcttattagttttttaacccttttcccaaattaaaccgcattcccgcaccttcctcttaactgcatcaaacactacatttacatcagtgggcattcgctaaatgacagaacaatatgcagtcgatcataatgattgtaacctattttacaacctcactcgaaaagaaaatcaccatc

SEQ ID NO: 20862 - DNA, 915 bp, Glycine max
  Clone ID: PAT_MRT3847_118844C.1
tataaaattagtatttgtttttgtaattttcatttttattttttaggtctctattgtttttgtgtaccgagcgaaacaaagaaaaagaaaaggacagaaacaaacacacacacgcggagcgcggaaccaaatgaaatgattgagaagagagcgaagaaaaaaaacagagccaaaccaaaccccaccgtccccgaaacggttcgttttgcccttcttcggaaccctcccttccgcgccgctgctgctgctccggtcgccgtcggcgattctccggtaaccgaacaccatcgatccgtcaggagcctcggatctcggatctgagcgaaacgaatcgaaacgaaacgaaacgatgccgtctcatgcggatctggaccggcagatcgagcatctgatggagtgcaagcctctgccggaagccgatgtgaaggcgctgtgcgatcaggcgagagcgattctcgtggaggagtggaacgttcagccggtgaagtgccccgtcaccatctgcggcgacattcacggccagttctacgatctcatcgagctctttcggataggaggaaacgctcccgatactaattacctctttatgggcgattatgtagatcgtgggtactattcagtggagactgtcacgcttttggtggccttgaaagttcgttatagagatagaattacaatccttaggggaaatcatgagagccgtcaaatcactcaagtgtatggcttctacgatgaatgcttgagaaagtatggaaatgccaatgtctggaaattctttaccgatttgtttgattatttacctctgaccgcccttattgagagtcagattttctgtttgcatggaggtctctcaccatctttggatacacttgataatatccgtgccttggatcgcatacaggaggttccacacga

SEQ ID NO: 20863 - DNA, 181 bp, Glycine max
  Clone ID: PAT_MRT3847_118845C.1
aaaggatggaccatcaggtgacaaaagtcatgtcccccccatggtaatgggaacctactgatacgcagcacctgaatatttatccacaagtcatcttactgttaaaatcgatgtctatagatttggggtcgtcctgctggaaatattgtctggcaacagggctgattataataatacacca

SEQ ID NO: 20864 - DNA, 705 bp, Glycine max
  unsure (1)..(705): unsure at all n locations
  Clone ID: PAT_MRT3847_118846C.1
ctcgagcacacacacacggagcgcggaaccaaatgaaatgattgagaagagagagcgaagaaaaaaaagagagccaaaccaaacctttcccgaaacggttcgttttgcccttcttcggaaccctcccttctgcgccgctgctgctgctccggtcgccgtcggcgactctccggtaaccgaagaccactgccgatccgtcagaaacctcggatctcggatctgaacgagcgaaacgatgccgtctcacgcggatctggaccggcagatcgagcatctgatggagtgcaagcctctgccggaggccgaggtgaaggcgctgtgcgatcaggcgagggcgattctcgtcgaagagtggaacgttcagccggtgaagtgccccgtcaccgtctgcggcgacattcacggccagttctacgatctcatcgagctctttcggataggaggaaacgctcccgatactaattacctgtttatgggcgattatgtagatcgtgggtactattcagtggagactgttacgcttttggtggccttgaaagttcgttacagagatagaattacaatccttaggggaaatcacgagagccgtcaaatcactcaagtgtatggcttctatgacgaatgcttgagaaagtatggaaatgccaatgtcttnaaattcttcaccgacttgtttgattatttacctctgactgcccttattga

SEQ ID NO: 20865 - DNA, 992 bp, Glycine max
  Clone ID: PAT_MRT3847_118847C.1
cccacgcgtccgcccacgcgtccgcccacgcgtccgtacggctgtgcagagctgcgcgtcgatctagaaaatggcgaggataaaggtttagaccgttatgagggtttcggagtcgttgcagagctgcgcgttgatctagaaaaatggcgaggataaaggtgtacgagttgaggaataagacgaaggcggagctactgaaccagctcaaggatctcaaggcggagctagccctgctccgcgtcgccaaggttaccggcggcgccccaaacaagctctccaaaattaaggtggtgaggctatcgatagcgcaggttttgacggttatttcccagaagcagaaagcggcgctgagagaggcttacaagaagaagaagtatttgccccttgacctccgtcccaagaagacccgcgccattcgcagacgccttaccaaacaccaggtgtctttgaagacggaacgtgagaagaagaaggagctgtactttccactaagaaagtatgcgatcaaagtttaggttagaattggtttcaagttgcattttttaggacagttacttgtattgaaattttaaggttttgatgcctgccgctggggcagcattccaattattagtaccagagttgtttcaatgcttgcattaagtttccaaggtctatatgttaaaaactagagttgtttcgagaaactattgttgctttcggcctttaactttatagcgattacctgttgaatgatcaatggccgtaacctttatgagttgtgatttatgcacatctcaacagtggatacccaaatcgacactcttcatttctctcgtttttgttaaattatattacctatcaaaattattactattcttcttcaaaaaaaagttgtgatttatgcacatctcaacagtggatacccaaatcgacactcttcatttctctcgtttttgttaaattatattaccctatcaaaatattacaaaaaaaaaaaaaaaaaggcccct

SEQ ID NO: 20866 - DNA, 1761 bp, Glycine max
  unsure (1)..(1761): unsure at all n locations
  Clone ID: PAT_MRT3847_118848C.1
ccggtccggatcagcgggtccaagccgaggagacgaagagacaaagaaaaggcacacacaccagccgtggaaatgaatgaatgattgagaaaagcgcgaagaaaaaaaacagagccaaatcaaaccacgccagctccaaaacgctgcgtttcgctcccgtcctcgcgtcgctcccaaaccctcctatccgcggcattcctcgagccctggtcgccgtcgacaccgctcccggtcaccgttcccaaccgcaaccctaagaaacctcggatctcggagctgcctcagcgccgtgacagtcaaacgaaacgatgccgtctcacgcggatctggagcgacagatcgagcagctgatggactgcaagcctctgccggagtcggaggtgaaggcgctgtgcgatcaagcgagggcgattcttgtggaggagtggaacgtgcagccggtaaagtgccccgtcaccgtctgcggcgacattcacgggcagttctacgatctcatcgagctgtttcggataggagggaacgctcccgataccaattatctctttatgggggaatatgtagatcgtggatactattcagtggagactgtttacgcttttggtgaccttgaacgttcgttattgagatagaattacaattcttatggggaaatcatgaaagccgtcaaataactcaagtgtatggcttctatgatgaatgcttgagaaaatatggaaatgccaatgtctggaaatactttaccagacttgtttgattattgtacctctgactgcccttattgagagtcagattttctgtttgcatggaggtctctcaccatctttggatacacttgataatatccgtgccttggatcgcatacaggaggttccacacgaaggaccaatgtgtgacctcttgtggtctgatccagatgatcgctgtggttggggaatatctccacgtggtgctggatatacatttggacaggatatagctgctcagtttaatcataccaatggtctctccctgatatcgagagctcaccagcttgtcatggaaggattcaattggtgccaggacaagaatgtggtgactgtttttagtgcacccaattactgttaccgatgtgggaacatggctgccatactagaaattggagagaatatggatcagaattttctgcagtttgatccagctcccagacaaattgagcccgacaccacacgaaagactccagattattttttgtaacttcatatatctctttgtttgtaagctactgctttatgctgttactgtagatgtgtctttaaggagagaagagtttcactgtttaagtgggacggttatcatcaacataattctttcttttggagtttgtctgctgttgctgctgctgccgtcttatttggacaagaaacaaatagaaattgacacaattggtgtttgtatatttttgataggaggaagcggcaataacatgatatatcatgtgctgtaattttttcttaaattaaatctcaagttagagagcagatttttgagttctgacaatcatgttcatttgagactgttgatggtgacagatgcaggtgttgatttttttcttctttttcttattttattatcgaatgatatgatattttaggggtggagggttgattggaaatggttgcttcgagaaataaagaaattgngctgtgctntttttttttttttttttcttctggagcacaatttattagtaattatttataaaaagccttacttgtttttttt

SEQ ID NO: 20867 - DNA, 278 bp, Glycine max
  unsure (1)..(278): unsure at all n locations
  Clone ID: PAT_MRT3847_118849C.1
gtggcgccctcgaggcccaagaaattctnnttggcctnntttcaacttctggctgccttctctttttaaggggagcactcttctcctttttgctccagctatttacaagggtgctctcgttctagcttttgtcccaaagtgnngcaacagccnattggtttccttgggtttaggtttacacgaagcataccgcgcttaaaccatgattntngtgatatgnttgatgcganntcgattgaaactcctaatctccttgtcgaagcgatngtagatcctct

SEQ ID NO: 20868 - DNA, 282 bp, Glycine max
  Clone ID: PAT_MRT3847_11884C.1
gggcggatgcaagcagacaacagacaggggagacggaagggagtaccttctctggcttcttcctgagtcataagccagagcaggccaacgccattcatatcgatgcgaggctgtctataacaacagagcacaacgtctcatatcggcggcataaatcacatacttaacaccgcactacacataaagagagggcacctatgagctggtgtagaggactagctacaaaatagaccctgttgtggtgcctgctgatatatgagatgcaagatcctgacattattg

SEQ ID NO: 20869 - DNA, 350 bp, Glycine max
  unsure (1)..(350): unsure at all n locations
  Clone ID: PAT_MRT3847_118850C.1
ttttatcaattcttaatcaatttttaaatagaaattgagagttgaacagtagaagaaggtgtacangacactttttaattttaagaaaaaaaaactcttagataaacgaacagcccctaagctttacattttttttcaagaagttaaaaagaaggggggagggttgagcaaaattgatagggcttatataccaagaactcactttaattcatgaacagtgcccaatggcattttttctgccttataatttcccaaaacttgatcattaattaaacttactcatttgacagttttaagcggggaacaatattcattgattggcgttccataatcataaacttgcatgcata

SEQ ID NO: 20870 - DNA, 419 bp, Glycine max
  Clone ID: PAT_MRT3847_118851C.1
cccccaaaaaaaaaattatgttacgggggtaaaattacactacttttgggggtccccaaaaaaattgaacccttggagttgaaaagaacctgttcaacaaactgttttacatggggaggttccctaaccatttatggtaaccccgggaaagaaaatgaaacctccctaaaatctttcaaaagttttgggggttggggggccaaaaaaaagggaaaaaaccccttttgagggttcctcaagggcagtttggaaaaaagggttggattggcctacaaacatggagctttcttcactatgttggaaacctaaaacaccttttcctttaaaatccccagcttctttaaataaaaaaactggttctgcgggacctacttctttttgattcccaacggagaaaccttgacacttctgattcattt

SEQ ID NO: 20871 - DNA, 398 bp, Glycine max
  Clone ID: PAT_MRT3847_118852C.1
aaagatattactactgccacagttgcccaaaggataatggctaatcatgaagcttatgtggtaatttctttaacgcaacttttttttttcttccgtttttgctttctcaatatttgagcaacctgcaaattttgttgatatggttaatcggttattctaatatctaaggccaatatcaaatttgtctaaggtgctgttaattttataatccttcacaatttacatagtttccctatcaagtcaaagatttattaaacatctatatctgaaagtgtactccacttgctggaatctgatgtgatcaaccaaagagttattccatactgctgaagcatttgaaaaggttatatgtatgctttacattcacccttttggaaatctttttcttttatcttttc

SEQ ID NO: 20872 - DNA, 402 bp, Glycine max
  Clone ID: PAT_MRT3847_118853C.1
gtacgcccacgcgtcctactgctgcttttacggctttatgggatcataatgaagaaatgtgatctttgaaaaagtacgtatggttagagtgacaatgttcatgtgctttttgcatggatctcaaattcttttttctattgcctgcatcctttttttaagacattattgtcaatatgtaattattacctatcatgggaaacttatatctcactgttctatgttgtattggttatcactctttactttgaatccatcgacctgttttcgacttcctgtatgaccttttccttacttttgttaaggttttttcttgttttactttctaagtaatttatgctaatttttgaaaattatatcttaataatctctattacataattctaattactaacttactaaatt

SEQ ID NO: 20873 - DNA, 295 bp, Glycine max
  unsure (1)..(295): unsure at all n locations
  Clone ID: PAT_MRT3847_118854C.1
cgtggttatgttgcctcaaactcaaaggatganccgcgcaaaggagggtggtaantttnacangccnagntantannangnaccaacctngnnannatnggaaatggtaangccctggtcctcgactgccnacacttctcaaattgctgtcaagtttgcgaactcatgaccangattgacaggnngatccggcaacgagttgagaaggagcccaggtttttgaagaagggtnangtnnggtttngttaagatgattccaaccaaaccnnggttgtngaantttcncgggtatccc

SEQ ID NO: 20874 - DNA, 143 bp, Glycine max
  Clone ID: PAT_MRT3847_118855C.1
gtcattctttcttattaatgcatatcagattctgggaattctgtactataagttttataggactgtgatatatagcaattattaagtgcatactgatcattgcgtatatcaagcacctgatgtattctataagacgatttatg

SEQ ID NO: 20875 - DNA, 173 bp, Glycine max
  Clone ID: PAT_MRT3847_118856C.1
aaaaacaattcagttataggtcaaaacaaagaaattgctttctcaatgatcttctacccaacttttaccaccttaaaccgtgccctttcccgcattgtttctccattcacctgtcttaaattcatcgcttgctttcccaccaggaagacccacaattacattacctccatttc

SEQ ID NO: 20876 - DNA, 490 bp, Glycine max
  Clone ID: PAT_MRT3847_118857C.1
cccacgcgtttgttttttgtttatcctctcaggatgtaccaactccttatgctggaacattggaggaatggacagtagttcaacctgctcagattgtcactgcagttgagaaactctgccagtgattgctacaaaacactagcaattgtgcttgttaaattaagctagaattttcatcatggctttctctttaccttttatttcttaagtctcccataacgtaaattgttatttaacttttgttaatctttgcattttttttcttaaaagaagaatatttagaaccctcaagccaatccaactccttctcaactagttcatctacatcatttgtgtggtgtgtgtaagagttgggcaaagccctattactagggagatatttatagtcagttctgaatcccgcaaatctgttatagatccacttttttttttaattgactcgtatggatgtagttctcatcgattttaaatatgctattcaatatatagt

SEQ ID NO: 20877 - DNA, 789 bp, Glycine max
  unsure (1)..(789): unsure at all n locations
  Clone ID: PAT_MRT3847_118858C.1
ccaccagccccgctcagcatcggaaaaacatccacgtccgtgcaaacaactgggacgcgagccacctcccagatccccaacctaggaacccgctttgcaacggaattgatcatacaacttagcttcctcattttccaaacttacggctgcgagaagacgacagaagggacccttcaattttccatgaatctggcttccaacaacattattctcaactaagtgatttgcattacaacggaattggtcataaaagctatgttcctcaattaccaagctatgattaccctccaatgtctgaatcctcaacttataacaattcctataataacagcaaccagaacttcagctacgcttcagttctttcaacgccttcttcaagtcccacaccgttgaattcgaactcgacgtttgtcaaggggagcagcagcactgaggatgagacagaaagctatgtcagtagcaacaacttgttgagatttgaaatcccagatatgctacgtatgaatacattaattatatgagtactcattcatacgtagcatataattaatgtattcacatcatgaaacaattgtgtcgaacaaaaattgatttatctggggctagctagctagctagctagataattacaatggatcgattgtgttcatacttgtaacattttctaaatttttaatagtattggtagttgcccttctgcnnaaaaaaaaaaaaaaaaaaaaaaaaaaatagagcctagggagaaaaaaaaagaataggagcatactgaacaaagctcctaaaagaata

SEQ ID NO: 20878 - DNA, 107 bp, Glycine max
  unsure (1)..(107): unsure at all n locations
  Clone ID: PAT_MRT3847_118859C.1
gctcgaaatcgctcgagcacatgctagcagccacaactngtttaattggtataggcgtgccaggtcttgttattttgagcgtaagggctgaactaattagacccaag

SEQ ID NO: 20879 - DNA, 1490 bp, Glycine max
  Clone ID: PAT_MRT3847_11885C.1
ccgatcataacgaaaacgaaaccgaataacccaatgtatcatcatcctctgaattcaactcgctcgcacatgggaatttattgaccagcatcaaccagatctgtgactgtgttcgattgggtaccaactattattcagtgctgcagctactactgtggcacaacattaagcttttagttgaatcagataggctgtcagtaacgtaaaagtaatccctgtgccccagccatggctgcaccgtttttctcaacgccctttcagccttatgtttatcagagtccgcaagatgcaattataccttttcagattttagggggtgaagctcaagtggttcagataatgttgaagccacaagaaaaaatcatcgcaaagcctggttctatgtgctttatgtctggatccgttgaaatggaaaatgcctaccttccagaaaatgaagtaggcatatggcagtggttatttggcaaaactataactagcattgtacttcgcaattctggaccaagttgatggatttcgtttggaattgctgcacctttattttgcaagaattcttccgattgactttggcaatgttcaatggagagattttgtgtcagccagatgcttttctttgctctgtcaatgatgtgaaggttagcaacatagttgatcaaaggggacggaatgctgttgctagtgctgagggattcttgaggcaaaagctatctggccaagggcttgcattcatattagctgggggatctgttgtacagaaaaatcttgagatcggtgaagttctagctgttgatgtttcttccattgttgctgtgacaagtgcagtcaatatccaaataaaatataatggtcctgcaagaaggacaatgtttgggggtgacaatgctgtcacagccgttctaacaggaccaggcattgtgttcatacaaagtttaccttttcatcgattctctcaacgaattgctagggcggtgacatcacccaacatgagggaaaatcccaagtttttcatacagattgcagtttttttttttctggcgtatgttgtcattgtatcttcgttaatattaacagatgtatgaaattcagtttggttttcattgactagtttatacatttctcttgtcgttgacatcacccaacatgagggaaaatccaaagtttttcatacagattgcagttttcttttttctggcgtaagttgtcattgtatcttcattaatattaacagatgtatgaaattcagtttggtttttcttttgtagttttttactattctcttatcttaatattataatacaggaatgtgggagagggggttgggggcagatttcttgttggcagatcctttgtgccaattaaaaattcatcctagtaatgtcattatgtctatcactaaaataggatttattttattcttttagtagactagtcaatttgaaaactttgtcgttaaaaaaaaaaaaaaaaaaaaaaaaaaaaaaaaaaaaaaa

SEQ ID NO: 20880 - DNA, 334 bp, Glycine max
  unsure (1)..(334): unsure at all n locations
  Clone ID: PAT_MRT3847_118860C.1
cacaagctctaagaagaagaagctattgtaccgcttgaagaccaagccttccctctctgactaaaatcattattgttatgtgtatgtgcgagtgggaagaggaagatcactacctgaattggttgcttacgttcctgcatcaactttcctgctgttcatatatgaatataaagtttttctttttttttgccattttgtttcaatgattattatgttttctaccatattatataattttatatatacctctttctgtgtttttgttgggatgattattttaatagttnggtggtatcactgaaaaaaaatatcaagctccttttttcaaattggg

SEQ ID NO: 20881 - DNA, 122 bp, Glycine max
  Clone ID: PAT_MRT3847_118861C.1
gcgaggatgtgacgcttgtctgtgagatgcagataatagacctgtggccatatgaccctggttcatgtgctagccaatgtgcgtgcggaaggtgttgcggaagatcgggccagcggcggcgg

SEQ ID NO: 20882 - DNA, 971 bp, Glycine max
  Clone ID: PAT_MRT3847_118862C.1
cccgatttctgagaaactcaagtttctggttaacctaatcgagaggaaggtattgaagacgaagatcgagtcctacatgccgaacttcaagcttgcgttcaagcatttttgtatccacacgggaggtagggctgtgttggatcgcatgcagaagagcctcgagcttgaggattggcacatggagccttctagaatgacactttacaggtttggcaacacgtcttctagctcggtctggtatgagttggcatattgtgaggccaaggggaggattaagaagggtgatagggtttggcaaatggcgttcgggtccgggttcaagtgtaacactgctgtgtgggttgctttgaatacgatcgaaccagggtccatcaagagtccgtggagggatgagatacataattttcctgtcaaggttgatccactccctgtgaagagtaacaaatgaatgaataatccaatcatgcaaattggggtttgggaatttctgaggaaaagtatgtggtttgatttggattattagtatttataatttagttagttgcgtatgtttgttatgttatggaagaattgtgtacttagttttctctagctttaatcattaacaactaccttttggccttaaaaaaaaaaaaaaaaaaaaaaaaaaaaaaaaaaaaaaaaaaaaaaaaaaaaaaaaaaaaaaaaaaaaaaaaaaaaaaaaaaatttttaaaaaaaaaaaaaaaaaaaaaggaaaaaaaaaaaaaaaaaaggggccccttggccccccctttttttcccttttggggggggtaaatgggcccctgggggaaaattgggaaaaagttttttcctggggaaaatttttttccccttaaatttccccaaaaaaaaggaccggagacaaaaagggaaaaaccgggggggcctaagggggggccaaacccaattttatggggggggcgcttatgcgcctttttcaaggggggaa

SEQ ID NO: 20883 - DNA, 211 bp, Glycine max
  unsure (1)..(211): unsure at all n locations
  Clone ID: PAT_MRT3847_118863C.1
gangnncggngcgtngtcagctcgganttcggctcgagccanannanaaganganaanagnctcagttgtgtatcgttgangctcctagtngctngggtttcgcaagtanggatcgaagaagnccgatggcgatggctgctgctcnacntcgcnanggnnggnggtnnnacacaagcnttcacngccntnngtncctntctnanntattcc

SEQ ID NO: 20884 - DNA, 305 bp, Glycine max
  Clone ID: PAT_MRT3847_118864C.1
acttattaacacttttcttaattcaagatggggaatcccttcttcactgtttctcttatttgggtttgggggatactcttgcggagtgcatgctatactattacctccagcaagttcaacgagtgccaacttaacaaccttaacgccttggaacccgaccacacggtttagtcctgaggtggtcttattggaacatggtacttttaacaccctgggcgtcaatgcgcctgtgtcactggttacaaacgcaccctcaaccgcaacggtctacacttgacatctcactcacattatcccctaatgat

SEQ ID NO: 20885 - DNA, 388 bp, Glycine max
  Clone ID: PAT_MRT3847_118865C.1
tcacggaatatgcactgcagctctgagctctccacacgatcaggaaccgaagcgtcggaattggaaaatatgactataattgccaatgaatcgggttccatttcctgtggtgagggacaaatcattcacaccttggctaagttcttgcaaccttgtgcgagaatcttataatttttttttttttttctcgaatacctcttctctttatctcgaattggaaatgtgagttatatcacgaaacaagagagagacatctgattgtgaatggattatgaatttaaaatgtctgaagatttattaatttttttgtgagaagcaagcattgaattggatcttacttgtggagtagtactattattgagaacgtgtgcgatgttaatcacttgga

SEQ ID NO: 20886 - DNA, 483 bp, Glycine max
  Clone ID: PAT_MRT3847_118866C.1
ggaaacaagaagaatattattcagacattttcgattttgtcttttctttatctttattaatggagttttgattttcgtcccaaaatttcctgagtggtagcctgagagctaacatattactttcataccaactcaaccaatttatcttcttctttaattcaactacaaaaactggttcgcggggaaaacttgattctcgttatttgacataacatattagtaatccttcaggggacatatgaattatatgataaaatacaagcatgtaatattagaaatagaagcatgtaatatttgatttacttcaatctccttagaaactttggaattattcaatttacggcatttctggttaaatttgtttagtattataagtgcacctgtacaacttaagtgtgaaatttgctgcactatatataatatgatgcttgaagggtggtgtatttaaagctagtcataacataaggcacatatgctggagga

SEQ ID NO: 20887 - DNA, 226 bp, Glycine max
  Clone ID: PAT_MRT3847_118867C.1
cggcggtccgccctcattattctatctttatattatttctttgacaaagttagattaaaaccttacattattgtgaaactgttattataactcaatacaaaaacccactctcattatcatacatttcactgttcaccactgagccattgtttattgttactagcaaacaactccaaccatgtttcatctgatcacgcatgggtttacaaacttactagggaaagaa

SEQ ID NO: 20888 - DNA, 452 bp, Glycine max
  Clone ID: PAT_MRT3847_118868C.1
ctagaagcgtcaaacactatacaattgctactttacagtctacattttttcacaagatgaatatatatgtacaaattcaataccatcactggggagataacagagttaatcggagaagaattcttgcacttcagctaattggtccgtgttcattagaagagggagtgaatcaattttagttccattggcattgagcttattatctactacatcataccactcctgctgctcttcaaactcggtaatattgttgtgattttgggggtaggaaatttccccaccaccagagttttgacatatgcaagctgatgggttctcggtaaactcaccactaccgggtctcaactcattcggttctcccataaagcctacctggaaagttcgtactcgagaggcaaattcctcccacgtcctattatttctgttcatgaataacatggtcaacttctttg

SEQ ID NO: 20889 - DNA, 258 bp, Glycine max
  Clone ID: PAT_MRT3847_118869C.1
ggctcgagtgtggttgcaatatgacttgatgcttcttttctacatgcatgcttttgacttgttgccaatgctgagtcgattttattctcattactatatggtccaatatttgtatttatttatttagacttttctatctaaaaatacttgtaacaaaatattccaaaaaaaactttattatatgcaccaaaaagatatagacactgtctaataactgtatttcctcttggtaggacttggaggaactgcctctggaag

SEQ ID NO: 20890 - DNA, 106 bp, Glycine max
  unsure (1)..(106): unsure at all n locations
  Clone ID: PAT_MRT3847_11886C.1
gcttgagagaatgaaggtggagaatcatagggctgaagaacatgcttgattcaggttaacaacaattaccaatgcccttgccagaccgccattgggtgantttgat

SEQ ID NO: 20891 - DNA, 1055 bp, Glycine max
  unsure (1)..(1055): unsure at all n locations
  Clone ID: PAT_MRT3847_118870C.1
ctatgagattagaattgacgctaaaaaagcaaacagttaaatcgaagcatgaaactgatgcaaatgaggtgagagcatgtcagagtaagcagtcagatcagtcattgcaagaagataacaaggggaatgcaaaaaggaagagagtgtccaaatctcaatcttctgcacctgctgtcattaaacaagtcaaatccaccaaaaaggtcgagaatcagaggtatagtttgcgaaggcaatctgcaggattgaaagctgaaaaacctgaaccagcttgtgtgctcctgcgggtccttcttaccccgcacctgctcgtgttttcggccatggtgagtggaccagcttcactcgggtccttcgccctcggggtggcctgggatgcctctgaatctgcgagaccttctaaccctgaacaagttcatgttaaaaagaatgttgagaagaagaggcagagtatgagaagacaaactaacaggttcaggccagagaatccagaaccagctgaagactgctttaagacagatgatgcaaaatttaatgtctcccaattatctgataatatgtcagaaaaaaaattgtccaacaacatcaactgtaacttctgaacaagaaaatgatgcctgtatatttgagcctcaggaaactcgtagatcatctgttgggcggccattgcgtcggacagttgagaagattgtgtcctacaaggaagttccagttaaccggaagatgcgcagagataaattagggattttcatatcaggttctcactcagttaccaataactctgtatagaagcgtgatgtggaaactgcaaagcatgatatgccctacgtccggatgctatagtgcatggtgatagggttctattgaacttttttttttaatagcttcttgtttagggctttgcatcattgagaactgatgtactttattatgatcatctttagatgataaattgataatatttgatccatttgttgatttcgctgcttatctccctcccctccccctcttatactgtaaatttnccnaaggaaaaagtttaaagaatataaaaa

SEQ ID NO: 20892 - DNA, 327 bp, Glycine max
  Clone ID: PAT_MRT3847_118871C.1
ttgctgtcaaggacaacatcaaccacgttggagctctctgaggggggagtgtcttaaacgagtgtgaatcaaatgttactactactatggccgaatatgagagagggttcacttttgagaaattgactcctccttctacttttcacaggtcttttttgttgtcttttggaccatcttacaatacttttcaagttgatttttttaaacttattgtgctccttgtggcctgagatggatgatccttctgatgtttagctgatcatacgttttttttttgtgtatttatccttttttctagcctttgtggtttctctttggatttttttg

SEQ ID NO: 20893 - DNA, 522 bp, Glycine max
  Clone ID: PAT_MRT3847_118872C.1
aaaggaaaggatgtttatacatgtccacatttgcccagggcctgcacagaagccacattatccctagcacaattgaggggagatgtttgcccacagaaagggctgggattaaggcccaagcaggcatttgtcaattaaaaagggcagattagcacacggacccaaagtttttacaatttggaagtagctgtccaggcctcccccaaactccaaacctaggaatgtaggacaaagggctttttatcatgaaagtcagcaggaggctcactctgggggttgctagtcaaatgctgcagggagcaggctgttgctggtctccattcccatttccctaagaagttttacaagggtgaggggaagcacagcctccactgcccaaaacatgcctactaccaaccttgcacttaaggggcctacactccactactccctggcacctagggaaatttcccccaggtctttcaacttgacacctgtcacttgcaaagtgtgggagcaggtatgggagcttttgacacgtac

SEQ ID NO: 20894 - DNA, 373 bp, Glycine max
  Clone ID: PAT_MRT3847_118873C.1
ggacttcaacatctaattacatgcatggatgaacattgtaatgaaagaaatggcaaaaagggtgatattgcctgatattgaaattattcttgaacttgtgctagaaaaaatatattaaaaaaaaactgaatgattcatcttggatttctataatgtatgatatcaaaacctgctctgcaattgcggcacagaaagattcataccccgtctcgtctccttttttttttttttggtttttcttaaaaaaagttcaggtgacttgaactcttgagattcacttcatagcgtccacgttaatcttgtatctaccggcattggtggttgccaacggttagctaggtccagtagcttcacttcacaactaataatggtt

SEQ ID NO: 20895 - DNA, 383 bp, Glycine max
  Clone ID: PAT_MRT3847_118874C.1
gtcgatttctatggcgatggtagctgatttgctgaacgcgaagcagcgtcgcaggagtgccatcaaggcgagaaaatcggccggtgcaatagtagtcggcgtcccgccgccgaaatgcacgtcgcttaccggcagcgcgcgaggcgcttgctctgcgaccaaacgtatctaaagaaaaggtgaagacataacaacaataatacagagaattgctaataaaaaataactacagtcgcagagtaagaaataaagaatagaaaagaagaatgtaaagaaaaacaatacaaataaaaaatgaaaatataagtgagagaataaacttcaaagcaagagaaggaaaagaggaaatttaaaataaaaaaagacaaaaaataaaaaaaaat

SEQ ID NO: 20896 - DNA, 419 bp, Glycine max
  Clone ID: PAT_MRT3847_118875C.1
ggctcgagctcacatgccgcagacttcgacgagggctgtgagagatggcaacctctatatcctggagacagctttcatgttctggcctgtggacagtctctctaatccacaatcgctctctgctcctgctctctcatgctcatgaactcttttggcgtagaccggtcgctattaagggacatagacaccgtgcgggttatgcggctaaaagagcctggacccataacaaatgctgcgagtgcacttcagctgctgggtgcgcttgtgctcggatctgtacaggcatcattcagatgaagacatctgaatagagctgagctacggatgctagcagctgtacgccgtgggaacccacgaggtgatgcactgtcagacttggaggatgcgcttcacaggcatagctcctgtgcctagcttgc

SEQ ID NO: 20897 - DNA, 739 bp, Glycine max
  Clone ID: PAT_MRT3847_118876C.1
gaggaatagagagctatcaattaagtagcctctttctcttttctcagagggatgacacgaactaccttggatttttcttcaacctttcaacgccctcacccaacagcaatcatcatgccctcaccctccctgcccttctctctgaccgtccataaccatcatcatcattaccccctcaaggctcccatcccttattcctttatcagaaacatcatcatcatcatccaccaaccttttgctcctcatgctgctgcttctgatgatgatcatcaccttcaccatcacaaacaccacactacagcacaagcccaagaagaagacgacgaagaacacagccaaggaagatccaaagttgctgctgcttcgctcatgcgcatgagaaaaaccctactttggtatctagctagctagcttcggcaacttacacacacacacacacacacacatatattgagttgtgagttaagggtcttggctcttttgctacgaggatcccaactactcacactcttggggaatcaagcgtctcggtccgatccattttctgttttgtttttgctacaagtatattaatttcatgttataaactaattaagtagccttttttttttcttttcaattttataccaatttttagtttcaaggattgtgttagtttgctttaccaccgtcttgcttctctatttctaagtgtgcaactgttctttgtgattgataaacttggtctagatcgaaattt

SEQ ID NO: 20898 - DNA, 624 bp, Glycine max
  unsure (1)..(624): unsure at all n locations
  Clone ID: PAT_MRT3847_118877C.1
aaaaagtgcatcatatttcccacgctacagtgtatttatnntacatgatttnaaagccaagagaacttgatgttaacgtgcatgcaataaaaggtatttatataatcttggttaagccacaggagaagaatcagaagcattctatttccgaagcctactagttgtcctttgtcctttctgggtttgcagaatttcttacaaccctgtatcaaacaaggcatctttgattcttctctctcacacttcttttggcacttcatgcttcaactctgacttagctccttgccttcaatataccagacatgcaattttattgagccctgaataatataatccataagacagaagaaagtgaagaggcatggcatccctcattcctggagttctactgaagcttctccaaagtatggattctgatgtgaaagttaatggggaatatagatcagtccttctgcaagtgatcagcattgtgcctgcaataaccgggtctgaattatggcctaaccaaggtttcttcttgaaagtctctgactcttctcattcaacttatgtctcactctcaaaggaagacaacgagcttatcttgaataacaagttgcagcttggtcaattcttttatgtgga

SEQ ID NO: 20899 - DNA, 371 bp, Glycine max
  Clone ID: PAT_MRT3847_118878C.1
tttattatttttatttttttgttttctttttttttttttttttgtttttttttgtttttcccgacggagcccaaatggggaaaaaccttcttttcccccccaaatcccattataatttttgggggaaccaagggggatttaaggggcaaaaggggaccaaatttttatctcaaaaaagggaaaaaaaaacccatactcttgaaaaaattgtcaccaaaagcctcaaatggatgtccattttttgcatttcccaaaaccccaacgaccatctaaactccttctcgtaactttggaaaaattgtcccaccctttttgggggtaaaaaggaccaacctctaggggggccactttctttaaaaaaaaaaaaacaa

SEQ ID NO: 20900 - DNA, 136 bp, Glycine max
  Clone ID: PAT_MRT3847_118879C.1
tgtcccaccaatgtagatttcaacttgaatacagcgtcaagcacagactgagggtataccctgaagagaagaagggagactagaggacagatagcgaggacggaaagcaccccgacggcgcaaacccacacagcga

SEQ ID NO: 20901 - DNA, 536 bp, Glycine max
  Clone ID: PAT_MRT3847_11887C.1
ccacgcgtccgtacggctgcgagaagacgacagaagggggaagcataacataacataacgaaaactaaatcccaaataacccaatgaatcatcatcctctgaattcaactcgctcgcacatgggaatcgattgatcaacatcgcccagatctacaactgccttcgactggacatcaactattattcattcgataggctgtctttacctccagtaacttcaaagtaatctctgtgccccagccatggctgcaccgtttttctcaacgccctttcagccttatgtttatcagagtccgcaagatgcaattataccttttcagattttagggggtgaagctcaagtggttcagataatgttgaagccacaagaaaaaatcattgcaaagcctggttccatgtgctttatgtctggatccattgaaatggaaaatgcctaccttccagaaaatgaagtaggcatatggcagtggttatttggcaaaactataactagcattgcactttgaaattctggaccaagcgatggatttgttgga

SEQ ID NO: 20902 - DNA, 1870 bp, Glycine max
  Clone ID: PAT_MRT3847_118880C.1
cctgaatcggacatccgagtgaaaagttatgaccatttaaatttctcgagagatcccgatgttgaattttgagcatttgaacatactctagagcttccgttgttcaatttcgagcttctcgatgtattatgcgcctgaatcggatttccgtgtgaaaagttatgaccatttgagtttctctgggcttccgttgttcaattacgaacgtctcgatatattatgcccctgaatcggacctctgtgtgaaaagttatgaccatttgaatatttcgagagcttccactgttcaatttccgagcgtctcgatatatgatgcgcttgaatcggacctccgagtgaaaagttatgaccatttgaatttctcgagagcttccgttgttcaatttcgagcgtctcgatatattatgcgcctgaatcggacctccgagtgaaaagttatgaccatttgaatttctcgagagcttccgttgttcaatttcgagcgtctcgatatattatgcgcctgaatcggacctccgagtgaaaagttatgaccatttgaatttctcgagagcttccgttgttcaatttcgagcgtctcgatatattatgcgcctgaatcggacctccgagtgaaaagttatgaccatttgaatttctcgagagcttccgttgttcaatttcgagcgtctcgatatattatgcgcctgaatcggacctccgtgtgaaaagttatgaccatttgaatttctcgagagcttccgttgttcaatttcgagcgtctcgatatattatgcgcctgaatcggacatccgagtgaaaagttatgaccatttgaatttctcgagagcttccgttgttcaatttcgagcgtctcgatatattatgcgcctgaatcggacctccgtgtgaaaagttatgaccatttgaatttctcgagagcttccgttgttcaatttcgagcgtctcgatatattatgcgcctgaatcggacctccgagtgaaaagttatgaccatttgaatttctcgagagcttccgttgttcaatttcgagcgtctcgatatattatgcgcctgaatcggacctccgagtgaaaagttatgaccatttgaatttctcgagagcttccgttgttcaatttcgagcgtctcgatatattatgcgcctgaatcggacctccgagtgaaaagttatgaccatttgaatttctcgagagcttccgttgttcaatttcgagcgtctcgatatattatgcgcctgaatcggacatccgagtgaaaagttatgaccatttgaatttctcgagagcttccgttgttcaatttcgagcgtctcgatatattatgcgcctgaatcgaacatccgagtgaaaagttatgaccatttgaatttctcgagagctttcgttgttcaatttcgagcgtctcgatatattatgcgcctgaatcggacatcagactgaaaagttatgaccatttgaatttatggagagcttccgttgttcaatttcgagcgtctcaatatgtgatgagcctgaattggacatccgagtgaaaagttattagcatttgaattttttctgcacatcgttgttctatttcgagcgtctcggtatgtgatgcgcctaaactggacctccgtgtgaaaagttatgacaatttgaatttttcgagagcttccgttgttcaatttcgagcatttcgatatattatgcgcctgaatcggacttccgtgtgacaagttatgaccatttgaatttctcgagagcattacttagagtcgacctgcagcttgttagacaagtagcctcagatatcttaagaaggggggggggggttgaattaagatattccgaactgtttcccctaattaaaaatctatttcacttt

SEQ ID NO: 20903 - DNA, 272 bp, Glycine max
  unsure (1)..(272): unsure at all n locations
  Clone ID: PAT_MRT3847_118881C.1
taggcatctatctccatactctgacagacacacaaaatttgagaganaaaaaaccatcatcacaagagagtcacatgagaattgaaatggcccacaaaacaagttacttctatggttcatgtagatgatgactacattgacatggaactatgttcctccccaaacttcttctcttattcccttagctctccaccatccaacagagagtttgaattccaaatgagtgaaaaagagtcatcaacttctccagctgatgatctcttctacaaggg

SEQ ID NO: 20904 - DNA, 205 bp, Glycine max
  Clone ID: PAT_MRT3847_118882C.1
gtcaactttttggcatcaaatgtcaacacatttaacaccagagtgtttagattctagcgggaacagttataacacctttgactttggctttttgcatggagggatcttgttggacttatatggacgattgtggcatgctgattcataatagaccaaactggatcttgggtcgagcttatgctaagttaaacagttatttactggt

SEQ ID NO: 20905 - DNA, 699 bp, Glycine max
  Clone ID: PAT_MRT3847_118883C.1
agtttatgataatatgcataatggtaacctgcaagatcatctgaatggaattggggaaagaaagatggattggcctttaagacttaaagtggcactgggagcagcaaaaggacttgcttatcttcattcaagttcttgtcttggaattcctattgttcatagagatttcaaatccaccaatgttcttctagatgccaaatttgaagcaaagatatctgattttgggcttgccaaactaatgtcagaaggacaggagacacatgttactgcaagagtacttggcacctttggctattttgaccctgagtatacatcgaccggaaaacttactctacaaagtgatgtttatgcttttggagttgttcttctggagcttttgacaggacgtcgagctgtagatctaaaccagggcccaaatgatcaaaaccttgtactacaggtgagacatttactgaatgatcggaagaagctccttaaggtgatagatccagagatggctcgaaattcttacaccatggaatctatattcacatttgccaatctagcatcacgatgtgtccgtagtgagagcaatgagagaccttcgatggtggattgtgtcagagaaatccaaatgattatgtacacaaattcaaagggcttgggaatggttatgcataggttgagattggtctaataatcaaatgaaatcccaagtgt

SEQ ID NO: 20906 - DNA, 1259 bp, Glycine max
  unsure (1)..(1259): unsure at all n locations
  Clone ID: PAT_MRT3847_118884C.1
ctctgttttaagctattttatgtggtcttctattgatgtaagtgtttaagcttatgtgaaccagcaagtacatcaggtgtgcaattagctttggattattctgaatgtgatgtgcatctaattgattgaaggaataatttggtcaatcaacttcgatattttttgtttttaaacccttttttgaatttttaagtcaaatataaatctattatatgtacaagaaaaacttatcatgtgaacactaaaggtatttgttaaaagtttatatttgatttcaacttggtcttgttaactgttaatgccctgaaaattgtatgaaaaatccaaaatgattcaattaaatttccttatatgcaagaagcacatagcatttgtaatttggctaatttcttaagtatatgttattatttcttatgatgatccagatagcaaattgatacatatgaaaaaatctttgcaggcttgaaaacatgagatctgagttccattggatcaagaacaaagccaatgtacttaaaaccatgggtatggtgtacaagcaaaagctagaaacaaaatcctctgatctctcaaaggctgaagcagaggttgatcttttgggggatgaggtagatactcttcttagcctccttgaaaaaatatacattgcgcttgatcattattcacctatactgcagcattaccctgggattattgagattctggagcttgtaagaagagaactgactggagattctagaaaacatgtttagttgtatgttctggccaggtaaatcaacagacaccctgttgactcaatgtatctttccatgctctggatttgtaaaacccagaagcagtgataaggaaatcattatctgcaaaccccccacatgatcattgatcaaccacactggatgtgaagaattgcaagtaatttttcagggagcaccgtcatagtgttaattggtaacaagttgtactgttgtatacacaatatagcagctggctgatgtgtagctgcttggtttttgttctcctgaaacatagtttgaggaaaacagcaacagaaaagaatcaacaacttgtgcagttgctaacacaccgtttttaccatacatgaatgctttatatcatactaggacacaaatttgcctcccttctttgtaatgaatagcttttctacatgggctaataacatttgtacatgttattttgtgtaatgaatttctagatggcttattgataaaaaaaaaaaannaaaananannnnannnngg

SEQ ID NO: 20907 - DNA, 327 bp, Glycine max
  Clone ID: PAT_MRT3847_118885C.1
tgcggtaccggtccggattcccgggtcgatccacgcgtccgcagactcgtgggcttacccttgggctagaacgtcgtccaagagagcgtataagctgttgatatcgcgttgactgagacgtacagtaattcaatgacttactgattaggataatatggaattactagactgtgctaatatctatagtatatatgatacatcttaattactagtcaattatgcacatgcataatattaaactgctagaagagactaacgttcttcaaagatggtagatagagtgactataatatagtggtattacttataacttactgttgtcttgat

SEQ ID NO: 20908 - DNA, 176 bp, Glycine max
  unsure (1)..(176): unsure at all n locations
  Clone ID: PAT_MRT3847_118886C.1
attagaacaatctcttaaccctatctcaaattcattcagattctcccttcccctttttgattttcttagaaaatcccaattcgaatcaatatgaagaagggtgtaagtgaccagtgcaatagaaaggcagaganattgatcaggagcgcnggatagcaaagtttggggtgaggtga

SEQ ID NO: 20909 - DNA, 500 bp, Glycine max
  Clone ID: PAT_MRT3847_118887C.1
gtcaaagcctttttgataagactaaaccaaaagattttctgcggcccataggctcaattatactcctcccaaaacgcattcatattgtaatactctaatttcccataaaagacaaactcttgaacaccgatagtttcctttactactaaacagatcctctctcaatacttgaatggctcctcttttggcacatgctggaaaccttctacctgggactgtaacacataatcaccgggatgcactttacgaatgcatgttaccttgccttttattgacaacatttttatggctcctatgacaacttctctcttgataactcattaatgcaaacctcttgaactattgcccatttccccttggcccaccagacgatgattctacatatcagtcctactgcatctttcatcaacccaccaaaaggtcccacattcggtaccaccgtggcccattgtagttccaaactccccactatcatatggccactatctgaactagcagca

SEQ ID NO: 20910 - DNA, 253 bp, Glycine max
  Clone ID: PAT_MRT3847_118888C.1
caaacacaacacaacacagcataccgtgtttcattttctctcacacacaaacctccttcgttttcatttacttctcaggaggtataactactatcttgcgcatggttctcataaacgagatcgattaaatcttttgccacggggacccagactttgcgagctcaggactgcctggcagaaggaatcagggctcctccggctgacttttcccggcgtaggacttacgggacttactgcaattattgttacgaca

SEQ ID NO: 20911 - DNA, 459 bp, Glycine max
  unsure (1)..(459): unsure at all n locations
  Clone ID: PAT_MRT3847_118889C.1
gctgaaaagaattattaatatatatttactgaataaacatttaccaagaagtaaaaatagcctccttttgttaaaatgactagattttctgatagaaacctggtatcttactacacctactttgaccaaagtgtccaaacatcaaccaggcttaattccactacatcgagttaactacatggacaaattggtattgtagagttctcgacttctcccaaaaaccaaattttctgtatgaaacagtatagatcaaggtctttttagtgacttaaagttttctgtatcctactccttttaatcagattatcttccattcttccatctgtctttctgtagcctctcttctcacttgaccagaccattatagtcaaggttctctcatctgtttgataggtgttagtgttactccaattaaccccccaatacattcaattctaatcttatccctttnttaatatt

SEQ ID NO: 20912 - DNA, 280 bp, Glycine max
  Clone ID: PAT_MRT3847_11888C.1
ttttattcttttttttgttttaacaaaagccgctcggggaacatgctaaaggaaagtccatttattagagacaccctataaagaagtgggtggaaacaaagggaccaaagccaacaacccttaccaaagtctgacacgcaacaactttatccttatcgttaaatatatatacattttgagggttcctcacaaaaaaacctaaaatcactggaaaaaaccctcaatgtgtatttcatttatcaaggaaaaaatttttccaaacaagtcccaaaagaaaaag

SEQ ID NO: 20913 - DNA, 891 bp, Glycine max
  unsure (1)..(891): unsure at all n locations
  Clone ID: PAT_MRT3847_118890C.1
atcattcttagaacatattcatgatttttttttntaaataataatggattcaaaccattatgttccattcttctccattttatcttccaaggatataatgatagattcaaaccatggactactgaattaaattagaagtacaattctatcttttcaacagaaaaaaaaacaaaaaaaattcacttccatccaatgttgtaaatggaaagtagaatctataactcatactccagactgaaatttaagccttaaaacctttatcaaaggttaatatgtgaaggagttggaaaatcctgaccacataaccaaaagccatcatttctcaaagagtctatgtacatggttgagaatttctttctccatttccaaaaattccaatatgcttactgtataagttgtcagaataaacttggttagatttttattggatgttggtatgcctcatttttcgtgttatggatcttcccatgcgaagacgtctatttgtgagggcatctaataggactgttaaagcatgttctactgcttctgcctgtttttccaattcaacagagctaaactgtggaagaagctggagctctgagagcagaccagcagctgctgccgctgtacatgtacgatcccaagatggctgtggcctaagtttatgcatagcagaagcaccaggatttagggatatacaggaaaggtcctcatctccccaaactgactttgctttatcctgaaggcgcctaaacattgctgctgaattgctccatgtcccatcaatcaaaataaaatgctgggttgcacctacttttaactccgtcggtgcgacttcatcacttgcaactggttcctgaccaaacgcattttcaactgactttaaagctgcactcttattgggataaa

SEQ ID NO: 20914 - DNA, 577 bp, Glycine max
  Clone ID: PAT_MRT3847_118891C.1
attagatacatatttttttattaatcaaaattagttaaattacgtgacttgcttttcaagcttcatagctcaaacttaaaacaaacttagccttagattgtgaaatactaccaccttcagaggtaataggtttttcccaggtattactttggttatgcaggattttcttcaactgcttggaagaaaacaattaaagataagttttcttcaagttcaaataataaggaatagaaaaaaaaatgataaaacttactttcacttaattatcatttcgacatctacttttttttttctttttcattcacaatcttctttaccttgtaagaggcatgaaaactctttgatgtctaatccatatgactcatacggatcaataatccgtatgaattttgtttttttttttaaaaatggatttttgatccatatgaaatccatatgacttatatggatcatcaatccatatgagtaaaaaaaaaaaaatcatacgaattgattgtcaattcatacttaaagaaaaggtgaaggacattttaatccttttcacctgtattgttaggtatctgagcaaaaatactgg

SEQ ID NO: 20915 - DNA, 286 bp, Glycine max
  Clone ID: PAT_MRT3847_118892C.1
gtcgtccctctggaaatccgaaacgaagcaaacaacagaatagagttagaaggagagagagagagatggtggtcggtgttctttctgattctccttgatcttctttttctcttcgttattgttcccaacactttccagactctgtatttattgctcggctcttccatccccgatatcctatgtcaaacgcggagtggcagcagagatcagaaacatgtcgtcttggctgagatctgcggtcagcatgccgtcgtggtcggcatcaggggcacctcagtcgttccgt

SEQ ID NO: 20916 - DNA, 1798 bp, Glycine max
  Clone ID: PAT_MRT3847_118893C.1
attgaaggtacccttcttttgttgcttgatcctcaatcaaagacccatcttttccgtttggcttagggaacttcagcactgaagccctaatcccaccgtatccatccaccgcagcacacacccccttttgctgcttcttctcttccaacatgggtcgcgaaactatgtgccttccaaccccaccaaccactgccaccaccacagtgaacccagtgccgccaccagcaccagcaccacctacctctcttgctcctggcttcaggttccacccaactgatgaggaactcgttatctattacctcaagcgcaaggtttctggcaaaagcttccgatttgatgccatatccgaggttgacatatacaggagcgaaccctgggacctagcagataagtcaaggttgaagactagggaccaggagtggtattttttcagtgcactggacaagaaatatgggaatggtgggaggatgaacagggctaccagcaaagggtactggaaagccactgggaatgatcgaccagtgaggcatgaccaaaggaccgtggggctgaagaaaacgttggtgtttcatagtggcagagctcctgatgggaaaaggactaactgggtcatgcatgagtacaggcttgttgaagaggagcttgagagggctgggtctggatcctctcagcctcaggatgcgtatgttttgtgtagagtgtttcacaaaaataacataggacccccaaatgggcaacggtatgcgcccttcattgaagaagagtgggatgacgcatcgggaatggttccaggggcagaccctggggataaccgctcttttgcccaccaaccacatgttgaaggcaaaggtggtgttttatgcgccgaagggagaaatggtgctgtgcaggacactcaatctttcaacaaagctccatttgatgtgaacaagcttcctatagaaactcaaaatcttctagctgtgtgcaagagggaaagcatggctgagtatccatcacccgaaaaggatgataataattgtaagcacatggatgactacccttcacctcaaacagataatccaaagcctttctctcaaatatacaaacgaaggcggcataacttgaactccaacaactctcatgtttctggagattcaatccgaaccagccaggatccgtgctcctctacaataactactgctgcaactgcactcccaaccactaatgctgctgctggcacagccaccaacactgcaccgaaaaaacattttctttccgcactggtggagttttcgctgctagagtcccttgaatcaaaggacagccttgcttcaattaagacaccggattttgacgtggaaaatcttgagtcatccatgcctccaagctgcgcaaagttcatcaaggaaatgaagagtgagatgcagaagctttcagttgaaaaggagacgatgaggtttgagatgatgagcacacaagcaatgattaacattctccagtctcgcgtcgacgttctcagcaaagaaaatgaggatttgaagaggatggtggcccaaaatccttaggaatcggcaatgccaatcccttgtatcagtgtaagttagttaaaactgagtaatgaagctcggtcttccggatattttcttatttttctgagtaagaattgtagttcgtttctttggctaaacttgtcaagttatcatttaaaacttgtcatcgtgtatcatatgactttcagtttcccagtgttgtgaaaatggccatgttagttcttgcttctctgaatgaatagattagcatctcaatttgatagctg

SEQ ID NO: 20917 - DNA, 219 bp, Glycine max
  Clone ID: PAT_MRT3847_118894C.1
gggtccgacccagtcctcccacgaggtgagagaacaccacagaggggacttactaatcttataaggacattctgctggatgactgcccacactgctgtgagaaatgatccaggagtcagctcgcatctgcgatccagctcataatcacaggaactagcttgcacatccactccgctgagaaaagcattatgggttgacgaagacataggacatctctac

SEQ ID NO: 20918 - DNA, 417 bp, Glycine max
  unsure (1)..(417): unsure at all n locations
  Clone ID: PAT_MRT3847_118895C.1
atgtgaggtagagtggaatcgtcagtgaaagaagcatcactcgtgaaccccacgcaggttcgataatcaaatcttctttctttttcttccgcagtcccaaccttcatgggattctgcactgcaacagcatgcatgtggcttgggtttgcttnctgctgtntgctgctgctnctgctncagcancaacggccaacaacaaccaaccancttaatngcaanccatgtntctntntcnctgnctgctntctctctcgctcggncaaactngnanctgcaatcttgcaaaaggtntctgctntgnctctgcaagctnttgcaattntctnncagggggggggcttcctgggggtcggaaangnattggggttncaagggcttaagggggaaaattccggggaaaaaggccaaaancggaca

SEQ ID NO: 20919 - DNA, 334 bp, Glycine max
  Clone ID: PAT_MRT3847_118896C.1
aacctttgggctagatttatgtgctgtgtttatgtgcttccatgaaagatgatccgaaccgcgaccaggaaccctggacagaaaggtcgggagtgcgcactaatactgtcaaggagagggtgacgaagcctcgagtgcctcacggatcgagctacatctccaggacataaagcgtctgtcagaactagaggagacacacgtggtataaacactcttgattgagccgtatgcgaccgtaggaaagacacttcacaacgtgactcagctcgatatacgacaagtaaaaaatcattcggcctacctgacatccagctgcgtcgggtaaccctcacct

SEQ ID NO: 20920 - DNA, 207 bp, Glycine max
  Clone ID: PAT_MRT3847_118897C.1
gacgatatccggcttttatcgaatgctcgatcacaaatattacatgataatgcatcatttctctgtaccgctcattgttgcacaacgtcctttgactagactaacagccggttcctccatatgataatacacctcttcgtcctggaatcactcgacagctaggggcacagacggggggctataagcagttctcgtgagcatagaaca

SEQ ID NO: 20921 - DNA, 125 bp, Glycine max
  Clone ID: PAT_MRT3847_118898C.1
agactatatggtggttctccacaattcccatggaagctaagacacaaccccaagcggagaggtcgtccccaaaaccttggggaacatcagggtcccttttggggtcaagggcttttaaaaccccg

SEQ ID NO: 20922 - DNA, 433 bp, Glycine max
  Clone ID: PAT_MRT3847_118899C.1
ctcacttcagagagtaaagtaaaatttcagttgtagatgaaaaaatctaacagttcatttttcaacatattatgatttgttatgcatgtgtaacagttcatttttcaacatattatgatttgttatgcatgtgttcttgatattttctcttcaacgaccaagataacttttttggttttctaccggtattcttatttggaagcaattctattcgaaacatggtcattcagatattaaatgtaaacacttcttctaacagacatttgaaaattgatttgtgggagattaaccccttctgccggactcaacctacattttttgacaaagatttagtatccccgctcccaccccaaagtgagttattcacttttaaaggaaacggatctgttaacagcaactcacaaaaccacccccattttttacttctctcact

SEQ ID NO: 20923 - DNA, 548 bp, Glycine max
  Clone ID: PAT_MRT3847_11889C.1
cacgcgtccgctgaaggcgggggaaggaagctttagcctttttaaacttgaaaaccaatcaaagcccccaaaacactgttacacagtcctgagtcttgtcactgcctccctaaggtcgctgtcgcgctacctccctcgctcaaggcctcaaaaagcccaaacaaagcatattccaacaaccatttggtgggaaactccgttctttcatgcttcttccccgtttctcccacctcctccgccaccctcctcctcctctccacgccatggcgcgtgccgtcacgtgcgccactcagccccctcatttccaccgctcatccggcatcgctacctctcgctgcggcgtttctctgccctccaaatcctcgcttttcggccgcacctttcacgccctcgcgcggtgcgcgggcgaagaagcagcgacgcggcggcggccagtggcgggagtccgcaccgagcagagggagtaccggaaggcgaggagaagagcgccgcccaagagcaaaggcaaggagcttcaactctgcgtcgagatttgcatcgaaaaagat

SEQ ID NO: 20924 - DNA, 186 bp, Glycine max
  Clone ID: PAT_MRT3847_1188C.1
ccatatatgccactttttttccttgacaaactcaaatcctcattggtgggatgtcacaataggctgctaggatttcaatcaccatactctttccctgatgtattcagattcaattgatgtaaccaccaccacactatctccatttatccatcctatcttcctctcatgctaacaatgctgcacact

SEQ ID NO: 20925 - DNA, 393 bp, Glycine max
  unsure (1)..(393): unsure at all n locations
  Clone ID: PAT_MRT3847_118900C.1
atcatatcattattctttttttgttgtttttctttttgggggagaacgaggaaaccaattttttgacatttacaataacgaaatgggaggaacagggtcttatcaaattacaacactattaactttctnccaggaaatgggcccatcctgaagttacttattcccattatggggcgtaaactaacatcaactgagactggagccactgttcctacattttaccgggcacttggggcgacaccccgaatcccagaccggcgcctgccagggaaaagactttacctatagtaagggcaattatagcttgggagagttatcgcgatacgcgcttcctgagataaatggcgatcaagaaagaattccacacaatgtagcttgcgccaaacctaaggc

SEQ ID NO: 20926 - DNA, 359 bp, Glycine max
  unsure (1)..(359): unsure at all n locations
  Clone ID: PAT_MRT3847_118901C.1
ggtctagaattaccgggccgacccacgcgtccaanaggatacaagggccctgtgatgggggatgcttgacgccatgcgtgatacgggccgtgctgcttttagaccaatagtggataagattcaggattctgaatgttcgcagtgcttgcattatacaatatgattgcgtgaatttcatttgcctcccatatgtattaattggttgtgactcaagtattgacatctgcatttgcgtcagcatctcctgtgatcttatacattggaatcacagatcatacgcgtatttcaaattctggggtttcttccacactacacatgatctaaagcgtcagttcatcggggtacttaaaacgagcatc

SEQ ID NO: 20927 - DNA, 366 bp, Glycine max
  Clone ID: PAT_MRT3847_118902C.1
cccacgcgtccgggaggacattctagagtcgccgacattcggccatgctggcagctaaccacacaacaccctcttagttttgcaaaggtgtacccgcttacattatgtggagtatgattacctgagcgatctacatgaaggcatgtgggctcactgacgtaatgaagagaatagcggaattagagtaacattcatatgaggcgggttataattaccacggcagagacatagttgtggactaaacacgagaaaaatcctgttttgacagaagaagaaatgatgggagtgattagaataagagacattcttgttgatgctcttgcgaagcgagctcatgaagctgaaaaacatgttgctcatgaaagc

SEQ ID NO: 20928 - DNA, 2143 bp, Glycine max
  Clone ID: PAT_MRT3847_118903C.1
aattcggctcgagattggaggaaatagacttgtcccataatgaattgagtggctcaattccacccggatcaagcaggctcttggaaactctcacccacttggatctttcagataaccatctccaagggaatatccctgcagaaaccggtcttctatcaaaactaacacatttgaatctgtcttggaatgatcttcattcacagatgcctccagaatttggcctccttcagaacctggcagttttggatcttcgcaatagtgccttgcacggttcaattccagcagatatatgtgactcaggcaatttagctgtcctccaacttgatggaaattcatttgaagggaatattccgtccgagattggaaattgtagctctctttacttgctgagtttgtctcacaataatttgactggttcaattccaaagtccatgtcaaagctaaacaagctcaaaatcctcaagctggaattcaatgaactaagtggagagataccaatggagcttggaatgcttcagagtcttcttgctgtaaacatatcatacaacaggctcacaggaaggcttcctacaagtagcatatttcagaacttggacaaaagttccttggaaggaaacctgggtctttgttcacccttgttgaagggtccatgtaagatgaatgtccccaaaccactagtgcttgacccaaatgcctataacaaccaaataagtcctcaaaggcaaacaaacgaatcatctgagtctggcccagtccatcgccacaggttccttagtgtatctgctattgtagcaatatctgcatcctttgtcattgtattaggagtgattgctgttagcctacttaatgtttctgtaaggagaaggctaacatttttggataatgctttggaaagcatgtgctcgagctcttcaagatcgggaagtccagccacaggaaagcttatcctgtttgattcccagtcctcacctgattggatcagcaatcctgagtccttgctcaacaaggcatctgagattggagaaggagtctttggaacactctacaaggttccattgggatcacaaggtagaatggtagcaatcaagaagcttatatccacaaacataatccaatatccagaagactttgatagggaagttagaatcctcgggaaagcaaggcacccaaatctaatagcattgaaaggatactattggactcctcaactacaacttttagtaactgagtttgcaccaaatggtagcttgcaagccaagctacatgaaaggcttccttcaagtcctcctctttcttgggctataaggttcaaaatcttgcttggaacagcaaaggggcttgctcatttgcaccactctttccgtccaccgatcatccactacaacataaagccaagtaacattttgcttgacgaaaattacaacgccaagatctcagattttgggttggctcggcttctgacaaagctggaccggcatgtgatgagcaacaggttccagagtgcactaggatatgtggcaccagaattagcatgccagagcttaagggtcaatgagaaatgtgatgtgtatggttttggggtgatgatccttgagctggtgacaggtaggagaccagtggagtatggagaagacaatgtgctgatactgaatgaccatgtgagggtgctgcttgagcaagggaatgtgttggagtgtgtggatcaaagcatgagtgagtatcctgaagatgaggtattgcctgttctgaagctagcaatggtatgcacctctcaaattccttctagcaggcctactatggctgaagtggtgcaaatactgcaggtcattaaaaccccagttcctcaaaggatggaagtattttgatgagatatgcttctctgttgaactagcttgacatatagaaaatctgtgactgatgagatttttttcttttcttttttcctttatgttgtgtatcctttttaatttccttggctatttggtttatgtagactcttgttttatgtccaagtagattttcctcgtataaatggaaatcactatcatataaatccgttattcgcaactcttgttttctcttttactgatttcagtttatcgattgtattatcaaattttaataatattacaacttacaaact

SEQ ID NO: 20929 - DNA, 850 bp, Glycine max
  Clone ID: PAT_MRT3847_118904C.1
gaggaaaagcagtttggattatgactagcctctttttttcaaagctggccatgttgtttatttcatcaaactccgttgtatgggtctcagcagttctcttggtggctgattgttcttcattgcctctttacagggatagatccaaaacaacttctaagattaaaccatggcaagggtatgcgcgtgggcggacgcgtgggcggacgcgtgggtttgccgtgaaacaatttttgaagccctccagtggtggaatggaaggtctccttcagatggtttacttttgggcttctgcatactgttgactggattggcttgtgttccaattgttgctattcatttctctcatgttttgtctgccaaaagatgtctagtgctggtagtggcaactggtctactttttattttaatgcagccacctcttcctgtgtcattgacttaccaatcaaacctaatcaagactgctcgtcactctactgatgatatctccatttatggctatatagctggcaagcctacctggccttcttggcttcttattattgcaattttgctgactctggcatcagttacatctattatacccattaaatacattgttgaattgcggacattttactccattgctatgggggttgcccttggtatctacattgctgccgaatactttctctgggctggcattctgcatgttctcattgttgtctctatggtttgtgcctcagtttttgttgtcttcactcatctaccatctgctacaagcacaaagcttttgccctgggtatttgctttacttgtagctctctttcctgttacttatcttttggagggccagctgagaattaaaaatatt

SEQ ID NO: 20930 - DNA, 1222 bp, Glycine max
  Clone ID: PAT_MRT3847_118905C.1
ctttctttgggcggacgcgtgggtgtgaattacgtttgaaaatgcacggtcggcctcgcaaagcgttgaagcaagaagatgaagccgcttcagcagccaaagctgaaaagcttcgttcactccaagctcagttcctcgccaatcaccacaatcacatttatagcaaggaagcgttagatgtgagcgcgaagcttctagaagtgaatccagagtgctacacagcttggaattacagaaagctcgccgttcaacatcttctctctaactccgattccgatcctcactctatcttcgatgacgagctcaaactcgtggagattgcgctgaggaagaatttcaagtcttacggcgcgtggcatcatagaaaatgggtactcagcaaggggcattcgtccatagacaacgaaatgcgccttctgaatggttttcagaagatggatcctcggaattttcatgcctggaattaccgaaggtttgttgctgaactgatgaaacgatcagatgaggatgagctgaaatacacagaggaagtgatagcgactaatttcagtaattactctgcatggcacaatcgtagtgtgcttttgtctaatttgctgaaaagaaaggctgaaggatatttccctaaagaaaaagttttggaagaggagtttgagcatgtccacaatgctatttttaccgatccagatgatcagagtggctggttttatcatctttggctcattcaacaaacagtgaaaattgatgctcctctacttgtttcatcttggccttcccatggatctaatataactctaattggggacaatgatcttcgtggttgtggtttgtctcttctgaatggtacactatcaaaccctggaacacttccaatcattctttatttcaatcaagccgtagaaggaataaactcatccacagtggctattaaatctgaacttttaaaggaggaacttgtttggaaaccactttcaatgaacaattcaaatactgctcagaacctgttcgtatatctaaaccttgcaaatcttgagcttcaactgtcaaaaacttactctgtggagatcaacattggacattctaagggtattatatcttcaaacggaaatcactatggtgatccttcccaaatttcctttaaagtgtttgtacagactgcatatactgaacctactgaaggacagggtggaaaaaggactacatggatggatacaaatttgca

SEQ ID NO: 20931 - DNA, 366 bp, Glycine max
  Clone ID: PAT_MRT3847_118906C.1
taggctggagctcgcccttttttttttcttttaaggcgacttttagaactactaatctttattgaccggcactaaggatatggttttatgcatcttatgacacactccattgactctatgaacaaaccacatgatactgatattgtataaaggagagggcagaatcaaaggcgaaggtttgcagaatgagattcatgatctcagggtctcctaaacgacacgggagggagatgctgagggcaagtacatccccggcagcaatgactcttactatgaccccgacatagacaccaacgcctccgttggaggcggtccatctaagaacggttgccccagccgggagatacgacatgctagctagttctg

SEQ ID NO: 20932 - DNA, 275 bp, Glycine max
  Clone ID: PAT_MRT3847_118907C.1
acgaggacaaagggcgtcctgccatccaaaatgagcatgaggaatgaggacactacgcgtccaggaaggcttaagaactgttactgatttaattagagggtttgcagacaattatacgtgctgaagctgcctttgttgacttgaataccttctttgcaatgttggtattctagttctagacaaatgaaactgatgaaaacacatggatggcatgaatttcaataaatatgccccagtttcgaagtcttcatcggggatgatgaattgagataatc

SEQ ID NO: 20933 - DNA, 116 bp, Glycine max
  unsure (1)..(116): unsure at all n locations
  Clone ID: PAT_MRT3847_118908C.1
ccttcgtaggcgaggngtacgaaggtgttcntgtcgaggacncantggaaggtgtcgatttgancnccttcgtaggcgangcgtacgnccaggtccgngagctctncatntnccnc

SEQ ID NO: 20934 - DNA, 234 bp, Glycine max
  unsure (1)..(234): unsure at all n locations
  Clone ID: PAT_MRT3847_118909C.1
agaccagaagccaagangcgggggcacagccagaggagcacgaaccagcagcaaacagaggcaccgaggcaagcaaagcacaggggaaaagacccggcacggggggaaagcaaaaanacacaggacaaaacgcgccagggcggggcgagnaggccaaggagcaaccgcagaaaaacacaggnnagagcgaaggaaaaaggggaacacaccagcaacgggggaagaggaagaggc

SEQ ID NO: 20935 - DNA, 331 bp, Glycine max
  Clone ID: PAT_MRT3847_11890C.1
ctcgcccgcctgcaccggcccggactgacttgctcgacccacccacgcgttcgttattttttcgctcgctagatacagagatgaagaactactggcccaggctagggctccaaggacgcttttacaattcatcaaaaagtttgcttttttgtgcgagcatggtgattatgacttagctagtgttcatggatatgtcaagccttactttaatggcaacacacccgaacgggttatggcttggactggaactaccattactgctggttttgacaaagctagggctgctgttgacattaccaaggtagctgaaagggagtctgtcatgagaaac

SEQ ID NO: 20936 - DNA, 2114 bp, Glycine max
  Clone ID: PAT_MRT3847_118910C.1
ccccaacctcccaactccaacaccctctctctctctctctcgtcttcaccaaacaaacaaactccactcatcgcgtgaagacgacgacgatggagatgctacgcagaagcagcagaagaatcttcgtctccgcgtgtgtgtggttgcttctgtcgctgtcaccgtcaccgcccagtgttgttaacgcctcccatggcgtattcaacgtgaagtgcaagtaccaggaccgctccctctccgccctcaaagcccacgactaccgccgccagctctctctcctcgccggcgttgacctccccctcggcggctccggccgccccgacgccgtcgggctttattatgctaaaatagggattggaactcctccgaagaattactatttacaagtggacactggcagtgatattatgtgggtaaattgcattcagtgcaaagagtgccccaccagaagtagccttggtatggaccttacactttacgacataaaggaatcatcctctggtaaattagttccctgtgatcaagagttttgcaaagagatcaatggaggtctgctgactggttgcactgctaatatttcctgtccatatctggagatatatggcgatgggagctcaactgctggttactttgtaaaggatatcgtactttatgatcaagtgtctggggaccttaaaactgatattcagcaaatggaagtattgtatttgggtgtggtgcaagacaatctggagatctaagttcttcgaatgaagaggcacttggtggaatacttggatttggaaaagctaattccaatgatttcacaacttgcttcttctggcaaagtgaaaaagatgtttgctccattgcttaaatggagtaaatggaggtggtatatttgctattgggcatgttgtgcaacctaaagtgaacatgactccattattaccagaccagccacactacagtgtcaatatgactgcagttcaagttggccatactttccttagtctatcaacagatacatcaacacaaggagacagaaaagggacaataattgacagtggtacaaccctggcctatctgcctgaaggaattttatgagccgctagtatataagataattctccagcaccccgactaaaaagttcggactctccatgacgagtatacgtgctttcaatattccgaaagtgttgatgatggatttccagctgtcacattttattttaaaaatgggctctcgtgaaaggtttaccacatgattatttatttccctcttgggatttctggttttttggttggccaaattagggggaacaatccagaaattaccaaaataataaccttattgggagatttatggctttcaattaaactggctttctatgacctggaaactctggttattggtgggattaagtacacttattttcaagcatttaagtggggggtgaaggaaccgggacagtcccattaattggttcccccttcaattctttttgcttctgttttaaccacgaattggggtgaattttttgtctacttgttctctttcataaatttgtttatttaaatgtagcaaaacatacatataccacagtcaaaattatggtcaaagaaagaagataaaaaatgctatgtgagaaattgactttttaggaacttccatgatttctaaatgtaatcaagggaaaactaggacactgaccattgggaaacttcgccgtgggtaaaatttttcttctcaattaccatggtgaatatgtaaattgcaaaatcttaccaccaattgtatatgttattagactttgattttttacttagcttgggtctgaatgccaaatgtataattaacatgatacaagtcatgtttggaattcaaggtagtgttgcaaatatttaacattaggtattgtagagcatttctgtgctggctggctccctttgtttgacctattttagccagtgttataatattccttacaacaaattcttatataacatttttaacaattcatttttttttctttatctctttcgaatgcattacctatgttatttcgtcttgtatttttcatttgttaatttaaataatgaagttggaattaaaaaaaaaaaaaaaaaactcg

SEQ ID NO: 20937 - DNA, 431 bp, Glycine max
  Clone ID: PAT_MRT3847_118911C.1
aaaaagaaaaaaagggctttttaactaacatagggggctttttgggggggccccttttaaaagggggttttttaaaggggggggtggggggggcccaaacccccctttaatccttacaaaaaccacccaaaaggatttggcaattgggaagggaaaaattttagcccccccccttgggaaaacaaaaggcggcccggggggggaattaaaaaaaaaacctttttttttggggaaaaatttccaagggccccggcaaattttgcaaaaaaggggggatgggggcccccccctttttaaaaaacctcccaaggggggtaaaaaggtggcccgggagtggaaaacccaggctaaaaaccctttcgggtttttcccccaacccggtaaaaaacctttcgggttgcccttggagggggggaaaaaaagggttgttt

SEQ ID NO: 20938 - DNA, 804 bp, Glycine max
  unsure (1)..(804): unsure at all n locations
  Clone ID: PAT_MRT3847_118912C.1
cgccattttacacgctttttttctgtggctaagccgtctctctcactcaacttttcttctgcatatatttctatgagttatgagttatgagttattcttcagccactgttgttttggttcattgtgtgtctctctcagtagaatccaatgagaattccccatgttcccttcctttccttcatattctgctactgcttcttgatacaccacagtgtttactacaccggggtaaaagcccaaattgttgaggatcaacaacaatcattgctcaaactgaagaatagcctcaaattcgagactaataagtctacaaaacttgtgtcttggaatccaagcgtagatttctgtgagtggaggggtgttgcctgtgacgaggatgggcaagttactggccttgacctgagtggagaatctatctatggtggatttgacaattcaagtactcttttcagtttgcaaaatctccagatactgaatttgtctgctaataacttcagttctgagataccatccggtttcaacaagttgaagaacttaacatatctgaatttgtctcatgctggctttgtggggcagattccaacagagatttcttacctgacaaggttggtaactcttgatatctcttctgtttcctatttatatgggcaaccactgaaacttgaaaacatagatctacaaatgcttgtccataacctcaccatgcttagacaattgtatatggatggtgtaattgtaacaactcanggatataaatggagcaatgctttgtttaaacttgttaacctgcaggagctgagcatg

SEQ ID NO: 20939 - DNA, 1149 bp, Glycine max
  Clone ID: PAT_MRT3847_118913C.1
gaaaacatgacaaaactcatccctgcaaaaaatatccatccccaatggcccaaaacaacttctggcacatcttttgtgaaactaggaacatcttcgaagcacactctcgtcacttactaactctctcactaatcttcctctttcccctttcattctccctcttactctctcccaccctctccaacctcttcaaccatttctataccaacattatcccttatccttataattattcttctacaacaaacccaaattataaacaccactctctcttctttcatctcctctattcccttttcacttttatcttctcaaactgtggagtcattagcatcacctacagcgttttccacttcttcaatgaccaatcattgaatttgaacctcaaatccacaatcaccaagtccatctccacttccttcttgcccctcctcgccaccaccatcgtttctcatgttatcatctttttcgtttctcttttatatgcccttctcttggttcttatcatttgtggtgctatatttttcaatgtaacaacttcatactcttccctttactacttcatcgggttccttattgcacttcctttgctattttttcttatatatttgcaagttaactggaccttggtgcctgtgattgtgatcttggaatcatgttggggtttggaggccctcaagagaagtgcgaggttggtcagaggaatgaaaagggtggctctgtcttctctcttcgtctatggttttttcgaagtgatcgttgtgttgaacggcttacttgtgacaaaagatcttaacggaactagtgacggttgggttcttgtggtgagctattgggtgttcattgtgtcgcaatcttatttcgttgcggtgtttatggtttctaaaattgcgttcaatacggtcttgtacgcatattgcaagcctaatcatggagaagttattgtggaggagtttgagaaggaaggtcttattggcttgcccttccatgacgatggaaaggtatccaatgctgtttaagctatgcatgtagtgatcaatgtgaaaacataagggtaacttgattttttttacttttatttttatgtaagaactgaataccgtactaaggaatttaaactcccttaatttatgtaaaccattgttgttt

SEQ ID NO: 20940 - DNA, 915 bp, Glycine max
  Clone ID: PAT_MRT3847_118914C.1
tccccacgcgtccgtacggctgcgagaagacgacagaagggggaaataaaccaacatcaaaccaagccattttttcttctcccttgtagcaatgaaacaccactccttgtcatttaaatggcttcttctgattttcctcacacactcaacccttctcaccgcaacacactcgttgacaattccaaggatgagtccaattcctgaatgggaaacaacactacacaaccaccctgcaattaatacagaggaagtgaaaacattttacttcaaacaggttctggatcacttcaactacaggccagaaagctacacaacgtttcaacaaagatatctaatcaatttcaagtactggggtggtgccaattctagtgctcccatatttgcatactttggtgctgaatcaccaattgataactcccctaatggcgtgggatttttaactgataacgctgcttccttcaatgccctcttggtatacatagagcaccggtattatgggaaatcagtgccatttggatccagggaagaagcattgaagaatgcaagcactattgggtatttcaactcagctcaagccttggcagattatgcatcaatactcaaacatgtaaagaagacattacacgccaaaaattccccagtgattgtaattggaggatcatacggtggaatgcttgcttcatggtttaggctcaaatatccccacctggcgattggtgccctggcctcatcaacttcaatcctatactttgataaaattacaccacaaaatggttactactctactgtcacaagggattatcgagaagccagtgagacatgttatgaaactgtactaaagtcttggtctgaaatccgcagaatagcttctcaaccaaatggtctagtcactctcagccagagattcaacacttg

SEQ ID NO: 20941 - DNA, 1335 bp, Glycine max
  unsure (1)..(1335): unsure at all n locations
  Clone ID: PAT_MRT3847_118915C.1
attgtaaagctggtatggggaggactggactgatgatatgtagtcttcttttgtttcttaagttcttcccaactgcagaggaagccattgattactttaaccataaaagatgtgtagatggaaaggctttagtcctccctagtcagattagatatgtaaaatactttgaacggactttaacacacttcaatggagaagtccaaccaggacgaaggtgcatgctaagagggtttcggcttcacaaatgcccttattgggttagaccatctattacaatttctgatcatacgggaattctttttaccacaagaaagcatcccaaaacaaaggatctaatgccagaagatttctggatcagtgtaccaaagaaaggaattgtggtttttgccctaccaggagagcctggtctagcagagttggtaggagacttcaaaattcagtttcaagatcgacagggagatttctactgttggatgaatacaacgatgacagaaaaccgaaaatttttggatggttcagattttgatggtttcgacaagagaaagatccctgctccaggattcaaggtggaagttgtgatgatagactataatggcaccctacctgcaaatacaaaatcaaatcctgccagcaaaggatctgatggaaacacaagcaatgccctacctggtccaaagtctactacatctaattcaagtgagagtaaagtccctagaaacggagatgatgatgtattctcagacagcgacgaagaggagacccgggatacacaaagcaataaagctgcagctgagtacaaatttatggcacctcatcaagtatctgagacaacaaatgaccatgtagggatgttgacacagaaaacggatcagttgtcactgcagcatgaggaatgcaagcaaaacgatgcttctgaagaatcagatacagataaacttcataaaaatcatacaggcaataagagtataaacatgggatctgtaggggcaagtgacatcaaggcaatcgcagcagatgcttcagttttttcctttggagatgaagattttgaaagtgattgagaggatgtgggatgaactattgattgatttcaatactactcaggaaaggcattaggcattacggaattcattggtttgcccccaatttgttgtcaaaaggactattctgtattttattatttaaactctgtatattttaaaggttacatttttacatgattctctcaagtattctacgtgatataattcactgtcaataacattttcaatacatattataaatatttnntattttattttaaaaaatttcttaatttcggggctctcgcttgtt

SEQ ID NO: 20942 - DNA, 734 bp, Glycine max
  Clone ID: PAT_MRT3847_118916C.1
ggctcgagctcaagacaaggagttggcggaaaatagaggggatgtacccatatgttaatgggggtgctcaggcacctccacttgtggcagttgtggataaccagttgtatgccgttgagcatctaaccaacatggtgaataaatatgacaaggaaaggaacacctggagtgaattgggaagacttccagtacgggctgattcttctaatggatggggcctggctttcaaggcttgtggggagaaacttctggttgtgagtggacaaaggggtccagaaggtgaagctgttgtgctgaattcatggcgtcctaggacagggttcaggaatggaaccatagattggaaagtacttggtgtgaaggagcatgttggggtgtttgtgtacaattgtgctgttatgggatggtccggtgagatgcttttagattgactcagcagaagatttgctggtatctacaatctgacttagctttgaggggtgcttccctgttgattcatctcatttaccaagttaattgtccctggtcccttgataagaatttgggtttctacttttgacatcttatttggatgtgtttctctctttcatgatccataatttttatttgcttttgagattacttagtaggcttacacagatatgttctgttatccttttccttatccaactatgtaaaccaataaatcatagaattttattttttttaatacttcaatccttattcaatgcttt

SEQ ID NO: 20943 - DNA, 852 bp, Glycine max
  Clone ID: PAT_MRT3847_118917C.1
ccacgcgtccgtgaaggaggatattcaaaatgtggtggttgttcaattgtaaagctggtatggggaggactggactgatgatatgtagtcttcttttgtttcttaagttcttcccaactgcagaggaagccattgattactttaaccataaaagatgtgtagatggaaaggctttagtcctccctagtcagattagatatgtaaaatactttgaacggactttaacacacttcaatggagaagtccaaccaggacgaaggtgcatgctaagagggtttcggcttcacaaatgcccttattgggttagaccatctattacaatttctgatcatacgggaattctttttaccacaagaaagcatcccaaaacaaaggatctaatgccagaagatttctggatcagtgtaccaaagaaaggaattgtggtttttgccctaccaggagagcctggtctaacagagttggtaggagacttcaaaattcagtttcaagatcgacagggagatttctactgtttgttaaaaacacctatgaattttcgtttggccaccctttttttctgcttttcactcacttaccagaatcattatgattgtattgtggcttatatagtgattttattggaatcttttttatatgaaggcctaaatgtctatcatgacgaatagttgcattccctattccactatatattaaagatttgttatcttcaaaatcatgttagtattgaagcactttgcttacacagattagcagctttcttgatgtaccactttcttcttggtagttggatgaatacaacattgacagaaaaccgaaaaattttggatggttcagattttgatggtttcg

SEQ ID NO: 20944 - DNA, 1266 bp, Glycine max
  unsure (1)..(1266): unsure at all n locations
  Clone ID: PAT_MRT3847_118918C.1
caacgggatgattagtttataagcatcacacagacacttggaagactaggttctaagttctaattcgatgaaactcgaatcttcagcgccagagcaagagagagaatagaaatctatatcagcttcttgacgatgaatgcagaatccaatttctaaactcccgatgaattgtcttattcaaatgataacttcactttgaaggctcaagcatttcctagcaacatcagtgtcttttcccttgaatatgtagcaagtttgtctttatggagacatttgatttgactttgaagaagacaaaatagaggagaaaacaagtgaatggtgaaaactcagtatggaattaggttcagcagaattatatacacaggttagccttgctgtgaaattttgaccttcttgactatttctttcttagggcacgagggcctccggagtggaggaaagactttgggagaacatagatgcaaacatagcagtgttccttcaccgagtgcaatctaatctctagctgccaagcacaaaggcataacgagttgatgtagttaagaggagcttacaatcatagaatctgaatatccaatgactgaaaatagttaatttgcatcctgtctctgcaccctcttctctcttccaacatgttatgtgctaggtgaagaaacaacctttccttcagctcttgcatttcacatacatctggcacacgatacattcactcagccaacatcttggatattgtgccttttttttcccgcaggttttaagataccccatctatacatttggaatatcgaacacctctagttgagcattctaatctctgcagtgaaatactggtaaaaattgtttttattcataaatttctactcaatttggttcctcagttcacattttaagtagtgataatgttatgcactcttaatttagctatacacaataatatcattgtgtttttctttttcgcagcaggtttcaagatacctcatctacactgttggaatatcgaacatctctagtggggcattctaatctttgcattgaaatattggtaaaaaatgttttaattcattaatttctactcaatttggttgctcagttcacaatttaagaagtgataatgttatgcactcttaatttagctatacacaatcatatctgttaggaacaattattcttgaattcattttcttaaaatttatttaattgaatattattttaagtaaaannaaaaaaaaaaaaaaaaaaaaaaaaaaaaaaaaaaaaaaaaaa

SEQ ID NO: 20945 - DNA, 352 bp, Glycine max
  unsure (1)..(352): unsure at all n locations
  Clone ID: PAT_MRT3847_118919C.1
cacgagggngatactngcgagagaggagngnctgtgagaggtatatatatacagcaagaatgcaagatagttgttctgtttttttttttttgtttttgnnaatggacctttgtttgtggaggtgcgcttgcttgttttttccgaaaagcgctaataaaaataaatattgtttttggctttggggagggaacgcctcgggggtgttttttttttctttttggccccgattctcttctctctctaaaaaaaagaagagnnntttcctttcctttcttttcctttctctcttctatgncctgggaattnttctatactctanntcgcggngnaagggcttaacancatgacaaac

SEQ ID NO: 20946 - DNA, 341 bp, Glycine max
  Clone ID: PAT_MRT3847_11891C.1
ggctcgaggtcccctatggctcgtcactttttgctcttagcgctcctgcttttcgccgccgtggccaccgacgtgatggaagaagccgattgctacgcccactacatcctgataccgtcatgttggcgccatgatgttgtctatgccgaagaggatgactgctctgctgaacgccgagcaccagtttcaaagcttaaatggcaaggtggtgaagacctacactgacaaggaggagcgcgagcatatgttatgggaattcaagtccaacctgcacagaaccaggctgcacgcctagctggatccatcacccgtacactgtgtcaccaaatgctacgatctaa

SEQ ID NO: 20947 - DNA, 330 bp, Glycine max
  Clone ID: PAT_MRT3847_118920C.1
ggttcgagagctctccagcgacacgacaaccgacatgacgatccggaagagcgccactatgggcagcctgacccactacactgattacacctcgcaccggcttcacgtcagcgagaataacccgagtttacccggtgagacgcacaaacacgccaggggcgactccagggcaacggctactatgacttcggaccaggctcttctccttgcaaatgctatagatgaagagcacatacatgggctggcgacgatcatttaaagggtatgctaagagtgcgtcaccattactaagatgatagtgctgagcatgcaatgagcctagttatacaa

SEQ ID NO: 20948 - DNA, 352 bp, Glycine max
  Clone ID: PAT_MRT3847_118921C.1
ccttcgacttcaacactcctactcctactccactcactctctttctctttcccttgctagcttccttcctttaattttttccaaatttatctttccttaccatcaatgcctatggcaccgccaatattgttgccattctttctgtcctttctttctctctgcctcctcatcaatgcaaacggagtgatgcgttcttttcaagagaagaagatattcaacgtgcaaacgttgcagaacaaacaccaacttggtaaccaggcttgcctcctcccggaatcaagaaaggagaaaggtgctattgtactggaaatgaaggacagaggacattgctcagagaagaaaattgattgga

SEQ ID NO: 20949 - DNA, 467 bp, Glycine max
  Clone ID: PAT_MRT3847_118922C.1
agaactttagtgatgcatttttctgatggagttcaccatgctaaaagattggcatgttgtctaaataagaaaaagcaaaatttagtaggatatataacataatagtacgattgaaactaagtgatgaaaccactgaattttttcaacttcttcctttatgtagtagttgatggcttgatgcagcattcatggacagtaatctgcttttttcatttataagttcctcctaataacaaaaagtctttcatttccttcacgttttccttttccttatgcagataccattttgtgttgttattggctggataatagggcaacctatggacttaaactttcaactttttgagactgcagcactatttcttactgttatagtcgtagccttcatgttacaggtttgtattcaatcccaaaaaaaaaaaaaaaaaaaaaaaaaaaaaagcggccgctcgaattcggacgcgtgg

SEQ ID NO: 20950 - DNA, 681 bp, Glycine max
  unsure (1)..(681): unsure at all n locations
  Clone ID: PAT_MRT3847_118923C.1
ctctcctctcatctttggatccccaaatctagggcttcttcttcttgtctgcgaaaatttcttgaatcactgtcttaattttcgtcatcaatttccgatttcgaatcttcgtctttgtttactttccatcgttgaagctgtgttgtgcttacttcactgtgctgggtttggtaagctcttattgtatctgtgaatgctcgcttcggatcttcgatttcgttttgtgatcttgcttttgctgtttaagtttcagtgtgtgccggtgtttgtgcgagatgtgagbgaaggtttttgtttttgttccatttctgntttttattttttgaacttgagttgttacctagcaatttgatgtcagatttgttatcgcgtgttgctgctaagggtttggtagcgtcgattttgtgtggagttgcattgaagtcaaatgtgcaaatccatgttctttaaaatggataaataagatttgggagctcttttatttgctttgtatgtgttggttagaaattattagaattatggttttccctttttatttttggggttatcaggagtagcaaagccccactatactagaatactacgaaatggtatgaaattggtgtaattaaaacttgaagtaggaatatgcttttgtgactattataatctagtcaggcgtttgactgtgtcaggcaaaaa

SEQ ID NO: 20951 - DNA, 776 bp, Glycine max
  Clone ID: PAT_MRT3847_118924C.1
actagtctctccgctaagtgcctattttgagtctacagagaaggaaatagtgttggtgttttccaacaatggtatcaaagctcgattcgttaggagggagctattatcctgtgtgattctggatgaagggagttgtcactcatgatggagatatgttcaagctaatcgtagaaaattattctcattgaaagctaatgatagaagaccatcagtactgcaacgatttgcatgagccaatcacacatgagaataagccgaaggggaagaaggacaaagaataggagctccttaatcggaagactgtagctatgattcgtaagtatattgaccacagcttgttcgagcatgtatcaacttatatcaacgcatataagttatggacaaagcttgaatctttgattcaaaagaaaacatcgaagaataaagctcatcttgtcgaatgcttggtcaagctggcgtatatggacgatcaaatttctgcaattaaaggtgttcagcccggcctcctttgcccaatgatcaggtttacctattgccccaaagctgctctttgcaaaatgtatctttaaaccggacgcaagttcaaaaactctcaacatggattttattgtcatcacattctgcattgtggcttcaccaaggaaaatggtgtcgtcggcatattgtaatatgttgactggtatcttgttttttcccaccatgagactgctgtagaggctcttgtccagtgcttctctcataagtccagttagtccttccgcgacaatattgaagag

SEQ ID NO: 20952 - DNA, 2808 bp, Glycine max
  Clone ID: PAT_MRT3847_118925C.1
cgagatgattagtagggagcttctaactttgctggtgcatgacaatggtacgtatccacttgctgataaactgatcaatggagaaaactacaaaggatgctaaaggaagagaaaaagcacgtccggaaggcttgcttcttaagggtagaagagagaattgaaggctgctggaattgatattaggcagcggaagagaaaaaggaaaggaatagattacaatgcagaaatttcattcgaaaaaaggcctcctccagggttttttgatgttacagatgaagatagaccagtggaacagccccagttccctactacaattgaagaacttgaagggaaaaggctgctggatgttgaggcacaattaagaaagcaggacattgcaaaaaataaaattgcacaaaggcaagatgccccatctgccatattgcatgccagcaagctgaatgacaaccaaacagtaagaaagaggaaaaaattgatgcttgcaccccctcagatttcagatcaggaattggatgaaattgcaaagttgggttatgctagtgaccttgcaggaagtcaggaacttgctgaaggtagtcgtgcaacacaggctcttctgactaattatgcacagacacctggccaaggaatgactcctttgcgaacccctcagagaacaccggctggtaaaggtgatgctatcatgatggaagctgaaaatctggccaggctgagggagtctcaaacaccattgttaggaggagagaacccagagttgcatccttcagatttttccggtgtcactcctaagaaaaaggagattcagactccaaacccaatgctgactccttctgcaactcctggagctgcaggtctcactcctagaattggcatgacaccaacaagagatggtttttcttttagcatgacaccaaagggaactcctcttagggatgagctacatattaatgaggacatgaatatgcatgacagcactaaacttgagctacagagacaggctgatatgagaagaagtttgcgttctggtttaggaagccttccacagcccaaaaatgagtaccagatagtgatgccacctgttctagaagatgccgaagagcctgaggagaaaattgaagaggatatgtctgatagaatagctagagaaaaagcggaagaagaggcaaggcagcaggcattgcttagaaagcgatcgaaagttcttcaacgggaacttcctaggcctcctacagcatcattggagcttataagaaattccttgatgcgaactgacggggacaagagttcctttgttccaccaacctctattgagcaagctgacgagatgattagaagggagcttctaactttgctggagcatgacaatggtaagtatccacttgatgataaagtgattaaggagaaaaagaaaggagccaagcgtgctgtaaatgggtctgctgtccctgtgatagaagattttcaggaagatgaaatgaaagaggctgataagttgataaaggaagaggccctgtatctttgtgcagcaatgggtcatgaagatgaaccccttgatgaatttattgaagcacacagaacctgtctcaatgatcttatgtactttcctacccgtaatgcatatggtctctctagtgttgctggaaacatggaaaaactagcagctttgcagaatgagtttgagaatgtgagaaacaaattggatgatggtaaggagaagacggtacggcttgagaagaaggtgatggttctcacgcaaggttatgagatgagagtaaagaaaagcctctggccacaaattgaggccactttcaagcagatggatgtagctgcaactgagttagaatgctttaaagctttgcaaaagcaggaacaattggcagcatcacataggataaacaatctgtgggctgaagtacagaagcagaaggaacttgagaaaactttgcaaaataggtatgggagtctaattgaagagctggaaaagatgcaaaatgtcatggaccaatgcagattactagcacaacagcaagaagaaattgaagcaaacaaccatgctcgtgagtcaactgagacccctgagaccaaggctggtgaaactgatgtacagagtacagaaaattgtgaaactgtacctgactcagtagagcatggacatgctctagcagttgagtcatctgatgatggaactgctgaccagcaagtagatattgtgcatgaccaggctacttctagcgttagccatgacatggatgtagattctgataaattggctaatcctacaccagctgcagagaatgtcgatggaaaactggaagttactgctactgccagctatactgatgatgggaagaccatgctagaaatgggtgctgcagtggaagtaagtagcagccccaatcatgatgtagttgcggatgctgtaaactcacatgataacagcatggaagaaaccaatgctgttggggaggagacaaattaggccggacactgcatagcctgttctgattaagtatggggacgttagactggatgctttaactgaataaaatgcatggatagtgagtcctccgttgttggaaggtagctaaagagcttagttgatgccaagattttgtaatgatccctactcgaagtttggaacatattatgaactgataaattgcatgagcatttgaaatggttgaccgtatttttttttttctgaatttttgtcctcttccatatgatggatgttgataatgtgctctttacattttaagaatgatacatgattttatatcaatgaattagagctcggtaactattgta

SEQ ID NO: 20953 - DNA, 798 bp, Glycine max
  Clone ID: PAT_MRT3847_118926C.1
acgcgagataaagagcgaaatttaagactaagatcagaatgtcaggtcgatcgaatcatggtactataaactcattcaataaccatggcaacgggaaccagaatttcgctggtgcaacgatcaacagtggtgcaaactctggcaatcgtaatagttatagcactgccaactactatggtggtcacacgataaataacagtggtactttcaatgggaatggaaatggaagctttatcaagggtggttttaactcttccaccatgaactactaccgttaattatctgtttttgatgcatgcatgctttacagtatcatctactgtgtgtagctatatattatcccaccaataaataatctagagctgtagcctgcagctcaaaattaatggtctataataaattaaatatgtaatataatggtttccgagttgctatctctgaacgctcaaatggagctcaagagatctctattattataatgcatctcctccgatcctattcagtccaaaaaaaaaaaaaaaaaactcgagttttttttttttttttttttttgtttttttttttttttcttggccggtttattctggattcgtataccaggaactgaaattaggaaagaagctttcgggaaagggattttaaattttatagaaacccccacgttaaaatattgagttgggccctttatcgacgggcccttttaccacacaggaattaccttttggggcaaaaattgtttaaaggcttcaataaaggttgggcatatgcccattctttattcactggttggaaaaaaaa

SEQ ID NO: 20954 - DNA, 225 bp, Glycine max
  Clone ID: PAT_MRT3847_118927C.1
ggagctattgcatgttatggaaaactaccaagcttgaaaatgagcagagtgagagctgagaaaccttcatctgaaatgtggaaggatgcagcttcaactattgtctctgaactatgcttcacatcaagttcctgtgtggaactaataaccgataaccctgtaagtatgagtccactgggcgcaagaaatctacttctgtctcgatacacgggttaagatctactg

SEQ ID NO: 20955 - DNA, 240 bp, Glycine max
  Clone ID: PAT_MRT3847_118928C.1
ctttctcattccccatctcctcaccttattcagtcactgatcatttctagggttccgcaatggacgctggctgtaagatcacgaagggcgccgcaggaagaaagggcggcggccctaagaagaagccgctttcaaggtccgtcaaggccggtctccacattcccgtcggaagaattggccgatatttgaagaaaggaaggtactctcagcgtgtctgtaccggcgctcccgtttacttgg

SEQ ID NO: 20956 - DNA, 346 bp, Glycine max
  unsure (1)..(346): unsure at all n locations
  Clone ID: PAT_MRT3847_118929C.1
ngtttattttttatatttatatgttcgataaccgggtggtacaacccgtgcctattgtacacccattggaccaacaggcgctcgatgtcactgactcccaatgatgatgcggatgtgaagccatatggcttgtcttcggaggctcatgaagaccgatacaacttgagcaatgatgcgccgctgttgcatatggcggagtgtcttatttgccaagaggaggacagcgttagctgtttggagacaccctgctcctgcagcggatgtctaaatgttggtcatagaacagttcgttcaactttggggttattgataaaggtaacataacttgtgagataatgcacaagta

SEQ ID NO: 20957 - DNA, 256 bp, Glycine max
  Clone ID: PAT_MRT3847_11892C.1
aattcggctcgagccaaagcttttggttctctctgcttatgggagggccttaaaccttcggtctctctggttcactttctcgcttttgccttttcttgggaaaaaaaaaaaaaatccctcaacacaaataggggttttttttttctgagctaccccagcgctaaaatctcccttaattgggttgtccgtgagattggagagtaaagtccccccccaccctcgtaacccaggaggagggggggagcaccccggcgtc

SEQ ID NO: 20958 - DNA, 168 bp, Glycine max
  Clone ID: PAT_MRT3847_118930C.1
gtcgaccacctccgccacctccgctttgaccttcagaggagctggctcacttactcagggggtcctgtgtactggagtcatattgccaggagggggaccgatttcatctgttggattattattggttgcggctcatctgaagggctctgaaatcatgctacaaggatt

SEQ ID NO: 20959 - DNA, 394 bp, Glycine max
  Clone ID: PAT_MRT3847_118931C.1
ggctcgagcatacgtaatacccaatttttggagttttacacagccgatttgcatagaccaaggctcatctggtgccgaacaaaggctttttgggcgagcattcgtcttcaccagaaagaggataatggtggctcgtgaagacatatatggtggggaggaagtttgtcttggccaaccagaccctgtggtgtcgcagattgcacggttgcaaatccaacttacagtaaaggattaggaactgcctacttgccagagcgtagaaatggccttcctggcatcttatgctcaaaaggacagggccctagactagctgatgaatgaagtccgcaaggtgcatgataaacttagacttaccgtggatcatttcaacatttgctagcaatttaggaacctg

SEQ ID NO: 20960 - DNA, 393 bp, Glycine max
  Clone ID: PAT_MRT3847_118932C.1
gtggccccaacccagaattaagtgcatgttacatttgcattttgtaatgcttattggagattaggttaatggtggacaagcccaacttgcggatcaaaaccaacttgttgatcattatgcttccaaacatccgaaggagaaaccccctgcagagaccagttagttatatttagagcaaatggtacaaaaagtccccaaaaaaaatttctctctaggtgtgccttcatgcttttaatgtaattctccctgcttgcaggcaggttgcaacatgttttaagttaatcatgttaatgtgcattattgtgagatcacaaaggatcataaaaactgcgtctatcattataagaatatcatcatgttgctaaaaaaaaaaaaaaaaaaaaaaaagggcgc

SEQ ID NO: 20961 - DNA, 268 bp, Glycine max
  unsure (1)..(268): unsure at all n locations
  Clone ID: PAT_MRT3847_118933C.1
gtgancccnaaacncntgacattggacatntctntaaactcctntnctggcaccatncccnccagcngtncagannctnagaagactcacttggttnnagnnccaaaacaattccatatntggggctatncctgacttcaaccttccaagtctcnagcatttgaacttgagcnataataacttgaatggctcaattccaaacncntaaanggnnttcccntacacntctttgttgggaacgntctcttatgcgggccacctctcaanc

SEQ ID NO: 20962 - DNA, 695 bp, Glycine max
  Clone ID: PAT_MRT3847_118934C.1
aagggaggctttgtatatctcttttatctcatctcagtttccttctctctccgtccaaaagtgacgttctcaacacaagaacggttttctgtgtctaagcgctcttagtggttccgattctttctccactttcaacttgtccgtttctcactctccctcaaatctcattctctctctctctcttccttcacattctctcttttccgcccatttcagttgagccattctctcttctgcttctactttctagtcaattcaaccccccatcttcacctctgatccaaagctgagaacttgctttctgggttcaatagctacactcacatgctgttgtgggttgcctttaaaacatcacctttgaagacatctcgggtcgctaactaaccccttttgttgattttgcaacagaaaggtttaataataataataaaaaaggttgtgcacttcgtggtgtggtctttgtgggggattacgcagatctgcatgttatctattatttcacaatatccaaaaccaaaagagcaagagagagaagaaaaaaaacggagtgttcttttttgttttctcatcttttatataaaaaaaaaactatacctttccttcttatcttacccttaattccttacattaattgatgactaaagctggttcgctgccattttagctatctcaatctgaaaagtgtgcaattgtga

SEQ ID NO: 20963 - DNA, 385 bp, Glycine max
  Clone ID: PAT_MRT3847_118935C.1
ctattacgtcgcatgccccccctcagcagggaataattctggtggaggacatgtgaatacctaggcttatttgaaacgagctgcccttggtgatatacacgggtggggcgatttatgactacacaacctcgttccaaacttggagccagagcatttacatagccattatggatcgaacaggtggacctctcaggcgaatgaagagaaaaactctggcagccgtattgatgattgcatacacatcagtcatccccacctttgcctattgcggtgtctgctaccctgataattcttgtgcgagggaagaatggaatggtgctgatgacccctatagccagccctttgttgatgtacctgctctccttataagataacttgggtatgg

SEQ ID NO: 20964 - DNA, 472 bp, Glycine max
  Clone ID: PAT_MRT3847_118936C.1
acgagtacaaaactagttatggttatagttataataaccccttataatctagtaatttattagttatagttatgattatttaaataaccaaaccataagcacccctagtcacggttgcacactaatatttttaatataacttggttgctgtgttgcattaatttacaatccaataatttagtagtgaatcactgtataagaatgtactccggtagaacagtgtgttatttcctttgttttcattctgaattgcattatatttataatttattagagataaggctcagaaaaccctttgcacatgaatgactagtaatcttggtgctagttttgaacctgttttcacttgaaaaaacagttttttcagtttataaactggttttgaacaggtcttaaaccagttgaaaactagttttggatttgtttcgaacctaaacccgaactgaactgattcaccaagacataaaccatt

SEQ ID NO: 20965 - DNA, 283 bp, Glycine max
  Clone ID: PAT_MRT3847_118937C.1
aaatgaggccgttatcatcgtcatcatacacgtagtcatggcccatcagaatcacgccacatctggccatgtgttcgcccactcaagcggctgggggggcacacaacccaggtcatcagcagttcgatcaacagtcaggtcgcaggccaccatagtatcgaccgtgtccgctgcgaacacctcttcaacatgcggcacacaaccccgacgcctgcatgcgtggccgatgtgaaccttgaacttctcccgctcgtgcaaggccacgaatgtccagtcggcggta

SEQ ID NO: 20966 - DNA, 452 bp, Glycine max
  unsure (1)..(452): unsure at all n locations
  Clone ID: PAT_MRT3847_118938C.1
cggtccggaattncccgggntcgactcctacgcgtctcgacgggctggcgagaagactgactagaaggggtaccggtctggtcgagagaacgactagaaggggtaccgggctggcggagaagactgactagaaggggtaccgngtctgcgagagaactgacagaaggggtaccggctntgtcgagaagaacgactagaaggggtaccggctttgtcgagaagactgactagaaggggtaccgtgtcttgcgagaagaccgactagaaggggtaccggggctgtcgagaagaacgactagaaggggtaccgggctgggcgagaagaacgactagaaggggtaccggggcttgcgagaagactgactagaaggggtaccgggctgggcgagaagaacgatncagaaagggggggggtcgcaagtgaaccagngtcccgggcgacttgtttactc

SEQ ID NO: 20967 - DNA, 1066 bp, Glycine max
  Clone ID: PAT_MRT3847_118939C.1
aagtacccctctcttctttaagctatatattgtgctaaaaaaaatatataggcatcaccagtagccattctcttcagtttaaagttacatagtttttcattgttttacttaatctacaatggctgcttcaacaatggctctctcttcatcatcattggctggccaagctatcaagcttgccccctccacccctgagcttggtgttggaagggttagcatgaggaaaacagcctccaaaactgtttcctcaggaagcccatggtacggcccagaccgtgtcaagtacttgggcccattctcaggtgagcccccatcctatctcactggtgaattcccaggtgactatggttgggacactgctgggctttctgctgacccagagacttttgccaaaaaccgtgaactggaagtcatccactccagatgggccatgttgggagccttgggctgtgttttccctgaactcttgtcccgcaacggagtcaagtttggcgaggccgtgtggttcaaggccgggtctcagatattcagtgagggtgggcttgactacttgggcaacccaagcctgatccatgcacaaagcattcttgccatctgggccacccaagttatcttgatgggtgccgttgagggttaccgtattgctggtgggcctcttggtgaggtgactgacccaatctatccaggtggcagctttgacccattgggccttgctgatgacccagaggcttttgctgagttgaaggtgaaagagctcaagaatggtaggttggccatgttctccatgtttggtttctttgttcaggcaattgtgacaggaaagggacccttggaaaaccttgctgatcaccttgctgacccagtcaacaacaatgcttgggcttatgccacaaactttgttcccggaaagtgaaatgacttgtgaattttatgttatttagttaaatatgtattggatctatcaagtgagaatgtgaattatattattatattttatatatctctttttagttcctttggaggtatctcccaggttttaagtttttatatatatgccctttttttt

SEQ ID NO: 20968 - DNA, 1238 bp, Glycine max
  Clone ID: PAT_MRT3847_11893C.1
acgagtagtacttggtggttgattcatcttggtatgaaaaattagtccattgtggtagatccatttgatatttggttaaattattgctctggctatataaggcacacataatgcaagaaacattctcctcagggtgaatatccactacacgcaaagcaaaacacacctccacattcacccttagtcctcactcaacaaacaaattagccatgagcaccaaggagtgctgccaccacgacgaggagcggcgtcagctcccccgccgcgtattcgccgcgatcctcggcttcatcctcctcatcctcctggtgatcttcctcatctggatcatcctccgccccaccaaaccccgcttcatcctccaagacgccaccgtctacgccttcaacctctcctccaccggcgacaccccttcccccattaccccaacccccaacaccctcaccctcaccatgcaggtcaccctcgccgccttcaaccccaaccaccgcatcggagtttactacaccaaactcgacgcctacgccgcctaccgcggccagcaggtctccgtcgccacctccctccccgccacctaccagggccaccgcgacacctccgtctggtccccctacctctacgccaccgccgtccccgtctcccccttcacgctccagatcctccagcaggacaaaacctccggaggaattctggtcaacgtaaaagtcaacggaagagtcaagtggaaggtcggaacttgggtttccggaatttaccatattaatgtcaactgtccggcgtacctcaggctcgccggcgaccgggacgacgccatcggatttgccggtccggccgtgaagtttcagctcttccaaacatgcattgttgatgtctagtttagtaattatattctccatataccaacaactgagaagttctaaagtcagagacagactcaagaaatttcagcaatgcatgaagccatgaacagtgatatctatgtgtaaaccaagtagtttgcttgcattgctatagttgttatagttcttactttctttctcttaattattctcaaccaccctcttcatacataatgctctcttttttctttttatgtttttaatttcttttttcggaagtattttggataaagtcgatatccttcagtttatatatatgaaaatgtttttgttatttttgttccttaaaaaaaaactatagctaaggcggccgctctagagaatccagcttcgtcgcgg

SEQ ID NO: 20969 - DNA, 380 bp, Glycine max
  Clone ID: PAT_MRT3847_118940C.1
catggtatggcccagaccgtgtcaagtacttgggcccattttccggtgaagctccctcctaccttactggtgaattcccatgggctttctgctgatccagagacttttgccaaaaaccgagaactcgaagtcatccactccagatgggccatgttgggagccctgggctgtgttttccccgaactcttggcccgcaatggtgtcaagtttggagaggccgtatggttcaaggccgggtctcagatattcagtgagggtgggcttgactacttgggcaacccaagcctgatccatgcacaaagcattcttgccatctgggccacccaagttatcttgatgggtgccgttgagggttaccgtattgcaggtgggcctcttgg

SEQ ID NO: 20970 - DNA, 1034 bp, Glycine max
  Clone ID: PAT_MRT3847_118941C.1
gacaagcaacattgctaaccattctctgcacttttcagttacaaagcatttcattgttttacaatatacaacactacaatggctgcttcaacaatggctctctcttcatcatcattggctggccaagctatcaagcttgccccctccacccctcagcttggtgttggaagggttagcatgagaaaaacagcctccaagactgttttcctcaggaagcccatggtacggcccagatcgtgtcaagtacttgggcccattctctggtgagcccccatcctacctcactggtgaattcccaggtgactatggttgggacactgctgggctttctgctgacccagagacctttgccaaaaaccgtgaactggaagtcatccactccagatgggccatgttgggagccttgggctgtgttttccctgaactcttgtcccgcaacggagtcaagtttggtgaggccgtgtggttcaaggccgggtctcagatattcagtgagggcgggcttgactacttgggcaacccaagcctgatccatgcacaaagcattcttgccatctgggcaacccaagttatcttgatgggtgcagttgagggttaccgtattgctggtgggcctcttggtgaggtgactgatccaatctatccaggtggcagctttgacccattgggtcttgctgatgacccagaggcttttgctgagctgaaggtgaaggagctcaagaatggtaggttggccatgttctccatgtttggattctttgttcaggcaattgtgacaggaaagggacccttagaaaaccttgctgatcaccttgctgacccagtgaacaacaatgcttgggcctatgccacaaactttgtccccggaaagtgagggaaaaaaaaaaaacctgaaacgatgagaaactatgacttgagtgtgaatttcatgttgttatttaatgaaatatatattggatgtgtgccttatatatctttttggaacgttttgattggtcaaaaaaaaaaaaaaaaaactcgagactagttctctc

SEQ ID NO: 20971 - DNA, 512 bp, Glycine max
  Clone ID: PAT_MRT3847_118942C.1
tttccgggtctcagatattcagtgagggcgggcttgactacttgggcaacccaagcctgatccatgcacaaagcattcttgccatctgggccacccaagttatcttgatgggtgccgttgagggttaccgtattgctggtgggcctcttggtgaggtgactgacccaatctatccaggtggcagctttgacccattgggccttgctgatgacccagaggcttttgctgagttgaaggtgaaagagctcaagaatggtaggttggccatgttctccatgtttggtttctttgttcaggcaattgtgacaggaaagggacccttggaaaaccttgctgatcaccttgctgacccagtaaacaacaatgcttgggcttatgccacaaactttgttcccggaaagtgagcaaaattaacgttcaaagatccagaaatgacttgtgaattttatgttatttagttaaatatgtattggatctaccaagtgagaatgtgaattatattattatatttt

SEQ ID NO: 20972 - DNA, 1111 bp, Glycine max
  Clone ID: PAT_MRT3847_118943C.1
ccttttccctcttctttttctatgatggcattggatatgatagatgttgttccgagaacgaggatggaggaagctgcttccgctggattaaagagcatggagcatctcattcgactcctttctccaacctcttctaattccaattcttcttcttctcctcttctcaataccaatcccaacaacctccactgctcccaaatcaccgacttcaccgtctccaacttcaaacaagtcatcaaccttctcaaccgcaccggccacgcccgcttccgccgctctccaccccaagcccaagcccaagcccaaacccaaacccaaacccaaacaagtcttcagcctcaaccagaaacccaacaagggttcagtttagatttcgtgaagcccaccattctaaactcaaaacccagcaacaaagacgagactttgaccctctccaccacctcctacttctccttcacgtcctccgtcaccaacgacgccagcgtctccgacggcaagatcggacctttcctccctccctccgccgccaaaccccctctctcctccgtcggatcgtgaagtaacggcggatgcgaacaaggatcgattcggttcgaggacggaaaaagaaaagtggcaactaaagtcaactttcgcgttgtggaatgattttgttgacgaggacttttgtgtaaatttgaccccaagtaaagtagtgcaggtctcaaagaatgaaaattatagtgatctcatctgtttttctttatttctatttttttttaaaaagagacatttatttatttatttatttgatgttagagttgaattggttgaaggatggggctgcaataattttcttggtagaagaataaaaaaatattaatattgggagatctaagttgaaagattagattctttttgttgaaagaaaggacggtgtttgggggcaaaaagtcaaagtatgagggccccacagagaagcatgtggagttggaataataatgataactttagcattgagtaatggaaagtaggggggaagggaaggaacaggtcaatggttgttatggcgagtgggtccaactgcgtgttgttacttcaaaattcaaatatctctttctctctggtctct

SEQ ID NO: 20973 - DNA, 1107 bp, Glycine max
  Clone ID: PAT_MRT3847_118944C.1
ctcgagccgctccaaatacaagccaatagaaattgaaatatagatcatcataagatattaagataaggacccatttcctgcttctaagctatatagtgctcgtctagcctacccactacaagcaacattgttaaccattctcttcactttaaagttacatagtttttcattgttttacttaatctacaatggctgcttcaacaatgactctctcttcatcatcattggctggccaagctatcaagcttgccccctccacccctgagcttggtgttggaagggttagcatgaggaaaacagcctccaagactgtttcctcaggaagcccatggtacggcccagaccgtgtcaagtacttgggcccattctctggtgagcccccatcctatctcactggtgaattcccaggtgactatggttgggacactgctgggctttctgctgacccagagacttttgccaaaaaccgtgaactggaagtcatccactccagatgggccatgttgggagccttgggctgtgttttccctgaactcttgtcccgcaacggtgtcaagtttggcgaggccgtgtggttcaaggccgggtctcagatattcagtgagggtgggcttgactacttgggcaacccaagcctgatccatgcacaaagcattcttgccatctgggccacccaagttatcttgatgggtgccgttgagggttaccgtattgctggtgggcctcttggtgaggtgactgacccaatctacccaggtggcagctttgacccattgggccttgctgatgacccagaggcttttgctgagttgaaggtgaaagagctcaagaatggtaggttggccatgttctccatgtttggtttctttgttcaggcaattgtgacaggaaagggacccttagaaaaccttgctgatcaccttgcagacccagtcaacaacaatgcttgggcctatgccacaaactttgtccccggaaagtgagggaaaaaaaataaacctgaaacgatgagaaactatgacttgagtgtgaatttcatgttgttatttaatgaaatatatattggatgtgtgccttatatatctttttggaacgttttgattggtc

SEQ ID NO: 20974 - DNA, 829 bp, Glycine max
  unsure (1)..(829): unsure at all n locations
  Clone ID: PAT_MRT3847_118945C.1
gttgtttttagaacgaggatggaggaagctgcttccgctggattaaagagcatggagcatctcattcgactcctttctccaacctcttataattccaattcttcttcttctcctcttctcaataccaatcccaacaacctccactgctcccaaatcaccgacttcaccgtctccaacttcaaacaagtcatcaaccttctcaaccgcaccggccacgcccgcttccgccgctctccaccccaagcccaagcccaagcccaaacccaggcaacccaaacccaaacaagtcttcagcctcaaccagagacccaacaacaagggttcagtttagatttcgtgaagcccaccattctaaactcaaagcccatcaacaaagacgaaactttgactctttcaacaacctcttcttccttcatgtcctccgtcaccaacgacgccagcgtctccgacggcaagatcggacctttcctccctccctccgccgccaaaccccctctctcctccgcccaccggaaaaagtgccgcgacgccgccgcagcactctccgccaaaccctcctgccactgctccaagaaaaggaaatcacgcgtgaaacgaacgattcgggtgccggcgataagctcaaagatcgcagatatcccaccggacgagtattcgtggagaaaatacggtcaaaaaccgatcaagggctcaccttaccctcggtattattctattccttcttctatcttcatgctgaatcggtcaaagtcaaatgcagatctcaaagttctttctttnttcagaanaaanattaactatgattaaggtctatgataaaagatcgaac

SEQ ID NO: 20975 - DNA, 203 bp, Glycine max
  Clone ID: PAT_MRT3847_118946C.1
cgacaattactaggaggacccgagaatgaagatggacatatacatctttctacccaacattttataaccaatactctccgtttctctgctactactgagggggagatcagagttcaaatatctagcaccatctgctaacatacagcactccaacatatgtgggcctagcagcagctcttgtgctgccactagcctccttgtat

SEQ ID NO: 20976 - DNA, 599 bp, Glycine max
  unsure (1)..(599): unsure at all n locations
  Clone ID: PAT_MRT3847_118947C.1
tctctttatacagagaagaggtacagctgtcataactaactctaatgtgatgactcacatttacaaatacacccttattacatactctaataccccccccccccccctctcaaactcatggnnnaaggtttttcagaagaaaaacctttcaccgtgagtttggacttaagaaaagtaaagcgagcagaagagagaggcttagtcaaaatgccagcccactgatcaagggcagggatatggaagatctgaagttgcttggacaacaccttctcatgcacaaagaagacatcaatttccatatgctttgttctgctgtggaaaaccaggttgtgtgcaatggcaacagcactcttattgtcacacaatataaccggaggagtgaaaggaatctgaagttccattaaaagagcctgaatccaagtaagttcagcggaagtctgagcaatacttctatactctgcctctgtactagactgagcagtaacctgctgcttgcgagaccaccaggaaatcagattggggccaagaaaaatagctgatcccaaggtagacctgtgatcatcaacatctgaagcccagccagcatcacacaaggcagt

SEQ ID NO: 20977 - DNA, 1159 bp, Glycine max
  Clone ID: PAT_MRT3847_118948C.1
actcgagccgaatcggctcgagcaggaaagggaccaaacatggagaccatggccaacttacaattctcttcacttttaagttaaatagtttttcattgtttcatttaatctacaatggctgcttcaacaatggctctctcttcatcatcattggctggccaagctatcaagcttgccccctccacccctcagcttggtgttggaagggttagcatgaggaaaacagcctccaagactgtttcttctggaagcccatggtacggcccagaccgtgtcaagtacttgggcccattctctggtgagcccccatcctacctcactggtgaattcccaggtgactatggttgggacactgctgggctttctgctgacccagagacctttgccaagaaccgtgaacttgaagtcatccactccagatgggccatgttgggagccctgggctgtgttttccccgaactcttggcccgcaacggtgtcaagttcggtgaagccgtgtggttcaaggccgggtctcagatattcagtgagggtgggcttgactaccttgggcaacccaagcctgatccatgcacaaagcattcttgccatctgggccacccaagttatcttgatgggtgccgttgagggttaccgtattgctggtgggcctcttggtgaggtgactgacccaatctatccaggtggcagctttgacccattgggccttgctgatgacccagaggcttttgctgagttgaaggtgaaagagctcaagaatggtaggttggccatgttctccatgtttggtttctttgttcaggcaattgtgacaggaaagggacctttggaaaatcttgctgaccacctagctgacccagtaaacaataatgcctgggcctatgctacaaactttgtccccggaaagtgagcatagcaatagtgaaacaaagagaaacacagtgacttgaaaattagagtgagagtttcattgttatttggagaaatacatattgaatgttttcttttaagaagaatatgaattatatatcttattgtgcattgagatctttatttagttttgtagtgttgatgcactttatatatttcggtagatgtggtagagctgcaataccaacaagagcgcattatattattaattatacgcattaattggatt

SEQ ID NO: 20978 - DNA, 613 bp, Glycine max
  Clone ID: PAT_MRT3847_118949C.1
ttcctccgcccaccggaaaaagtgccgcgacgctgcgccggcactctccaccaaaccctcctgccactgctccaagaaaaggaaatcacgcgtgaaacgaacgattcgtgtgccggcggtaagctccaagatcgccgatatcccatcggacgagtactcgtggagaaaatacggtcaaaaaccgatcaagggttcaccttaccctcgagggtactacaagtgcagcaccgtgagagggtgtccggcgaggaagcacgtggagcgagcgcaagataaccccaagatgctaatagtgacttacgagggtgagcaccgtcacgttcttccgttaactgccgctgccggcgttagtttcggccattaatagagttgagtaatcgacgtcgtcgtttcggaaacctgacgggggacgttagatgaccgtcggatcgtgacggtaacggcggatgcgaacgaggttcggttcgtggacggaaaaaagagggaatgaaactatgaaagccaacatttgcgttgtggtctttgacggagtctcttatgttgacgaggacttttgtgtaaatttgacccaaagtaaagttagtacaggtctcgaaaaaatgaaattatagtg

SEQ ID NO: 20979 - DNA, 246 bp, Glycine max
  Clone ID: PAT_MRT3847_11894C.1
aaagtcaccatgcaccatgattttcttttaatggtatcaacttttggtaaaacaatattagggattggaaactttatggattcatatactatgatttggggagaaattttatttaatttaactattttaatctgggggggggggattctgtcacgtatttgtttctatataactcgacctaaattctgttggccctagtccctttaggaaaaaattcctaattattgggatttgcgaaaccaaatg

SEQ ID NO: 20980 - DNA, 1702 bp, Glycine max
  Clone ID: PAT_MRT3847_118950C.1
aaaccgcgcgtttcttttccctcttaacctcttcttcttactctcttacgttaattcttcgttgtctatgatggcattggatatgattgatgttgttcccaggacgaggatggaagaagaaaatatagcaatacaagaagcagcttccgctgggttaaagagcatggagcatctcattcgtctcctttctccttcttcttctcttcacaacaaccttaataatctcaatctcaaccacctcgactgctccgaaatcaccggcttcactgtctccaagttcaaacaagtcatcaaccttctcaaccgcaccggccacgcccgcttccgccgctctccaccccaagcccaagcccaagcccaagcccaagcccaagcccaagcccaaactaatcctcaaccacaacctcagatccaacaacaagggttcagtttagatttcgtgaagcccaccattctaaactcaaagcccatcaacaaagacgaaactttgactctttcaacaacctcttcttccttcatgtcctccgtcaccaacgacgccagcgtctccgacggcaagatcggacctttcctccctccctccgccgccaaaccccctctctcctccgcccaccggaaaaagtgccgcgacgccgccgcagcactctccgccaaaccctcctgccactgctccaagaaaaggaaatcacgcgtgaaacgaacgattcgggtgccggcgataagctcaaagatcgcagatatcccaccggacgagtattcgtggagaaaatacggtcaaaaaccgatcaagggctcaccttaccctcgagggtactacaagtgcagcaccgtgagagggtgtccggcgaggaagcacgtggagcgagcgcaggatgaccccaagatgctaatagtgacttacgagggtgagcaccgtcacgtgctgccgttaacttccgctgccggcgttagtttcggccattgagttaatcgacggcgtcttttggaaacttggcgggggacgttaaatgagcgtcggatcgtgaagtaacggcggatgcgaacaaggatcgattcggttcgaggacggaaaaagaaaagtggcaactaaagtcaactttcgcgttgtggaatgattttgttgacgaggacttttgtgtaaatttgaccccaagtaaagtagtgcaggtctcaaagaatgaaaattatagtgatctcatctgtttttctttatttctatttttttttaaaaagagacatttatttatttatttatttgatgttagagttgaattggttgaaggatggggctgcaataattttcttggtagaagaataaaaaaatattaatattgggagatctaagttgaaagattagattctttttgttgaaagaaaggacggtgtttgggggcaaaaagtcaaagtatgagggccccacagagaagcatgtggagttggaataataatgataactttagcattgagtaatggaaagtaggggggaagggaaggaacaggtcaatggttgttatggcgagtgggtcccactgcgtgttgttacttcaaaattcaaatatctctttctctctggtctctaatctctaatctctttgactggggtgcgtgtctccaattaagttacgtaacctaacctaactaacattgatgccaaggttgacgggttgaggccatataatagtagaattaaaattttatgaaa

SEQ ID NO: 20981 - DNA, 181 bp, Glycine max
  Clone ID: PAT_MRT3847_118951C.1
ataatatgactaatcaataaaaacccggcgattattttatgaacagggtggaacacaaaactcaaaactttacttccaacaaccacttctccctcaatatttattttctcatttcccacactattagccccactcttaactctttctttctaaatactctccaagtcctagaaaacgaacc

SEQ ID NO: 20982 - DNA, 324 bp, Glycine max
  unsure (1)..(324): unsure at all n locations
  Clone ID: PAT_MRT3847_118952C.1
aaccctatccacttctccgcatcacgattcaaatcttcgtgaagaccctttcaaataaaacgatcacatttgaaattgaatcttcggacaccatctacaactttaaagccaaaatccaagacaaagaaagcatccctcccgaccaacaactcctcatcttctccgggaaacaactttaagactgcctcaccctctcctactacaacatccaaaaagagtccacgcttcaccttgtcctccgncttcgtttcggctccaataatctcaagaaaaaaacctacaccaaacccaataaaatcaaacacaaacacaaaaaagtcaaac

SEQ ID NO: 20983 - DNA, 223 bp, Glycine max
  Clone ID: PAT_MRT3847_118953C.1
tgtactacgctggtgccgaaacccttccggaaccctaaggtatgtgagtaatcagtggttgagattggttgagaagacgatgggtagaaaggagtatatggttactcgtgagtacaccattaacctccacacgcgctccatgtctgcacattttagaagaaaactcctaaagctattaatgtgataaggaactttgcccaaaaggccatggtgaccaatgatg

SEQ ID NO: 20984 - DNA, 138 bp, Glycine max
  Clone ID: PAT_MRT3847_118954C.1
aggtccaaaattgggttctaggtctcactagacctagggatgaacataatttttacttaaattaattgcattacatgtccaataacaattatcgatccaacattcttgaatgacatctataccttggatcacctccat

SEQ ID NO: 20985 - DNA, 140 bp, Glycine max
  Clone ID: PAT_MRT3847_118955C.1
tgtcggcagtgatgatgttgaaacaacactctgttcgatttactcactagggagagcttcctcatattggctactcaaatacatgttgtcaagtaacctgtatacaatatttccaactgctacactttaatatggaccaa

SEQ ID NO: 20986 - DNA, 1072 bp, Glycine max
  Clone ID: PAT_MRT3847_118956C.1
ggctcgacggctcgagccaattcttctcttttgctttctctctccaaattcatcacaacttctctcgtacctctgcagagaagtaaacatataggagtgagagggagggagagagaaggaaagcttggtagcgatggggaaggagcaagttcaggtgctgaatgccctggacgtggcaaagacacaatggtatcatttcacagcaatcatcattgctggaatgggcttcttcactgatgcttatgatctgttctgtatatcactagtcacaaagctacttggtcgcatttactaccacgttgatggggctgcaaagcctggttcattgcctcccaatgtgtcagctgcagttaatggtgtagcttttgttggaacactttcagggcaactcttctttggctggctcggcgacaaaatgggccgaaaaaaggtctatggcatgacccttgcgcttatggttatagcttccattgcttcgggtctatccttcggacacgatgcaaagactgtgatgacaactctatgcttctttcgcttctggcttggttttggcattggtggagactaccctctttcggccaccataatgtctgagtattctaataagaagactcgaggtgcctttatagctgcagtgtttgccatgcagggttttggaattttggcaggaggtgtgtttgctattatcatagcatctgtgttcaagtccaagtttgattctccaccatacgaggttgatccgttgggttcgactgttccacaagcagactatgtttggaggataattctcatgtttggagcaattcctgctgcaatgacttactactcgcgatccaagatgccagaaaccgctcgttacactgccttggttgccaagaatatggagaaggctgcagcagatatgtctaaggttatgaacatggagattcaagccgagccaaagaaggaggaggaggcacaagctaaatcatatggattgttctccaaggagttcatgagtcgccatggactgcatctgctcggaacaacaagcacatggttcttgcttgacattgcattctacagccaaaat

SEQ ID NO: 20987 - DNA, 466 bp, Glycine max
  Clone ID: PAT_MRT3847_118957C.1
aaacttgaggggtatgaattacaaccctcaggcggcggattgggccttgaagaggcaaatggtgcactcgatgagtagagggattgattggctgtttttggtttcagatgattcggatttttcggagatgttgaggagggccagggaggcggatttggggaccgtggtggtcggggattgggatagggcgctcgggcgccacgctgatttgtgggtgccgtggagtggggtggagattggcgtgggagtaaggccttttctggacctagttgttgccgctgtaatgttttttccctctgagaacgaagactgcaaatgtgttctcatggtctggtgaaatcccttcacttgcatgtttagtgtttggagagccaggaaaaagagtttgagaacaaaacatgggaggctcatgtaactctggtgaagcgctataactttttatgccaaggagcaagccactttgcac

SEQ ID NO: 20988 - DNA, 249 bp, Glycine max
  Clone ID: PAT_MRT3847_118958C.1
acactgctctgtcaataacgcttgcgtttgcgttagctatatacccgagttagcgggcacattatcatgtgtcaagcagcttgattgcctaaaaaccttggcacaaaggctaacagtataaaagactcaatacctaaccctgtgacatggccagtgtttgtcattgccacccttgctccaattgtaacgagacaagctgttataacttcaacatactccatcattaaacagtgtcatgcgctttgtttc

SEQ ID NO: 20989 - DNA, 554 bp, Glycine max
  Clone ID: PAT_MRT3847_118959C.1
ttcctttttttttttttttttttttttttttttttttttttttttttttttggcaaaattactttttctccttattctgaaacaaaaaactgattacaaggacaaagggcttacaatccttgaaagaaaaattctcaaaacagggggcaaacggggggggggggaacggttccctcccccaaagggggaaaaccacccctttattcaaaagttaaacatcactttgctaaagaaactaagattgctaaaaaaacataatacatccaaggcagttttcatgaggattcaacgctgggggtggcaaagcccacatggagaattaaaagcccgggaaagttaaaccccagggcctatgatttaaaagggggagttttcttcacgccaaaatcgatcgacaatccttacaaagggccccggctctattatccattgagcacgttggccccgggggctatgaaagttttcttcaaattcctgggacctattaatgggggggaaaaccccaagctttgggaagctgcgcaccccagaagggccccccctcagggggggga

SEQ ID NO: 20990 - DNA, 222 bp, Glycine max
  Clone ID: PAT_MRT3847_11895C.1
ctcaatccttacatactcctttccatccttcccatattgtaccccatacccaataactaaacttatttttttatcctaatcccaaaactcacaaaatcaaacttcatcaaaatatacccccactttttacaaatatcaattttcattattccactcctacttctacatcatcaatatatactactctactatcctattacacaaacctcttatccttcattt

SEQ ID NO: 20991 - DNA, 389 bp, Glycine max
  Clone ID: PAT_MRT3847_118960C.1
gcgaaatggaacagggctcttcgctggatctgattgcctgtgaaatatgtgatactgatcatgccgctttgcagagtgtgcgctgcacataaaacgcttatccgacagcttgtccatgctgctgctcgtgctgtttaacaccatttccgctaacgactcaaggaatacaacaattctgatgactggaggacagatctacgagaagcatagaccgggaaacaatgtccgcagggaattggtgtgacatgggctctcaaatggtcaatgccatcatggatatggacaacacatgcccgctatgccaaagcggattagctgaacaaatgggacacacccccaggagcaggagcattaggagtacatcacacgctggatttgaatcatatcgg

SEQ ID NO: 20992 - DNA, 312 bp, Glycine max
  Clone ID: PAT_MRT3847_118961C.1
aaaaaaaccaaatcatggttttgcattctaacaggggccgccagcacctttcacaagttttaacaaaaaaacattttattttaataaatgaatgggggggcccggaaagggtgaatcaagccaaggctgggtgtttttccttttttcccccaaagcgaacaccataatacccggcgttccactgcacgaactttttgagaccaggggcgagatccggggggggtttgtaccccaagtcccttcaccccaagctcactttagcatgcgtgaaccgaaccttccctttttggggcattttgatcacgtgctttt

SEQ ID NO: 20993 - DNA, 347 bp, Glycine max
  Clone ID: PAT_MRT3847_118962C.1
gatgaaatatccatgaatcccatgtcaaatgggttctgcacatgttgagacctgcaggcactttcatcggaaatgtcctcaaaagcagtggcctccttctggaccgctgatgatgtagagctggcgcatgagcttagttcataggcaatactacactcttgggagctccgctccttttcaatggttgggccgatcggtaccaggtgggctggtatcatcagagcaggctgtgtcagcagtgtccctatctttctcaacatcacgctcgcaggaactgatgttgggtacccaggtggggtttggtttgatccacttagctggggaagtggctctcctgagacgatcac

SEQ ID NO: 20994 - DNA, 343 bp, Glycine max
  Clone ID: PAT_MRT3847_118963C.1
ataaaggggccaaaaccccaggccccaaccgcaaaactgtagctaaaccgagcatgatttaggtcccccaaagccaagacacgggccgggaggtaaaaaaaccgggaaggggaaaacccttgcataccccaaactaaaaacccttgtggcgggccccgtttcaccaaatgggggaaaaaaaaaaagggccccccagccacagcttacaaaaaggggacaccacggaagggccaatgggccccccccggcaggagggccaaaagcccacgcgccaaaagaggtaacccccaacaaaaccgggttggaagccacccccctgaaaaaaacaaaaaaaggggggggg

SEQ ID NO: 20995 - DNA, 492 bp, Glycine max
  Clone ID: PAT_MRT3847_118964C.1
ccctccaggggggggctcggtcattctttatcattcctctgggtgggtcgcggaatccctgacttgcttcctgctgcacctttcccagattcttgatcagcactgggtcgccccctccctgctgaacgtgatttattttttttttttccgcccttgctgtttttacggcgggcccctctgactgtgcatactgttggcctacgcgattcttcggactggctgatctccctgaccttccctgccacttccgcccacattaacttgctcatcttgcaacctttttacctcttgctttcgctaccctgaatgcgcaccgggccatcatcccagcttgtttttgccatctgtctgcccgcccccttgcgcctctttattccgccctagctgaccttggcagaataccccctcctctttcttgagcttgtaagcctctacttggtacgcctccccaacttcccaaattatcttcttcctcgaaacccgcttctaccc

SEQ ID NO: 20996 - DNA, 229 bp, Glycine max
  Clone ID: PAT_MRT3847_118965C.1
gttgtgagggaaaaaaaacaatttttttcgaaccggggggggggcccgggttataccccggtaatttcgggccggttctttggggggtcccttttttccttttgggggagttttttaagcgtgggggaaaatagggaaaagactgattctttgggaaaaaatgttatgctgataaaattccccaaaaaatacaggcgggaaaaaaatatgtttaatccgggggggccaa

SEQ ID NO: 20997 - DNA, 369 bp, Glycine max
  Clone ID: PAT_MRT3847_118966C.1
cttgagatttttttttttctaacgtgatttttttccgattgtatcatttgcctaaaaggggcgtgaactctgttatcgtctgaaacttggcattagtcaggggcgcgttaatccctgccgcgatcgacgactgacatagatgatggagagccccgactcgcacaggtgtctcagacctagtacatgtctacactacgcacgacctctacttcggagagtactgttccgtggcctactttctcctgccacgctggagcgagtagtacagcaacgtgagtaccctgttggccgatgtccccttcgagacagatgcagtctgctgactcttggagtccaccgtctgtgccctcagctgatgcgtggacgacc

SEQ ID NO: 20998 - DNA, 772 bp, Glycine max
  unsure (1)..(772): unsure at all n locations
  Clone ID: PAT_MRT3847_118967C.1
cgctcgcctgctttcggagattgagtgcgtgattcggtctcaggaactccctcccgctcgccgacagcagctcgtcaatattttgggacacgccggttcgtacgatctgccgaactatttgcaagctatcaccatcatcgtcagagagctcgcacccaagaagttcctcgcgatcgtcccttctattcgaaatcgcatggaatatattttacggcgatccttcgcggccagtttggactacgtccgggagaaagccgttattctcgacgagaagaaaggaacctatacgcactcctcccaaacggaccgtctgctcgccaaaatgcgccgccgattcgacgaattcttgacgcagacgtgcgacaccgccgatgaaggaatcaggtcgtatatcgcgtcaactttccaggtcgtgtcattcagagatggtatgcggcttctacctctgcccgaagagtatctatctaagttcctgagggacgagctcgacgtcggcgacatcgaagagagggtgcgcaccgaattggccgacaaagacgagttcaaacatgttcttccgaccgccgaccccgctcatttagagtttttgatggcgccgctcgacaacacccgcgaactgaccgagaaaaccgtgctgttcttccgattatgggccggatacctcttcgccgccatccgcgagcattntgccaactcagtccgcgtcctcctttaccaacacttcctaaatcctatattggaaggatctggcgaagaatctactcgacattgc

SEQ ID NO: 20999 - DNA, 370 bp, Glycine max
  Clone ID: PAT_MRT3847_118968C.1
gcagactgagctacacccacgaacctgaggctgcacatagactaactacatagcaatagtcaagatttgtgttaggctgtaagacaaatcttgattgtgaattgtgttacagtcctgctaaattccaggaaggaggagctaaatagttttgtcaggtatgactgatcttttaattaacttattgattgaatgactggttttactttgggttcaggactcaatcaacaaattcaattgtacaagaagtgaaactttatttttctgtaaccacttaactattttgagcctatcttcagtgttagaacctaatttccctcagtctgcaatccatatgactagtagatcctctagagtcgacctgcaggcatgc

SEQ ID NO: 21000 - DNA, 159 bp, Glycine max
  unsure (1)..(159): unsure at all n locations
  Clone ID: PAT_MRT3847_118969C.1
cttaaactctgaaacctttggttnatcctctgnttccnccggcgacgnctncttctccacggcgaaggttgcggnncctttcanctggagnaganactggtttcccnnnaacctttcaggttnattagnnaaaantctcttggaaanaaaatttgaaag

SEQ ID NO: 21001 - DNA, 258 bp, Glycine max
  Clone ID: PAT_MRT3847_11896C.1
gctgctttttctttctcatattttccttcattcccagtttccacacctttcccacaattcactatttctctcgccatgccatctcgacaactgcccacgtctgcaccacctcccaaccaccgcgtctcaacccctctcttcgctttcaccgcctccgtctgctctttattctttctagccctcctctgcctccggaagcgtcaaccgaacaactccatcctcgaacccccctcaaccgttcccctaccccgtcctccg

SEQ ID NO: 21002 - DNA, 383 bp, Glycine max
  unsure (1)..(383): unsure at all n locations
  Clone ID: PAT_MRT3847_118970C.1
gcacgaggcttcttttggtattacaaattggtgtaaatatcagtaattattttctagttccttgaatcattcatattcctaggaaatagtggattcttgtaaataggatatatcatgcatgtacatgggaagtagcatttttattatcttgtaatcataaaattcctctaaaattctcaaataatcttttcaagtattttaattgttgcctttatactgttttgttgccttttgtaattttactttttgttttgctttcaaaaacaatttcattggtatattttatatttttctttattaatcattgcaatgtttaaccattggagccaaanaaaaaaaaaaaaaaaaaaaaaaaaaaaaaaaaaaaaaaaaaaaaaaaaaaa

SEQ ID NO: 21003 - DNA, 148 bp, Glycine max
  Clone ID: PAT_MRT3847_118971C.1
tatctcggaattagctcgagctttgttcctaaacacggagctctggtttcgaaccctttgtttgtgtaggtcttcttcacctttcgaattttggtatccatgggtcagggagcgggggtcgttattaacctgctgggctaccggaagc

SEQ ID NO: 21004 - DNA, 584 bp, Glycine max
  Clone ID: PAT_MRT3847_118972C.1
caacaggatgggattcaaggcgccattttacactgcaagagatccttcaatgcatccagacctgagtgtgagtcttctcagctgccgcgttctgtgagccatccatgggacgagataggcatcaatgaagccaaagacaagcgcctttcagcatagaaaagcttccttccggcggtgtcagtgtgtaaaaaggaaaatttatgttattactattagactatattttacactccaatgaagtgaaaaagaagatgataaaaatagtaaaaagtagagtcgtgggccagcatgatttgttcagttcagatgagtgaatgaagctcgtcatccattcagcttagtgactctttttttttctttttcttccttggtagtgtaaactgtaaagctctttccgataaagccaaagaagaatcagagcttttccgtgcttgtttctcctggacgtatctctctgtatctatatgtaatgtagtagctactagccaggctagatcaaataccaccctaaatctaatccttgtgtacaaagtgctttgctttggttggtacttagatcaaataccattgacttgattcattaa

SEQ ID NO: 21005 - DNA, 144 bp, Glycine max
  Clone ID: PAT_MRT3847_118973C.1
atgacgttgtgtggccgagtcatgtcgcagctcgaggcttttgcgaaccgcgctgagatagttcacgttgatgttgattcggcaccgattggagagaacaagcacgtcggatgtctcgcgctgcgctgattatgaaagctcgcg

SEQ ID NO: 21006 - DNA, 569 bp, Glycine max
  Clone ID: PAT_MRT3847_118974C.1
cttcagcctcaacctcaacccacttaccagtttttccaaattttcattctttttccctttccatgagttgatgcatctttttcaagctaattaagcttgaattagctggtggggttttttaaattcgtcgataaaaaattacagtcgttctgctattttttttttcttcttcttgtgtttttgcttgcagattcaggaactggtgtgtgagatggtttttgttgacttaaagaaccacttccttatttaaatggcagtaagtgattacttaaatccctgaaagacatgcagtcagccttgtttctgctgaaatgaagaacttgcagagctcggaagaattacagtcgtcgactcaagcttctcatgagcccaagagtgaacaaccaaacaatcacacaactgatgctcctgttacagacacaggatcagcatctgctacaagtaatgacagcaaaaaagtttcacggcaggatattgaatttgtccagaatttaatagaaagatgcctacagttatatatgaataaagatgaagtggttaaaacattactgactcgggcaaagatagat

SEQ ID NO: 21007 - DNA, 545 bp, Glycine max
  Clone ID: PAT_MRT3847_118975C.1
cttctttccttcaacttcaacctcaacctcaacctcaacccccacttaccagttttcccaaattttcgttcttttttcctttccatgagttgatgcatctttttcaagctaattaagcttgaattagctggtggggctttttaaattcgtcgataaaaaaacagtgttctgctttttttctcttgtgttttttggttgcagattcaggaactggtgtgtgaggagttgtttgcttgatgaatctgtgtgccgcttccacttcagttctcaatttcttatcgacaatcgagatctgatttcttcaacttggggtgtcattgacataaatgcaaacaatcttgaatttgaaggcagtaagtgattacttaaatccctgaaagacatgcagtcagccttcgttctgctgaaatgaagaacttgcagacctcggaggaattacagtcatcgactcaagcttctcatgagcccaagagtgaacaaccaaacaatcacacaactgatgctcctgttacagacacaggctcagcatctgctacaagtaatga

SEQ ID NO: 21008 - DNA, 175 bp, Glycine max
  Clone ID: PAT_MRT3847_118976C.1
gtagttttttttttgttaatttgaattttattttactcaattcgactaatcaaacccatgactgaaaaggaaggtgttacccataatacaattgaccccgaaataatgttaagacttgagagtaatcaaacaagctcaaaaaagagtctactttttttaccagggagttgggaag

SEQ ID NO: 21009 - DNA, 778 bp, Glycine max
  Clone ID: PAT_MRT3847_118977C.1
ggctcgagccatcttgcaggtgtgtctttcattgtatgttctactgctgggtaattggaaggctaaccaggagctgcttcattcctcaattattcttcaaactttctaagaattcatattcttcagtgttctctagtgtcatcaccaaaatcagggaatgctgaaagatgtgcttgatagttaagaattccttcactgaggctaatgagtccgtgcctccatctgagctagccttgttcaaccttgatgacattggatgtttagtccactgcccatatctattttgtgctcgagcgactgaggtgcccagaaatctcagccattgtacaatttccaaacatgatgtttgtgaagacggttgagctttgaatttcttgagtggcagtttcctgcttctggtcgcgtgattgcctgtactgcattggttttcacaaaaacgtgtttctagaaatggagcaaaaaggaggtgtgcttatgcaacgatatgaactggggagattattaggccaaggaacctttgcgaaggtttaccatgctagaaacatcataactggcatgagtgtggccattaagattattgataaggagaagattctgaaagttgggatgattgatcagattaagcgtgaaatttcagtgatgaggctaatcaggcatccacatgtgggttgagctttatgaggtaatggccagcaaaccaaatttactttgtcatggagtatgtaaaaggcggtgagctctttcacaagtgtccaaaggaagctcaagcggatgatgc

SEQ ID NO: 21010 - DNA, 712 bp, Glycine max
  Clone ID: PAT_MRT3847_118978C.1
cttctgcctctcgtggacgcgtgggctcattgttactcagacttgttgggtccctaatggcaatatcattctccaccgttttcaaaatatgtccttaaaccccaaatgctattattgttcactctccacacttcttcattccttcaacttcagcctcaacctcaacccacttaccagtttttccaaattttcattctttttccctttccatgagttgatgcatctttttcaagctaattaagcttgaattagctggtggggttttttaaattcgtcgataaaaattacagtgttctgctattttttttttcttcttcttgtgtttttgtttgcagattcaggaactggtgtgtgagatttcttcaactcggggtttcattgacataaatgcaaacaatcttgaattcgaaggcagtaagtgattacttaaatccctgaaagacatgcagtcagccttgtttctgctgaaatgaagaacttgcagagctcggaagaattacagtcgtcgactcaagcttctcatgagcccaagagtgaacaaccaaacaatcacacaactgatgctcctgttacagacacaggatcagcatctgctacaagtaatgacagcaaaaaagtttcacggcaggatattgaatttgtccagaatttaatagaaagatgcctacagttatatatgaataaagatgaagtgttaaaacattactgactc

SEQ ID NO: 21011 - DNA, 1520 bp, Glycine max
  unsure (1)..(1520): unsure at all n locations
  Clone ID: PAT_MRT3847_118979C.1
actattattcactgtgcacacttatttccttcaacttcaacctcaacctcaacctcaacccccacttaccagttttcccaaattttcgttcttttttcctttccatgagttgatgcatctttttcaagctaattaagcttgaattagctggtggggctttttaaattcgtcgataaaaaaacagtgttctgctttttttctcttgtgttttttggttgcagattcaggaactggtgtgtgagatttcttcaacttggggtgtcattgacataaatgcaaacaatcttgaatttgaaggcagtaagtgattacttaaatccctgaaagacatgcagtcagccttcgttctgctgaaatgaagaacttgcagacctcggaggaattacagtcatcgactcaagcttctcatgagcccaagagtgaacaaccaaacaatcacacaactgatgctcctgttacagacacaggctcagcatctgctacaagtaatgacagcaaaaaaagtttcacggcaggatattgagtttgttcagaatttaatagaaagatgcctacagttatatatgaataaagatgaagtggttaaaacactactgactcgggcaaagatagatcctggattcacaactcttgtatggcagaagttggaagaagagaacgctgatttcttcagggcctactatatcaggctaaaattgaaaaagcaaatactattattcaatcatttacttgagcatcattattattctcatgaagtgttcaatgcctggaaaggttccattggctccaatacagaatggaatccatccaatgcctgtgcagtcaacaacctacctatggggtatccagtgctacagcagcctcccatgccagcaacaggtcaacctcatattgactccatgggttgtggtttatcaagttgtcatgtagttaatggagtccctgcctcaggcaactttcaccccattcggatgaattctggaaatgatatgatgatggaccacagcgctcctgatatggttcctgttataccaccaaatggtacaatgtcatctgtctcagaaatgcctgtgagtccgacatcagtagcatccagtggtcattttcccttcactgcatcagaaataccaggaatgggcgcagatacatcagctcttgatacagcatttacatctgatgtggcaagttcagtaggactacagcttgcagcagatggtggcaatggaatttctagatcgctggatcaaattcaatggaattttagcctatctgatctaacggcagatttgccaaacttgggaggtgatttcttatttgactctctgattcacttttatatatgcagttaaagttagtcagatgtcatcagggagtgaagttgtttgagatgtacaacatatgttgagtttgtgatctgttatgtcattcatgtgcccaaagtaatcttgatatttgagaagaaaaagatgaattagtgagaatatgttcttgataaaatgaagcangaagcattaactatc

SEQ ID NO: 21012 - DNA, 429 bp, Glycine max
  Clone ID: PAT_MRT3847_11897C.1
ctcgagccgctcgagccgctcgagccgctctgtatctgctttgatattgtgcaggatgttcataaatagactcagagctaggttgttgtcatcatctgcagcagcaggaggtggacatcataaccatacaggaggagcaacattgtttggtgaagcaccattagcaaaaggacaaaagagacaatggcaaggatgggagatgcctatttacataggatatgcagctggcgtcattgcatttgtttccttgttatatgcaccaaatactaacctcactgattgggccagagatgaatcatttgcaagaaatcaaagaattaaagaaggaaaagaaattaaaacaggtgtaaattactctcagcatcattacttacactcaagttggaagagaactgttggagatagaaaattttgtgctacagaagatga

SEQ ID NO: 21013 - DNA, 1945 bp, Glycine max
  Clone ID: PAT_MRT3847_118980C.1
caacctttacccacttaccagtttttccaaattttcattctttttccctttccatgagttgatgcatctttttcaagctaattaagcttgaattagctggtggggttttttaaattcgtcgataaaaattacagtgttctgctattttttttttcttcttcttgtgtttttgtttgcagattcaggaactggtgtgtgaggagttgtttgcttgatgaatccttgtgctgcttccccttcaattcttaatttcttatcggcaatcgagatctgatggtttttgttgacttaaagaaccacttccttatttaaatggcagtaagtgattacttaaatccctgaaagacatgcagtcagccttgtttctgctgaaatgaagaacttgcagagctcggaagaattacagtcgtcgactcaagcttctcatgagcccaagagtgaacaaccaaacaatcacacaactgatgctcctgttacagacacaggatcagcatctgctacaagtaatgacagcaaaaaagtttcacggcaggatattgaatttgtccagaatttaatagaaagatgcctacagttatatatgaataaagatgaagtggttaaaacattactgactcgggcaaagatagatcctggattcacaactcttgtatggcagaagttggaagaagagaatgccgattttttcagggcctactatatcagactaaaattgaaaaagcaaatactattattcaatcatttacttgagcatcagtatcatctgatgaagtgtccaatgcctgcaaaggttccattggctccaatacagaatggaatccatccaatgcctgtgcagccaacaacctacctatgggatatccagtgctacagcagcctcccatgccagcaacaggtcaacctcatattgactccatgggttgtggtatatcaagttgtcatgtagttaacggagtccctgccccaggaaactttcaccccattcggatgaattctgggaatgatatggtggtggaccacagtgctcctgatatggctcctgttattccaccaaatggtacaatgtcgtctgtctcagaaatgccagtaagtccgacatcagtagcatccagtggtcatttcgccttcagtgcctcagaaatatcaggaatgggcgcagacgcatcagctcttgatacagcatttacatctgatgtggtaagttcagtaggactacagcttgcaccagatggtggaaatggaatttccagatcgctggatcaaattcagtggaattttagcttatctgatctaacggctgatttgccaaacttgggagatctaggagctctgggaaactatcctggttcaccatttttgccatctgattcagacattttgctagaatctcctgatcaacaggatatagtggatgacttctttgttaattctgagcccccatgctctcaatcggatgaggagaaatcttgaggtgaggcgagttgcatgtttcacattaattgttaggttagggaaaaattaggattaataaatgtcatctagcttacatggcatacaggtttactgttacctaagtgtaggcagcagcctgatttaatatcatcaggatgaagatagagaatgtcaattgttccctgtagtagcaaactagcaatcttttgcattcttttaagaaaactattatcaggatgagttgggacattgtttaggatgtaattgatttgatgcatttggattatatatatattgtttggatccttgtcagtccaaaggttggtttcacattgtttcaaagcattatattattttcttgatgctccaatggtgtcaaattaatcagttcatctaataacagcatggttcaatgtccttttcagcttttacttcaattagaaatgagtatagtggttgatcatatactattgttgaagcacaaatcactgct

SEQ ID NO: 21014 - DNA, 267 bp, Glycine max
  Clone ID: PAT_MRT3847_118981C.1
ggctcgaggtgtgactttgacctctttacctgtgccaccggaccatgaatcaccacgtggacatgaactttatggtatgagctccttccttctaccattgcacaaagaggagctttaaaacggaaggatcttctgggaagaccacatgctacagcgacttgaaatggaagacgcctggcacatacaaaaggcccctcaccaatatgtggagacgttaggttctcagataaggaaacaaaagccagggctacactgaagggcaacccc

SEQ ID NO: 21015 - DNA, 149 bp, Glycine max
  Clone ID: PAT_MRT3847_118982C.1
ccgacgcgttcgattagactttagttcaaaaatttaagtccaatcgttgtgtattgctctggctctcataagcgagaatcttacacacttactcctactccgactttgctatctaaactttctgaaccaatggaaagacctattgtgct

SEQ ID NO: 21016 - DNA, 363 bp, Glycine max
  Clone ID: PAT_MRT3847_118983C.1
cacgcacggttcgtagctgagcgaacaacggaataattaccggctcaataagcggcggccgcccttttttttttttttttttttttttttttttttttttttttttttttttttttttttttttttttttttttttttgtgtaatttgttttttatttctatctattattgaaagaataacaaaaaatagggggtgccccccaattacatagaaaagtggcaaacggaaaacacacatgctccaagaatatgtcccgagagcaccaccgaaaaaagaaggaggaggtaaaacacaacacaaatacccaataaaagatgggcagtactactaggctgaaccgaaggtaagacaacccgaggggg

SEQ ID NO: 21017 - DNA, 480 bp, Glycine max
  Clone ID: PAT_MRT3847_118984C.1
ctgaaaataaaacctcatttttacattttaatgtatggaccccatcgggtccttatcccaacccggcaaagaatttcttactttttccaaaaaacccgatttaataaagctcccggaaccacgggatttaaacgaaccaagaagtccccagacttaactccgattacaaaaacggttgtgtaaagggaaaaatttttattaattgtttttctccagccttttaatttaaatgtgggtgacaagggtggggcccttacacatgcttaatcatatcagtcattgtttctgggggggacttaaaaaattttctcttttcatccgattaagaaaaaaagtcaggggcctggagcacttccctgcacataatggagtttttacgaagaagcttttagctggcgaaccaaaaggggggagcaccctttttgaaaaataaggccccgccaaatactcacaaaatttatgtttttgcccaaaaatttt

SEQ ID NO: 21018 - DNA, 986 bp, Glycine max
  Clone ID: PAT_MRT3847_118985C.1
gattcggctcgagttgagttgctgattgatggttcctactttggggttcatatatgtttcaagttcttgtgcagaaacctttgtcactgcactcaaaatctgcactagctaggtggaacagaaatggcagaggattggaaccgcacggctcttcttgtgatcgatatgcagaaagattttatagaagattggagtcctgtggcactaaaaggagggaaagacattgtcccaaatgtgattaaggccgtggaagttgccaggcagcgtggcattctcatagtttgggtagtacgcgaaaatgatcccttaggaagagatgttgagctctttcgtcggcatcattatacagcagggaaagttggaccagccaataaaggaagcgaaggtgcagaattagttgatggattagtaattaaagaaggggattataaacttgtgaagaccaggtttagtgcattctttgctacacaccttcattctgtccttcaaggagcaggaattaataatctggtggtcactggtgttcaaactccaaactgtatcaggcaaactgtctttgatgctgtatcattggactatcaacctgtgactgttattgttgatgctacagcagcagctacacctgatgttcatcaagccaatatgtttgacatgaaaaacattggagttgcaactccaacattacaagaatggagcgaatccaaagcttaatctgtggaccatgcaacttttaatttgtacctcgggatgttcgatttcaaaggtgttggttgatgtttttggcatgttaaattgtaacgtgaagtgaacgtatatgtaatactgcattacctggtattgttgttagctgctctgtaaaatgaatttcgttaatgatttttaagaaattttagtcaataataaagtgtattgtctgtattcttcaatttgaaaatgaagtgaaactcttttacttcaggtagcacatacatacaacaatacaaggc

SEQ ID NO: 21019 - DNA, 1665 bp, Glycine max
  Clone ID: PAT_MRT3847_118986C.1
gtgtctaactctcccgctccgtccatctatccgttaaccctactctctctcttctctctctctcttccgcagctctttcccgttgaacacacacaggcacaagaaaacccaccaaattctctcgttccgaataatcaagaaaattttgaaaaaaaaaagagaaaactttattcacacacattcattcatttatcataatggggaagcttctctgtgactcaacctccgtcgccgaaccattccaaggttcgccgccggccgcgcttccgtggcgggaacccaaaccagaacctataggaaccgtagatctcgtcgttccggccaacgtcggtggcgcgccgttcgccggcggtgggtgggaagacgtcgtcggtttggaggagcagcagcggcgccacctccagaggctccacgcgaagggagtgctctggaagccaccgccggaggaggaggattcgtcgtctccgctgtcgtcctccgccctcagatctgttgtcttccggctctctcacggcggcgaggtctccgccgacggaaactgcctgttcacggcgtcgcggaaggcaatgggcggcgaggacgttgacgcgcgcgagctgcggcggcggacggtggcgcggttcttggaggatctcggatctgtgagttttgaggagagagaagcgatcgacaacgcgattcggcacatgtactcgccggatctgaagaacggttgggggattcatgtcgttcaggaggtgaaattgttggcgaagaaggaggatcgattcgctcttgattcggctatcgaagagcttgttcacctcggcatgcaaagagaaatggcggcggagtctatttacaaagagagatgtgttcctgtgaatgatggtccaagttgggccaaatacatgttgatctctggttctcctgatgatgaatatgatatcatcactttgcaatatactgaggagggtttattatctgtagatgagaatagagagggtcgtgctgcagctttcggtgatgatattgcaattgaatgccttgctacagagttcaagagagagatatatgtggtgcaagcacatggttcagatgccatggtcgatgaagaaaattgtgttttcttccttccacatcgtccaaggagccgaattaatgaacctccttttttccttttcatgaaaggaacaggttggtgcggtgctggagctgaccactatgagcccctgattgctcatccttccgcgtttggttcccaagaaaaggttgctgtggtactgtgaggtttccccggcctgcaattttgtggagtagaaattgagtagaattagaaattttattcgccctattttatgggcccctcattgtggttcttctccgtcccaggggagaaacctcatcgggtagcatttgttttgactcttttgacattgccattgcctgcagtttgagcaaccctagagtattattattgtattagtttccccggcttctgttttcttgagttaattagagggtagtgtgttgttcaaattggaagagttgagttgtatctcagtggatttcatcccattaatgaagtggcttcatcttttttaggccgaaaataagataaagccacatcattaatatgtgatgcaactcaactctgccaattagagggtagtgtgttgttcaaat

SEQ ID NO: 21020 - DNA, 226 bp, Glycine max
  Clone ID: PAT_MRT3847_118987C.1
gtaaattggaattacccaaggacaccactggctgacctcaaaagttaagacggataagacaaaaaaatcctatagtcgagaaaaaaagcccaaacgtaaaaagcccctacggcttatggtgagtatgtaatgccgcccagaaaaaaatatagagtactaaaatacaggactgctattaaagctgaagattaaggaaacgggtggaatcaatccttcaggaaggggg

SEQ ID NO: 21021 - DNA, 157 bp, Glycine max
  Clone ID: PAT_MRT3847_118988C.1
ggctctacctatgatgacagatcaggggccaatgaggtaaggcttgctgaaaaaaagggcgaagcagatgtacatgcttgatggtacagctctcaacattattatgcgagacactgaccaataccgtaactagacaacctggacccatatcagactc

SEQ ID NO: 21022 - DNA, 754 bp, Glycine max
  Clone ID: PAT_MRT3847_118989C.1
aagaaaatcaacattttttttctatcaattcacacgacaaaatttagcagagttcaaaacaccaaccaagtaaagtaaagaagggaagatgtcactgataccaagtttcttcggtggtcgaaggagcaatgttttcgaccctttctcgctcgacgtatgggaccccttcaaggatttgtctttcccttctgctgaagattcagctttcttgaaaacacgagtggattggaaggagaccccagaagcgcacgtgttcaaggctgatattccggggctgaagaaggagcaagtgaaagtggagattgaagatgacaaggttcttcagataagcggagagaggagtgttgagaaagaagacaagaacgataagtggcaccgcgtggaccgtagcagtggtaagttcttgaggaagttcagattgccagaaaacgctaaagtcgatcaagttaaggcttctattgaaaatggggttctcactgtcaccgttccaaaggaagaggtcaaaaaacctgatgttaaggccgtgcaaatctctggttaaaagtccaatatatagaaaatactgtgttttgcttcttgtgagttataaggaagatcttacaatgtaaactgtacctgttgaaataagcgtcagttgttcttgttgagtggcattcatgtgtgtttaagtgtcttaactaaatgtgatgtagacaaaaaggaaagagattagtaatgtgaattcccattggtttactgcatctgttctcgcttt

SEQ ID NO: 21023 - DNA, 1514 bp, Glycine max
  unsure (1)..(1514): unsure at all n locations
  Clone ID: PAT_MRT3847_11898C.1
aaatgcgtggcagaacaacaacagtgtcaaatgaacaataacataaacgcccgttccgtttcccgacttggattctatcagactcagcgtcgactcggttgactcgtttctatcgcagcaacacacaccaccatcatatcataccaccgaagaaatctcttattattatttttctcggcgcagcggcgatggcatcatcggagcaggagaagcgagtggaggacgagttgtcgtaccctattatggtggcggagcgagttcgctcggcggtggacgagtccgactcgttcaaactcgagtgctccgaggttgggaagcacgtcgatcgcatcctccaaatgctccgaaccctcgttcgcttcgccaccgccaccgccacctccgccgccacgccgcccctctacgatcgtcccatccgccgcgtcgccgcggagacggcgaaaaacctcgagcgcgccctcgccctcgtcagcaagtgcaagcgccgcagcatcctccgccgtgtcgtctccatcgtcggcgccgccgatttcctgaaggtcctcacccacctggacgcctccggcggcgacatgaagtggctcctcagcatcctggacggcggcggcggcattgtcgtctccctccctccgatcgccagtaacgaccctattctctcttgggtatggtctttcatcgcttccattcaaatgggtcagttaaacgatagaattgaggctgcaaatgaacttgcttcttttgcacaagacaatgctaggaataaaaagatcatagttgaggaatgtggggtgcctcctttgttgaagcttttaaaggaaggcacttcccctcttgctcaaattgctgctgctactactttgtgtcatttggctaatgatttggatagggttagagtcattgtgagtgagcatggtgtgcctgctgttgtgcaggttcttagtgactcccccatgagggttcagaccctggctgccaatttggttgccaggatggccaagcatgaccctgtcgcgcaggaggatttcgcgagggagaacgccattaggccgcttgtcacgctcttgtcgtttgatacctttgtggatgatccattggggcatttggggaagcagagtattcactctattgttcagattaataaggaattggggaagggtggccggggagggcaccagttctccagttcctactcgagttcgtatttgtttacggagtggagtagccggggagtgaaccataggaaggagagggagaatgaggatcctgtggtgaagcttcagctgaaggttagttgcgctgaggcgttgtggatgcttgtgcaagggagcgtgaccaacagtaggaagataactgagaccaaagggatgctttgcttggctaagattgttgagatggagcaaggggagctgcagcttaattgcttgatgacgatgatggagataaccgctgctgctgaatacatgctgatcttcgccgtgcagcatttaagaccaactcccncgctgctaaatctg

SEQ ID NO: 21024 - DNA, 559 bp, Glycine max
  unsure (1)..(559): unsure at all n locations
  Clone ID: PAT_MRT3847_118990C.1
acaagatggttgcattgcagagattgttagaaccatatggcatttgtgaggtatgttttataagttttctttcacttaccatagtagatattttgctgagacagttgacttgtttaaattccttattccataaatctccggaaccgaatttggtgcatttgcttcctcaaatgtatctcctgattctgtccaagattgtttactcaattgctattattttgttctgaggttttcctttgtttcacgggtcagaatattcataccagaggaaagaagtcagttttgatggtcttggctagatggccttgttttcttttgatgctctgtagaggatgagccccctacacacgcagttagcatgtcattcttacacgttgatgttcattttttatcatctataaagcacaccagtagtagcctgatgttcattttttatcatctacaaagcacaccagtagccattattttaaaaaccaaattagggagcataacagtcaaaggagagggttaagaattgcttttcaccagaattngagtatatgatttattaaatataaaa

SEQ ID NO: 21025 - DNA, 520 bp, Glycine max
  Clone ID: PAT_MRT3847_118991C.1
tattgccaagcgcgtgcaaatttatgtgtcatgatgctgtcgtaccttcattctcgtgggatatcaggaatttaaccggctgtacttgatatcgctcggcaagattttgcactggcaaatctgatttctcacgcgaatcttgcagtttgaggttcttgagtggttgactgaatatcgtgcaatcacatctaagccatgggacgaataagcatgaatgagcaaatcaagtgacgtcttcaagcggacaattaatgacgttctggtcgatagatgggtacattgtgagcaggacgttgacatctaattgattcagtattaggagatagcgatttgagcacctaacttggcttgccgaaaagtcatcatgtgctccttcagatgtgcttggacaccgcagtgagtgcgatcgaagcagcacgcatgtccaatcgtcgaaaactgcagtgctacaagcttttggtccaatcacgtcaagtttacgatccacaacagcaaaatcattcgttctcgacagcgcacg

SEQ ID NO: 21026 - DNA, 329 bp, Glycine max
  Clone ID: PAT_MRT3847_118992C.1
atactctcaaaacttcaaaactatgtagtacgtattatgctgcactcttgcgggccagctctattctaacgcccttactatcacatggtaatttcttgctactgtgcccgctcatgtgttctgtacttcctataggtgtgataccgtcatggaagcctcaagctcatacatatatacctatataagtatgctataatatgtctattatgattacatacagcttagtgaatctgacattatctcatattgctaactagtcttctgccacaggagatgatgacacagaatcaagatgttctagtaacaacaatgaaggatccctgtctggc

SEQ ID NO: 21027 - DNA, 606 bp, Glycine max
  unsure (1)..(606): unsure at all n locations
  Clone ID: PAT_MRT3847_118993C.1
agctggtatccatgttnnnataactaacttgtaggggccattgcaagactatcatattatgttagaacaaaatacaaaaaacatacgagtttttgtaacgcctaaaaggttaaacaaagcctaagttgaactctttctagactaataaagggttatataagacttagaaataagcccatcatcaatattttttccagaaaagtccaccagaagccatcagtagcacagctagaaaatcccttagaggctatgaaatggaaagtctcattcatatccccattgatcagctcagtttttgaatcagattctaacaaattgacctctttctggcatggctttaccccaaatggaacatggcttgatgacattagtccaatttggtagcaaaggtttgggttgttccaagcaccaaaacgccttcccatttttccaaaaaagtctttagagaagctaagctctcctgtgagattnnttccactaagnnaaagtgcattgagacaagnnagagtttccagctttggtgacgggttccctgngannnnnnnnncactaagtcccaaaaatctcaacctctttaattctgataaagactcannnatttcccct

SEQ ID NO: 21028 - DNA, 330 bp, Glycine max
  Clone ID: PAT_MRT3847_118994C.1
gtatgcatcaacagctctgcagtatcttcttgggaaccaatcagaaacatgtctgtggtttcctctgcacaggagttgcagctacgagacactgttttcagggaccttgcaggatgtgttcccggctacttgcagtggagaaacagtcatgtttaatgttacctccagttcatcgaccttattggtagttttccttttcgaaaactttgttgcacatatcctcaaacgatgagaattctgatactactcatgcttagcatattgaccggctctctgaggaatcatagttgcatctaccagtgactcactgtatacccaagtgcccaattc

SEQ ID NO: 21029 - DNA, 235 bp, Glycine max
  unsure (1)..(235): unsure at all n locations
  Clone ID: PAT_MRT3847_118995C.1
ctaatttatttcaagataatttgtaataaaaaaatagttgataatttataactaatttgtagctaattatttttnaatatatttnnnttgtagtaaggactaanagataattaanataaaanttttagaaactnaaaanattactttcaaactatagggactaanagattattaanatacaaactataaaggctaaaanaaccactnttnaactagggactaanagagattanca

SEQ ID NO: 21030 - DNA, 387 bp, Glycine max
  Clone ID: PAT_MRT3847_118996C.1
agtggaaggtcatttcgaacggttattccttatcagcaaagaacagaggggactttggtattttcaggtaccttaacttctaccaacgttaacgggccaattaaccagaatctaaaggcctgacctttatttaccttagttttccagaaggaaccgggccgggccttttctgggggctggtccagggaccgaagggacaagttcaatctggtaaaactttttttggcttttcttattcattggccttttctttaaccttttttttttttttccacccaaaaggccgggaacttggaaaatttttatttttggaatttaattgggaattccagggcccttttcttaagccacccttaaggagccttcctccttggttgaaccttggct

SEQ ID NO: 21031 - DNA, 293 bp, Glycine max
  Clone ID: PAT_MRT3847_118997C.1
gatttaatacttgaactgagtatctcctttttgtcttcagcaaattaaaagactgataattcatgtgtttgggttgttcattttccagaacctatgtaagaaacttgatgtgacatcttagcaaagggctgagttgttcttgtggtacccctggtaaattccagtagtgtaaatacctgactttgaaaagagatatgatatttataggccatctatggcatcttagcaaaaagctgagttgttcttgtggtacccctggcacctttgttataatatatctttttccgccaacc

SEQ ID NO: 21032 - DNA, 260 bp, Glycine max
  Clone ID: PAT_MRT3847_118998C.1
gatccaggcgttcggtcagtctaatgagataaaagacatattgacttgataggacagtgcaacctgtcttgccatgatacaccatgaggatgcctcgtatagagagctttacatggctatagtcctggatacacctatgatggaggaaccgatactcttggtgatcaatgatcagacctgagatagaataagatggtgtcaagaactagctgatctcttgtgaggaagaccgcattacctgccttttgagtccagggact

SEQ ID NO: 21033 - DNA, 900 bp, Glycine max
  Clone ID: PAT_MRT3847_118999C.1
tcctctcgtccgcccacgcgtacgtacaggtgggggttgacgacagaatggggctctttgttttgttaaatattattcttaaaatcattctaacctgcaaccagctccagccacacaatccattcattcagtgagcgagaaagtgagaagatgctggcaccaattttcattttcatataaaagaagaatcatcatctgtatagattactagttatttactaaacagacaaatgggtttcagagtattaggagtttctcttcttatcttcatctatctcattaatcttgctcctgcatatcctcttcaaaacaaattgttttcagaatttgtgcagaatagcaagtacgaagataagggaatatatgaaagtaagatagaaggaggtgctggtcatggaggcagttcacatggaaatggaaattcaagatcacctgaaacacgaggaggaggtgcagcagttatacccgtttatgcagcaggtgctgcaaacaaaaatcaccaacatcagacccgtcatggtgctgcaaactgcaaccttaataaaatcagattttccaacatgcttatgatcatcttggtctatcctctcatactgtcatttttgttgatgtagaaagcacaaaaaatcagttcattgtatattatgtaacaactgttacaggtttctttcgagtaaaaactgttacaggtctttcgagaaatagtgctgtcatggtctactgatgtattttgtttaggttaaatttgtgacactttgcagaatgtatcaaatgctgatgaataaaacttgtttcgaatggcaaaaaaaaaaaaaaaaaaacgagactagttctctctctcaaaaaaaaaaaaaaaaaaaaaaaaaaaaaaaaaaaaaaaaaaaaaaaaaaaaaaaaaaa

SEQ ID NO: 21034 - DNA, 1002 bp, Glycine max
  Clone ID: PAT_MRT3847_11899C.1
cgattctctaccagagttgcaatattttttcttaagttccaacgtctccccttccacgccgcttcctggctcttcgtctcactccgccgcctcgtaggttcctgtcgcaatcgcttaaggcataatattagtgcacatggggagacactcttgctgctacaagcagaagcttcgtaaaggcctctggtctggctcgagagacgagaagcttttgaattacatcaccaaacatggccatggatgttggagctccgttccaaaactagctggtcttcagaggtgtggcaagagctgcagattaaggtggataaattatctcaggcctgatttgaagagaggagcattctcacagcaagaagagaattccattgttgaacttcatgcagtccttggcaacaggtggtcacagattgcagctcagttaccaggaagaactgataatgagataaagaatctatggaattcctgtctgaagaagaagcttaggcaaagaggcattgacccaaacacacaccaacccctctctgagattgagaatgacaaggacaagcctctcacagctgacaaaagcaaccagaaagcctccaatgaagtgatgagtcattcggagccaccaaaaccaaagccaatagctactactgcaactacttctatgcctatggatagacatccccttgaagtttcttccacctccaagatcagcagtggcaacaacaacagcaccctatacaggtttgacagctccatcactgttctgatatgatgggaatgggatattttcctttccagcacctcaactatggaccaaacatgggactcactactactcccaacaacaccccactttgcttcataccaagttccacttcttctcaaatgatgtcagagctgaattccaccatgttccattctatggttccaacacatgtaaaacccactggtagtcttcactctaacaacaacaacaaccctttttcaatatcctctgatggtggtcaaaac

SEQ ID NO: 21035 - DNA, 325 bp, Glycine max
  Clone ID: PAT_MRT3847_1189C.1
ctctcctatctctcctcccccatccaagaatgaaagctgaagcgattgaagaaagcaaatagggttcccgaaccttctcaccctcctatctctcctcccaatttttccccacagtagttgatgaagtgaatttctttcacgaggagaatagtggaataccctatgagaaaatacgagagggttgctagtggtgaaagaggatttgctcttcgtttcttcgttgcacacattctcttttactatttctgctgaaattgcacatttcttttgcttcagcttttgtgagaaggctgctagtggtgagagaggatttgttcttggaaga

SEQ ID NO: 21036 - DNA, 560 bp, Glycine max
  Clone ID: PAT_MRT3847_118C.1
tcacaaaacttcaactcttgaagcataagctttaactacagtagttcacaagttgtattagccacagcccaatacacttctgtacttgatcttgcagcttaaatttgcttcttacttttccacaatatcaagtcccctccaataaaaacacaatagcctattgtggatcttctatcactagcatctctttcccaatttgcatttctatgtacaatggtgttagcttgacccttgtccatatcaataagccctttgccaggtaatcctttgattcatctcaggatctgaacaactacattccaatgactatcatgtggtgcattgaaaaattgactgacaacattaacatgaaagtaaatgtctgttattgtcagtgtgagataatttaactttccaaccttttttttatatttgcctaggttaggatagggctccccctaatttggtagaaatttctcatatagtttctctaaagatgagaatgcttctacaaattagcttgtgcataggttaatttgagcttatggagaaactcatttcatttttttttctatatcttt

SEQ ID NO: 21037 - DNA, 888 bp, Glycine max
  unsure (1)..(888): unsure at all n locations
  Clone ID: PAT_MRT3847_119000C.1
cccacgcgtccgcccacgcgttcgtacggctgcgagaagacgacagaagggggctaccagcggcgcccacacaatccattggttcattcagtgagcgagaaagtgagaagttgtggccaccaatttttaatttcatttttatataaaagaagaagaatcatcatctgtatacattactagccattagctaaacagacaaatgtgtttcagagtattattaggagtttctcttcttatcttgatttatctcattaatcttgctcctgcatatcctcttcaccacaccttgctttcagcatcctgtgagaggtttcataattgaagaggtctactttgcagtcagtacttcaacataagctgggaatatagttattgttattgcactagtatttaccagtaggataaattgtgcagaatagcaagttcgaagataagggaatactatatggaagtaggataggaggcgctggtcatggaggcagttcacacggaaatggaaatggaaattcaggatcacctgaaacacgaggaggaggagctgcacttatacctgtttatgcagcaggtgctgcaaacaaaaatcaccaacatcagacccgtcatggtgctgcaaactgcaaccttaacaaaatcagattttccaacttgcttatgatcatcctggtctatcctctcatactgtcatttttgttgtaatagaaagcgcaaaaaatagttcattgtatattatgtaacaactgttacaggtctttcgagaaatagtgctgtcatggtctactgatgtattttgtttaggttaaatttgtgacactttgcagaatgtatcaaatgctgatgaataaaacttgtttcgaatggcaaannnnnnnnnnnnnnnnnnnnnnnnnn

SEQ ID NO: 21038 - DNA, 430 bp, Glycine max
  Clone ID: PAT_MRT3847_119001C.1
ggctcgaggcaaattaatgagattgtacaagtgcaacatcattttgctgacaaattaagaaattgttttattgaacaacctctatgcaggattcctaggacagaagtgtttcactatggcttctctagctaggtaccatcttgagcctgttaaattgaacaggtgtttttgttgcagtattagatgatatctgctgagtaaatatcttggtgtacaggtgtgtgtatatatatatatatatatatatgtacacatttgtatgtgtgagacgagaaaaattaggagagaaaggagaaaggaaaggagattcttagactaaaatccaatggtttagaataagcttggaagtctttattggaattctgttgttattttttgttttaagatttttttactttaatcatgttaattctcaagaaataaaaatata

SEQ ID NO: 21039 - DNA, 504 bp, Glycine max
  Clone ID: PAT_MRT3847_119002C.1
ggttcgttctttctttaggtatgttttttttttttttttttatttcacacattctattctttattgattccttttccctttttctcaatccactacaccacagttatgaggagccaacttgtgtgtaatggcaaaaaaaaacaccttgttttaccctaggaggagcagccaacgcttgctgtgctttgggaacaccattacctgggccccttataggggaatggccatgtcacaacaatatcgcgcacgcagaacgacattgctaatgccccacggggtgctacaagccggaaaaagaacctcgctggcacacctaccaaggctagacaacaacctcttgaagacaaaaaaagggggggggtggggcccccactcccggctcccgaaagaagtttaataaaacaaaagcggcattccccgctataaaacaaaaatttttttgaccaataggaaggcccttaattactgaacagagatctcctggcaccccccgttgtggaacaa

SEQ ID NO: 21040 - DNA, 349 bp, Glycine max
  Clone ID: PAT_MRT3847_119003C.1
aaccatatatatcttcagagagagaatgcgaagggcactgatcacaggatgattctatctgtcagtagggaaggaaatccaatcattacacattagatggtcgaaagtctagctctagccatctttctggacaaggtagatctagcgcaccacacagtacatgatcatgtctagtatacacaatgtcattctcatggtgctccagatgtatggactaatgtaacaacaatgttggtttgattggcaggggtcacagattgaccgggtacccatagaatggccttgctccctatgaaatggctaacagggttggtctcaggatcaactcccattagcaggtgaagcattt

SEQ ID NO: 21041 - DNA, 315 bp, Glycine max
  unsure (1)..(315): unsure at all n locations
  Clone ID: PAT_MRT3847_119004C.1
ggcagtgcgcccacgcgtccgcccacgcgtccgtacggctgcgagaagacgacagaaggggctgattttcactgcaagtttctgtgttggttacactgacccacttgatgttgcggcaatcaatagtttgtacgnggacctnggcncctccncncnggaggtatggaaagccacaggaggagatccttgttaggagcactgggaaggtgtgagttgtgtcttctccaacattactgcattacggctgggaggcatggatttaagtggaaagctgggaactaatttggatttcccatccatcatagaaatggatct

SEQ ID NO: 21042 - DNA, 329 bp, Glycine max
  Clone ID: PAT_MRT3847_119005C.1
gaaagcgtatttggtacgctcataatcgcgggatgattaaaaagaaggcgttggatcataaatcataatctaaatcagacaatctgtatgttcacactcagtcatggacaccatactccgatgatcgcgaatgcacgctataactcacatacattgcttggtcaaccgactattacacttcattatcacctctgagctggagacgcccggtccagtgatcttgaaagaacacaacgcggactcacggtgggggctagattcatttggcaccctattacaaagagagcgagtgtcccaagtgagccaagttttcagccgtacgggtagat

SEQ ID NO: 21043 - DNA, 599 bp, Glycine max
  Clone ID: PAT_MRT3847_119006C.1
acggctgcgagaagacgaagaagggggaaaaggttacttcaagagggggaaaagatggatgggtttcaaataacattaacaagggtcgatttgacaagtactactggcttcttgccacaatgagtgctgttaatgtactgtattatctagtatgcagttgggcttatggacctacttctgatcaagaatcaaaggtaactgaagaaaatggttccaatgaggaagaattgccattaattcgatccaggactaagggtcagtttgataaggtatctcaggttagtgaagaaattttaagaacttcacatagatagtaactgattgaaattagttttagtgttttcaataaataaataagaatgttagtgttttcaatttacaaaaacaaacaaaatattcttatttgggagcctcgcccttcattcctttgtgggtcatccatacaacaatctttttggtgatagctgaaattgaccaatcattggttgaactctgttctactttattattaggcaactgaaaccggttgttgatattgtacgaggcaatatttcatatggtttgacaagattcttcaaatcatactacataaggattgc

SEQ ID NO: 21044 - DNA, 377 bp, Glycine max
  Clone ID: PAT_MRT3847_119007C.1
tataacggcggccgccctttcttggattgttttgtgatcactggatcgagcacgacaatctgaaagaggtaccaacagaaaaggaaagattccaaggtagatacactacatgatgtaaacaacgagactccgaatcctaacggatcacgaggacattccggtcagataacagaagacgaagactttgcttcatagaagcaaacaaggactagctgaggacatctgcagacgctgataatggtactgcattaccggttgcatctgaaacacgtgctcaaaccacacctgtatacgctgcacctgtaggaggatggctcagcgatgtgctgggcatgcatcacactattggccctgccaatcatgcagatactcctact

SEQ ID NO: 21045 - DNA, 290 bp, Glycine max
  Clone ID: PAT_MRT3847_119008C.1
aattcggctcgaggctgcgagaagacgacagaaggggcctttttaagaaaattagtgtaattattaggttcacttttacaattacctcacacaggttttacccctagtgtcccgataaagtacatttacagctaagtcatgctttaagaatataaaaaacattacaattgaaactaacaattagagaaatcacgaaacgcccagaatcagtcatggtgcatacaatctcttcaaaaccttaattgtcttacaatcttttcacataaagcttccttttaataaagaaagcc

SEQ ID NO: 21046 - DNA, 336 bp, Glycine max
  Clone ID: PAT_MRT3847_119009C.1
atatgagactacactgagcatcgtctagctatctcgatcgaactgtccaaggtcctgtcacagtcagaatagagggtatggcacatacggagtgggagtgatctaacaccaacaagacaaaagccagagtaccggcagccagggccatgtgttaggcggtaatatgtgctattcaagtagccagtgcatacaccatctacacaacaatggcaatgtgttcatgtccatagatcggtctcatctcaacgtaagcctgctcatgttgctccatcgcaacacgatttgaatgatgatcgcggtcgcagtcatagcttacgttgcaaagttcccgatagg

SEQ ID NO: 21047 - DNA, 260 bp, Glycine max
  Clone ID: PAT_MRT3847_11900C.1
ctcatgtgagcgtccccatctcagcatccaagatactattgcttatgctttattatggcaaccctcaacataatgggaaaggaccaggagcagacttgcaatgacatctagcaagaggccgtgggggtcgccaacaagaacgacgactggcccaaccatgttgatacaaactcgactagtatgtgcggggatgcgctgagaagatcaaacagcgcctgtcgacacttcgaaagagactaaaccttggatgcacatctatt

SEQ ID NO: 21048 - DNA, 1963 bp, Glycine max
  Clone ID: PAT_MRT3847_119010C.1
cccctttacgttgtggatgtgaccaaaatttcataaaaaaagggaattttcggaggatttgattgaatggttttgctgtttctttttttttttggcggggtttgattaaatggttttgccgatttctgagttcgttggatttttggtgttgagtttctggaggaaagttttgagttgcatcactttagtgaaatatatatatgggtttcgtagatttttttatttttccttttaatttttttttctaaataggagggtgagtttataattatggtcttgtatttctattgtatttggccaatttaagtaattttgatagggttatgagctatgagtaagctaatcaaattttctaatactgatttcatataaaaattgaattcttcttcacatttgtctgtgcagttggattaagcatcattctcacccattttgttttgtgtgaaactatgaattgattacattctcagtgtttatttatttattaaaatttagccccacgcgtccgacggctgcgagaagacgacagagtgggatcgtacgatcgttaatttcctctctttgtttcgcagacctcaccaaccccttttagctcaccctctcactctcagccaccgcacgccgccgtctccggcagccactgtccgttttcacttgtaatttgtcaactcagcataaaaggggtgggttaggctttgcaaccattggaagttccaacaatggcaggcatagctatacttttagatctatggaggaaaaatcaaaacttgagctctggattgcactcctctcatgcttttcagtcttccagtgcctttttttctgcctctgctgcaactgctgctgcagcgtcttttgctgcagggactggttttgcctcaagggcattgtttgggtcatcagttgcatattgtgatgctggtgcagcattaccagaagactacatttctaatatacaaagttcttttgaaaggaattataaatatgatgctttaagatatagtaccaagcagtataatgtggaacttaagcctctcttctctgcttttgaattgagggcatttacattgacttccttaaggtcgttcttgatgttctatttgccacttttggagccccgtgtggaaatggaagatgatgaggatttccaggaggaggatcaagagcaccatgttgatctggttgttccctttaaaaaatcagtgaagcaaatcatgcgtgagacaactgttgtgaccactagaaggattttagaaagaattgctgtgcattatgtttcacaaagaatggcatggaagcttcttaaagatatccctagatcagcaactcgcaaggctggaaggagcatgcctactttggtttacgtctactgtgtgagcagaacaacattcagaggacatatgcttggagttgcagcatcatggcttgtccaagtaggcattgatttatatcgattcttttcctccgcgttccagggtcagcatgaggataatgatgttgatcaaaccaatcaagttggagttcttggacagaaggttttcattgctacagttagatgtacttcatctttaatttttgcctccataggagcaggaattggtgcaacccttattcgtccatcgctcggccagtgggttgggtgtgctcttggtgatttgggtggtcccatcattgtagcattttgtgctgacaaattatttcaagtgaaactttgaaagctagctatattttctgacagattttttacccgcttcaactaactggggtatattaagaattttactttatttgctagccatgtctgatagagccactaggaagttggtggacctgcttttagctgaaagaattctaacaattttctcccatgatggataattccttattgtttcaatatagtacgcttttcaagctattaaaaaattgcaaaaaaaaaaaaaaaccaaaaaagacactcaacaaa

SEQ ID NO: 21049 - DNA, 141 bp, Glycine max
  Clone ID: PAT_MRT3847_119011C.1
tagcttttggtggaaagcggggcaaattggtgaactggattatccgcttccaatttgggcaccaatacacgggataagggcgtatttgaccacaaattagcttaatacttatgataaggctagaaatgctgcggctcttgc

SEQ ID NO: 21050 - DNA, 422 bp, Glycine max
  Clone ID: PAT_MRT3847_119012C.1
cctttggcttcggataggcctaattagaaaacaaataatcccaactcatttttgaacatttttgcctccttatttcttgaaaatgtggaattggaatttcccgaggaatacccatctcattacctttggcatctaggataggcctaataagaaaacaaattattcccattcatctatgaacattttcgcctccttatctcttgaaaatgcggaatctggaattccccgcggaatttccgatctcatttcctttggctccaggataggcccaatcagaaaacaacataattcctattcatatatgaacatttttgcctcccctaattcttgaaaaagtggaattggaattccctctggggagcctcttctgtcgacctgtcggcatgacaacctgtttcttcctttagtgagggatatcttgg

SEQ ID NO: 21051 - DNA, 270 bp, Glycine max
  Clone ID: PAT_MRT3847_119013C.1
ggtctccttcttccttgtcacctttctttgcaaagtcgtccctgatgccaatatggctttgcctgaatccctgtgctcctcattacgtgcatccctatgttcatgcatatccttgtactcttagtgttacgtgttggtaagactatgatgacgactggtgtgacgttgccgagtgaatcttactccctttgttgcagctatcatgggggaccatggcgattgccactatatccctttggattccctctaagttcttctcttcgatgttga

SEQ ID NO: 21052 - DNA, 341 bp, Glycine max
  Clone ID: PAT_MRT3847_119014C.1
ggacaaaaaggcaaaaataatttccccccaaatttgaaaggtggaactacagatttgaatggttaactttacaaaaaaccagtttttttcccccagaaaacatttgtcacaggggcattttatattttaagggcaaaaaatttttggggccaacatttttgccaaggggggaggggaaagcattttggcccagggtaatttgtagttttgttccaccaaaaatgcctcaaaccacatttttattttgttttaactgccatttaagggggaccaaaaaggcctttaaacttttttaaatttttaaaaaccaaatctgatgttaagagcacctaaagtttttg

SEQ ID NO: 21053 - DNA, 518 bp, Glycine max
  Clone ID: PAT_MRT3847_119015C.1
aataggaaccgccctttttttttgtgtgggaaaatccccctccccctttttgttttacacttggttattttttaccccttaaattaactttttccttggccaatttatttttccccccctcccccccaccctttcgtttttaattcgcgggcggcccttttaagggatccaattttacttcccctttcttggaaagtaatttttttttttttgggtcccctaatttaatttcctgggccgtgtttttcaaacgtggggaagggaaaaaccctgggttttcccattttttttgctttgcgaaaatttccctttttgccagttggttttttataaaaagaggccgccctatattcttttttaataattgttccacccttttttggaattgtgacccccttttttagggtctatttaacccggggggtttgggtttttctccctatgttaattttttttttttttcaagtccctttatggtccctccttttttttgggttttttttctctctttttttttt

SEQ ID NO: 21054 - DNA, 594 bp, Glycine max
  Clone ID: PAT_MRT3847_119016C.1
gagggtaaatacttaatataattttcattttgaataaagtgagtggactgtgggctgtgatatgtaattttttttaaaatatagtaatttcctttttttttttttcaaaactagtgtatcccctcactttgcctcaaatcccttggatttgactgttggagttggagtggtaggatagggtttggatgaggtgatgacccctctaaaccattccactcattgctcataacttttcaaaatattttttgtataataatccatcccacatcattgctccaaatgtatattataactataactgttgattattgctgtgttagtacttttacctaggtggctaggcttattagctaattacctgaagtcttcaactagtttggttattggggttttatttgaatttgtcaggatgcttttgctgctgaagatgatgatgaccttgatctcttttgcgatgagacttgagaagacaaaatggcagcacaggaaagggaggcgtgtaaaaaatctaccaagaagaaagagaatggcagtatctcttgctctgttgccgttaacccttggatgatgaaacaggacatgagaagctgggag

SEQ ID NO: 21055 - DNA, 408 bp, Glycine max
  Clone ID: PAT_MRT3847_119017C.1
aaaaactggaaaaaaataatttataataatcataaatttcataaaagacccgtagcagggcccgtaatgaacataaaattacatcccgaagagcttttaatcaccattttaagagtctttttcttcgacaagtacaagcttgtgtaacttacactggggacccaaaaccttttaactacccgacctaaataaattatccgtaacccattttatcacatttcacaattacggcatcttttatttgttttccaaaattggtaggcctaataaaaggaatcgaccctatttcctatattattggcacaactttttttctttaaaaaagggatggccataattttttttatcagggacttcgacaaaagctgaagattattcaccttccttattccccttgaacgggtttat

SEQ ID NO: 21056 - DNA, 427 bp, Glycine max
  Clone ID: PAT_MRT3847_119018C.1
tatgatataattggtgctggttcactttttttagaagattttcctgtttttgaagatcaagaaaaacccaaaaagattgatgccagattgagacaaagaatagattcctcaatacaatgagggttcaggctcaggatggaaacaaatttgtttaaattgtcttttgatgatggtgaaactcttaaaggttcatgttgggatcttaaaattgcttattttaaaattgcactttccaaagaacacaagttgggggaacaattctacgcagtgatctaatgggcaaattttttgacggagggcaattttagagcaagtgttgatttgcagggcactcatcgtattaaagggataataaaaatgggggcacagttggtatcctgagaatacaggtttagatttggcctgtgctttgaatagtttttttagg

SEQ ID NO: 21057 - DNA, 238 bp, Glycine max
  Clone ID: PAT_MRT3847_119019C.1
tttttttttatttactagagagaaaaaatgtctggaagctctaactcagctgttacactatggtaaatgtttttacacacacgtggcacatgaataattgcataatacaagccataatccaaaaatatacgaaggccctctagtagaggggtgagcaaggaactgttactcgcccgaaacccgttaaaaccgcatgaaaaaatcagttgttggatggtcagtttcaggtcctcggttt

SEQ ID NO: 21058 - DNA, 154 bp, Glycine max
  Clone ID: PAT_MRT3847_11901C.1
tgattgggaaaccaggtttgaaatcgccggcggggcagcaacagggatggagtatttgcatcatgggcgcgacacgcctgtgactcatagagacgtcaagtccaggaatatcccgttggatgagctccttgaacctaggactgcagaatttgga

SEQ ID NO: 21059 - DNA, 1340 bp, Glycine max
  unsure (1)..(1340): unsure at all n locations
  Clone ID: PAT_MRT3847_119020C.1
acgagggtgatagtttttctggaaaagctggagtacagttttatacccaaatcaaaacagtggttcaccaatggaaggatttccctagacaagcactattccctgctacatgtccatctgagagagattcacctaggcaattgtcacaagccatgcctgtagaatctgaaagtgattcaccaacctatgaagtacaagtggccatcactgatgcggatataccgaacacaaccatgtcatctgcatctacatcaactgataaggatcacagaagccaggatgtttccctattgctgccttcagcatctgagagggatatgtcagatcgggatatttcactggtattatcacctgcattgcaaagcaatttacctagccaaggagtatctgttgccacatcacagtcatcagagaggatgtatgtctctgaaacatctcagtggaatgaaaattcgccagcaacatcaaaaagaagtgaaattattctaccaacttcagagaggagtcttgtgtctgcatctcagatgaatggaaacttatttatcccccatacgactgatactgctacagctttgaaaccagaggggatatacatgtgtacgtcacataaaactgatagcattgctcaagcatcacaagagagtagtgatagcatctctccagggtcgtcatagaatggatgctactgtgcattcaaactctggcaaggcatacatgctggcagcatctcatttgaataaaagtgttggtcaaacgtttgaaagaacagaccctatgtttccaacttctgagagaatatgcatgccttcaacgtcatcgcacatgaatgaccaaattggctcaacatctcaaaggactgatattccatctacagagagaatttatatccctgcagcatctcatataaataaaagcattagtccagcttgtcagcttgatgatgatactttggctcctacttctgagagggtctttatgcctcctatagtaccagaatataccaccaacttcagagaggttatatattcctaaaaattctcgaaggatgtataatcaaaacccaataatttcattggatgaatttcccagccaagctttgtcatcgtctcaaaggatataggatattgtaccatgttatactatttgtttttaaaagcttttacatagtaatttcatcacaaatctttttagccctcatcttgttggacaccaaagctggtgacgtttctagggtaactaggaaaacatgaagtgtgaaatggggatactattagagagagccttgaggtaacaaaacaatattgttcttattcagtaaggtgtgattannncactannnt

SEQ ID NO: 21060 - DNA, 185 bp, Glycine max
  Clone ID: PAT_MRT3847_119021C.1
cccacgcgtacgaccacgcgttcgttcactcttaagtctacgcttccagatacgtcatcggtcatggttttaacaatcatggggagtactgtaattaatgctataaactgcaatggctccattgacagataataacctcttcttatttagatgatacatgaatccattctcgtcattaccacctt

SEQ ID NO: 21061 - DNA, 416 bp, Glycine max
  Clone ID: PAT_MRT3847_119022C.1
ctaaactcttcatcaccataaccatgttttaactaacaacatcctctcacaccgtcctagtacgaaacctcaccaaccctttcactctctactccttcaaacccacattcatcaaatacgccacccaactccatactcaatccctgcccctcacccactcccaaaatctcctcttcaacttccacaaccttccctccaacctcacttaaaacttactcctacatgcccaatactagctctacaacttcaccttatcacccatcagcgtcatctaaattatccaccccttcaaggacaatctctccataatccataaagccaaatccgatctccacgctctgctccagatccgccctaaatactccgtcctctatctccacagcagaaccaccttccaaaacgccttcatcaccctc

SEQ ID NO: 21062 - DNA, 284 bp, Glycine max
  unsure (1)..(284): unsure at all n locations
  Clone ID: PAT_MRT3847_119023C.1
acagtntgattttngtgttggcctttcgtttgtntgtntatttaggatattgtaaganttagtatgataaataacagcacgtgcatcggaattttcattaagttttttncttttttcagttnanagttaattggccccagatcngccatggacgcagntccgaangccttngccctgntttccnctttgctttcattggncagggacngaatcgaacnccaaggnataaccccngtnntnncaccaantntccnacccncagnggtcaatncncgttttcagnc

SEQ ID NO: 21063 - DNA, 199 bp, Glycine max
  Clone ID: PAT_MRT3847_119024C.1
accgctacgcactgtccttgaaattcatgcaaggttgatatttacgaaaagacaaccactaataggataaggagctgttagcagaatagtgtctaccttcaattgtgcattctcaattatcatactttcttgatcttgtatttctatgcattaaaaattagctatgcaagaatatatgaacttcacttactcactcaac

SEQ ID NO: 21064 - DNA, 806 bp, Glycine max
  Clone ID: PAT_MRT3847_119025C.1
gtctcgagtttttttttttttttttttttagttcctatagtttgaaagtggtctttttagtctctatggtttacattttaattctcttttagtccctgtagtttaaaagtgttctttttagttaccaagtgatggatttctttcataagatttacaggggaactaaacttcttggtttatgcttgcaaatcttggactttggtattggcagcatgtggcaagttgtaattcattgaatcctcccagaagttgacgctcatctccttgcgcatctttcacaaaaggctagaaacaagtgggattttatggaagattccttgcataaatcaagtgattctagaagcatcccaacgaatgaaagaatgcatgaacaaccagagcccataatagtgttgtcaaggagaaaatccttcaacgaaaaagtttgcaactgcatcatcagcaacaggattggcaggagtctcctgaagggtaaaagatgcttgaatttcgtagaagtcttcctgctttcaaagagaaggatgcatttctgagttatttcagagtcaggtggaaagggaaaaatggtgccctctgtgatttctaatttattacttctttccttcaatgatttgtttatacttctacaaaagaaaaaaagaaaaaaggcttgaagcttgtgtatgatcctttatataagatacaactgtataatttatagtttcttgtgaatagagtcaattttccttactcttgaaagacactgttgattgtagataaatcaggatattatcatcttaaacgaagtttatatggtttactaaaaa

SEQ ID NO: 21065 - DNA, 2877 bp, Glycine max
  Clone ID: PAT_MRT3847_119026C.1
cccggggggacccacgcgtgccaggagagcgggtgattaaatatgtgatggggatagtgttttgtgatggtgttaacttgaaacttgtgtctgtgagcttgagatcacaggagaatatccagggggcctgagtagtgttgtgaaattcttcatttacataggtggggggaataatgaggtaaacccccttttgagagttttaatatagtaggtgggggggggaataattttcccttgagtttgtgatctgtgaaatttgagtaattacctgtggttttttttttggaggggggggtggggaggagtttggcaaaagtaaccctgagcgcggatattttgcgtgggaaaatttcgttgataatgcgtagcctattgagtacaggtaaaggagcaattgtgaacttttattcttttgtgaaccctgagtacattgaggagtgagaaccataagacaggttattattctgcttcattcaaatatcatgtgggtatgtgatatggtaggtggccaaatacactgaggttttcatataattataattataatggctagctgaaggcgttagaaggtgactaacatgaataaaataatatggttttgcgggaacaccgaaatagagattcagtcccgcatttccccttgtggttgaatcctattattttctgcgtcaattttgctgaaaaccttaagtgggtatcctgaaaacactagattttcgattcgtttggtaatcagattctctatggtttgattattaagtttttaccgttcttggtcgtctgtggaggttataccgttattgtaagccctcaagcgcatcgccgagccttgctttcgactcccaatattttctgcgcgaattttgctagaaaccgttagtgggtatcctcaaaatactagattttcgattcgtttggtgaacggatttttaggtgtgattattacgtttttttttttgttcaacaagctatggaggtttcggtgattggaagctcacaagcgaagctgggcgcgtctgaattggcttctagggaagttggattttgtaatctgaagaacaatttaagggttttgaatgatagagttagttttggtaggaataatatacggtgggagaaggctgggattagtttcactttgagggctcttcagactgaacctgttagagaggagaagaagccttctgggattggaacaagatccaaaacggtagatggtgtaagattatttgtggggcttcccctagatgcagtttcttatgactgcaagtcaataaaccatgctagagcaattgcagctggcctaaaagctttgaagctcttaggagttgaaggtgttgagctccctatttggtggggaattgttgagaaagatgccatgggacaatatgactggtcaggctatcttgctattgctgagatggtccagaaagttggtctcaagctccatgtttctctttgctttcatgggtctaagaaaccaaatatccctctacctaaatgggtatcccaaattggtgaatctcaacccagcattttcttcacagataagtcaggacagcattataaagaatgcttgtccctggcagttgataatcttcctgttcttgatgggaagactccagtccaagtgtaccagagtttctgtgagagcttcaagtcttcattctctccattcatgggctctacgatcatgagcatttccatgggtttaggaccggatggtgagctacgttatccatctcacccccagctgccgagtaatggaaaaactcaaggtgctggggaattccagtgttatgaccaaaacatgctcagctttctcaagcaacatgctgaagcatctggaaatcctctgtgggggcttggtggtcctcatgatgcacctacctatgaccagcccccatacaatggcttcttcaatgatggggcttcttgggagtccacatatggggacttcttcctctcttggtattccaatcagctcatagctcatggagattgcctcctttcattggcatcttcaacttttggtgactctggggtgacaatctatggaaaactcccacttatgcactcttggtatgggactcgatcccatccttcagagctaactgcagggttctataacacagctaacagggatggctatgaaccagttgcacagatgtttgctcggaactcgtgcaaaattatattacccggcatggacctttcggatgcaaaccaaccagaggaaaaccattcaagccctgagttgctacttgcacaagttatggcagcttgcaaaaagtatgaggtgcaggtttcaggtcaaaattcttctgagtctggtgttccaggggggtttgaacaaataaagaagaatttatctggagataatgtattggatttgttcacatatcatagaatgggagcatctttcttttctccagagcattttcctttgttcaccgagtttgtccggagccttaagcaacctgaactgcattcagatgatctaccggccaaggaggaagaaggcgccgaatctgccatggatatgagccatgaatcaagtgtgagcatgcaagcagcctaatggttgtaaattcgtaatgtatgataatcatgtagataacaattagttatacccttggatcagtgcatgggatgagattgagaacaggttattttgtaagcacaatatgagaatcttttttgccggtttatcctcaagcgtagaccttttagttatttcttattatgtagccagttgggtggcagattacctttttgtcatttgtgctcatgtggtgtacattccagccaatattacataataattgtgaaagttataaaatatctttatttttaagaaaatttaaaaaaaaaaaa

SEQ ID NO: 21066 - DNA, 834 bp, Glycine max
  Clone ID: PAT_MRT3847_119027C.1
cggccgctcgagccggcctgttcggatcttcaaaatctctcctttctttgaatcccattattttctgcgtcaattttgctgaaaaccttaagtgggtatcctgaaaacactagattttcgattcgtttggtaagcggatttttaggtttgattattacgtttttctgttcttgttggatatggaggtttcggtgattggaagctctcaagcgaatctgggagcgtcggaattggcatctagggaagttggattttgcaatcttaagaacaatttaagggctttgaatgatagagttagttttggtaggaataatatacggtgggagaaggctgggattagcttcactttgagggctcttcagactgaacccgttagagaggagaagaagccttctgggattggaacaagatccaaaatggcaaatggtttaagattatttgtggggcttcccctagatgcagtttcttatgcctgcaattcaataaaccatgctagagcaatttcagctggcctaaaagctttgaagctcttaggagttgaaggtgttgagctccctatttggtggggaattgttgagaaagatgccatgggacaatatgactggtcaggctatcttgctattgctgagatggtccagaaagtgggtctcaagcttcatgtgtctctttgctttcatgggtctaagaaaccaaatatccccctacctaaatgggtatctcagattggtgaatctcaacccagtattttcttcacagataggtcaggacagcattataaagaatgcctgtccatggcagttgataatcttcctgttcttgatgggaagactccag

SEQ ID NO: 21067 - DNA, 2137 bp, Glycine max
  Clone ID: PAT_MRT3847_119028C.1
tatgggcgacaccgtgagtttgcccaacttatcgaccaaagtagtagctattgctgcaggggaagcacacactctccttcttacaggggatggacgtgtttattcctggggaagaggaatactgggacggcttggtcaaggttctgaacatgacaagcattttcctgttgaagtcaagtttggatcagaagaagacagcgtaagaatagtgggaattccttaccatatgataattgaaataaaacaaatggatgatggatatgtttggtgttggggctacaatatatatggtcaacttggtatacatggagaggaatttcatggcagaaaatacaccgatggagattattctatagtgccctgcttattgaataagtttcttgacttgcacccccctgattcttcatcaatatcaattgttccagaaacagaaggccaagcatcactaaagataattgatgtcaaagcaggaggaatgatgtctctgtgtattgataatcttggggccctctggctgtggggaaattgccctcaacaaagcaaagaaggcgacttctctcttataagcaatttcactccaacaccagtgtgggattttcatggccacactgtagttaaaggcgcaagtggaaacgaacatgtcgtggcacttgttactgctggagaatcatacaagggcgtggatgatctagtgtgctacacttggggtaacaacagtcatggtcaattaggcttaggggacacaaagaataggccaagaccacaagtggtgaaaacatttgatcttgaatccccttgggcaatatatgaggtagcatgtggtgccttccacactgctttgcttactcacaaaaagaggcacagtgacacattagaaagcacatgctggacctttggccttggggataatggccaactaggtcgtggcacaacacaaagcacatcacttcctgaacctgttaaggaattgccacaaaatgtgcatcttgtttctgttgactgtggcttgtttcacacttgtgttgtttcctctgatggggatgtgtggtcatggggaatggagaagggtcttggcttgtgttctgatgatagcaatggtggaacacattctggtgatgctctttctccgtttcttatctcttgcaatccacatcaacctaaattttcacaaccagttcaagttgcatgtggggctgctcatactgtcattattgcgcatgagggttgcaagctatggtcttgggggagaggaaggagtggagttcttggaaatggtaagactatggatagttacactcccaccatagtgttgtggcctccactgatggaagatttcaaacaagaggaactatatagctcatgtgagcatgataaaaatgagactaaagaagtcacagaaatagatgagagactatcttcagcattgaatcaactgaagctgcttcaaacaaagctatccataatagaaagatatgccagtatacttcatagttccctatttggtgaaccttttgatgagcaagatgttcctgcttcattgaaaaattcaggtgcatttgacattgcaaaggaatgggagaacatgttagaggcagcagatggtacaaagctgattaatttggaaatgctctaccgaaacatgcatgctagtgtgaaagaaaagctaatgaaaagaaggatcaaggcgattatagatgaatgcctactacaatcttcacaggtgaaaaattagtacatataaaagtaagaagtgaaccattctggtcaaaggattgcacatacaaattaataagctaattgtctccaaattattgtctttattttgtgtccgtgagaatatttttgtaagcctctcgtgtgattgagttctgtacagagttgagcaccaactggcattgatttttatgccataaatgtttagtatgccatatccatgagtagttgtatccgtcctcttgttgtagtatgacttactccctaatctccttattcaattgaagctattcttggttgttatttaactagttaccctacccagcaatgcccaggtattatgtgtttcaaataatggtataattgtcatacattaattaaataagaacatcagagaaataaagaaaagttttgatataaaccc

SEQ ID NO: 21068 - DNA, 550 bp, Glycine max
  Clone ID: PAT_MRT3847_119029C.1
attccgttccaaggaaggtttcccgtcatcactgtatgacgtcctccttctttggggggggggggggggggggggaaaaaaaaagccgaacctagaagagagcgttgggcgctgaagtgaagtgaacccaagaggggaagcgattttacgccgtaggatataccattacgccatagtgtaacacgattttcgcatttgagtagggtatctgtatatgtttttagatagatacaaataacaagtttgtaatcctgatacaagagcataatttagtgggtgaaggtgaaaggtgatgaaattgcggatatggaaattacctaaggaaagcgttgaaggattgatagaattgaaatttagccgagagagggagggggttaaagtagaaggaaggattaggagatgtaggaaggtaaagagttttgcttgttgattgagaggagcaggagtgggtcgaagaagtaagaaagttttaatatagagtgcgaagggggtttttgtggccagatagcgtttcaggacgaataggaagggatatatgtacaggaatgat

SEQ ID NO: 21069 - DNA, 1599 bp, Glycine max
  Clone ID: PAT_MRT3847_11902C.1
ttgttaacccttaatttaactaaacattcaatgcaagtaaggatctcaaatccaaaattaacaagatacaaatgctgctcaagtaaaacaatatctccattatgaaaaacaaaataatttactaggctacaggattatgatgcttatatcttcatattcttaaactgtatgagctactgctagcttcttctaactgggtacgtattgtatacttgcttcatctatttgctatatatttatatatggacatgcatggagcattaccgtaagtcagagactgaaggaaagaccttcttccctcttatcccatacggtatcattgattctatctccatattggaggtgcaataactttgtctgttcacagtataatcctacacttgctaataaacttatcggagaaatttacatatctagtccataaagttcgaacctcaggtaagccaatttcaagccacggctttgctgggccgttgaaatgaacaacagcagcagcttccactctctctatgctattgctaatttcttctgatcgatggcgataacccaaatcagtgacgaaccatgatgaatctatggggtgcacttgacccgcaaaagcaatcaaggcaggtgggagcactccaggattccataatgtcaacccagactggacgttaagtttcaaccattgatgataggtcttagtaatatctgatttcctccaagcttcaagatcaaatatattcacgccaaagagccatgcacacttatcaccatcaaagttggatgatatgataggatgtgaaaaattcaagaagttgacgtatttgtttccagggcagcaactgttctcacaccatgacttgaacactgaaccactgactttgccattaagatccagttcccataaagaagatatgtcatgttgtactacaacatcatcatccagcaatactaccttgtttagatctggaaagagctcagggatatagatgcggagatgattcaacaaggaaaggctgctaggcctcaaagcttccaaatatctgtcatgctcttcactatggtcaagctccttttgtttatagttgctgtagtagtgcttccaaattaagttattagtttcctgcatatccttaacaccagcgttcacttctttagaccaatcatagtggtgtaaccccctaacttcaacaactgctgagttaatagagttgatggcaaaccaagtatgcattggagtataagttttcttgtcagtaacaacgtgaaagactagtcttccagggttggctgaattttcaacagtggaggttacaaccacagaagctgcaaggacgttgtcggttaggagaacaatgtggtgaaaggtggggtcaacaaggcgagagacatgttcaggagaaggtaaaaaaaatcgtgccatggcatttacagcgtattcttcagccaacttcaaacaaagacaatgcagactttgaggaacaccgtgtgaagctatatgccaattaagtgactccttctttcttgctgattgcacctcacgttccatctgtgacagcatggctttggtcttgaaagcaaatgccttgaggtcttgttttaacgcaaacactt

SEQ ID NO: 21070 - DNA, 209 bp, Glycine max
  Clone ID: PAT_MRT3847_119030C.1
gaggatataactttctcagtgatagggggagataaattaggtgaggaatattgagtatatggagggactaatttgttaggatacggtgatgtattgatatggtactgacataaacatcatcgatggaaatgccagcttgcaccccgatcaggcactcctcgtcgccttcatcgccggcggcgacggcgactacgaccggattgtgggtg

SEQ ID NO: 21071 - DNA, 466 bp, Glycine max
  unsure (1)..(466): unsure at all n locations
  Clone ID: PAT_MRT3847_119031C.1
gtcgacccagcgtccgaacaaacccttccgtttcgttacacctttcctcttcccgtcggagtccgccgaacacccattcagcggcaattgtatcaaaccctaccaatacaccgtctatcgagttgcacgcatagatgcacgagtcattgatctcaatgtatcagagacttgaggtatttccccttcaacaagcgacttcagatgtgagcgcgatgganaactgagggcaacaccagagctctacccagcagcttctgggatcttgggagtgtgcaagcttgatcgattcatgtaccggaactagaactgtagactagctccagattaaagaactgcatccgaacacctgattctcagttaccgaggagctgcttctactaaccgagcttaattccacacttaatcaccgagtcatactggttcccgctgtgttcgaggctcagattcttgctcgcaatcttggatt

SEQ ID NO: 21072 - DNA, 535 bp, Glycine max
  Clone ID: PAT_MRT3847_119032C.1
aaaacaaaaggggatattggaaaacatttaaaggggataaagacaaacccctaaaaaaaaaacattatggggatccttcctaaaaaattaaaccgggaaaaccaaaagggggggccaaaaggacattttaaaaacccaaaaatacaggctccttaaaaaagctacgtgggtaaaacccccaccctttacccaaaaaattcttatttaaaaggttaaaaaaaaaaaaataaagttgggtaaaaaggttaaaggccctaaaaagggaccaaattttttctttagataaccaccaccccaaggagattttttgaagggcaaaccatttgaacaggggggaaaaaaacaaaaataaaaaacgggctaagccccggggaggaaccaacacccgggggaatgcgattaaggtgggacagaaatttttgggaaaatgactttttaaaaacgggggggggccctgatatgttcattgggggggaaaaaaaatcccctttccaccgagggaaaaaaattgggtttgaaaggggaaaaacccccc

SEQ ID NO: 21073 - DNA, 450 bp, Glycine max
  Clone ID: PAT_MRT3847_119033C.1
cttcggtcgtcctttttgcctaatgaaacgaaatttcatttgtctcctatatcaaggaaatcacagggctcatcaaacttctatggaaaaatgttcaattcttcctatgcaaaacggtgctcatgatcatagattgaatattgatagccagtgaaaataccagatgatctgatcctgctatgtcctataccagatcctgtaaaccatgccttactggattccactgtgccgtatagggcggatacttattacagtacctcaccacgtataaaccacattgcatatcaactgtcattatggagctataaatctggcaagcattatcaagtataaccccttctcccctgcatgaaaaatcatctcgaacattcgaatgaacgccctacacgatcacgtactaagcgctactcctttgcaaacgttactgcgtgtggcgcatgaatgattact

SEQ ID NO: 21074 - DNA, 472 bp, Glycine max
  Clone ID: PAT_MRT3847_119034C.1
gcaattatagtggacacaactggagatcggatcacactaatacaaaattctccaattagtaacttgttgtgagttgctgcttggaagaaaggctgtttaatggttacgattgcgatgtccgggaatgcatcgatcaaaaagaatgatttgggccatcattggtacatgggtttctgacgtacatgaaccgctcactacatatctatgcatggtaggtggacaaaatcggaaccacattcctgggaattgatctccccaatagaggtgtgtggtcctcattagtggatagataggtggaactatgaatgggcaaatcaaactccatggcgtttgagttttcttattgacaatcccaaacagtctacagttttggatattctcttgtgaagttctcaagatattgaaagtgctggtgatactcttatgccagctttttctgttccacaggcttactgccgatcttctgaaaatg

SEQ ID NO: 21075 - DNA, 144 bp, Glycine max
  Clone ID: PAT_MRT3847_119035C.1
gtttcttacttggactgagagcaagaaaatcgggttggttacgccgcatccaccagcatctgataaaaggtcactgatgacatgtgactgctggccatcatggtgttgctgttgctgaggtggttcacggacgctcacgtcaaa

SEQ ID NO: 21076 - DNA, 513 bp, Glycine max
  Clone ID: PAT_MRT3847_119036C.1
cacccggaattttttttttcccccttaacaaaacgggaaaaaaaacatatttggggcccggaaaaaaaaccctattttaggggcccaggcccggttttttggttttaggggggaaaaataaaaaaggggcctttttggggggggaaaaaaaaaccatcttggccttggggggaaaaaaaaggggccccccccaagaaaatccacctaaaggaagtttagcccctttcattttgggacacaacccccctcccccgaggggggggggtttccctggggggaaagcccccaaaaaaaaaaaaccccttcctttgggcccggccccaaaacccccgggtcttcgggttggggcccccccctccccccccatggggggcatcataaactgggcaagcctcttaaaagggggcttcctttttttccccatcccaaaaccgggggccaatttccccaccccttttaccggaagggggccccccatttccccccccaggtccaaaccaaaacccccctttt

SEQ ID NO: 21077 - DNA, 297 bp, Glycine max
  Clone ID: PAT_MRT3847_119037C.1
tttttattttaaactttaaggttttaatatactgcacaagctcaagcttccatgccaattatccaaggacaccaaacactaatatgttctgagtagcctttgtttattattaacagaaaacacacataaccgttcccatgttgcttccacatgctgagcctgagactcaaactgtggctatggcccccacatcaaccacgcttgcattggccttcatagcttcaaaccttggctctttagcctgaaacttgagaccagcatagagcttcatgtaatcatcaaacacaaatttcgggt

SEQ ID NO: 21078 - DNA, 585 bp, Glycine max
  unsure (1)..(585): unsure at all n locations
  Clone ID: PAT_MRT3847_119038C.1
ccggggggagccacgctggccccacgcgtccgcccacncgtcctagcgggtggggaggacacagaaggggggaccttcatgtccgggcggtgaccacctctacgtgcgggggccggggggcatcagctttgggccccccagcaatggggtcggcntcngagagaacgccatcaagtgccagattatccaacggggcgccgggagggggtaaacttaatctcagacaagagaaatgggaataacatattttctaatacactcttttaaatatgggtattagggagggggtttagggaggggttgcgttttcgggactaattctaaagttacaaaagctttagtgaggagtttttcaaaagtgacataggagatatttcgtgactaaaatttattgagaattaaatctggagaattcatggggattttttttatggtgagtttatagtgttttaataaatttaaactaatcataaaaaatgtgtgaaaatgagtgtgataaagaatatgtgattgagacttgtggggtgtgtactctactcgagccgagccagtgtgtttttataggggccaatttcttcttccact

SEQ ID NO: 21079 - DNA, 517 bp, Glycine max
  Clone ID: PAT_MRT3847_119039C.1
cttaaacagtgtatcactacatatcacactaacttaatcatcatatcacaggcgacaacatatcatatatatcacggatcatacgcacaaattaagatcaacctaattaatacttttattttaaactttaaggttttaatatactgcacaagctcaagcttccatgccaattatccaaggacaccaaacactaatatgttctgagtagcctttgtttattattaacagaaaacacacatacccgttcccatgtgagagcctgagactcaccacatcaaccacgcttgcattggccttcatagcttcaaaccttggctctttagcctgaaacttgagaccagcatagagcttcatgtaatcatcaaacacaaatttcgggtacacttggcttgtctcatctaattccttcaccaaagccggtgcaggagaaatgacagcatcatcaccagggttgtagaaagaagctatggacattctggtatcatcggcttgggcaatcactcggtgcatgacactc

SEQ ID NO: 21080 - DNA, 122 bp, Glycine max
  unsure (1)..(122): unsure at all n locations
  Clone ID: PAT_MRT3847_11903C.1
aacggttnccttacacgatnnagccngttgaagtgggcgcaaactgnngtganaacgctgaaagaccggtggggcccanatngggccaatcntgaaacnaaaantcnanggaggtgcttcca

SEQ ID NO: 21081 - DNA, 259 bp, Glycine max
  Clone ID: PAT_MRT3847_119040C.1
gggtgggttggtttgttcttgccaaggtttttgaaatgcagtcacaagatctatggtggacagttgatatcacacctaacataagtggtgttttagaataaccttgttttaatgtgaagtttgtacttctgataactgttttgtcctggagtctggatttgggcttactttcaaaatacactagcagggggtgagactccaattgctgcgtcaaagataagagtggtataacggactccttatcatactgaatgtggaa

SEQ ID NO: 21082 - DNA, 717 bp, Glycine max
  Clone ID: PAT_MRT3847_119041C.1
ggagacattgaatatctattattttaaatttagtatttggataacaatttaaagaaaaattaaatatctatgattttaacagagaattttaattaacagaaaatgaataatttaaaattctcttaaaaactaaagaatttcaattcctccacacactcactcctcgctctcggtctttcctctcaagagacattgttcactcctctcgagccacacgttctcgacccacccactctcgttttgccttagctcaccaaaacgaaaatcgtcgccgacgacaatggctttactcttctcgcacgcaacagcaacatcatgaatgtgagtgttgagctggttggggccattggtgtggctggtttcagaggaaacggaagtggaaccgacggtggcggtggcagtggctctacacttgcgcttctttttctggtgaggaaatgaaggtttgggttgcggtggttcctctggcgcgcccctgtgtctcatcttatattgagaaatgcaaaagatctctgcaattaaatgccttgagagagatctgtctctctttctctacctggtcatgtctgtgtatgtttaatttgtacaaaaagggaaaactctcttcgtctgcatatttatatataatttactggtaataattaaactaatcaaggctaaatccatgatttacatcttgaaaactaaaaacttttttaacacactgtcacatgttac

SEQ ID NO: 21083 - DNA, 239 bp, Glycine max
  Clone ID: PAT_MRT3847_119042C.1
atgtatattgggtttttattaaccattttactatttctttcttttcattttttttggcagtttaaacttctttttcacgggcggggacaaaaccaatgtttggaaaaagggtttacacactaggggacagagttttgttaaaaaaacaagccagtgtggtaatcccccccgccgaggcaacaaataattatcgcccgcgggcgaaaaaaaaaaggaagggccttaccaagggaaacaca

SEQ ID NO: 21084 - DNA, 552 bp, Glycine max
  Clone ID: PAT_MRT3847_119043C.1
acgaggcacattttccaactcatggtgaaaaacataaactccatgcaaaaaactgagtggcttctttgcaattcaactcatgaacttgagcctgcagcattttctctggctccacaaatcatacctatagggccacttctttcaagcaatcatcttcgccactctgcaggcaatttctggccacaagacctcacttgtttaaaatggctagatcaacactcaccatgttcagtaatatatgttgcatttggaagcttcacaacttttagtccaacccagttccaagaactgtgtttaggtcttgaacttaccaatagacctttcatttgggttgtgcagccagatttcacagaagggtcaaaaaatgcatatccagaagggtttgtacaaagggtggcggatcgtggtataatggtggcatggtcaccacagcagaaaattctgagccatccttcagttgcttgcttcataagccactgtggttggaactccacactggaaagtgtcagcaatgggatcccagtgttgtgttggccatactttgctgatcag

SEQ ID NO: 21085 - DNA, 729 bp, Glycine max
  Clone ID: PAT_MRT3847_119044C.1
gagccccaaaccaaaaccaaaaccaaaacatgggtcatatgagttacaatagagttagcagtgggagagcatcatcatcatcttgccatggaaaatgcagagggtttaggttaaacctcagaaggctttactttctgcgcctaaggaagaggttcactttcatactaagtatctttgatagctggaaactgtcttattctcaggctcttcagcttctgaagaacgtgttcagaagaaaaagtggcttcaaaagaaactacagcaacagcagcagaagtggtttagtgagggatgaaggaatcaagggtcatactgattgtagggcatcatcttatggaaggaataattctttctatgcagaagccattgccgattgcttggagttcatcaaacgaacatctatttcttccatggaccaaattcaagacccagttggtcatattcaagatagaaactcgtgactccttttgttttctttttggtagaggaaatcatgaatactagcttgtttttttggtttcctcttgattattctgaatttatctggttttcttttttcttttactttttaggaagcattgagaagatatgatatagttactccttaatctgtgtatatattaatttcctctcaagttttgcatcggttgagttattttctgtaaacaagtgtgaaaattgtcataaaacttgtaaaatattcttccttctagtgagaaatttcattca

SEQ ID NO: 21086 - DNA, 248 bp, Glycine max
  Clone ID: PAT_MRT3847_119045C.1
cgtttaggttaatggaagagaaaaccgtgccggggattattgacaagttcgggtggtgcacgtgggacgcgttttaccttaacgtgcacccggaggaggtgcgggaaggaattaagggcctggtggagggagggtgtcctccggggttggtactgatcgacgacggttggcaaacattttgccgtgacgacgaagccgtgagcgacggggggagtttaaattgctctgtgccgggggagcagatgctg

SEQ ID NO: 21087 - DNA, 357 bp, Glycine max
  Clone ID: PAT_MRT3847_119046C.1
ctgagaacatcaatgcatacaaagtgcgaatcagcatttgcagatgctgctcttacagcaattgaaattcagtaccggatcagtcaacatctacatctcgcgaatgaaactccatcaggtcatcaacatcgaacgcctcggcctccgcacaaagaagttatagatcgtgccaatgcactcctagctgttccacatgtgccagattttgaatcagttgagccatcagctccatctgcagtagcatcagtcaggccgatttgcctaacagatccaaaggacatggcttttggatgtggacatataactctgcaacgagtgtggcgtggtattagcgccatgccctatgtgccggaagga

SEQ ID NO: 21088 - DNA, 159 bp, Glycine max
  unsure (1)..(159): unsure at all n locations
  Clone ID: PAT_MRT3847_119047C.1
gcgagtcttccacagtgtgaagcttctttttctgatatctttaacgtccccatgaaacatttaagctctcaactagattcaantaaccattcaccattgactccttctttaactaacgtcaaaatcttctcttctttcgtcctaaacggattcttaaac

SEQ ID NO: 21089 - DNA, 485 bp, Glycine max
  Clone ID: PAT_MRT3847_119048C.1
tggttgcggccatgctattctacatgtgtgtgaggttcaagaatatggtgcatgcatggagtgaactggaggaattaataaatgggaaagaaagtgtgtggtttagggtttaaagcggttttcttgttgagggttgcaggaaaacaaagtgttggcgtgacttctcctgcatgcatgtgaataatcacgataaggctctatagccagtcacctttttttctctattttaaggaaatgaaaattactcaacagagaaaacctaagtccgttatatctaagcctcatgagactaatctcatagtaatttctagcaataacaatatcttgcttctaggaaaagaactacacaacgaaatggatgattgaatccaaaatttagttgaagatgtgatggttaatattactcttcacatatatacattattttggataatccatctggaatccaaacacacatttggagctaatgattgaacatattaaat

SEQ ID NO: 21090 - DNA, 350 bp, Glycine max
  Clone ID: PAT_MRT3847_119049C.1
ccaacccaccaagaagggaaccggattttaattaattcaaaaccattaaaaaacaaccaccaaaggggcgggaaaaaaaaccataaaacaaaagggggggcccggcccaagtcaaaaaaaaaggacccctaaaaaaaccagggccggggaaaaaaacccccccccccccaaaggggaaaaaagggggggggtaagggaaacccggaaaaattgggggccacacccagcccaaaaaaaaagggtttaaaacccccaaactggacaccggcaccccccctaaaaacagccaaggacccggaaccttaaacccggccgggggagaaaaccggacccccaaccctcggggaaaa

SEQ ID NO: 21091 - DNA, 227 bp, Glycine max
  Clone ID: PAT_MRT3847_11904C.1
ggattgattaactgatgctgaaatgaaatcctctgtgctatgattgttactacttttgacactgtgtgacaagattttaaattgtggtcacggttgtgatagtggttttgtcgcattctttgatgttgtggaaaattgtagacaaattcagccgatgcgatcgcatttaggctgatacggttgcacatcagccaatttggttgccttttggctgatctggtggtgca

SEQ ID NO: 21092 - DNA, 277 bp, Glycine max
  unsure (1)..(277): unsure at all n locations
  Clone ID: PAT_MRT3847_119050C.1
aatactctagttaagccaatatgtcaagttacccctccaggaccgagcttgcatagttctccggccaganaagagggtgaagtgcctgaatcagaattagacctagataccaggcgtaggcttctcatattgcaacatgggcaagatacaagggagcncacgtcaagtgaacccccaattcccgtcagacacccngacnagttttctggttcccagtgtcccgtcacgtaagggatggttttctgtaagagaggagatgggttcacaacaactaaat

SEQ ID NO: 21093 - DNA, 335 bp, Glycine max
  unsure (1)..(335): unsure at all n locations
  Clone ID: PAT_MRT3847_119051C.1
gaactgaaacctatatttgttagcaggggtagcagatgggaactgcacanagcagacttcatctcaaagaatgtgaaaaggaaaacaaaatcactttaattagaaggatgctcttttcaattttgacttccacttctgaatacaaattcctgagcctctcaatattctcttcagaaatttcccaataaccacacgtccattggtttccaatagtgtctacactagcttcctgaaaaagtttggatttgtgttaatgggcttgttcaacatttgcatatcatgaatgaaatttgtgttggcttcttcatacacccacttgtcaacttggcctaaag

SEQ ID NO: 21094 - DNA, 380 bp, Glycine max
  Clone ID: PAT_MRT3847_119052C.1
cccaaaagaaatgggggggggggtaccaccacacttttttccccttttccatgggtaaaaaaaaagggggccgaaaaggggcggctagcctttcttttggatatttttacaacccttatcccgaaaaattttttcaaccccccttccctaggaaatttttttttaaacaagggggccggggggaaaaaataaaaaacccctggctttttaattttcctacgccctaaaaacctctccgggggggtttaaaaaatcttatgccccacctttgggggggccacttttttaaaaccaaaccaaaaaacttttttggttaattaaaaaaccttttggataaaaatcaaacacacaatggtcccaccctctgtgatatttttttt

SEQ ID NO: 21095 - DNA, 902 bp, Glycine max
  Clone ID: PAT_MRT3847_119053C.1
tcgccctcgcgtccgattgttcaactctcacacgttctattccacccaattaaccctactttcacattcccctttgttaactcgtaccaatggatttggaactcgtaccagaggctgttgaaaattctgctgaaataatatcagcagcatgtgaaggcagttccattgaggagccaaatgttgggatggagtttcagtctgaagaagctgccaagaacttctatgaagaatatgcgagacgggaagggttcgttgtgcgccttgatcgctgccatcgttctgaggttgacaagcaaatcatttcacgccgtttttcgtgcaataagcaaggttttcatgtgagggtacgaaataaaaccaagcctgttcataaaccacgggctagcataagagaaggctgtgaagctatgatgtatgttaaagttaatacatgcgggaagtgggtggttactaaatttgtgaaggaacacagtcatctgctaaatgcttctgctttgccttataattcactgatagagtcaaaggataggataattcaacaactcgcaaaggaacttgagcaccaagatcgattatgtcagcattatcgcaggcagctattctcccttctggaaactgttgacgaacaaacaaaatgtttatcaacaaaagttgaacttgttgttaacaccgtaaaaaaacttgagaatgaagtacaaaagcctttgatttgaacattgactaactttcagccaggttttgttagaaagcaaattcttttgcttcaacttttgatattaacatgggtctaatgtaaaggtttgttaaccattaataataatgtctggtcttggggatgttacatttagtgcatctaggcaaatatttactttgctgatttttcagttaggtaaagattgaga

SEQ ID NO: 21096 - DNA, 1206 bp, Glycine max
  Clone ID: PAT_MRT3847_119054C.1
gacggctgcgagacggcgggagaaaaggggaagacaggaagacgaggaagcagtgtagtggtaactcttgtcaatctttccactttgacattgccgacgcctccaaataaacaaccttaactttcccacaacaccacccatcattctttttctctctctagatttcatttagttgttgctgtcttcttctgtttgtgtgtgccaacacagagcgaaaaacatggctctgaaccaatcaaaagccgtgttgttgagggtgagtttggtggtggtggcgctcttcatagcagggtacatagtgggtccccctctctactggcatttcgttgaaggtttggctgcggtcaaccactcttcttctacttgtgccccctgcatctgcgattgctcttcacaacccattctttctattccacaaggactgagcaacacttccttcggagattgtgcaaagcctgatccagaagtgagtggagacactgaaaagaattttgctgagctattggcagaagaactcaagctacgggagaaccaagccgtggaaaatcagcaacatgctgacatggcattgcttgaggcaaaaaagattgcatctcagtatcagaaggaagcagacaagtgcaattcagggatggaaacgtgcgaggaggctagggagaaggctgagttgacattagtcacgcagaagaagctaactgcattatgggaacttagagcacgtaagaaagggtggaaggaagggcttgccaaatctcatgcacactctcaagggaaagtacagagttcttagatacattacacggcctccatggaggtgagtggttgcataatactacaatagttttcaaatgttggtaatagcaaaagtgagtcatcgaggctcatgtgttcatgaaaggtcaagtgtaaaatgcaaatgttgtatttctgtcattcatttttgggtctttattccatgtgtaacacggtttaaagctagaaatcgccaaatgttgggtaaaacttgcataaaaaatattgagactatcttttttgtattatttttttgcttctgatttgaaccaaggctcggactgttgcttcttcgttgtgtttaatcaattttaggtttgattgacaaggataaaaaaaaaaaaaaaaaaaaaaaaattttgctcaatcattttaaagtatttattcagttattggagcttagtttatattccc

SEQ ID NO: 21097 - DNA, 981 bp, Glycine max
  Clone ID: PAT_MRT3847_119055C.1
ctcgagccgctcgagccgattcggctcgagctcgaggcgtttaaacctctctctctctcaaattattcgaaatccaaaaaacaaaaacaagtttcttattataaaaaatgaaacaaatagaaatggaaagtaacgcatcagcactagcaaagaaagtttggagcatggtacgtgtggtgttgttcatgcttcgaaaaggcataacaaaggggaagctcatgatggacctcaacatgatgctgaaacgccgcggcaagctcgccggcaaagccattgccaacttaatgtcgtcccaccaccaccacaaccgcggtgggtcccacaactctcaccaccttaagttctctgccccaagggagtacgagttcagctgcagcaacacgccccacaacttcttcttccccacaggagggaagcaccaccgccaccacttcttcgcctgtgtccacgcgcctcccacgcaggacgacgacgttgtgacggtgaacgcaatgaaggcagtgatggagatgctcaacaacaacaacaacgacgccgttaaggttgaagcgtcccctgcgctgccagggtttggacggagccctatggtgaggcagcttagggttacggactcgccgttccctctgcgagacgccgatcaagacaacgaccacctggtcgataaggccgccgaagattttataaagaggttttacaaggagttgaggaagcaggattaattttttctctctttaattcaccctatctaccttgttttcttttttattttctgtaccttcattctcttttcttaatcataaatgtgatcgttacttcaccatcatttttggatattttcatgttgccgtacgtacttgtcccccacttctgatttaagattaagatggattatgcgtgtttttagtttaatttaaatatataatgcttacatacaataaaagaggaactctttaatttcgagctaaaaaaaaaaaaaaaaaa

SEQ ID NO: 21098 - DNA, 400 bp, Glycine max
  Clone ID: PAT_MRT3847_119056C.1
cgaagacgctcgctaggtttttgcatactacaaggatggtgctgttgatccaacattgtaatactttgcatatgccttagaggaggctacgggctaagcgacataggggaccaagttatctactctcattttacctagttattttttttaaattctgacctaagatacttaaaacttccacttgttattttgattttaatggagagacattttgtgctacgtcataattcccataaaatttaattatcgatgggttagaaatttattaatttattattctggttgtgctggaagggcttccaggattctttttttgaaaaaaaaaaactgtcacaagacagactaaaccccactcacgtaccatatagaagggggcaccaatactccacataagagaatg

SEQ ID NO: 21099 - DNA, 547 bp, Glycine max
  Clone ID: PAT_MRT3847_119057C.1
tcttaacgtttcacgtacgcccacgcgtacggttacttcaaagcatacaccacttctctctggttctcttcactctctgtatccctacctgtgtaactaacatggctattgaaaaccaggacaccgttgtcagagaaatcaagcccaagaacaggtgaatcaagggtgctggagggcccgttgatgaggacactaggtggacaccgtggttgaagccactgttgaaagagagcttctttgttcaaagcaagatgcatgctgattctcacaaaagcgaatgctccatgtattgcttggactgtaagaatggccctctttgctttatttgcctaaaccaccacaaagatcaccgggcaatccaagtttgacacatcacatcattcattagttattttcaaaaactctgcatctgacccgcattatggctcaagactctcaaccaatacattggttggaagaaacaccccttttccatttttgggacaacagggattcttttcctttattgtctctggaatattttttttggaaaagtcacacccttcct

SEQ ID NO: 21100 - DNA, 359 bp, Glycine max
  Clone ID: PAT_MRT3847_119058C.1
gagcatcatttagtggggtttgttttttttttttcaaagggataatggttttggtccccacacccataaaaaccattgttaagactaggttgactagaatttatccgccagggtttggacaaaccactctaaaaggtttacaaaaatatttttgttttaaatgaaaattgcaataactcgcaccaccccccaaaagctagttttttggcccagtttttttgggggcacaaaagtggtccttacccattgacgacatgacggacacaagaggatttttgccttgagcaaaatccttctttattggggggggccgacttttattcaagggaaagttgggggtatccttaaggttaccattt

SEQ ID NO: 21101 - DNA, 1152 bp, Glycine max
  Clone ID: PAT_MRT3847_119059C.1
ccacgcgtccgggagcaatcaacggtagctatcaaagaagtgtttggaaaatttgatgatgtgcttgaacctggtttccactgtgtgccatggttctttggcactcaagtggctggttacctttctttgcgcgtgcaacagctagatgttcgctgcgaaaccaagacaaaggacaatgtttttgtcactgttgttgcgtctatccaatatcgagcgatggcggaaagagcggtggatgctttttacaggcttagcaataccagggaacagattcaggcctatgtctttgatgttatccgggcatgtgttccaaagatggatctagattcctcttttgaacagaagaaagaaattgcaagagctgttgaggaagaacttgaaaaggtgattgattcccttttgtgtatgtgtgttgaggactagagggttagcaaccttatggtttttaacttgctgtgcatgtgaaggcaatgtctgcttatgggtatgagatagtccagactcttattgtggatattgaaccggatgagcgtgtgaagagagccatgaacgagataaatgctgctgcaaggatgagggaagctgcaaatgagaaagctgaagcagagaagattctgcagatcaaaaaggcagaaggagatgcagagtcaaagtatctatcagggcttggaatagctcgtcagcgtcaagccatagtagatggtctgagggacagtgtgctagccttctcagagaatgtccccgggacaacatctaaggatgtcatggacatggttttggtgacccaatactttgacacgttgaaggagatcggtgcgtcctcaaaatccaattctatttttgttccacacggaccaggcactgtgagagatattgcttcacagtttagagatggtcttcttcaaggaaaggtggctcagtcatgaaatcacacaatcacattacttgaactattaggaatctatcttctagactctatcgatgtatacattttaattttgtctgagtgttcaagtttgaactaattcggtatgttaatatgcctttccataccattcattgcctttctatccgtgccctcttttttgagttgtgaatagtcgaacattgtgctgttctttttttccttcgaaataaacataatggtgttcg

SEQ ID NO: 21102 - DNA, 249 bp, Glycine max
  unsure (1)..(249): unsure at all n locations
  Clone ID: PAT_MRT3847_11905C.1
ctgggttnctcaaggncaggangcctatccatgctgaaacaaggtaatgaaataaccatctccactgactatgcnctagggggtgatgagaagacgatgtgtatgagatacaaaaagctgtctgaggatgtgaggtctggtatggacattctctgcggggatgacaccatntcattcagagttttctcatgtgacaaacaaggggttgtgccacagtcgcgatgagagatctctcacactctgggagag

SEQ ID NO: 21103 - DNA, 263 bp, Glycine max
  Clone ID: PAT_MRT3847_119060C.1
tcgaatttcattgcagagtgttattttgagtatcagcatcaatggctccaattgcactgggaaacgtgattccagacggcattttggcctacttggatgaagagaacgaaccccaaactgtctccattcagtctctcgccaccggcaagaaagtcatcatctttggggttcccggtgccttcactcctacttgcaggtctttactttcccttttcaccataaactagactgaaacagattcatgggtacttgagattcagcat

SEQ ID NO: 21104 - DNA, 415 bp, Glycine max
  Clone ID: PAT_MRT3847_119061C.1
tcggagccacattcgtgtctccgaagttcgaacttcgattagagagctattccacgtttggtcgagtggaaataagaacgagtctagttatactttggtggatattacgcaatggttcgcgtatttaactttcaacatggttgtgcgaatggtcgttgggaagaggtattttggtgtcatgcacgttgaaggcaaagacaaagcagaaaggtttatgaaaaatataagagagttcatgaatttgatggggactttcacggtggcagatggggttccttgtttgaggtggttggatttggggggttatgagaaggccatgaagggaaccgctaaggaaattgataaattattgagtgagtggttggaggagcaccttcagaagaagcttttgggtgaaaaggttgaaagtgataga

SEQ ID NO: 21105 - DNA, 150 bp, Glycine max
  unsure (1)..(150): unsure at all n locations
  Clone ID: PAT_MRT3847_119062C.1
ttacggggcggggggagagcantgtagcaggcaaaacagctcngacggatgcacttgacggaacaaaagcagaaggacccgacggaggcaacaacaaaatttctggggatcggaagaagcaagaaacactagcaaggacacccggagacc

SEQ ID NO: 21106 - DNA, 556 bp, Glycine max
  Clone ID: PAT_MRT3847_119063C.1
ttcggaaaaacaatataaatatggtgaagaagggtttaggtgggttttgagcacttggcacagaagagcacgctgagagaaaggaagatgatcatccccgttcgttgtttcacctgcggaaaggtcattggaaacaaatgggatacctatttggaccttctgcagtcagattacagtgaaggagatgcactggatgctttgggactggttcgatattgctgtaggcgcatgcttatgacccatgtcgatctcattgagaagttactgaattacaacactctggacaagtctgatcccagttaagaaggcttaaggagcaaagaatgaccaagatgtttcagttgcattccatgctatctggccaatgaacaatcttttttccttttctgaattgttttgctacaagctggtcatggttgtgtgctgattcatgtgaattatggttatccgttctttaaaggggctatatgacaaagcgcagcttatgttaattacttcatttctagttagtgtgatgcgaagctgtcttttgatattaatatctcatacacaatta

SEQ ID NO: 21107 - DNA, 728 bp, Glycine max
  Clone ID: PAT_MRT3847_119064C.1
cccccccccctcgagcccgttcaaattggctatagtttgaaagttctgcagcagatctagtcatagaaatcagttgtagattgtagaaatcaattcattctttcatacattacattacagtacaaaagaatcaaatggaagaaagatgatcatccctgttcgttgtttcacctgcggaaaggtcattggaaacaaatgggatacctatttagaccttctgcagtcagattacagtgaaggagatgccctggatgctttgggactggttcgatattgctgtaggcgcatgcttatgacccatgtcgatctcattgagaagttattgaattacaacactctggacaagtctgatcccagttaagaaggccttagggagcaaaggatgaccaagaatgtttcagttgaattccatgctatctggccaatgaacaatcttttttccttttctgaattgttttgctacaagctggtcatggttgtgtgctggttcatgcgaattatggttatccgttcgttaaaggggctatgacaaggcccaacttatgttaattactctttttttagtctttctgatgcaaagttgtcttttgatattaatatctcatacacaattatatgtctgaccaaacattaggagactgactcgaagatctgattatttaagaatgtccaaattgatacaaatgcatgtcctaaatttatatgcttcgaatgagttcaaaaatctt

SEQ ID NO: 21108 - DNA, 422 bp, Glycine max
  unsure (1)..(422): unsure at all n locations
  Clone ID: PAT_MRT3847_119065C.1
caacgaatcaacatatgactacttgctacttctgattagacggcgcctgtatacttttgatgattgcaaatctgagatccaagttttctcattcaaaacgggtttgaggaatagagatgttattacggattcagagctcggtcgttattggatgtggctcttcattggttggtcttttgcgagaatgtagacaatgggttgagtacatgtagttcctataatggccatttgttacaatggagagagaatgtgacctatgagttgagtacccataacgaagagagaagagagcctatggtttgaatatccatagtttccataatcatcgactgctacgacgaagagagaatgcaacctataatctaagtgattgttatcctatagttattgtttgccacaacanagagataatgtggttcatt

SEQ ID NO: 21109 - DNA, 1738 bp, Glycine max
  Clone ID: PAT_MRT3847_119066C.1
cctgttcgctgcgagaagaccgacagaaggggaccatatttcatgtctgttactcatttcttctcttcttctttttcttctaccctttaaaattattattccgtgcaaacaccaccaacaacaacttcatcaccaacacgaagaacaagattagcgttatgggtctcttcctttctaggaatttggcttgcaaattcatatacccttttcttttctccaataaggtttccaaggatttgtttcccaagcagttggagaacatgatgtctctgatctctcctcgtactggctaggcatttgcagcgctatgacaatggcctgtcgccaagttgtgggatgcattccttatagatacaagaacaatggaacaccaggataaggaattagaggttcttgtgattagtgctcagaagggtcatggaatgcagttcccaaagggtggttgggaaactgatgaatccatggaacaagctgctttaagggaaaccatagaagaagctggagttgttggcagtgttgaaagtaaactgggaaaatggtattacaagagcaaacgccaacccataatgcatgagggatacatgttccctttgcttgttaagaaggaattggataactggccagaaatgaacacaagaaaacgaagatggatgactgtggatgaggcaaaagtaatatgcccttatgcttggatgaaggaggctttggatgaattggtcagaagacaaactcaactgcactccaaaaaggatggggatatgagtaggttgtaaatttgtaatagcgtgtttggttccacatcacagatttgttttttcacgcttagtcagaaactaatgcttacagctttttcacatcccaaacgtgatttctcacttctcaaaaaaattccaaacatgcacttagtgtcttgcttttggaatctacaaagtggtagaacaaaagcactcataagctgttgttagggcaagagaaattaagtctagtcattaagaggagggaaagtgcagttcaaggtgtgcccacaatttgttcctcccttgagtttgtttgttcctctcttcaaattggctatagtctgaaagttctgcagcagattacggatttgtaggggcgtagttgagatctagccatagagatcagttgtagattgtacaaaatcaattcattctttcattcatttgattcttttgtaatgaaatgtatgtaggccatgtgtagaatacattattcttcctgtactcataaaattattaaaataaataaaatcttccattgagactgaaaactttcacctgcggaaaggtcattggaaacaaatgggatacctatttagaccttctgcagtcagattacagtgaaggagatgccctggatgctttcttctttccttcttctttctgggctttcttaaagttctgatctttatggatttcattgagtaaagttaatgtttttttttataaataatattacactctggacaagtctgatcccagttaagaaggccttagggagcaaaggatgaccaagatgtttcagttgaattccatgctatctggccaatgaacaatcttttttccttttctgaaatgttttgctacaagctggtcaaggttgtgtgctggttcatgcgaaatatggttatccgttcgttaaaggggctatgacaaggcccaacttatgttaaatactctttttttagtctttctgaagcaaaattgtcttttgagaaaaa

SEQ ID NO: 21110 - DNA, 304 bp, Glycine max
  unsure (1)..(304): unsure at all n locations
  Clone ID: PAT_MRT3847_119067C.1
taagctcgcaattcggctcgagactagttctagatcgcgagcggcctccctttttttttttttttttttttttttttggttttttttgttttttttttaggaaaanaaacctttacaaataggaagggggaaaaaaattaaagcaatacaccacaccatcaaaaggaaagagtggcaaagacaatgacaaaaaacccctcccctcaactaacagaaacaatcctcaagcccccaccaaaggttaaacccaaaaacctggatactacacccaacccttaaaacgatcccttcaatgacacaaccc

SEQ ID NO: 21111 - DNA, 387 bp, Glycine max
  Clone ID: PAT_MRT3847_119068C.1
ccacgcgtgcgaccacgcgtgcgggtgcgtgaatacgacggatggagttgctaaggaacatcggtggcataaacctgaatgtggacagttctaactgcacaccaacaaggctacttcactaaagtgttttatctcttccttgatcatacatggaagcgtggatagctgggatggaagtgacttacattgaatcggagctccacactcttctgatcagaatgaccatcaccacaagacaaagcgttctgccagaggtgatgatgaaagcttgaaacgtgagagcagtgctcgacgccatagctctacgtagaagaagcctagagtgaatagggcaattgaggtgcccgctatcagcatcaaactagctgatctacatactgatgatta

SEQ ID NO: 21112 - DNA, 638 bp, Glycine max
  Clone ID: PAT_MRT3847_119069C.1
gataacaatgaggtacaaactctgcacattttaaaaaaacagagacttgataatgagttataacatcttcatcagaagtaacgacagtccgtatgatgtttccttcccttcaaactacatccccaaaacagtaaattagaaataacacatcaaattgagctgaacaaaaatctcaattagaggacctgaataaatcagctttgtgcccgaaaatttagtgtaatctaataaagcaaggtctttgtacttgtacatatcaggcacggaaatggttttgtttctgtaaacgtctgaataaatcttgagaaatagcattcatactaacaagggatttagctagctccactgcataacttcgccatccagcataaccaaccccttccaccaacaacgtgtaagtagtttcatttggctgacatccattgtcaaccatgacagccagcacctcaatggcatctacaattctgtgtgctttgcacaatccaagaagaacaatgttgtaactaataaccgtaggttgccactcgctccgttccatgtccaccaacaacccaatggcctcatccaccattccatctctgcacaaacttgatatcagtgagttatatgtgatcctatcaggatcaacaccgttgctc

SEQ ID NO: 21113 - DNA, 402 bp, Glycine max
  Clone ID: PAT_MRT3847_11906C.1
ttttcacaaatatacacactcttatgccattgacagaacctaatgaatttctttttacttcagagaaggaaacctacacaaactcttttttttgtagagggaacagatacatgcacccttatgaagtgaattagggatgcgtgaagaaacaccgcagaaaccctcgaggctgacgtgtgcaggaatgaattcaatgcgcactacagtcatgcgtctcgaaccaacataggagccttgtcgcaatcttagatatcaatgagcgccactctccttttccttgaccttttcctccgctgccttggagtgataacagggaagcttctcttttatcttttctaatacacctttcttctgcttggcctctgcttcatgaagagcacctctcccatgctccatagatgc

SEQ ID NO: 21114 - DNA, 485 bp, Glycine max
  unsure (1)..(485): unsure at all n locations
  Clone ID: PAT_MRT3847_119070C.1
cccacgcgtccgtacggctgcgagaagacgacagaagggaatattaccatcttaaacctgtataaaaatttaatactaatagttatgtaaaaactattaacctgttcggaaagtttatataattagtttgaaaagaaaagaaaaaaaaagctgtgagaatggaatattattagtacaaattatatggtgcaattagtatatttttttatttagaaatatggttagtgaatgaaacttaataaatttgtaccttagtcgaaagtcgaaaccattcaaagccctcaaagcagcacgaaatatcgcatgccacgtgttaggaccgttatgcaatcatttgaaatgtttgaagttttgacatcttatacacggtaagttaaattagttttttttatcatctaatctattacttagatttaattntatcttttaattntttacttttaaaaattgactcaattttgtccaataattcaaattaaactgat

SEQ ID NO: 21115 - DNA, 146 bp, Glycine max
  unsure (1)..(146): unsure at all n locations
  Clone ID: PAT_MRT3847_119071C.1
ncgtcgcnngcnncgcgtacgtncgctncggnnnttcgcgcctcgcngcttngnaganttgnanctgcncattattgtaagtacngnnttgggaanggncaggacnngcgcatgnatnctcccctcatacatagatctgtacctcc

SEQ ID NO: 21116 - DNA, 520 bp, Glycine max
  Clone ID: PAT_MRT3847_119072C.1
aaagttaacaactgtatcaaagatgacaatccattggataacaatataaatctttaggtgcaatctaattaaatccttattaatgatttggcgcagttatggtgatagaattttgcagttttgacttagatgatatagcatagaaacagctttctccccactgcctcttccaaagctactattttctttgtagacttgagtcgtttgggtactatgtgcagaacatagtgctgaccgagttgaatttttgaagctctgcaaaagaatagagtatacaattcgagcttggtatcttctacagtttgaggacatgatggtattcttttttcttcaccattttgtgatacaaatagcttagtgatatggttggagcctgattttttcttttctttttttgttccttaagcaactctattctctctttgatcctgtatccgggacgcagaagttggaacaccagaagttacctcgtgaagaaattgatgttcttgaacagaatttcttgacttacctatttgag

SEQ ID NO: 21117 - DNA, 480 bp, Glycine max
  Clone ID: PAT_MRT3847_119073C.1
tcgtctagctatctcgatcgaactgtccaaggtcctgtcactttaaagggtgttatgatttgagtgttggcgtgttgcaaatgtctataggtggtagtactaagctatcagtggtaagatcaagctaagggtcagagggcatagtccacgagtacgcgggcacatcccgcaagcccaaaagctgacaactaagccaaacggtccgtaagccgcgctggtgtttagggctacactgcgccacagactactcaacaacacggagtcgcgtggttgtcgtatattaaacggcgtcgaattccaaagaattctattaaagccgcgtgtcggccgtggtaccgcgtcggaacaaacttggccatgacgtcagcctaggcctgccggtggataaagccgaggcaacggaactgataaaccaacgtgtggactcgcaggcaagtatttattcgaagcaccaacatcagcattggcacgggcaaaaga

SEQ ID NO: 21118 - DNA, 1252 bp, Glycine max
  unsure (1)..(1252): unsure at all n locations
  Clone ID: PAT_MRT3847_119074C.1
gcaaagcaaaagatgttgttgaatactctgttactattatgggtcaaggccaagttagaccagtccattctggaggttctccaaccagactagtcctctccaacttggtttctttttatacaaccttcccactctcattcttcaatcaatccaacccaaaagaccctttctttcaatattcatagcatcatcatgggtgactcttccgcggctaatgaccatttgggtgaatccccggccgttgagttaaccggaaagataatgattgtggttattattatcatgttcttcgttattgtaattgctctctgccttcatctcttcgccagaaacttctggtggcgcagccctgctccccaatctcgcagccaccgccgccgccgctttgttttctcgtccggtccagacggtggaagcggactggatcccgcggtgctgagctccctaccggtgttggtattcgaaggccatgcccaagagtttaaggatggtttggaatgtgcggtttgcctctccgaggttgtcgaaggagaaaaggccaggcttttgcctaaatgcaatcatgggtttcacgttgcttgtattgacatgtggttccaatcccattctacttgccctctttgcaggaaccctgttgcatcctcagaagaatcttcagaatctcccacttttcccacaaacgtcttggtttgggggaatcaagctcaaataagttctactggtggtggtggtgcttctttggaggaaggttcatcctcatcctcttccgcttctacttgtgatgatcatggaatgttggtgattgatataccaagtgagatgacttcaacctctctgtcgcctgaagatgacgtcaaatcgcctatgacgggaagactcaggtcattgaagaggcttttgagcagggacaaaaggtttaatccttccagtcctacttcttctccagatgtacaacaaccaggatcagggagctgagttaggaattatttcccaatcatattcattattttttctttttttcttttctttcatgtgcacatattgcgcattcaggtgactgaagattgtatctaatgtttgcaagtacaccatgagggtgtttaatttttctgttcttcagaggtcagagctcctccagctctcatagatgtgctattattgtctttccnatacttgtgcatataatgccttagcagattcattgtctctcattgtctttgttgtatacagtataggtttctttcangnnacg

SEQ ID NO: 21119 - DNA, 763 bp, Glycine max
  Clone ID: PAT_MRT3847_119075C.1
gcttttacggtccttgaacctcttggagcggccccaatccggcaccctgacgatcgatgacgtcacgattgattacggcgccaatttgactaacaaggaaatcctagcggtgcgccaaaaaacggcgatggtctttcaaagctggaacctcttcccgcacctaacgatcctgcaaaacatcaccgaggggccaattcacgtcctcaagcaggacccggacaaggccaaacaaaaggcccacgagctcttgaaaaaagtcgggttagacgacactgccaaccgttacccgggtcaattatccggggggcagcagcaacggatttcgatttgccgggcgttagcaatggacccggcctacatcctctttgacgagccgactagtgccctggaccccgagttagaggcccaggtcctgcgggtcctccagcagttggccaacgacggcgattccttaattgtggtgactcacaacatggaatttgcccgccgggtggccgacaagatcgtctttgtcgaagacggccgggttgacttcaccgggtcggccgatgacttctttaaccacccaacgccgcggatcaaggaattcttggcggcgatggaattttagggggagggcgacagaaatctttgatttcgtcgtcgctcccactggcgtactgcactgttgccaatttgataaaactaagcaaaaagagcagcctgtctggggctgctctttttgcttagaggtttttcttaatctcgtagggttgggattgct

SEQ ID NO: 21120 - DNA, 283 bp, Glycine max
  Clone ID: PAT_MRT3847_119076C.1
aacagcaacgttgtagagggaaacctttgcgggaaaatcactgacagtaaaacgatctttccgccttccgtagcgccgccgttgaatacgaaagtgaacgcctccaccgggatcctggggctggaactgtgccgaacgccagggaagtgctgattgggctgtacagcaagacgctgaaagagatccacaacgttcccgaagatcaagggtaccgcaaggccgtcgagagcttcatcaagcacaggctcggcgtgtgccacgacgacgacgactgggagaacat

SEQ ID NO: 21121 - DNA, 206 bp, Glycine max
  Clone ID: PAT_MRT3847_119077C.1
gaaaattttgtttgtcggattttatagcgcaaattctggttgtcttaaaaaaaaacaaccaaaaagacaattgtttttgaaaaaaacagctgataaagacggctgggcttggacagcctacaccacctcaaataaactttgggttctcaaacaacaaaaaaaataaaggggggccccttctaaaagatccaactttaccaacccgg

SEQ ID NO: 21122 - DNA, 355 bp, Glycine max
  Clone ID: PAT_MRT3847_119078C.1
tttccccattcacagagcggtgttagtacctgcactctaaggtatagatatcattgctcgagcgaataccggtaccggaaagactttctcgttcgggatttcaattattaaaggcctcactgaaaatgagcacacaccttctcacaggaggtctggaaggcttcccagatttttggtgcttgctcctactagagagttggctaagcaagtggagaaggagataatagaatctgctccttacctgagcactgtttgtgtttacggtggtgtatattatgttactcaccagagtgcgctttcgcgccgtgttgacttggtggatgggacacaccagagaataattgactctgtagaa

SEQ ID NO: 21123 - DNA, 450 bp, Glycine max
  Clone ID: PAT_MRT3847_119079C.1
gtggggttttttttttttttttttttttttttttttttttttttttttttttttcccaaaagggaacaaaaataatttttgcaacaaatttcataaagaccccctttacaggaaccaaacaaaaccattttttttttttaaaaatcgccggacctagcgagggaaggggaggaaacctccaaaaaagggggcggccttttttttgggggccatataaatcaataggaaaaaacctttgcccaaaaattttttttggtttgggggggatgggggggaaaaattttcctacgcgggggggtccaatcggccccaaaaaagttttttttttcaaacctccaaacgggtttgataatttaaagaacatgggtcatgaaaaaaggatggggccaagggggggctctatacgggtttgtttccccctccaactggggtggaaaagcttgccctttt

SEQ ID NO: 21124 - DNA, 389 bp, Glycine max
  Clone ID: PAT_MRT3847_11907C.1
aaaaaaaggcccacaaaaaatctttgggggttgatgggatgtatgaattatataaagcggccaataatagacaaagggaggagggataatcctaatggctgggtagtaaaaaaactcctttaataagcactatatcttacaattggggccgtaataataaaaatttgccccaaaaaaaatacagaatcggccctaaaaattttacagggaataggttggaaaaaaaataatgaaaagaactgcccctgatgattaaaaattaaaatcatgaaaaggggaaaaaaaaaaaatggctaacatacctaaggacaaaagagggttctattaaacctagggataataatggcttaataattcaaggggggggtcaaattaaatcccttcttttt

SEQ ID NO: 21125 - DNA, 403 bp, Glycine max
  unsure (1)..(403): unsure at all n locations
  Clone ID: PAT_MRT3847_119080C.1
aattcggctcgaggaagcgtgaacggtcgcgatagtttcggagaatcggcgtttacttcctttggngacggnnacgngacgtatgtttgttctgttgcaacggcaacgtcagacagggtggaatcgttggagttaaagcgtgtctcggcaaatgattcgattccgaagaggtcacctgtgtcgtacgttttggagaagtcgtaccatggaaattctgtgtggagcacaacaactattggtgatgaaaagggacgagaaagagtgtatgacactatcttccgcttgccatggagatgtgaattgctcatagatgttggcttctttgtctgcttcaattcatttctgtcattattaactatcatgcccacgaggatagcgatgaccatctggaggcttctgaaaa

SEQ ID NO: 21126 - DNA, 125 bp, Glycine max
  Clone ID: PAT_MRT3847_119081C.1
ccctcttcctcccaaacacccctagacttttatcacattcttccagttctgtccttatacccacttaacctcctaagttccataaatcaactacctacatatgaccttccaaacatgcaagtccc

SEQ ID NO: 21127 - DNA, 267 bp, Glycine max
  unsure (1)..(267): unsure at all n locations
  Clone ID: PAT_MRT3847_119082C.1
tnnttgnaattaggannggtaaacagnngcacncgtgnanangagngtgangnanntganntanacntcactntgnntcngttcagnanacaagttgancttngctcngnccanangncgnnnntngcanacnncnggantacacagcgntatgtccaacnngnngtcntcnnnacgnantggatcttncatncnagctncaaaagnctnctnnaatgngtcanntntncngnncacggagnggncgntgtnccgtcngtngtaatt

SEQ ID NO: 21128 - DNA, 440 bp, Glycine max
  unsure (1)..(440): unsure at all n locations
  Clone ID: PAT_MRT3847_119083C.1
gggctgatttagtgcttgcatggtcgtgagaagatgatagaaggggaatgcaaaaaaaaaaagaacaacaaacagaagaaggaggacgccgaccacacagaaagcaaagggtaataactacccccgcccattacgggcaaggatattactgtcgatacaacaattcacacaagaaacgtcgatacgaacaaaaaaggaacggcctaaacattacccatcaatacaatagaaaataccgcaaaaacatccccatgtgagggccccgccgaaaatgctagaaaatacagagaaaatgataaacaccccccagccccaatctcatggcacagaagaaacagaaaaggactacacaaaagccccccaaacccaaaatggactagcatatttggctcatgaacacacctcaaccactaatgaacnttctgaaccccaaggggtac

SEQ ID NO: 21129 - DNA, 160 bp, Glycine max
  unsure (1)..(160): unsure at all n locations
  Clone ID: PAT_MRT3847_119084C.1
aaaaataaacccgaataaaattggatatttacataaacattggaaaaaaaaacacaaatttttagtttactgtgactngaacatcctaacttttttccaacaaagaactagacacacagatttggaaacagctttaaagaaaatctacccattcccccaa

SEQ ID NO: 21130 - DNA, 309 bp, Glycine max
  unsure (1)..(309): unsure at all n locations
  Clone ID: PAT_MRT3847_119085C.1
cctcagcagcctaccgacactgaaaaccagagaaaagaaaagcaccttttttccgccattattgacccttcttgaaaactggtcatcaatggtgatgaaggactcatcttgacaccaccccacttccaaattgatttggattagttgtgttggacttggatgctgctgctcatacagttgatccacaaatgagattccaccttgcattgtttctctttttggcttctcttcaagccactttaagtcaagatatgaacaggttcactnagtagaggagctcagacaaggctgaaacggtgataatttatt

SEQ ID NO: 21131 - DNA, 315 bp, Glycine max
  Clone ID: PAT_MRT3847_119086C.1
acctgtggtatgttttatgtgcgtgcttatatgcttgtttatgtgcatcctgagaatatgatagaaaggagaagcgaggcatatggtaccgcggctcagtgagtcgggcctatctattacgtaggtcagcgacacgatcaatacttatacctaatctaagtactcttaagttaaatacgcacgaatccgctacgtcgaccagaatagacccttacgtctagactatacctcatgtatctgtcacgtactacacacaggttatcattaccaatcgagatctcacgtcactgtcctaaacgaactcactcgaacaca

SEQ ID NO: 21132 - DNA, 981 bp, Glycine max
  Clone ID: PAT_MRT3847_119087C.1
ctctggcttacctttgcatccattattaatgatcaagttctctttattcaacctctcaacaaactaaagagtgaaagatcacgctgaaggatccctgctaattaaattaaagcaacttaattagcagtatagcatgtccaacaatggcagcaacaacccttatgttcaaatttcccctcttcacaccaaccgtccaaagccaatggatacggtgtgtgatgcattaaaccgctgcagcaggaaggttggaaaagcaactagaagagctgagaccatggctgacaatttctggaatcatatcagaattggttctagtcttgctgatgcagcagtggctagaatcgttcaaggaacaaaggtgcttacactaggaggacctgatatattatttcaacaatcatttgggaattttccaggagagaagctcataaagtcatttgcttgctacttatcaacatctactggacctgtaattggaacaatatatgtatcaactaaaagagtagccttttgcagcgactatccactgtgcaattatccactctcgctgcagcaaaaccagagtgtgcattataaggtcgtgttgcaactcgatcagttaagcacggttagtcctttctcaaatagatttaaccctgcagaaaaatacatgcagcttgtcacagtggatggttatgaattctattttatggggtttatagcatatgacaaggctctcaagacagtaagagaggcttcactgcaatatcacaaccattccagagaaagctcgaatgcttgaattatttttcatctatgtgctggacacacacccttgaactacaatgtaccctattccaatttatttggtagcaattagctgagaaatgagcatatggcaaatttcatcacaagttaatggggaaagcccctccctagaattaatgtcgacccaacgataaacgaggtttaaagtgaattttaaaagaaattttatgcttt

SEQ ID NO: 21133 - DNA, 328 bp, Glycine max
  Clone ID: PAT_MRT3847_119088C.1
cactgttgataggaattaccttcatgtagttgatgaatcaaatgggcaccttgatgctttgcgtaatctatatgaacctaatatcggcagtgatgtttttaaccatgggaacaggataatgaactttagttatggaattcgttcgagcctctaatatgtgcttgcaaagaaaactccacttgggatggctggctgaatacctgacgatgctgaaattgcttatgcttcttctaatactgcgtaatgacatctcctaaggaacgccaagtacctcatcttctagatttgccatgattaatggaattgggcttataaatacccttttgct

SEQ ID NO: 21134 - DNA, 441 bp, Glycine max
  Clone ID: PAT_MRT3847_119089C.1
ctctttttttggtcaccatgcctcagaccaattcacaaaaaaacgccagttacacatggctcgagagtaaacgagggggggaaattctaaaatagggaaagcttactcaacaagaggggaccgcctaatttgcttgattcgtttttgaccaactttcttgcgagggagaaccctattcccaaatcctgcataagattccccattttaaaaaaatctgggaagaaccggtggaacaaaaaaagcagggataagactattaccccccctttcaaaatgttggaagaggccccagagaaacacaaaaaccgaacaccgtttgggagtgcccattaggaaactgccaggccatggaggtagatttgcccaccccaaaccgcacatttcttaaccattaatggggccccccccccttattgggaagaaaaattcccatgaaagggg

SEQ ID NO: 21135 - DNA, 440 bp, Glycine max
  Clone ID: PAT_MRT3847_11908C.1
aagggaacccatttttaaattttttaaaaaaggacaaagggggttccaattccttaaatgggccaattccccctcctttccatgtttaacataaaattttgtctggcaaaatatccctgccggggctaactttaattcccacttgttttagccccccccctaaaaaagggcgggtaaaataacaaaaatatctgttatatgaaaaaacaaaaaccccctccactttgaagttatccaaaaacttaagggcaaaactaggagggataacctttactttgcatggggctgggaaatcttttcaacctgggaaaaaacataaaacattttagggcccataaacggaacattctgcttccaaaaataaacaaggccaacccccttttggaggggactaccctctgggaggatcctaaaagagggggaagttttttgaaaaccca

SEQ ID NO: 21136 - DNA, 2309 bp, Glycine max
  Clone ID: PAT_MRT3847_119090C.1
ccacgcgtccgatcaatttcagaggcggagcctggaggctggagctgcttcaagtcttcaactatctgaatttctgaactcatccattcgttagcgcagctagaacgaaaactgagtaatggaaagtggagggaactcccttccatcagggtcagatggtgtgaagagaaaggtttcatatttctatgatccagaggttggaaactattattatgggcagggacacccaatgaaaccacacaggattcgaatgacacatgctcttttagcccactatggattgcttcaacacatgcaggttctgaagcctatggctgctaaagatagggacctttgcaagttccatgctgatgattatgtggcctttctgagaggcatcacccctgaaacgcagcaagatcaattgagacagctgaagaggtttaatgttggcgaagactgccctgtatttgatggtctttactctttctgccagacatatgcaggaggttctgttggtggtgctctaaagttgaaccatggagtatctcacgcgtccgtaaattgggctggtggtctacatcatgcaaagaagtgtgaggcttctgggttttgctatgttaatgacattgtgctggctattttggaacttctcaaaatacatgagcgtgttctgtatgtggacattgatatccaccatggtgatggtgtagaggaggccttttacaccactgacagggtcatgactgtttcgtttcataagtttggggattactttcctggaacaggtgatattcgcgatattggatatggtaaagggaaatattattcactaaatgttcccttggatgatggaattgatgatgagagctatcagtccttgtttaagccaataatgggaaaggttatggagatttttaggcctggtgctgttgtattacaatgtggtgccgactctttatctggggacagattaggttgtttcaatctttccataaaaggtcatgcagagtgtgtcagacatatgagatcttttaatgttccccttctattgctcgggggaggtggctatacaataagaaatgtggcacgttgttggtgttacgagactagcgttgctcttgggattgaactagatgataagatgcctcaacatgagtattacgaatattttggtcctgactatactcttcatgttgctccaagtaacatggaaaacaagaactcccgacatttattggatgaaataagagcaaaacttcttgataatttatctaggcttcaacatgcaccaagtgtcccattccaggaacggccacctgatgcagagcttctagagagagatgaagatcaagatgatagagatgaaagatgggatcctgattctgacagggaggctgacaatgacagcaatcctgttcgcagaagggtgaaaagtgaatgtgttgaagctgaggataaagatgcagtgttgggggtggactcaatggcagtggatgaaccatgcatcaaagaggagcaggataatttaaaagagctttctgatcacaggtcacgatgaagcaataataagcattattgatcaaccttctccttgactagtaaactgaagacatatatggtgcaagcttgccttggcttttgatgtttaatattactgcaagatgaatgtagtagttattttttctgtatgttacactatggtaggagcctttgtcaagggagcagctcattgttggatccgttgagatgaagtaataacattcatcttgtgtttcttggaaaaatgattaaacaaacacatgctttcaccataaatctagtttgtcatttatcgatagcggtgcttagtggcattgggccactacaaggagaccgttgcatctcagttcagtggtgcgtgcggccattgcggctgtatcccagagtggtggaacgtcagattgtttcaaatcttctagaagatctgtctgaagttgtttcaaaatcagtgtctgtcgccctgtaaattatagtttcctcctaaagcagtttggcatgcattcatctgacgtctgtagtgtttcaaatttttgctttatctggaaactgaaaagatatggtgcaagcttgccttggcttttgatgtttcatattactgcaagatgaatgtagtagttattttttctgtatgtttcgcaatggtagcagactttgtcaagggagcagcttattgttggatccgttgagatgaagtataacattcatcttgtgtttcttgcaaaaatgattaaacaagctcattctttccccataaggggggggggggggggggccccggggggcccagg

SEQ ID NO: 21137 - DNA, 475 bp, Glycine max
  Clone ID: PAT_MRT3847_119091C.1
aattcggctcgagggcttcaacatgcaccaagtgtcccattccaggaacggccacctgatgcagagcttctagagagagatgaagagcaagatgatagagatgaaagatgggatcccgattctgacagggaggttggcgatgacagcaatcctgttcgcagaagggtgaaaagtgaatgcgttgatgctgaggataaagatacagaaagttatcataaacatctagattgtggaagagattatcttacgcctttcaaggagatttcatgctccaaggtgtcgggggtggactcaatggcagtggatgaaccatgcatcaaagaggagcaggataatttaaaagagctttctgatcacaggccaagatgaagcaataataagcattactgatcaaccttctccttgactagtgtctgtcgacctgtaaattatagtttcctcctaaagcagtctggcatgcattcatctgacgtct

SEQ ID NO: 21138 - DNA, 1151 bp, Glycine max
  Clone ID: PAT_MRT3847_119092C.1
ttacggctgcgagaagacgacagaaggggaaaatcctctcgtctatagtctattgcactctgacagacactatcagatttcagaggcggaggcggaggctggagctgcctcaactcaagtcttcaactatctgaatctgaactcatccactcactcgttagcgctgctagaacgaaaactgagtaatggaaagtggagggaactcccttccatcagggtcagatggtgtgaagagaaaggtttcatatttctatgatccagaggttggaaactattattatgggcagggacacccaatgaaacctcataggattcgaatgacacatgctcttttagcccactatggattgcttcaacacatgcaggtcctgaagcctacggctgctaaagatagggacctttgcaagttccatgctgatgattatgtggcctttttgagaggcatcacccctgaaacgcagcaagatcaattgagacagctgaagaggtttaatgttggcgaagactgccctgtatttgatgggtctttactccttctgccagacatatgcaggaggttctgtttggtggtgctgctaaaattgaaccacgggagcatgcgatgtcgcaataaattgggctggtggtctacatcatgcaaagaagtgtgaggcttctgggttttgctatgttaatgacattgtgctggctattttggaacttctcaaaatacatgaggtttccctaattaattccccacactatcttattgatgcatggctgttctcattttaatttagattgaatttactctttacatgaccaacatctgcaaaattccataacatccgtttggaactgtgaggttccaaaattgaaagtgtattttagaagaaagagggataagtgagtatgtgctagagaacagtggtaatgtggacgggttataatagctagtggttagtggtaattagtaagggaagtatataaatataaatactgttacaatcttgagtagggattgtttttggcttcttggcttcacttggctgtttttgttgtgactgattgatgtactgcattgtggtttactattttgctttattatggtgttgaaatgttgaattattatattggtgtagaggaggccttttacaccactgacagggtca

SEQ ID NO: 21139 - DNA, 552 bp, Glycine max
  Clone ID: PAT_MRT3847_119093C.1
tacggctgcgagaagacgacagaaagggatatcatgtgatatcattgattaagaatggcatttgattcttttgtcttttgtaacggcgtgacctggtgacaaataggcgtgttcacgtgcatttatttcactttctgtgtccaactttacttgtcaatattccattagtgccagagagagagagagaaggtgaattgagccatggaacctcctccatcacaatccattgaaatttctggccacggataccaagctggggatgatacacaagacaaggtcatcaatgaatgttgctcttgttgctatgactgtacacagggtctcttcgatttcttgtgctgcaacttttgttagaagtctttagattaaatttcagtgttattacttaataccagcaatatgtaaagtcattgggacataggtatatcgagaagttcttttcccatcccctttattaccatagaattgatggatgatcagaattaactaagaaaaagttgtgatttttagttattgtgacttttagtatgaatattctccgtttctctccta

SEQ ID NO: 21140 - DNA, 113 bp, Glycine max
  Clone ID: PAT_MRT3847_119094C.1
gggggggaacggaatcgcccatccaatcgaaaccctagtgggtgactgcgaggcgcactggaatcatccaccctatgaatctatgtgcactgaagaagtggactaaatgacca

SEQ ID NO: 21141 - DNA, 572 bp, Glycine max
  Clone ID: PAT_MRT3847_119095C.1
ttccgagactttctgtgtccaactttacttgtcaatattccattagtgccagagagagagagagaaggtgaattgagccatggaacctcctccatcacaatccattgaaatttctggccacggataccaagctggggatgatacacaagacaaggtcatcaatgaatggtattcttctttttctttataaaatttgatgtgatgtgagatataatatgtctgattattgaaatactttaacttttgttttctggatatgtagttgctcttgttgctatgactgtacacagggtctcttcgatttcttgtgctgcaacttttgttagaagtctttagattaaatttcagtgttattacttaataccagcaatatgtaaagtcattgggacataggtatatcgagaagttcttttcccatcccctttattaccatagaattgatggatgatcagaattaactaagaaaaagttgtgatttttagttattgtgacttttagtatgaatattcttcgtttctctgtcttttgggatgcctttactttaccaactgaatttgagtttgatactatcc

SEQ ID NO: 21142 - DNA, 241 bp, Glycine max
  Clone ID: PAT_MRT3847_119096C.1
tcgaaaagggttgccataattgcatggtagaagccaacaaaagaggcctctcaaggctaagctgggtataaggataacagggctgaggagtatcctgcagaaagctgtacagaagcctataaggattacagtggcttacagaaacctaattctaaacgaactggtgcttcttgactgtcaataccagcacgaatttgatactgtacatttcgttctacctgaattttaattggagcagtca

SEQ ID NO: 21143 - DNA, 185 bp, Glycine max
  unsure (1)..(185): unsure at all n locations
  Clone ID: PAT_MRT3847_119097C.1
accccaatgaccaanccanaaagcagaactccgatttctccttcaagcnaagnnccgaggtaaagggtatcaaatttggaggccagttcatagtgnagtccttnnagaatcagaagagcagacctnagaggttntnaaggttntttttttcaacaagcngnaagncncatggaggaaggggangg

SEQ ID NO: 21144 - DNA, 760 bp, Glycine max
  Clone ID: PAT_MRT3847_119098C.1
ggcacgtccgcccacgcgtccgcccacgcgtccggtgtgttggggaactgaatttgaatgtggagaaatgaagatgatggagcgaagacagaatcgaactccacaagaccaaatagctaggattctggttgaatttttggaggtggctattactgctgttgtttttctcaaaggagtttatccttctggtgcctttgagcggagaaggtatatgaatgtggtggttcaaacggctagccatcctcagcttagatattacatacatgccactgattcttatcccttaccttccatatactagggaatggtggagagagtagctgttattttcttcaatgctgacaatgttccactggagaaatttgtattcaagcttgcaatgaaccaaacttatagttcagaggtggaagaggttgatcttgagttctctctcagatcatttctcatcaaactgtcaaactcagaatctctttctaaagggcttcctcctgattgctggtgggagataactggttactttcgatcccttcctgagactggtacaagcaaggaagcagacttgtggatccctactgacacaaaacaatggcagcagcctgcacttataacccctatcaagtcaatgagtagtgaacctctgtgtttacaattgtacttggagcatccatgtttatcagaatcattgctgtgagaacggaactcaaagccgcagtacatattatacatgtattaaatatcgcatttctctataccatgcaat

SEQ ID NO: 21145 - DNA, 407 bp, Glycine max
  Clone ID: PAT_MRT3847_119099C.1
ataaatggcatatgagaagactaaagatgacaagggtctttgacggtgtactacatatgctatgatttggttactttggctgtagagaaaaatatcaaatatttcaaggataattccagagttacctctacattaggattttggctagtgactgttaactttttttcattgaatattgaaagcttggcatgcattgctgaaatgatgtgttttttgtttttctctctgtaataggatatcttatcctagtctcttataaatttcttttgctaaatataatgaggtgatgattattcttgattaatacggtagcattaaaggaaagtaaattacaatatactaaaatagtgactaggatatagaaatggtaattatccaagtatatgtacttctagtaccactggtac

SEQ ID NO: 21146 - DNA, 311 bp, Glycine max
  Clone ID: PAT_MRT3847_11909C.1
gattcatgcacctgaattattgatgaagttcgatttccatcacagcggtgcaaaatgtatatcagtagcttgttcgccatctttcgagggtacgcgctcacctgaaactgagcttccgccaacgctcatgatctgctcgacatggatagcgatactattcggaacggttccataatctacgttttgccggccacacaaggactcggtggcggaacagtgcgaaccgcacgcgggaatgacacttgcccgatcgttgtagtggtatctcccaatccacacaccaaggggtgtgtcattaactttgaatctgc

SEQ ID NO: 21147 - DNA, 292 bp, Glycine max
  Clone ID: PAT_MRT3847_1190C.1
ggacaagacctgctaacggtcttggtttgtgtttcgtgcactgccgccgtctttacaccaagcgacgcttcaactccgttgttcgtccccggcgtgctcatagacaccgggttcatggtcgtctttatcggctggaggttcaacttcgcgcataagacacagtctgaccccactgagggatatgcgggcggtaatattatgccctgtcgccaaagtttactctaggatgttaaacgtcttactgactaaaactcattttggagcccgaatatccctcgattatcccttattt

SEQ ID NO: 21148 - DNA, 223 bp, Glycine max
  Clone ID: PAT_MRT3847_119100C.1
agccaactacctattgacgggaagattctctaattcgagtgacaggacctcatcgattgcagaaataatgaccggtgagggagcactaacgcagctaaccattgtgaccgggggaccattaaacgatatgcaacccctctagctgctcaaagatataccatatttcattgctgcgctgactcctgtaactggcaaattcgttacatatgatggggaggatgat

SEQ ID NO: 21149 - DNA, 475 bp, Glycine max
  unsure (1)..(475): unsure at all n locations
  Clone ID: PAT_MRT3847_119101C.1
ttcagaanccggtgcgatgaactcgtacggtagctcgcatactagctcgagggcgtcctgtcttattccggtttattttaacacttgatagagagctgacgggtgatttaacaattggggtatatttagaagatgccacttcactatataaaacagtgagtaggataacatcctgaaacaatggcaccaatgaataaattggtggacttggagatttttggatataataactcttgtatcgaatgtgggagttgatatacatagattacacaatgaagagttagtgacatggtataccttaatcaccaacataaatcggagttaacgctgtgcaaattaataaacatttgacctactcaaaatggtatatgaattgagctgatgcacccatagaaaatacgagagtgttgattatcctgacgtcggacgcttcacttgtactaagccgcatgctgaatgaaaagatgataaagca

SEQ ID NO: 21150 - DNA, 483 bp, Glycine max
  Clone ID: PAT_MRT3847_119102C.1
aaattcggctcgagtgatgcttgggcttttgaggaggtagatatgacatttgaaggatcctttaacttttcaacaccataagctttatgggctaatacttgatctgttggtacctggcatatggatttttaagtaaagaaagaaggttttaaattgtgattgtggttatggttccatcacaatccttaatgttgtgagatattccggacaaatgcggccacaattacggtcccaatgcagtcatggggggcccaaaaaccttggtgttgtggctaaacttgtggtcaccgaccttttttaaaaaccttgtaaagtattgtgtcgatggatttagagttgtgtttctccaaatgtgttggttttgtgtgggtgaaattataattttcttttcacctccatttttcttttctagtgtctttttttcgttgtcactctgtaatgtgttatgaattgtaagcagggtcctcattctaattttgctgg

SEQ ID NO: 21151 - DNA, 204 bp, Glycine max
  Clone ID: PAT_MRT3847_119103C.1
ggttaaattacatatctgttttgattgcggtgacgccacaaacgaacaattctttttttgcgcttaaagagatggagacaaacattgggggaggaggtagcggcagaatcactagcgacagacaagctcccctccaagcgaggaataaaacacactagcacgggccacaccggtatacagtcaactcccgggaggggggggtga

SEQ ID NO: 21152 - DNA, 735 bp, Glycine max
  Clone ID: PAT_MRT3847_119104C.1
ccacgcgtccgtgggaaataaaggtgtactaatactgaaatagatagtattgcactttggcactttggttggggaaaaatgcaggatatggggtttcaatttgttgaccaacatgattatcttgtagctttttttggagattaaaggtcacagattgaagtgatggagatggtagtggagggtctttgctgtaaatgaggacactttttttttttctctcaagtgttgcactctctcttggtgattgaatgcatgcacattaggcaactgcggtcccactttcagccctcctttttcattctttcaaggttgcacgcatatcatgctggcatctactctaaaagtaacaagaaagtctcctgatgtttggcaaagtgagcttagtgtttcattatgagttgctagggcccccttcgtttggatatatagcattttgtggtaaaggttactttgttttacatgttgagggagggaggaatgatgataagcaattctagtttctgctttgtaattcataataatattggtggtctaggtctctttttgatgatgctattatgtagctgtcaagtgtgtgtgattgtaagaataattggagtgtgaatggttatggaagtggtgtatgcagtttatagtctatcatgcttcatgcatgtagttcatcttgtcagttgttagctgatgtggttttcatgtttgtacatatcattttctttcaatctgtgcttcctcatt

SEQ ID NO: 21153 - DNA, 808 bp, Glycine max
  unsure (1)..(808): unsure at all n locations
  Clone ID: PAT_MRT3847_119105C.1
ccacgcgtccgacttaacccttggatgtgtctacatgtatcaatgtatttgtggttttttaagatcctttatgcgcagctattataggaacatatcctgtgagaacatgatggtaaagattgttttacctatgtctgattttgaccgtacatttagattgtatgatcaagagttgctcctttcatactcttgtctctcacttgatatgcttccctactctgtatatatatgggagggagcatgtctggtgagagatgagagaagtcaatcttggtcatccattaacttctttcatgggagcatgctctgatttctctcacctaatatgtttctgatatatacagatctgtcatctggaccttggttagctttgattaaaaattatattgtttggcatatctcttaaccagttcttagtaattcttttattttcttgaaaaaagtgtaatatttagggtatttgtggatcaacacattggtgaataggtgtatctttaatggcaatgggaaagtcttggatgatttggtcttggctgccaaagaaggtgtttttgtcaacattgatagtgaatttgacttggaaaacatcatagcagctgcaaaaattgctcanaagagggtgaaatgttttactacggattaatcctgatgtggatccgcanggtccacccttatgttgcaacagggaataagaactccaaatttggcataagaaatgagaagctgcaatggtttctagatgctgtgaaagagcattctaatgagttaaagcttgttagggcccactgccatcttgggtcaacatcac

SEQ ID NO: 21154 - DNA, 154 bp, Glycine max
  Clone ID: PAT_MRT3847_119106C.1
tagtgtgctgcaatgagtaaccaatctggtgttgctaaaccaagatgattcagagataacaagctaatgtcggcacttactcaagttcgtaggttaatggggaaaaccgatgatctcttcccgcctttcatatataccatgcattttttatgag

SEQ ID NO: 21155 - DNA, 172 bp, Glycine max
  Clone ID: PAT_MRT3847_119107C.1
tggatcacttgcacgtgccggtaaggttagaggccatacccctgaagtggtcaaataggatacgaagaagaagccacgcggccccgctcacaacaggatgtactataatctgcgactcggcaccgtcgtggcgggattccgccagaagagaggacctaactcgtctcataag

SEQ ID NO: 21156 - DNA, 244 bp, Glycine max
  unsure (1)..(244): unsure at all n locations
  Clone ID: PAT_MRT3847_119108C.1
cgttctttcatgcttcttccccgtttctnccanctcctccggcaanctcctcctcctctccaagncatggcgcgtgngtcaagtgcgncaatcaggcccctcatttcaacgtcatccggnatgtaactctcgtgggggttctctggcctccaaatctcgttttcgggcgcactttcacgcctcncgcggtgcgcgggcgaaaanagcgagcggcggcggcatggggatcgcacgacagaggata

SEQ ID NO: 21157 - DNA, 322 bp, Glycine max
  unsure (1)..(322): unsure at all n locations
  Clone ID: PAT_MRT3847_119109C.1
tcgcangcacncgtacgtnagctcggaattcggctcgagntnancantntgnctngtnacnagangatggggaaggngtacngcgctaccantctaaanggttcagnngaggnttgnggattgttttggcntcncgccacngggttttgagtncatggnatccagattatcaagtnctgtaccatcccagctgggctttgnncgagggagagnaccaagcaattncacaactggagaatnangttccgatcccncgcttccagacnagttagnncacntcntccggnagctgtcggaccacatananggncangaancgnat

SEQ ID NO: 21158 - DNA, 403 bp, Glycine max
  Clone ID: PAT_MRT3847_11910C.1
gtaatgcggccgctgacggttgtgagtaagtactacttatgggtccatggaaaatcaaattggtctttgaacttcaatggaagattactgatgaacttgcgggaagcgagccaattctattcttaggattcatggcatgaccccacctggatgcttttacaaggatttttaaattcacgatcctcctaaatgtttctagcactactaggatcatttgcgggaacattatatatttgatgattgcaacttacagaattggtatcaagcaatgtgaactcatattctaacatatggcggctacaacttcggcgtgttgaatcccacagaacacccatatcctcggaaaagcttgtcttgaactcagtacttaccatagggcggtaaaactcttacagcgtgcgag

SEQ ID NO: 21159 - DNA, 353 bp, Glycine max
  Clone ID: PAT_MRT3847_119110C.1
ggcagttgaattacagatgcagtctacaatcatccatcgttcatcatctgtctacgatgagctgtcactgagttgcgcagatatcgcgcgtgtacacagcctgctcacatccatcacgcatacttcatgaatatagcagcagtgtaaatgatgacattattagcaacttgttgagttctactaaagttccagtagacactcatgggtgaaacatgtgtgcaaaacatgctgctaggagatatcatggcaaattgagaacgcattcgtgaagcagttgcggatgaattgctgttacatccggctgatttgctgctgccgctggtcgtactgctacctgatcacgagatgctgaa

SEQ ID NO: 21160 - DNA, 216 bp, Glycine max
  Clone ID: PAT_MRT3847_119111C.1
catagcactaagtcaattatttatttatttttgcaaacccgcattagcattctttagtacacgcttacactatgtgcactccatgctaggtcatcgacttgcttagtggtgtttcaataacgtgtgagtaaattttatgaatgacatgttggatcttcgacttccttgagctcgcaaagtttagcacaaaactaaaatcttttttcggacgcgtgg

SEQ ID NO: 21161 - DNA, 450 bp, Glycine max
  Clone ID: PAT_MRT3847_119112C.1
ctgcgagaagacgacagaagggcacactagaaaagataagaatcaaaaccccatgacttaaaaattacgttaatgagtaggttaggataaacttataagattattatatcttgttggcccaataaatttatcttggtgagttattctatactatacttgttggaattttctattccgataattaatgtgggctaatattataagacaattgtattagctatttatcattagtgggttttattttaagttatcaaattaagtgagtccgttagacaactaaatcagatgatatggacttaaatgaacagatgtcagtgttagcccattagggaataatgaaaatcctattaggttaacacaccataagaagactatggtccccaatataccgagtcatcacatataatttttcttctccccatttgaagagttactaaggtgcctataata

SEQ ID NO: 21162 - DNA, 509 bp, Glycine max
  Clone ID: PAT_MRT3847_119113C.1
tcctctaaagcgaccgatggggggggtatccattaaccatgctatgtgcataaatcatctttaatacgaggacatacttgccttgtatttatccactatatacaacatctgtctatatccaccagctattataagtcttggagaaccgaaagagggcaaagactggaatacatacgctcagaaagggcgatgctagatatcaaataaagtaaaaaaacaccacacggaaagcttaggggaaggggactaatgttacatgatgcaactcaaatgactcccaattaatggaacacgcatgaactcgccttctctcactacattcactcagcctctgatggctgcagaacaaccttgattgcagcgaaacacacagccttaagattctgttgaatctttgagctagcgttctatatacacagcgctgccgaactccttttacaactctcttacctgagcattcattataggtgtggcccgaagatgatcaatcaaacattgcctatttctcc

SEQ ID NO: 21163 - DNA, 561 bp, Glycine max
  Clone ID: PAT_MRT3847_119114C.1
cataagcaatccacatacatcatcacataataatgaactaaagatacatacattttctgaataaaactttcaaaagctattctagctagcttgtatccaaagagagaagctaaacatgataagcttaaggtttatttgaatataagttataagtgtttttgaaagattttttcgtgaaaatgtagagctttttttaatagaatttttttgaaaagctctaaaaaaacattttatgtttttatatccgaacaatcttaacaacatgctaccatataagtcaaaagtacttttgaaagtttttctattaaaaatatataaaaaaattttaggagagacgctcttgaaagcacttctacttctagtggctggtgtatccaaacatgtctaagcataagatgataaatgataagtgtttagtatgggctttctccaatgtagttcccaggaggattatagaagcaaatggtcaagctagcctgttccttcacacacgtcgctcgagcgcacccgagctcaagcgactttctccacacaacctgcgtgtagacgccgcaccggtgg

SEQ ID NO: 21164 - DNA, 276 bp, Glycine max
  Clone ID: PAT_MRT3847_119115C.1
tttcaaaacttatgatctgatcatacttcccaacccaaccctaccttaaagaactgtcctttctttaattaaactaactgtgccgtgaggcaaacctatattctttccatcccagcacactacccttaccttaacttaacctagcccaggggaaacgaaaccaatattgttttgttctatataaaacactactcttctgacctgacatgaccttccccactgggctgagctgacttgactttcttactgtactcatctactccaggctacggcact

SEQ ID NO: 21165 - DNA, 169 bp, Glycine max
  Clone ID: PAT_MRT3847_119116C.1
ttcggctcgctcgtctacctcgttggcatggtagtcctcgtcatactcttagtgtctttggtcgcttttgtatacatggatactcttcggggacacggcaacattggggccaactgcgcttacttggagtaccgcatggatgacttttctggctatcttcgtcgtaggg

SEQ ID NO: 21166 - DNA, 184 bp, Glycine max
  Clone ID: PAT_MRT3847_119117C.1
aataagttgtgcacttcttttttaaaaatggcctctctcacacgttctaaagataggatctttgttcatcataaacataaggccgaggtgtacacaaaaggtaacgttttttattttctgggttttataaggccttcatgaggagggaacttatgtacacctgcaaaaagtttcatctcacctt

SEQ ID NO: 21167 - DNA, 338 bp, Glycine max
  Clone ID: PAT_MRT3847_119118C.1
aacaattactaacttcttttctgctatcatcttgtcactctttgccatttccatactttaaacatttttaattgctgctaattaacaatttatccacttttatgacaacaacatcaaatattttaatgtaattgtctatatttaccatatcccatcacattccctctaatagatttatccttacccaatacctcattcccttcatgtttttttttcagaaattctactttacatcccttttttttccccccctttattattttcataaaacctttttccctttctactactactttataacaattaattatgacccaacttccctttatcttaacttt

SEQ ID NO: 21168 - DNA, 1983 bp, Glycine max
  Clone ID: PAT_MRT3847_119119C.1
tgctgggattactattgctgcgtccagaactaaggcaaaggccacttatgttaccctgatatgtaagaattgtaagaaagggaaacaggttccatgtcggccaggacttgggggagcaattgttcctcgatcttgtgatcatgttcctcagcctggtgaagaaccttgtccaattgatccctggctcgtggttcctgacaagagcagatatgttgatcaacaaactttgaagatgcaagaaaatccagaggatgttccaactggagaacttcctagaaacctgcttctctctcttgatcgacatctggttcagacagtggtgcctggctcaagattgacaatcatgggaatttttagtatctaccaggcttctaactctaatacatctaacaaaggagcagttgcaattagacagccttatattagggttgtaggaatagaagaaacaaatgagaccaattctcgcggtccagctgcatttacacaagatgagatagaagaattcaaaaaatttgctgccgaacctgatgcgtataaaaatatctgctccatgattgctccctctatatttgggcacgatgatgtcaaaaaggctgttgcctgtcttctgtttggagggtcaagaaagaatttgcctgatggagtccggttaagaggtgatatcaatgtattgcttctgggtgatccatctacagcaaagtcacagtttctgaagtttgttgaaaagactgcccctattgctgtttatacttctggaaaaggctcatcagcagctggcctaaccgcttctgtaatccaagatagcggcactcgtgagttttatcttgaaggaggggctatggtcttggccgatggaggtgttgtctgcattgacgagtttgataagatgaggccagaagacagagttgccattcatgaggccatggaacaacaaactatatctatagccaaagcaggaataacaactgttcttaattcaaggacttcagttcttgctgctgccaaccctccatcaggccgatacgatgatcttaagactgcacaggataacattgacttgcagacaactattctttctaggtttgatttaattttcatcgtgaaagacgtcagaatgtacagtcaagacaagataatagctaatcatatcataaaggtccataaatcagctggtggaaggatgggagagagcagaactttgaaagaagagaattggctgaagaggtatttacaatattgtcgaactcaatgccaccctcgtctatctgaatcagcaacaacattattgcagaatcattatgtgaaaatcagacaggatatgagacaacaagcgaatgaaactggagaagctgcagcaataccaattactgtgaggcagctggaagctattgttaggttgagtgaggcacttgcaaagatgaaactatctcatcttgctactgaggagaatgtgcaaaaagcagtaaggcttttcaccgtgtcaacaatggatgcagccaagtcaggaataaaccaacaaataaatcttacacctgatatggcaaatgagataaagcaagctgaaacacagataaagagaagaattggaattggaaaccacatatcggaaagaaggctgattgatgacctcagcagaatggggatgaatgaatctattgtgagaagagctcttataatcatgccccagagagatgaaatagagtccaagagagaaaggcgtgttgtatttagaaaagcatgataaatttatgctttacccattaggcagtagtgtatgcagaaatcagaatgctaagggatttcaaaattcaaaggattttaggcagtagtgtcctgtttatctaaattttgtctatttttaggcttttctcctttgtaaggttcgatgagctttttccttatataattcaagtcccatgtaatatttttttgtgttgcaaaaacagtgaatgtctaatttttaaacctattttaaaaaaaaaa

SEQ ID NO: 21169 - DNA, 481 bp, Glycine max
  Clone ID: PAT_MRT3847_11911C.1
ggaatcatctcgctctttgagacagcatatactgtatgaccacagattgcaccaatttgccttctttttgtgataagcagcatgtagtaaggccccaaaaatttgatgaaccctacaattccataacaagttgtaacaaattttagtccacctgtggacttgttaccctcatgtatccgtctcaaaagatcagaacattcactttctgtatatgtggtggaatcttcacgcaaatttagctcggaaggatcaagacggtcaatctttagtactttccaatatgtcctgctcttgtcccttcctatcatgtaaaagttctgtggaataaaaaaaatgcagaagttaaatatttttaagtacaagacaagcatgataaacactgcaactccaataacattcaattttgcaaattaaatttctcgaatgggatgtcccaagcttagtatgcatattagattaccagggatgataatacatacat

SEQ ID NO: 21170 - DNA, 707 bp, Glycine max
  Clone ID: PAT_MRT3847_119120C.1
gtgaaaatcagccaggatatgagccaccaagcgaatgaaactggagaagctgcagcaataccaattactgtgaggcagttggaagctattgttaggttgagtgaggcacttgcaaagatgaaactatctcatcttgctactgaggagaatgtgcaagaagttgtaaggcttttcaccgtgtcgtgaatggatgcaaaaaagtcgggaataaaccaacaaataaatcttacatgtgctatggcaaataagataaaggtttgtcttgtgataaacatagaccatcttgttttttccgtctagcttagtatcctaacggattactttacattgtgagcagcaagctgaaactcagataaagagaagaattgggattggaacccacatatcagaaagaaggctgattgatgacctcagcagaatggggatgaatgaatctattgtaagaagagctcttataatcatgcaccagagagacgaaatagagtacaagagagaaaggcgtgttgtatttaggaaagcatgataaatctattctttacacatttaggaaagcattaagggatttcaaaattcaaaggaatttagagtgaatgtgaatgtgaatttaattcctattatatttaaaatactatgtttagttaaaatacaatacaaatttcttgtttcaaaatttgtttagatatagtagtataattctcttaatatgt

SEQ ID NO: 21171 - DNA, 355 bp, Glycine max
  unsure (1)..(355): unsure at all n locations
  Clone ID: PAT_MRT3847_119121C.1
cttcataacaaagaagtatcctactaatagattttcgttttcgattaaacttattagctattagtttaaagaaaaaacgcttaccatcaccaatattcatgcactaacaaaaagaaaaagcaatccaccatgtatacgttttaatccaatgctgggtgcggacgttgtagccggtacagctagcacagcaatttccatccgtaacgtacaagagtggtaacaatacattgtggccactaaccctttcaaggtcatgccatggctntgggcgttagacccaccctaagaacaaacgcaaccactccaaacttgaaactcacggaagaaccagcataagaagcttcagcgggcaagt

SEQ ID NO: 21172 - DNA, 445 bp, Glycine max
  Clone ID: PAT_MRT3847_119122C.1
ggtttagatggtttgccaatgaatctcatcgggggaggatgctgaagaggcttgttgaccgtgccactagcaatacggacaatggtcgtgaagtagattttgatttggatatcttggttactttggtctgtgaggagcaggagtttatcaggcctgttttgagtatgatgcgtgaagttgctgaacgtgccaatgttgatcgggctgctctatggcaccagttatgtgccagtgaagatgaaattgtgcgtgttcgtgaagaaagcaaaaatgagatttctaatatggctaaggaaaaagttatgatatcgcaaaagctgagtgaatctgaggccacaaacaatcgcttgaaggctgttctgggctctgtggtggatcggttgtcgcggcctcgggtggatcgagcagaacaaattcaagaagttgagagtcagcttgaatggat

SEQ ID NO: 21173 - DNA, 701 bp, Glycine max
  Clone ID: PAT_MRT3847_119123C.1
acccctcacctggcaggtgccgctgacaatccccatttcccaatcccgaagctgcggcttcctcattcttgcatcacatatcccaatcgcttctgattcgaattccatttcaatttcgattcgacgggtttttcatttgataattgaaggtgagaaggtttgaattgagattgaggagtttatttgagggagagggaaatggctaacaatgcagcagcctgtgctgagagagcaactagtgacatgctgattggtccagactgggcaattaacatagagttgtgtgatataattaatatggaccctaggcaagcaaaggatgcaataaagatacttaagaagcgtttgagcagtaaaaatccccaaatacaacttttggctctttttgcactggaaacccttagtaaaaattgtggcgacagtgtatttcagcagatcattgaacaggatatcttacatgaaatggttaaaatagtgaagaagccagacttacgtgtgagggaaaagatattgattttgattgatacatggcaagaagcttttggaggacagagtgggaaatatcttcagtacaaggttccatataattagttaaagtctgccgtagtttgttttacccccagagtggagaatagtgttcctttcttcactcctccccaaaccctgccagttcatcttgctgctgcagaatatgatgatgc

SEQ ID NO: 21174 - DNA, 690 bp, Glycine max
  Clone ID: PAT_MRT3847_119124C.1
acgcccacgcgtccggttgtttcttgttctcaaggcaaactctctttcccagcaagtagtaatattagggttccgagagaggttcgcatagggtgcgcgtctcggcgcgtgaaggctgtgatgaggaaaaagagtggcacctccaacaacaaccctaataaggctcagaatgcgaaggccattgtgattgtgaagcgaagtggtggtggtgggctactaacgaatctcgttagagatggtgttgaagggattgaagagttggttgggaaaactcttattttggagcttgttagcaatgagcttgattcaaaaacaaacttagagaaaaagacaattaaaggtgatgcacacaagactgaggaaaaagaggatgaggtgtattatgaggccacatttgagttaccaacagagttcgggaaagttggtgctgttttggttgagaatgaacatcacaatgagatgtttttaaagagaagaagttgtacatgttagactatcatgatctattgttaccatatgtaagcaaagtgagagagattgaaggaaccacactatatggatcacgaacactattctttctcactaaacaaggaacattgaagccactagctattgagctcactaggccacctattgatggcaagccacaatggaagcaagtcttcactcctgctttttattcaatttctc

SEQ ID NO: 21175 - DNA, 899 bp, Glycine max
  Clone ID: PAT_MRT3847_119125C.1
ccacgcgtccggtcgagtcaatgactcgtcctcgtggacccctctcgtcttcttcctcaacctcaaccccattcccctttccccttctccttctcaatcaacatcgtcactccaaaaccctacctctctctccgattcccatgtcttcttcctcctaatctcccttctctcacccctcctatttcaattcgcacccccccatggaatcctccgccaccaccgtttcccccgattccgaaaacgacaccaccaacacgcgagtgaacggctacgtcgtttacactcgccgcaagcggaccctcaccctccattccagtaatgacgccgccaagtggctcagaacagctgatatcaaagtcgaagctcgccacggcggcggcggcggcggcgacgacgacgtcgttttcaagcgccgccccaagctcgagtctgaattaacggaggtggaattgaaaacggcgacgtcgttgaagacgacgaagaagatcattagtcgtccacaagaagcccgtcaccgtcaaggagctattccaaacgggcttgctcgatgggggttccgggcggttacgtcggttgcaaaaaggattcaactacggaattgcgaggtgaaattaaagatgggggggatcttgtgctcatgccgtctgtgcaatggacgcagggttattccaccttcccaattcgaaattcatgcgtgcaacatatataagagggcagcacaatatatttgccttgaaaatgggaagagcctgcttgacctaatgagagcatgcagggcagctccgctacatacattggaggcgaccattcaaaattttattaattctccgcccgaggagaaatattttacttgcaaaagttgcagagggtgtttcccttcttccaatgtggaaagagtg

SEQ ID NO: 21176 - DNA, 557 bp, Glycine max
  Clone ID: PAT_MRT3847_119126C.1
cgagcatttcagagccgactccacgctcgtgcgtgcacgaagctctagaaaaccggactaaatgaccgccctgacaccctagaaacacagcactgacggcgaagactcatcatgacctcgaaatatcattacccatcaagacacatacaccctatttcatgcactcgttttcgacatttatgtgctatgattcacacgcccagtgcatgtcaccgtcctggcaaggctcagaggaaggtgccaaggtatactttaaaggttatggatgcgccctgcactgcaagaccatgtctacctgaatgttgtggatgggtctatgcataatgggtggactgagggtctgggaaactgtgtatatgttgggaatgctgggagcagtaaggacactaaatactgagacttggggattgatgaccttgatgggtcgggtgcatgcgctcatctgtggtacacaccttgctgttgtaacaagctatggtaaagatcagatttgcgatgcatctttatgcacgaagattagatctctggagggtgatcatatacaagatgcggccttg

SEQ ID NO: 21177 - DNA, 865 bp, Glycine max
  Clone ID: PAT_MRT3847_119127C.1
taatagttattttacatgcatccacttataagaattaattcaccacacaaaaactacagagggagggtacttataaaactacatatccctccttagctgcagaagaccttaccttatacataaactattgcaggtcatcgagctctaaaattacattacatacataccatactagactgcaatggcggacctacactatggtgaggatgtgcacttacattttctcattttttaaaatttaccaataattttttttttaaaattaaaagttataaataaaatcttatattttatttcatttatatttatataattgaactcattaattttattttttataatttattctcattgacttagagtcttgattccatcattgctagactcagtaaataacctacctatatgacctgagagactcactggaagataactttataataacaatatttaagctaccataagtgtttaaaatttgatgggcctaccccagcgattctgagcttttcccctagggtactggtttgcaacaggtattccatagttaacaacatgtttgtttttcagaccaggcttttgatccatgtcaccattaggcacttgatgaaccacccaaaagcattgtcgttggctggggaatgcatcattgctggcggggccccttcgaccgtagagcttgtctatcaaatcgaagctttctacagcaatctttctgaggtctgcttgagatgatgccatggatgtatatgtgtgtgtgttgaactcaggagtagcagaatatagcaatgtagttgatgggcttttgcttgggcggctttttacttcaaacggaagagagccaaatggcttttataggaggcaggag

SEQ ID NO: 21178 - DNA, 354 bp, Glycine max
  Clone ID: PAT_MRT3847_119128C.1
cttgtcacttttgacttaaagctatttctgggcttcttgatgtctgaatttgaccaacagaaagttgtatattctggcagctgtttgtaattgtttaatcattgttattgcttattattattgctgctgctttccttttctgataatttactcccaaccctgtttgattagtggacacatctcatgaaatttaaatgggattgtgctaaatgaaactaaagcatactcatccttcatttcagttagcacaatcccatttaaatgaaggatgagtatgctttagtttcattttttttcaaaaattatgctcacccttttttgttttgctcttgaagattgtttttgcactgtcag

SEQ ID NO: 21179 - DNA, 391 bp, Glycine max
  Clone ID: PAT_MRT3847_119129C.1
tttttttttttttttttttttgggaagaattttttttatgcccaacaacaaattttatttacagctcaatcgttcaaaaaccttgggaaagagggcaaaaatattaaatatacttataacatttaataaccgacatgtattcacgagcccctggaaacggttaatgctgaggaaaaaggccaaccatgatcaatgataactcaaatttgacccatttgtatgtaatgggggaggggtccgccccctccggacacaggaaggtttattcccggagcctcctgtcgaaaattcggtggcttcaaaaaaaccaaatcgggaatcaaaattttccccccaaaaagttgtagggggcccccttatacgactttggagggaagtccccctggcctgg

SEQ ID NO: 21180 - DNA, 2069 bp, Glycine max
  Clone ID: PAT_MRT3847_11912C.1
tcactcctctgaattgccaccggtaactgcagggtgttgaggcctgtacttgtacctctttgaaacgaacaaatagacaaagaagttgatcaagctcaatattgagaggaacaagtagaacaggttcagatggtttctgttaatattgttccctgctaaccaacctccacttgaagtgatattcttggtcgcactgttcacaattttcaccaatatggaacttagaaaatagccaagggccatagagcaccaaaggaagcatgttgatgtggattttaggccttttggtgcttctgaatagaaaaactcaagaagccccacgtaggtaaacatgtcagctatgccaaatataaaatactgaaaagcaagccagaatatactcaatggcaatggctgttttactggcaaggcatctagcatgttgtggtctcttgcaactccttttcttttaacctctatgattgctgcaattgccatggagatgcaagagagtattaggcctactcctatgcgctgcaagtgtgtaatgccggtgggaataccagtgaatttacgaagaaaaggcacacaaatgcgatcatagaaagggactataatgattaagaagccaactgggatgattgggagggatgcaggagggatgttaaaatgttttgtgatcctggtgtccatggtggagccttgctgaacagaaaaggtttggagttgtgctaagcaaagggtcattatgattgagcaacagaatatagggagcatgcttagaatgatttttgcattttctacttgggtaactctgcatagtttccatgggtttggagtctcttggttctccggttgcacgtcagattttctttggatagctgctttgtccaaaaacctgaaaatatccctatgaggttgatgctctatttccattgcagcttctttgtcctgttcaatctcgtatagttctataggatcttcaggaagggaaaggtttctgttgcgaattgcagcaacatagacctgtatgatctcaatgatgccgttttttgtatgtgcaacatgaattcggtatagtggcaatccaaaggcaaagagtatggttcccaaaacaatagcaaaagtggagattccaaagccccaatcccatccatagcggtcttgtatatatacattaaacgttaagctcactgcaccaccaatgcaaactgctaacaagagaccattgaagaagcttgacatttgcattgcttctttggggtctctttcatcaaattgatcagcaccatgtgatggcaaggaagccttcaaacctgcactgccaaaggccaacaagtagaggctaatgaagaaaaatgcttcttgcttcccactaagctttgcacaatgtgcatctttcacatacacgttgcaaatgggtggtgtcaggctacccatgtgtgcctgtaccgtaagcaatgcaagtcccaaagattcaatgaatccagaaataacaacggatttgtatctgccaatccaagtgtcagcaacaacggccacaacaatggaaagcatgtaactaacacccatgtaatcggttactatgttagctgcatctgctaattcataatgcataattccagtgaagtatgacacaaagttcactgctagtgatagagttgccatgttctcgacagcaaatgcgccaagtatgagcaatgaaactttcatccccccatgtttgtgtttcaaagctcttcttcctttccaatcaacttttccatcaacaaccagttctgctttctcctcctgcatccactccacactcccatcaacaacatgagtatccatttagtatgagttatatctttcacacctttctatagttttcgttccttttactgtgcctccctggtctggccgccccgcctggtgttcatattctgctgtaggttggatgcgcttttattagtgaatcatcagaaaaaattgattagtatcaattcatatgtgaacaaaaggttataaatctaaacttttcatgttcttggtaattcaaattctaggtcacaaataattaagacgttgtgaagtcaaaagcattatta

SEQ ID NO: 21181 - DNA, 356 bp, Glycine max
  Clone ID: PAT_MRT3847_119130C.1
aaaaggaggaagggagaaataaataggtcttggatttaaatcccccaccctaacaaaaaaaactaaaactgacaaatcacttttgccgattaaaaaaaaaaggacatttccccttttttaaatcaggaaaagccaaacaaaaccaaacaagaacaacttttttcaccaaattgggtatgaactgcaactaaaacaacatatattgggacgcttttttttttcaaaacatacaaaatttttcaattttggtgcctaacacaaaaaaagcaaaaaaaaaaagtgttttggttttcttttgttggggaaagggggggataaaaacacctaaattcacagtactactagtaatgggggta

SEQ ID NO: 21182 - DNA, 353 bp, Glycine max
  Clone ID: PAT_MRT3847_119131C.1
gggccaaaaaccaaaaacccggagcgacccacgcggccggcaatttttcccgcgaaggcgcgagaggccagaaggggggggagcagaaaagccaccgggagaaaaaaaaccaacagcaacatggcaaaaaaagaaaaaaaaacgacgaaggggcggccgcacaagaggacccaagccaacgcacgcgagcgagcgacgacaaagccacacaaaaggggcaccaaaagacaaagcacgggccgaagcacaacaacgacgggacagggaaaacccaggcgagacccaaaaaaaacgccaagcagcacagcccacacaagacggcaggcggcaaaaagcaaagaggccacgcaccg

SEQ ID NO: 21183 - DNA, 457 bp, Glycine max
  Clone ID: PAT_MRT3847_119132C.1
aatgcatagtgcatagttgcattcaccaggaactcaagcaatcacaaagacccttagctcgcctctgtctcctcttgtgatgcctcgtgccgaattcggcacgaggagttgaaagccaaggcgcaacagaagggaagctttggaggttctgggctcaagaaaagtggaaagaaataagggctctttatcatgactgtatacatccaatattgagccctgtagtttattaccatgataacttctgtcttattgtggccttctttattgctctaatgttagtattgaactgaggtatttcgtgatgtaagctgcaacaagttacttgtttgtagctttattgtgtggcccttcatggggttctgataattacatcctattagtagtgctgtggatttggcatagacttgttcaagtaataatgacttggcttgcgaaaaaaaaaaaaaaaaaactcgag

SEQ ID NO: 21184 - DNA, 1093 bp, Glycine max
  Clone ID: PAT_MRT3847_119133C.1
ggctcgaggctgattccacagacacacaccgctttactattatgcaagacccttctcgccccgcccctcctcccttctaccaccaaaacggcggccagcctcctccccccgccgcctccgccgccatcgccaccggctacccctacgctgcccaacaacaatactacaacaccacttaccctcctcctcgctcctacgcctcccgctccttcttccgcgctttcttcgccaccatgatctgcctcgccgtcgtcttcggcgtcgtcctcatcatcacctggctcgtcctccgcccctccctcccccacttcaccctccactccctctccgtttccaacctctccagcacctcccaatccctctccgccacgtggcacctctccttcctcgtccgcaacggcaacaagaagatgaccgtctcctacaacgccctccgctcttccatcttctaccgccaaaactacatctccgagtctcagctcgctcccttcaggcaggacaccaggtcccagaccacactcaatgccaccctcaccgccgccggcacctacctcgagcccaaactgatcgacaatctcaacgccgagaggaacgccagctcggtcctcttcgacgttcaggtcgtcgccgccacctctttccgctccggctcgtggaggttcaggacgagggttctcaaggttctgtgccgcaaagtacccgtcggcgtctcgtccaagtccagctccggtgatttggtcggcggagatcgggaatgtcaggtgtggacgtgaattttctgagggtgatgtttttcaaaaccctaggtttggtaatggggggaaatttaattttctgattttattatatatagttaattgatgctttcgacggtttatatttatgcgatttggtttaggtttcaatggaattttgttggtagtttatatgattgtatatagttatcagcaaccttatattgtttgcttgcctttctagagcactcagtggagatttgaaactttgttagtggaaaatttgcaattgtatgttaattggagatggagacaaaaaaggaggcagatattaatatttatttggatatcattgactt

SEQ ID NO: 21185 - DNA, 139 bp, Glycine max
  unsure (1)..(139): unsure at all n locations
  Clone ID: PAT_MRT3847_119134C.1
atctctnttncagcgccggtcgcccttactggggtacctccggccacgacagacgacagctacaacaaccggtggtcgacgttccttttcgatgggctcttcaacatctacgggtggggcggaccctaatttttcgtca

SEQ ID NO: 21186 - DNA, 268 bp, Glycine max
  Clone ID: PAT_MRT3847_119135C.1
gtccaaggaagctcgaagcaggtttaggaccaggtccccttgagaggtcagaggggcctgtgtgggtgctgggtactccagaggtgccactggtggaagggtcagcggagcccagcaggaagggtgggccagccaggccattcttagtccctgggttggggaggcagggagctagggcagggaccaaatgaacagaaagtctcagcccaggatggggcttcttcaacagggcccctgccctcctgaagcctcagtccttcaccttgcc

SEQ ID NO: 21187 - DNA, 472 bp, Glycine max
  Clone ID: PAT_MRT3847_119136C.1
taccgctgcgagaagactacagaaggggattgttaaaagttttgttgctgtacgtgtgtgagactccaaaagagaggtttggggggagctgatggagcttcataccctaagaaaacagaaccccaacctaatcccattcaagttcaataactcgatgagaaatactgcgtagccattgctcatactgatccttaagccgtacttgttgtgtaattacctgttacaataatatacgatgatttcttgcaaattgagattgactctgttcacgaaatggataatagcattcaagggaatgcgagagcaaaccaatctttaggattatttaaatgaggggaagaattactacactctatagtgttacacactattgcatacgaattgtaggcagctttaaaacaattatctttggatacagaataaggtttccatctgatggcctctctgtatatcctaatacctgagttaaatc

SEQ ID NO: 21188 - DNA, 668 bp, Glycine max
  Clone ID: PAT_MRT3847_119137C.1
gcacgagcgttggcatttcccccgccctataaaatgattgtatgcatattaatggcagactcaaagtttttattttgagaagtacataagttgatgacatgatactagacagatctacctcattttggtataggctaaagtcgacaactttggctagtcaatatcaaggaacacattttaaatccatcccctgatatatactatcatttaaattttttagatttttcagttttaattgctctgtaaaattaaatttcattttggttcagtgattgtgaagcacatgttcttactgctcatccgctcatatgagattagagtttgaacagagtaccctctctaagaatagtttgtcctgcattcttctatggtggattattcgagacgtatgaatctagaggctgatctgataacatgtcacattagttactgaatggatttctttttttatttcttttggtgacaactaacaaatgaaataaatcgttcaatactttttttgtgcaaggatttttatagtgatgaacattttgtgatctgcagggtcttgttatgcagttggtctggatgataatgcattatgtgtggagaacttcatgaggcatcactgtcccatttgttacgaggtcctttttgattcattgaaagatggcattgttatgaaatgt

SEQ ID NO: 21189 - DNA, 1033 bp, Glycine max
  Clone ID: PAT_MRT3847_119138C.1
cccacgcgtccgcccacgctaacgcaaaaaatggcttctagttcagaatctcaatctcagtctaaaccgctccaagaccgagttgcaatcgtcaccggctcgtcccgcggaatcggccgagaaatcgcgcttcacctcgcctcactcggcgcgcgactcgtcgtcaactacacctccaactcggcccaagccgactcagtcgcggcgcagatcaacgccggttccgccaccacgacaccgcgcgccgtcgtggtccaagccgacgtgtccgatccggctcaggtgaagtcgctcttcgactcggccgagcgcgccttcgactcgccgatccacatccttgtcaactcggcgggcgtgatcgacggcacgtatccctccgtcgccgacaccaccgtggagtccttcgaccgcactttcgcggtgaacgcgcgtggcgccttcgcgtgcgccagggaggccgcgaaccgcctcaagcgcggcggcggagggcggatcattctactgacgacatcgcaggtggtggcgctgaggccggggtacggggcgtacgcggcgtcgaaggcggcggtggaggcaatggtgaagatcctggcgaaggaactgaaagggacgcagataacggcgaattgcgttgcgccgggaccgattgcgacggagatgttcttcgagggtaagacggaggaggtggtgaatcggatcgtgcaagagagtcccttggggaggctcggtgagaccaaagacgtggcacccgttgtgggattcttggccactgatgcttctgaatgggtcaacggtcaaattgttcgtgtcaacggtggctatatttagtgatgattttttttaaaataataacaataataataattagtgtattttctttcactttgtcactacttggcatgaaataaatcaccttccgagaaaaatacttaatttatgtgcgatcataatcgtggcaaaaattagttatcgcattcaatgcaaccttgtatcaatacctgagaataaagaagaagaaaggggatgtgtgttg

SEQ ID NO: 21190 - DNA, 385 bp, Glycine max
  unsure (1)..(385): unsure at all n locations
  Clone ID: PAT_MRT3847_119139C.1
gaggggaaaacggaccgaagacaacaccaacccacaaaaacagaagggcnacgaccgaggaganncaaacgcccannacagaggaggggacagggacncaggggggncacgccacggcgaaacngaaccagctagaaacggcncnacccggaacaacgatccgcggaaaacgaaggaagnanacgaacagatctttttatttaaggnncccgcaaagctattaaatgtcacaaatctgaccaatttccgcaaggatgggcacccatgtgtctttggcaagaatacaatgggtggaaggaaagtctctacaaggaagcaagatcgcagccattggtgtcttcctgggagccctgatgcaaggaacgagctaattaatgccactctt

SEQ ID NO: 21191 - DNA, 245 bp, Glycine max
  Clone ID: PAT_MRT3847_11913C.1
ggaatttgcaaggtagtgttgtttacgacactacagttctcttcggtgccaacatatgatgtctcaagaagcaatatctgctccttacagcaatctgacagacccctcggctcaggctaaggagccaaacttggacatcgattcaaacccgaataagcctaaccctaatctacttaggagacaaagaagccgacccggaacagcacagccgaaggcatgagggattgctctggctcaaagtcgat

SEQ ID NO: 21192 - DNA, 242 bp, Glycine max
  unsure (1)..(242): unsure at all n locations
  Clone ID: PAT_MRT3847_119140C.1
ccctcccctcccccagacaacagcaaaccaagggagaganagcaaacacaacaggggcccgccgggcacaaccaacaagncacangcagagagcacaccgcccccagcacaaggccacacaaacccaacgccaaaacgagcaaaacgcccccacagcaaaggccaccacacaacccagagaaacaccgaggacaaccacaaacgccgacgcaaagcaagaggcccagacccccaaaaaggcc

SEQ ID NO: 21193 - DNA, 399 bp, Glycine max
  unsure (1)..(399): unsure at all n locations
  Clone ID: PAT_MRT3847_119141C.1
cctagcttccgcaatattncttctccttcaattaattcttcaccatggatcgtgtcagccataggggttcacgctttcttctccgtgagtctccgctattagagttcgagtttcaatccatcatggatcctgtcatcaattggtttgtgtccctgataagttgcttagggacaaagattaatccaatacttgaaaaaatcacagggcatcaatttaacgttaagactgaatcatgtgatgaaatttcaatgggtggaggatggctgttgtatgttgctattgctgatggtgtggcactagcagctactgctgttgattggttgctttggaagctaatttctggagttgtttggttgctccggaagctgatttatggtgatgccttcacggcttgggaaa

SEQ ID NO: 21194 - DNA, 334 bp, Glycine max
  Clone ID: PAT_MRT3847_119142C.1
gaacaaagcaactgaaattgttgctttttagcttcaacaatctctcatccaacgcatcagccaaatctagtggcatatctcagccttcactttcacaacactgccaaaaaaaaagaagtagaaaaaaagaaaccctttacttctttttagggacgcaggtcgtgtttgtcttgttttggctgctgacactatcatagttttttgttaggtgaaatcaagcccactaatgtgtgtacgcattagagaagggcattgaaacaaagtgtgatttctggtggagcttgattagtcatcttctatgctgtcttttgtaacagaaaacatgggcttactc

SEQ ID NO: 21195 - DNA, 584 bp, Glycine max
  unsure (1)..(584): unsure at all n locations
  Clone ID: PAT_MRT3847_119143C.1
caattaattaaatatagatatgttttagttaatggttatatagtggatatattagtttatggttgtaacttcaggatattattatagcgaaggatgaataaaaatcgaaaactttgatttacaattattttgatttagcccnctgtgagaaattgttaaatcattcgacccttcacccctccccacctgtcgcatgcacccgttcgttagctcggaattcggcgcgtggtttgaaaataaatgaattactagttgtagaatattattctcgtcagacttaaacctaactaaaataacacgagtttttataccaggattttccgccattcatatatcatagacatggatatggtaaaattgtcattccttgcccacttttttcaactattttttgtattaccgaaaaattatgaatagagagtccatatcaaaaaatgggaaataatggtatgcattgtgatgagtaatattgatgaatttggtaaagattcggaaagagagggattcgaaccctcggtaaacaaaaagcctacatagcagttccaatgctacgccttgaaccactcggccatctctcctcgtgc

SEQ ID NO: 21196 - DNA, 775 bp, Glycine max
  unsure (1)..(775): unsure at all n locations
  Clone ID: PAT_MRT3847_119144C.1
acgaaagtgaagctggtgcagttgtgctgtatctgggtacagtttaagtacagaccaatcctcatattcattcaattcaatggctctctactccttcttctctccctctcttttataccctccctcacatattccccgtcgacttttttgtcccaaggcttccttaagctcttcctcccctgaatccaaagcatcgcaaagtgtttcttctgcaacttccaccaccacttcccctaccccttcggttgagtctaggccacctgaccccgccttcaactatgcactcaccaaccctaacggcaacccaatcgtaaggattgttcgagccaccgagtcttccattgaaagggtcatttttgatttccgcttcttggcattacttgctgttggagggtccttggcagggtcactcttgtgctttctaaatggttgtatttatattattgatgcatacaaagtctattggtcaagctgtgtcaaaggagttcacactggacaaatggttctgcggttggttgaagcaattgatgtttatcttgctggtacagttatgttgatttttggtatgggcttatatggattgttcataagcaatgtacctcctgatgttccacctaccgtagaccgtgcccttaaagatcctctttgtttggaatgtttgctatgaaggagaggcctanatggatgaaaatatgctcgcttgatgaattgaagactaaggtgggacatgttattgtaatgattctcctgttaaagaggtttgagaggagcaaaa

SEQ ID NO: 21197 - DNA, 392 bp, Glycine max
  unsure (1)..(392): unsure at all n locations
  Clone ID: PAT_MRT3847_119145C.1
cccacgcgtccgcccacgcgtccgattttattttgacgaatatgccctggtgctgggtgggggtgtagctgcgtgcctccctccatcgcatcatactatatggatagggtgttctcagtggacgatatcttctatcacttctggcagccgtctatccctgtcttcgtcggccatacatactcccagatgatccgcagctgcttcgagtggtgcttccancgctgtctccaggaagcttccgcctccgcaccctctcctccgtcttcttactatgccgccgacgtcgtattcgtctggatcgaagatcaacctaaacccgcccctccccctccgtcaaacggcgccgttctgcccaatgcccctggttccgtcccccttgactccgacgaata

SEQ ID NO: 21198 - DNA, 256 bp, Glycine max
  Clone ID: PAT_MRT3847_119146C.1
tgagcataccacaaacccattccctttggactcttgcttgcttccaccattttccttcgatgctgtgctcccaaacgaaacgaaaagtataattcttcctttccttttcgccagccccactccacacgtctcaatgccaagccacacccttttgatcaaaggccaaaaatgtctccaccttttggtggggctttgtttagcttctcttttcaaacatgggttgtgtccatggcaagtgctgtaaccgttacccttc

SEQ ID NO: 21199 - DNA, 1929 bp, Glycine max
  Clone ID: PAT_MRT3847_119147C.1
ggacattgcttctggggatcttccccctactcaccccatcagattgggtctcgctctcaacttctccgtcttctactatgaaatcctcaaccagtctgacaaagcgtgtgccatggctaaacaggtcaacttcatttcgacgtttttgactttcttgtttcggcaatcaattatcctttccccttttattttactcggagattccacttccgtttaacatttttggaaaaataacaaacattttttttttaatctttactggtatgttccggaaggattttgactaccaggatttctgtttgacttggtatatgccttttgttgtgttgtggggatgtatcttatcagaaaatgggtggattttgtgaatttctcttgtttggcttgctgtaacaatctgttttcttgaatttattgaggatttgcatttacacgcattattctgtgctgactgggcaccagaaaaaggttgctaacacagaccatagttcttacctgtatcatgatagttgaggtgggtgagcaataaattgcacactgcatagcagtctaactgtcaaatttggttcccaatcaattgcaaaggttttgctcatgaagcttggtaggtttttcacttgaattgaactattaacagaaagggggaaataacaagcaagccaacaaaaagtactttaaccttggttcatcagatttttctttctttcagaaataaaatgttattgttcatctgcaatgattatggttaccccatagcataatctggttcttaagcaatctgataattttgctgctcaattgcaactaaatggagttgatattttgtaggaaagatttgattattcatctgcagctaatttttttaattataaaatttagttgattggttgtgtgtaccaaactggatgacttgaaagtgttgttaactttaacccgaaattgtattttctcccctggaaagaatacactacaatttgtctattagcaatccaggcttatccatattggcttacatggcttacacgattccatgttttatgatattctgtctttctctttttccattttaatgcttggcttctactgttctgagtaactgcaacaggagcacgtccttattgattctaaaatctacttaaccgtatattggttttcgtatttgataggcttttgaggaagcaattgctgagctggacaccttgggagaagaatcctacaaagacagcacgctcataatgcagcttttaagagacaacctcaccctttggacttctgatgtccaggtaaatgtcactatggaataatatggaacccacactttacagaatatttctctctttagctcctaacgaatcaaaatctgagttgaactatactttaacttcatgcaggaccagctagatgagccctgatatccattataggtttgatgggtggtattcttcctctcatggaggtgggctttgaatgtcatttctttgtgctaaattaagaatcgccctagtttataaaatgattggcaatctgtgatataatgttgtatgaacagagaccaggcttctttgttttttatttttatgtctcatgatattttggaaaggatactgtataatgggatatccaattaattaattattatatctgttgcaatctttaccgaagaaaactgtataatgggatatccaattaattattatctgttgcaatctttcttgtgttacttccacagtcccacaacacatagggtcctaactcataagtgcccccattttaaaattttgggtcagcatctggtggtcctataggaactagaaatgtcattgtagcaacattattctcttggaaagaacatttttcattacagctataatggcgcattaaataataatatataaaaataataatatttaatattaattataataaaaa

SEQ ID NO: 21200 - DNA, 332 bp, Glycine max
  unsure (1)..(332): unsure at all n locations
  Clone ID: PAT_MRT3847_119148C.1
gattatcctaagtctttgggaatagtgctgcaatggcttcaagtcaggaggaggtgacnctnntgggagtactggaaggccatttgtgtncanggttcatatggccctcaagtngaagggagttcaatacaaatatgtcgaagaaaatttgaggancaagagtgaactgcttctcaaatccaacccagttcanaagaanggtccagtgtntattcacaatgagaagnccatagcagagtcnctgtgattgttgcatacatgatgagactggagtncnanccatcttgcttctganccttacaaagagctttgccgnttctggtccaatcatg

SEQ ID NO: 21201 - DNA, 414 bp, Glycine max
  Clone ID: PAT_MRT3847_119149C.1
cccattcaagcagtggtacctcactcactatggagttgacattggtaggaagaagaaaacccctgctgcaaagaaggataatgctgagggacaagaggttgaggcagcagctgaggaaacgaaaaagagcaaccatgtcacgaggaagcttgagaagcgcaaggagggacgtacccttgacgcacacattgaggagcaatttggcagtggacggttgctggcatgcatttcttcccgccctggacagtgtggccgagctgatgggtacatccttgagggtaaagagcttgagttctacatgaagaagctacagaggaagaagggcaagagcgctgtagcttagagcattctcatggattgtcttgcaccgaaatgtgtgtcctgatgagtacactttttttggttagtcgtctc

SEQ ID NO: 21202 - DNA, 543 bp, Glycine max
  Clone ID: PAT_MRT3847_11914C.1
ggctcgagggtgcctcatgtaatcttcggtgtcatccaaaagctaccaaccaacattccttctttctcacgcacgcacaggcacgctcgcacgtgttgtcctctgatctccctgaaaaaccgcaacactaactcaaactattgatctccgtttaattccttttgaatctgaaagaagaaacagacggtggcttacggtcatcaattgcagagatctattaagattctggaatggcagcaatttacagtctttacatcatcaataaatctggtggattaatctattataaggattatgggtcagctggacgaatggataccaatgacagcttgcgggtggcaagtttatggcactcaatgcatgctatctctcagcagttatcacctgtttcaagttgtttaggaattgaacttcttcaagcagatacatttgatcttcattgctttcaatcactgacagggacaaaattttttgtggtctctgagcctggagcacaacacatggagagtttattgaaatttgtctatgaaatgacaccgacta

SEQ ID NO: 21203 - DNA, 306 bp, Glycine max
  Clone ID: PAT_MRT3847_119150C.1
aaagggcaagattttctttaaatgcctcacaaactctatctcccaaatgcctcatagcctgaaaaacaaaaaaaataaccacactaaaacaaccttcatctggggggcacacccccccaaccaaaaaaaccaaaacaattggccccacccccccaaaaaaaaaacaagctttgccgcgaccccaaaaaaaccccccccgggggggggatcccacactgggttactaaacaacaaaaaccaggggtcccccccccccccttataatgccggtgctttttgcatacacaaaaatttgaaacaggcccc

SEQ ID NO: 21204 - DNA, 505 bp, Glycine max
  Clone ID: PAT_MRT3847_119151C.1
tttttgggtttgggtgggggttttttttttgggcaaagactcgggcagggtatcatttcatataatccaaaaaccctaattttacttggagaaacatactcagggtaatttaaagcggcggtagcagcggcagcaaaaattaagggcgtacgagataaataaaaggcaccagaacacgaagcgagaggagagtaaaacaaagggttacatctgaagccaaaagagtgtccatggacagcatcaacatcggtacctcctggggaggggggaggcctggtgagcaggaacaggggcaacctgggggatgccggggatggccgtgagtccgaggggatgaagcatgtgaaggggttctttgggaacttgcagtggggcggggtggagtgcggagacgtcggggacaaagtccatggggcgcggcggctcctgcttctggggcttaggggggatgcggcgaacgggggccttgtgggtgcgcgtcatgagaggggggggaaacccggga

SEQ ID NO: 21205 - DNA, 454 bp, Glycine max
  Clone ID: PAT_MRT3847_119152C.1
aatgttattgaattttttcatttttttttcctctttttttcttgtttttttttaacgaagctgtcctggttcaccactccttaaattttttgtttttatacaaaaacccacaaagttcatggccccccgttactgccccagaaataccaccccgaatcgacacgctacccaactctatcatgccagaccgaaaaagagaacgcgccattaaatgggacaaacgtacctcccggtaaaaaaaggaagcacccctcgcaagctcaaaaaaaaagaaccccccaacaacacgggaagaccccggggcgccttgagggggggaaaaacttcactagatcagtgactcactgcactccgcctttcccctgaaaaaagcggtatcacctcacttaaaagagggggtacccctctccagagaagggggggataacacaggaccccacgtgtgatctttttt

SEQ ID NO: 21206 - DNA, 271 bp, Glycine max
  Clone ID: PAT_MRT3847_119153C.1
tttgatcttccatctcaagttgtcaacatggctgtgtcattctggcttacatatgttttatttaacaaaattctagtcaagggataagggcataatgaagacaagcttcagttatgaaagtataaactatttgtgtgattaatttttaaaaatgacattaagaagcccattgtaaaataatatttgcagtcaaatggtttttcttgctgtaagtcctgttgtagctatgtttagggtagtggttctcatctaccttggagtgcataagact

SEQ ID NO: 21207 - DNA, 307 bp, Glycine max
  Clone ID: PAT_MRT3847_119154C.1
ggctcgagctcgagccgctctgcacaattttgctctcatcgtccagagtaacgtgagataggtgtcgctgatgatgagagctcacatcctctacataggaagccatacattagtttcctcacttcacacattgttacatgctgtatcacctgtcgcggatgggttcgccggagcatgacctgcgccagtcaggtgttacacacactgcatccactttctgcacaattcatatgtgcgctcgcctcctttaatctccgcactataggacacctggcccatcttatgtcaatacatgcgaaagctatat

SEQ ID NO: 21208 - DNA, 563 bp, Glycine max
  Clone ID: PAT_MRT3847_119155C.1
ccgggaaccgagttttattcagaaataatctcaatctcattctcgaacctccatgggttacattcaagacgcacgccagaatcacgttaagaagaaagttgaagaagctttgcgcagcaaaatgaagcagaaggcgctgaaagagtgtgatcattacacggcaaagtatgctgaatgtgctttagggagaacactttcagttgtgtggcgctgtcgccaacaagcacaagagttgaatgattgtcttcaccaattcaccaatgattctgttttggaggaaatgaagaaagaatacatgttaaaacaaggagagggctctactagaatccagactgcttgatttcaatgacaatgtgtacgcaaggaacagtttatcaatataatctgatgcatcttgcattcaagttctctagatatttacaatgatctcttcattattgtgatgtcatggagcttcattataacttaaactttgtttgggagttttgtatggacaatagaacattaatgaaaagatcttctttgtttgtaaaaaaaaaaaaaaaaaaaaaaacaaaaaaaaa

SEQ ID NO: 21209 - DNA, 1183 bp, Glycine max
  Clone ID: PAT_MRT3847_119156C.1
tgttctgagcaggttggttcaaatggaggtcaggaatttgaagttgaagttgaagaatttattgaagctgaacagagaaaagtagagggaagagtcacgagacgttcatcattaatgaagtcaatgtgtttggaatcattgcataatgcaagatatttgctaccgatagaaaaggaaggtgagttttctgtgtctgatatggtttggggaaaggtgagaagccacccatggtggcctggacagatatttgatccctcagattcatctgagaaggcaatgaagcattataaaaaggactgccatttggtagcatattttggggatagaacatttgcatggaatgaagaatcccagctaaaaccttttaggacacatttctcctccattgaaaagcagagcacttcagaatcatttcagaatgctgtagattgtgctgtggatgaagtcacaagacgagccgaatatgggctggcatgttcttgtatacctaaagatacctatgactcaattaaattccagacggtagaaaacactgggattcgatcagaactaagtgccagacatggggtggatgaatctctaaatgccagctctttttcacctggtaatcttgtagaatacttgaaaacactgtctgcattgccaactggtgggtttgatcgtttggagcttgggattgctaaggctcaactgctttcattctatcgctttaaaggttactcgtgcttgccagaattacaatattgtggaggttttgatgatgacatggactccttagttcatgatgatgagaataatcatgcagcgcctgtaagcaagaatgatggtcaagctggttctggaaatttaaaaaaccaaagcagctctcaccgtaaacggaaacataatttgaaggatattatgcatgaaacaaagaaggaaagaagcttgtcagaactaatgggtgggactccagactctcctgatggtgattattggtctgaggagaaggtaattgataatctggtttcacctggccgttccaagaaaaggaggactgttgatcactatgctgatgactttgggaagccagatggaagaaaaacaatttctgttgcaaaagtttctaataccacaaagccgtcatttttaattggtgaccgtattcgtagggttgctagtaaacttactggttcaccctcta

SEQ ID NO: 21210 - DNA, 666 bp, Glycine max
  Clone ID: PAT_MRT3847_119157C.1
ggctcgagtattaattggatcctgctttgtgagtttaagggcttcgcttttgtttcttctattccactgcggctactgacgaatctcttatcttcttctgcttcctaaatgtgagttcattcatttgatgttgcaacttaaagttttgttttgtttgaaattgaaatagtgaagtaaaatggagtctggagctggaggcctagtgtcgtcgtctgagaaagaaggagcctcgtatacctattgggttaggaaaataacggaagatgcagcgcctttgcctctgcctcgtaagctcaacccagaagatcttcccccttcccaatctcaatcttccacgcttgcttcagcttggaatcgcgctgggacatgggaggagaaaagtctaagcaattgggcaactccaagaattaaggagttgcttttctcattaggctccattcagttctcctttggcagggcagaagtagaagatgtaacaaaatgcgttggcgatgcattcatggtgatagttcggaacaagaaacgtgttggttatacatatgagttgaccttaaaagtcaaaggggaatggatcatacaaggagagaagaaagttattgggggtcatatagatggcccagagttctcatttggggaactagatgacttgcaggtggaagtgagact

SEQ ID NO: 21211 - DNA, 1020 bp, Glycine max
  Clone ID: PAT_MRT3847_119158C.1
ctcaattcggcttgagccgctgtccattgttttgtcagttgaagggcttttgtttctattcccctgcggttggctgctgacgaatctcttatctgcgtccttaaattagtaaaatggagtctggagccctagtgtcgtccgagaaagaagggcagcaaggagcctcgtatacgtactgggttaggaaaataacggaagatgcagcgcctttgcctgtgcctcgtaagctcaacccagaagatgttcccccttgtcattctcaatctcaatctcggtctgccacgcttggctcagcttggaatcgcgctgggacatgggaggagaaaagtctaaacaattgggcaactccgagaattaaggagttgcttatctcattaggctccatacagttctcctttggcagagcagaagtagaagatgtaacaaaatgtgttggcgatgcattcatggtgatagttcggaacaagaaacgtgttggttacacatatgagttgagcttaaaagtcaaaggggaatggatcatacaaggagagaagaagttcgttgggggtcatatagatgtcccagaattctcatttggtgaactagatgaattgcaggttgaagtgagactgagtgacgcaagggatctttttggtgaactagatgacttgcaggtggaagtgagactgagtgaagcaagggatatcttgcatcaagacaagacacagatgcgcaacgactagaagctatttttacagcctgttcgggaaaagttgctgcaattcgaacaggaactctgagttagataggtagatactaggaggtcgtgttcgtttccgtcacaaaatccaggcatgtttttgacttttagacgcctactaaaatgctagttctcttgggtaaattcgaacatgaggcctaagcatttcaatcatcatacattaatggaagttctctcgggtatattcgaacatgaggcctaagcatttcaattatcatacattaaattaaatatatggcgtggttttgctcttaaaa

SEQ ID NO: 21212 - DNA, 282 bp, Glycine max
  Clone ID: PAT_MRT3847_119159C.1
gggccactcaccaacacacactctaccgaaaccatttcttacaccttcaacaagttcaacccaaaccaaccaaacattatgctccaaaaagaacctaacattacatccacaggggtgaaacaactcaccaaagtaggcaacaacaccatgcccacctcaatatctcacaatcgtgccctatacactgtcccaaaccaaatttgagacaacgaaaccctcaaagtagccaagctagctacattctataaatacaacaatttcacacccaacaaaaaaaactca

SEQ ID NO: 21213 - DNA, 276 bp, Glycine max
  Clone ID: PAT_MRT3847_11915C.1
acgaggtcttttcattttaaatacacctggtcatattttatttagagtttgatgatataattattattaatatgtggtaattcgtaatggaatgagatgacgaaaattgtagttaattattattattgggacagtaattgaggattttctcaattaattaaaaattggcacgcaggggttgcagccggtggttagtgctgctccaaagatgggtttgggtgaagaagttgaagtgttggactccaaagtagcctccgtagcagcattcagggacat

SEQ ID NO: 21214 - DNA, 120 bp, Glycine max
  Clone ID: PAT_MRT3847_119160C.1
tttactatcataaaaatttcatgcgcaaaactgcgtgtaaggtcccggtgctttattatacgaacatattcatacacccaccctctatctaccaataaataaaatcactttcactaatta

SEQ ID NO: 21215 - DNA, 1529 bp, Glycine max
  Clone ID: PAT_MRT3847_119161C.1
ctcttgccccccttactccctccaaaccctgaactacctctcccttactcccataaaggtagcttagcttcagatgccaatcatcaaattacccaaaccccttcactcatagagatcatcatcacctaatggtgctttgttcagctcaaatttttggtggggttttgcaaaagaccttaattaattaattcccctcctcaaattttggtggggttttgcaaaaaaccttaattcccttttctctttttccttttatgttgaagataactactaagtagcatgctcccaacacctcaaagtaaccaaaccaaaatcatcaccaccatctagatcccatattcccatctattaccctttcaatttgcttggacttttgtaggtgttcattgttcaaggcctccaaatctagggttgccacctttgcttcctggagctcctcacggacgccctctccctccacccctgcccccccgcgacctccacttccaccctcaccaccaattccagccccaccacaaccaccaaaacaccgaggatgaagccggcaatggccgcggccagaagcgagatcgcgacgagaacgccggcggcgggggccccgcctccgcgcccccccggggcggcggcgtgggcaggggacccggggcaggacacggaggagggagtgacatggggagaagacccagaggaagtcccgcggggccctgaaaccggcccaagcccccctgtctcggaaatcgccaacggctgtgacatcatggagagcgtcaccgccttcgcgaggcggcggcagcgtggcatctgcgtgctcagcggaagtggcaccgtcaccaacgtcacgctccggcagccggcctcgccgggagccgtcgtgacccttcacggaaggttcgagattctgtccctgtccggttcattcctgccgccgccggctccgccagcggcgtcaggactagccatatatctggctggcggacagggacaggtagtaggtggaagtgtggtgggaccccttgtggcttcaggccctgtggtcatcatggctgcttcatttggtaatgctgcttatgagagactacccttagaggaagaggaaactccggtgccatatcatggcaccgaaggattagggtccccaggaatcccggggactcagcaacaatcacaatcgcagccgcaacagcaacaacaacagcttgtgggagatccaaatagttcttctcttttccatggagtgcctcagaatcttctcaattcaattcaattaccggctgagggttattggggtggcagtgctcgccctcccttttaacaaagtgttttactttcatggtttttttctcggttatctttgttttcttctttttcttattttatttttgtttgtctttttttatttttaatttcgactttctcttattatcatcactgttcattctccttcttgcttaattataatttcgtttactcttatccttcttgcttaattataacttaatttcctcttaatttgaaggctttgatcagtc

SEQ ID NO: 21216 - DNA, 260 bp, Glycine max
  Clone ID: PAT_MRT3847_119162C.1
ctttacaacatcttcactactaaaacccttacattacccaacttaatcacctcgcagcacatacccctttttcatcattcgtaatatctaataaacccacacctatcacccttcccaacaatatcccatccttaatttctatataaactctccctttatcggcacattaatctctactaatttcctcaatactcacaacattaccacttcactatccaactccctaactccctctcctttcaatttcttcccttactttc

SEQ ID NO: 21217 - DNA, 365 bp, Glycine max
  Clone ID: PAT_MRT3847_119163C.1
aaaaaataaaaaaggggccggaccattaatcatttttcgggcaaaaaaaaaaccccatcatctttgattccggggggttttccaaaaaaaaagcctcgggggtttttttaattcgcccctttgctaaataaaacaacccctttttaaagcgcccgaataccgggaagttacccctccctgcccgtttaggaacccccccctgggcaatgaaatttgaaaataaaagaccttaccggaaagccccccctcccaataagcccgaagcaacttgggcctttctttccccctggtgtttaaccccattggaaaccaccggggacctgccttggccaaaccttggaaacccagctgggggaaattggaag

SEQ ID NO: 21218 - DNA, 184 bp, Glycine max
  Clone ID: PAT_MRT3847_119164C.1
cttagaaacgatatggaatcggttgtcttgtctctacgagctatacgtgaaggtcggatgaatgaacattatccgcatgttctgtatactgtcgcattggatgttcatcttatgctaaatcagcttacattgattccatgtatttcatgcagaacactataacgatgtatcaaattgatatatt

SEQ ID NO: 21219 - DNA, 499 bp, Glycine max
  Clone ID: PAT_MRT3847_119166C.1
cttacccccaaaataatcccctacaaacaagaattatgaaaccttaacatggaacattcctgccctttaagagcacacaaaagaccccccccaaaaaaacccccacccttaaaaagcacaaatattctgcccaagctggaaaaaaaaaaaaaaaaaaccccccccccggaaggggggggttctttgtttttaaaaaaaaaaggcggccccaaaatcaaagccccatcaagaacagcggggggaaaaggaaccaaacttgggaaaaatgaataactttaaaaccctgaaacccattgtttcccggggggaacctttctaatttgaaaaggggggggaaaaaaaaattgggcacggggaaaatacggaaccccccgggggggcaaaacgcattggggccccaaacaaaaaaaggtttggggggggggaaattaaggggtgggggaccaaaaaaggccttttatgccccccggggaaacttcaaagcccaaattgggaaaaa

SEQ ID NO: 21220 - DNA, 235 bp, Glycine max
  Clone ID: PAT_MRT3847_119167C.1
ctaaaacaaatttttcaaacatagctactgtaaatactctatggcccttattccagcttggagcaaacaacacaaactctaataactaatctcactcttacaaaactacaaattttttaacattgtctcttaaaatgctttaaacaactaatggttacttctcatatactaaaatttttcaatttcaaaattcactttccataccacaatcttattgaaacatttttttttaaca

SEQ ID NO: 21221 - DNA, 349 bp, Glycine max
  Clone ID: PAT_MRT3847_119168C.1
aagccggggcacccacccgttgaacctttttatgattttaataataaactttccctttataagggtgtagggacgttaaaaaaatacaaccagtcaagctgggggccctaatgtggaaaagggccccagcgagtggagacttttgaataaaaaaaggtaaagcccaacccaaagggggggccacccgctattcgattaagacgaaacattcaatatgggggggaatttttcttttggggggaaaaaaattactatccccgggccccttttacacattacgcactgaaaccaaaggggtggattattgttacagcaaaaacaagctgggaacgagaaagttattgtaatt

SEQ ID NO: 21222 - DNA, 168 bp, Glycine max
  unsure (1)..(168): unsure at all n locations
  Clone ID: PAT_MRT3847_119169C.1
tgtttntttttttaagacttttttaatatcacaatgtattataaacgtaattcttcttcactcatgcagactcaaattatcaatgaaaagcatcattatcaaaccaaatcatgttttgagaatcattcttgtaaagttctttaatcttcctctttttattatacttta

SEQ ID NO: 21223 - DNA, 1101 bp, Glycine max
  Clone ID: PAT_MRT3847_11916C.1
aatcttcagtgtcattcaatagctaccaaccaacattacttctttctgccatctgatagctggcgagaactcctgtcgtaatctcccacattcgaaagtgtcagtgagcaccctgcttcgattggcctctgcctcttcctttgtttgaatggttttcgttgcaaattctggataagtttttggaatggcagcaatttgcagtctttacatcatcaataagtctggtggattgatatactataaggattatgggtctgatggacaaatggataccaataacagcttgcgggtggcaagtttatgccacacaatgcatgctatatctcagcatttatcacctgtttcaggtgctttaggagattgaacttcttcaagcttatacttttgatcttcattgctttcaatcactgataggaccaaaaatctttgtggtgtgtgagcctgtagaacaatagatggaaagtttattgaaatttgtctatgaattttacacggactacgttttgaagaatccggttctatgagatggagatgcctatacgttgtgagctcttcgatatcaacctaacacaggcagtacaaaaggtatcgtgttgcatttttgggccgataaatttatatatgactcttctaatttctatattctgatgagtacatataatctgaaaattgtcattcaatttcttgtaagggacgagtttcttttactactcctagcctttgtattttatcaagatttacaatgtctaagacaagttttcagatttcttttgtgagcctgacgaagagttactggctcttcgatttgaatttgtctctggcatccaaaccgagtattttctcaggtgtccgttcgaaaatgccgggatgcctgcacggtgcgccctcgtggatggcttccggacactggcggttcggttcgtgcatgtcactcttttgggccgacctggtgatagctggccgctttctcccttctcctctcggctcagtacataatctaaaaattgtcattcaattgcttgtaagagatcgtgttacagctcctagcctttgtatttgctttttacaaacaaatcaagaattactatatctgagaaaaaa

SEQ ID NO: 21224 - DNA, 713 bp, Glycine max
  Clone ID: PAT_MRT3847_119170C.1
ccacgcgtccgggacgcgcgacaatgtatgctaccttcctttagccgaggtcacggtggtgcgatggagatgcaggcaaacggtaaaggtcacggagaggtcacagtagaaatttcagacaaacggggagggagctcgagcgaggtaggagtgttcatcacttagcgcccaaaagtggtatataaacctcaatgttaacaacggtgggtgtataaaaacatcattgatatttaaaatttctaagacggtgtttacaaatacaccatcttagattacctgctctgtaacctattaagacggtcttctcaatcaatgtctttgtatcagtcatgcgccgtgcacatggcacttaaaatgtaacatatttatgaaaatgccaccggttatcgtactacgatggatttattatgaccaatgtgaaatgtgtgtcgtaaaatgggtttttttttaagtagtgtttgcaaggaaacctatcgacatcaacactcacgagccctgattgtgactctctgtccctcacattgccaacgcgaaaccccgacctcaccatcactgtgttgtcattgagaggcacaaatctctctctccatcttcactctattcatcttcatcttctctaaatcgccattgccttgcaggtttttgagtttgccacaggttatccactcattgtcgttgccaccgcaacgaaccctctcacatgtccatgccga

SEQ ID NO: 21225 - DNA, 660 bp, Glycine max
  unsure (1)..(660): unsure at all n locations
  Clone ID: PAT_MRT3847_119171C.1
ttaatgaagtgaaacatgcaaaatatgtattcaattctatggcccaaagcggagtgacacctggtgttcagagctatacgatcatgattgatgggttatgtaagacaaaaatggtagatgaagctattagtctctttgaagaaatgaaacacaaaaatgtgattcctaatacaataactgttaattctcttattgatggtctgtgtaaatcacggagaatagcttatgtttgggatctctgtcgataagatgcgtgatagaagtcaacttgcagatgtaatcacttacagttccttgatagatgctttgtgcacaaactgtcatctagaccaagcaattgcattattcaagaaaatgattacgcaggatattcaccccgacatgtacacatacacaatacttattgatggattatgcaagggtggaagacttaagattgcgcaagaggtcgttcagcatctgttgattaaaggctatcatctagatatacggacatatactgtcatgatcagtgngttttgtaaagcacgcttgtttgatgaagcattggccctactgtcgaagatggaagacaatggccgcatccctaatgctataactgttgacatagatatttgtgctctatttgataaagatgagaatgataaggcagaaaaactc

SEQ ID NO: 21226 - DNA, 394 bp, Glycine max
  Clone ID: PAT_MRT3847_119172C.1
ggctcgagctaaaaaaaatcaaagcattacattttccaccaaaaagggcaggacgctgacaccgagggaagattccacggcagtcaattcactaccggagtctgcaggctactcatgatgcacccagatgaggcagaccagaccgcggagtagcctggagcattcaagctgatggagccataatgcctggcgagaatatgtcacccaacgttgaaaacggagccctagctgtcacagtcaggcgagcttaaggagagagctaagcccatgtagatcgggttactctccatggcctcttttctggattcaaacaggaacacgccagctgcagaaatgaatcagtctctgagcgaggctaggcaccgatacatatattacactcaagtgtcacaca

SEQ ID NO: 21227 - DNA, 650 bp, Glycine max
  Clone ID: PAT_MRT3847_119173C.1
gctcggaattcggctcgagatcacttctaaataatagaagataataaactcaccttctcgtcctccttcaagcgtaatttacaaaagcaatatggaaacggagtcactattgcctaagccaacttatggtggcataaagaggtacttgagaaggaggcgctaccaacgcctcgacggcgatggcggtgccaccgctaccaccggtggaaagaaaacaaagatgattaggtcaagaagaagaagcccacgtaggcaatggaggatcaaggcaattccaaaattgacatggatggttaggtcacccttgaagatgatggcaaagctaaaaaatgcttacacaaacttcatgttgaattccatgagcacggacaacatatttggtaccaaaaggattccaaaggctgatcctcatcaagtgtctaagtattataccggtgatgcgtttgaggccaggctcatttttgagatttcaaaggccttggttgcgtctcatgaactatatcctgtacattaattattgtttctacttcttttttttttttttggatttctcgaattttcctttcgaaatttcccgtgtgattccgcagaaaatgttgaagaatcacccagaaattgtaatttatttcttgttaaacgcatacgctttc

SEQ ID NO: 21228 - DNA, 438 bp, Glycine max
  Clone ID: PAT_MRT3847_119174C.1
cggctcgagcggctcgagctcgagccgaatcggctcgaggaagttctaagatttcaatcagaaaaaagaagaagcaaagaaagatgataatggttgtggttatgacaggtatattaggagagtacacagcagtgctaacaagggtcacagagcgccttcttcctcgccatggcataagttttcgtggtctaaggaggaaccttcgttttgcttccacaacctcttcttcagattcagcttcttcttttctggtttacttttaatcatatttgtcagattaatttatttctttcatgttttaggataggatatttgtttattgcacaatatattggttatgtgaggagctagcttcagaagaataagctatgttaattagattctgttgcattttgtgtaattatgttaaagattttgtaataaagaattagcccttgt

SEQ ID NO: 21229 - DNA, 238 bp, Glycine max
  unsure (1)..(238): unsure at all n locations
  Clone ID: PAT_MRT3847_119175C.1
ctttgaaatacaacatgaaagtnagagtggaaggggattttcccttgaagaactcaaggcagcagggttcccaaaaagttgcaccaacaattggtattgctgttgatcatcgccgaagaaccgttctttggaagtctgaactaatgtgcagaggtgaaacatcaaggcaaattggtgtgtcccaagcgggacagaagtaagctgtgatctctccgaganttnaatnacnagccaggnt

SEQ ID NO: 21230 - DNA, 366 bp, Glycine max
  Clone ID: PAT_MRT3847_119176C.1
ggcccaactttgatcttttaatttcattaccaagattgcttaaaaaaaaaaaaacttatggggcctgaaggaaaaaattaccttttttttgtttcaaggggaatgggaaaatataaaaattgggccgcaataaatatgaaatttttagcctgacaaggcgtttttgggtttaaaaatctcaacccctaagtaattaactggaccccgaactgccacatgggggttttcaacctttacttggacagaaaattttttttttttatttgaaaaaagagggattgcaatttttttgggcccctggctccaaaaaattggggggggaccctttaaaaacttccttagctatataaaatatttctgggaaac

SEQ ID NO: 21231 - DNA, 428 bp, Glycine max
  Clone ID: PAT_MRT3847_119177C.1
gggggggaaaaaactgctttttatatggcttgcaaaacaggataatccatggtggattaactgaatagaatgttgttgccggcccaggccaccaacatgggtggggggggggaaaaaaaaaaataacttgcttaatttgttactaacccacataagcatgtcctggacttactttaaagtctaaaatactcaatgccaaggatttaccacctgggggggggatcaaattccttaccattagagacatgggcttctttttcatccgcgggatttttgataaacctttttcaaaaccaaagctggttccacactttctcggtcattttttcgatggggacattctttgtctcgggccaccggaaaagccccaagacctacttggcggggacccaccccgagaagaaccagaagatgccccacttggaggg

SEQ ID NO: 21232 - DNA, 1339 bp, Glycine max
  Clone ID: PAT_MRT3847_119178C.1
gcgtgggtaatacatatgctttcactttcctctggttgggttgcggtgtttctccgagttgcttcaattgaatggctcttcagcttccaccacttcctggccgtgccatgcgcttcaactcaagcgtgtgctcccttcctgcacgaaaatctagcacctttgccactctgtcacaaccccgaagcgactgggttgaagccactaacagtttcttcgaccaagacaaacgacccatcatgttatttgacggagtatgcaacttgtgcaacgggggtgtgaagttcgttcgtgataacgatcgaaataagacaattagatatgaacctcttcagagtgaaacgggtaaaatcttactcaggagatcaggaagagctcctgatgatatctcaagtgttgtacttgttgaaaaggaaagatcctatattaagtcagaagccgtgctgaagataatggaatatatagacttaccctttccacagctagcaattcttcttcaatttgtgcctctgtttatcagagattttgtttatgacaatgttgcaaacaatcgttacctgatttttggtcgttcggaatcatgtgaaatatagcatcatcctggcatgagtactggaggtaacagtaatgtgctaagttcaaaaactgggcttctttatagtccaagtcatatcctgttctcaaatattttgaagattctgtgtactactgtatagaagctttacttgtcgttttatttgataagctcatagaagcagaggacatcatcaattcgtaataatattttctgtcccaaatgattttgcaatttcatttctttcagtaaacactcctaatttcttaacttcatcagggaattattaaataagttgtttatctgtatttaacttttaactgttctggtttaacagtttctctgtaaactgaattctgttaaccttgactcagatattttttggatttggatcatttcctattgtcgagcaatagaatatggtcatgttggagagagaaggacacaatttttatgaattttaattagtcaatcctacaaccaatcctggtgggtctttgtttggtaaaaattgtatctttgtttgacaagttttagtttttctgcttcaacaaagaaataaattaaaccaaagcctcagctctccttcctagtagaagcagaactagtcattggtgatggatctagttgtaatgagatcctcaaatcttcacaaatacgttctttatgtaaaagcatgtaaaatgtggattgttacatcatgatgacatacttctgttggaattctgtcatctttcttgtcaagatactagctacattttcctcttg

SEQ ID NO: 21233 - DNA, 773 bp, Glycine max
  Clone ID: PAT_MRT3847_119179C.1
gggaattaacaagtgtcacataattattgaccaaaagaaataatttcaactaaaatcaaaatccactcgttttatagagattaaaaacatatttaaaccgataatggattacaagctttgaaattattttttacaagatgatcttattccaatggtaacttattgtaatgtaataaattgagtcactcccacacggcatagtcttggccagaggtagcaacgtggaaatttgggggaataaggtttccaaggtccatctttggccctatcttcaaaaagatcttgttgtctatctttgcaacataaaggtcagcttcagctgccagaatattcacactgcttttctcattgatcccatgcttcacccttatgctactcaatttggctatctgctccttcaagccccaatcaaagaaatgatcgtagaatattgatggggtgccaggatgtgttagaatgtaagcatatccttgcatgactttatcagatgggaatggccaaattctctgagtggaaccagtatcatggttgtcaataaaggttactgcattttctggtttcacaccaatcattccagaaggcttgccatttgaatccttcaacctccaaagttggccttgcacagcagcttgaaaaattccttttgttgtgaaatcaaaggcagtgatagccccaccagcagattcaacccaattcaccagtgccccacgatgaccgtcatagttatcaatagaaagagaatcccatttctctcctactgcaaaatctggcct

SEQ ID NO: 21234 - DNA, 124 bp, Glycine max
  Clone ID: PAT_MRT3847_11917C.1
aaaccattggcagatcagccccttttatttccaatcaggaatgcacattaaactttctttttccaagaaaatatgcggagaaaaactggggcacggtttaaccccggggttcggaagggggggg

SEQ ID NO: 21235 - DNA, 269 bp, Glycine max
  Clone ID: PAT_MRT3847_119180C.1
gtggcatacagttactctggacggaagtgtaaatgggtcagtgtgtgggtgtgctacttcccgagctgcaccatctttccctgatcgccagtgcaagctctcccctaagcaccttcatcaacctactgcctctttccaaatcgctcttctccgcgtacgggcttctctagccaacagcagcaactacaacactagcaccagtacgatgaaatgtcgtaggctcaagagtgactccgagatctgcaatgctctgcgtcaattcctcgatt

SEQ ID NO: 21236 - DNA, 305 bp, Glycine max
  Clone ID: PAT_MRT3847_119181C.1
ctttgatttgaattggacttatcgttacaagatgctttaattgagcggactcgtcatgcgtgctctcggaatgggactatctttgtacgctcgcaaggatcattctaccgatgctgctctgatttgcactcatcttcttatctatattggtggatcgttcagtgtaattggaacacgagtctgttttttaaggcttcagatgcttatgccgatcttgccatggtcattgcaatgttggctctctttaccaagcttggtaggtgccatgggtactacgattgcttgagccaattggactaacacta

SEQ ID NO: 21237 - DNA, 363 bp, Glycine max
  Clone ID: PAT_MRT3847_119182C.1
gagaaatataaagagaggagatgtcgtctacaaggtcgtagaatgatgaggaagaataattataatatgcccaaatggatatctggaagtacatatttggatttgtataactgtttgtcataaatttttccattgagcttttccttgtttaaaacttttttaatctattatatttcctttatacttttttatatatttttaattttctgttttttattttatttttttatctttttatacttttttatttattcatttttttttttttgtttggctgctctttctttttatattttttttacttttttttatctattttttctttaattttttttatcttttttttctttttttctttttttc

SEQ ID NO: 21238 - DNA, 319 bp, Glycine max
  Clone ID: PAT_MRT3847_119183C.1
ccgccctttttttttttttttttttgtaacaagaatatattagttatttacattagaaccaaaagttacattgcaaagttgaaaaaaaaaaaataaaaaagctggcaagaaaccaccattgggaacaaaccactagagtgccatttgttctttgggttattattaactaacccttttctaccaaaagatctctagattgaacagaagaacttgagagaagaaggtatagacatgctctatatgctatagagaaaaatctgtgaggccaaaagcaaatggcttgaacttgctccggaattgcaaaattacaagaaccatg

SEQ ID NO: 21239 - DNA, 443 bp, Glycine max
  Clone ID: PAT_MRT3847_119184C.1
acgcattcaaattcgctgaaacccttcgacacaaccaatggctgcttgtctcagtctctgcactcctactctgtatcggcctagagtatgcaaacatttcaaattgctcaatgggtcacataagttctcattcaatggatatgggttggatttggccgttgtcctacaaaactctaatgctgctggcagaattagagctacattaacattcggaggaggagacttaggatcttatctgaagagttctgatgttgtgaccaatcgtttcggaactgggacacagttcgatgcggtagcgtttggaacgctgggagcagacacagcagtgccagcaggcagtggtttttctgatgatgaatccgagcatgatttcgatagtcccacggaaggttttgcttacataccggaggccattgaagacattaggaatggaaagatggtag

SEQ ID NO: 21240 - DNA, 480 bp, Glycine max
  Clone ID: PAT_MRT3847_119185C.1
cagtggaaaatgcactcagttgcagctcaatagtattatatataatgattacattcttccccttaaagaggtacgtaacaagcttctatttaagctcgtggtttacaaagcaaaagtgaaactactaacacaatttgacatgccaactccgacacaattctcaactgactaacagaagataactactgttgagctattgacagtaagtcacgagatcaatttgaagtccaagcaaaatacccattttgtgcaattaagagtaagttgcaagagaaattctaaaatttaagtatgcacatcatccattttttgtttctactgtacccaagaaaaatgaaaccagctatacgtccaattccaatctatatccccttggagatactggaagttgcatgtatctttaatgagcactcagggatataggtaacacctttttccttgacatcaatttgcaaagtgtccagaacaattatgccatca

SEQ ID NO: 21241 - DNA, 249 bp, Glycine max
  Clone ID: PAT_MRT3847_119186C.1
gttatcttatttttgttctttgttcatattttcggtattgtctttccaacaaaaaggggaaactaacctctttacatagcttcacacaaaagggggtgaaatagaaaccaaaagttgttggataaaaaagcaaaaaaaggaaaaataatgggggggcactacaacaatatatgtccagtaaaagggcaatgtttataagacattgctagccactaaacccccaattccgggcatcccaggttcaaaagg

SEQ ID NO: 21242 - DNA, 699 bp, Glycine max
  Clone ID: PAT_MRT3847_119187C.1
catcgctacgctgtgctgtgtggccgagtatcttgagatgacagaggactattcagttggaaacttgatgggaaggaccgatgcttacttgaatgaagtggcactaaagaccattgcaggggctgtgtctgttttacatatgtcagagaatctccttgcaatagcagagagagcaaagttggtgagtagatgcatagatgccattgcatttatagcatgcaaaagaaagccaattctgttcatctgcaagaagtgagagtggttctgtgggagtagtgtcttccatgggcatcaaaccagagaccagtagttgactggtgggctgaagatttaactgtgcttagaattgacattttccaaagagtcataattgcaatgatggcaagagggtttaaacagtatgcaattggccccattctaatgctctatgcacagaaatctctacgaggtttggatgtatttggaaaggcaaggaagaagattgagccgcgacaagagcatgaaaaaagggttgttttagagacaatagtgagccttttgccaagggagaagaattcaatgtcagtaagcttcctttctatgctgcttcgggcagcaatatatcttgagacaacagttgcttgcaggcttgacttggagaagaggatgggcatgcagttaggacaagctgttttagatgatcttctcattccttcctac

SEQ ID NO: 21243 - DNA, 277 bp, Glycine max
  Clone ID: PAT_MRT3847_119188C.1
acgtaacctcggaattcggctcgagataacttataagacatgatagtgttaggttatactatactatactataacctaacactatcatgtcttataaggtataacagagaggccctagaggaaccagaggcacatgtctgacataaatatacatgatagtgttaggttatagtatagtatagtataggttatacgctgtattgtttggtttggtgtgtcatgtatgttggaataattttatccattatagtattttgttgcccgatcatattaaaaa

SEQ ID NO: 21244 - DNA, 1193 bp, Glycine max
  Clone ID: PAT_MRT3847_119189C.1
cacccatccgcaaatgggaagcgatcatccgaagaattctaaacatatcttctgaacctgaaagcaagcacaaaagctacagtgcccctcattctgctgttcaaaaaacttcttcttctgcttctgttaatgctctagcagacagtgtagatgttaatccactagacatgatgaatgaggagtatttaggaacttttgacaatgatgatctagaacaagaggaacagaaaagcagcatattcggtataggaaagaatttacagctgaggaaaatacatgacattgatcttcagactatacttgactggcctgaacgtccattagatgcaactccacatactgattccagtccgaaattgcgccgagtactaagcagctcagagagaaccggctttagctggacagatactgcttcaaaatattcgaatgcaatgaaacggtcacaccatagttctggaaatttgggcttgttatggaaagagcagaaagtgatgcctgaagaagtaattgatattattgacgacttatctgacatgctatcagacgaggaagatgatgatgattattttgaagtagcaaatgacaaagaagttaatggaataagtaaggtgaaatctcatcgtaaatatgtccggattgtcagcaagcagatggtaggaatatatgtgtctgtttgggtgcaaaggaggttgagaaggcacattaataatttgaaagtttccccggttggagttggtcttatgggctacatgggaaacaaggggtcagtttccattagtatgtctctctttcagtcacgtatgtgctttgtttgttcccatttgacttctggtcagaaggaaggggtgggccatcgcgtgaactctcgcgtgggtgaaattctaagacgcacttgcttctcatcatctgtcttcgatgcagatcaaccacaaacaatcccatctcatgaccagattttctggttcggggatttgaattatcgtatcaatatgttggatgctgaggttagaaaattggttgctctaaagaagtgggatgagttgaagaattatgatcagctaagcaaagaattgcgtatggggcatgtatttgatggatggaaagaggggttgataaacttcccacccacttacaagtatgaaatttagagctctctttagcttgcgaaggtcgaatacttcgttctagatcgc

SEQ ID NO: 21245 - DNA, 274 bp, Glycine max
  Clone ID: PAT_MRT3847_11918C.1
gagcaaggaaggggccccccacttggattacccttgttttttaaaaaaaatctaaacttattaaaaataagaaccatgtctgggtttttccaaattaaaaaacttgaccccttgttttttttaaaaggaaaatgaaaattctttgtttaaacaatttatttgaaactcttacttgtcaaacttaacctaaattccccaggcggcttttattttgaattaaaaaatgaaattatgcttattattgaaacgttttccttttacccaccggggggaa

SEQ ID NO: 21246 - DNA, 304 bp, Glycine max
  Clone ID: PAT_MRT3847_119190C.1
aaggggaaaggcgtgacgcctgcgggtaccgatccggggttcgacccacgcctacgcgtttccgttggcggacgcgcgggcaaggatggctggaggatggtgcagactacaaaatctagtaaggcaatcacaaaaaggacagagggggactcattggtacaagtgcttttaacgaaagagaaacggctcggatgatgacgacgcaagattgcggacaaagctggtacctcatttcgggaaataggtgaatgcaattcagggtggtggtgaagaaggaagcattgaacaggggaactctaagggg

SEQ ID NO: 21247 - DNA, 243 bp, Glycine max
  unsure (1)..(243): unsure at all n locations
  Clone ID: PAT_MRT3847_119191C.1
gcacgcgtacgtaagctgggaattcggctctagcgaacagacttattgaacgacgcacctatacttcaaagaacagtanttttcaaagaacaccagcgggccaatactacgcccaatccgaccttatatctaccttgttacagcgcttgctctcagtccatgtagctgccaacatacgtcacaaacacacccaaaataaatacataccaatacatatgactaaacatgctcatagacgccaac

SEQ ID NO: 21248 - DNA, 312 bp, Glycine max
  Clone ID: PAT_MRT3847_119192C.1
aaaagccaatcattttcttttaagaataacaataatgcacactgagatactatctcactactagcgggtaagccaccgacggaaaggagacccacacgattgctctctcttactcatacggggtggggcaaaacatcatcgacaaggagaacctaaagaggcgatgaacgctctgagtgactccgccgtaacaatgcgggtaagtacgcgtgtaaatagtcccgatctacattggcctgttaagcgtacttctacctgtcatagggacatactaggtcacttccggtgaccacaaaatgatggggacgatga

SEQ ID NO: 21249 - DNA, 525 bp, Glycine max
  Clone ID: PAT_MRT3847_119193C.1
gctccctctctctctctctctctcgcttgtggtgtgtgaattagaatggcaaaggtaagggatcagaagctatacgtgaccgttccgagtctctttcggtgtccaatctccatggacgtcatgcgctctcccgtaagcctctgcaccggcgtcacatacgatcgcgccagcattcagcgctggctcgactcaggccacgacacgtgtcccgccaccttgcaggttcttccctccaaagacttcatccccaatctcacgctccaccgcctcatccgcctctggctcctctcctcctccgccggcgaacccttctccccctcctccgccgaccatctccgtcctctcctccgcaaaatccatacctccgacgacgacctcgccggaaccctctccataatcgccgaattctccctaaaatccggtgagaaacgccggtctctcgccaccttccccggcttcgactctgccctggtccgcgcgctcgccggaagcaattcactgattgacgctgcggaaaactcgatc

SEQ ID NO: 21250 - DNA, 372 bp, Glycine max
  Clone ID: PAT_MRT3847_119194C.1
aaacgggggggggggggggtaaacaaccaaaaaattaatttggttttggggggaaacattacaacctaaatccataaccattcggtaaacccagagggaactccccttggattcaatcaacaagggggaagggggagtttcgggtcattttacgaaaattcaatcttgaattaaaaagacatacttaaatcccgcgggggaaaaaaaaaggaaaacccgttttggaaaaactttttaagaaaggaccttttaagggggggaaaagggcacttttccgctacctagggggaagttgcttggtttacaataaaattccccaaaacggggggggggataaaagaaattggctataaggtgccttgggaacaaggg

SEQ ID NO: 21251 - DNA, 330 bp, Glycine max
  Clone ID: PAT_MRT3847_119195C.1
ggaggagaggaagaggggtgagttgttcattatcatcatttcattgtttcttttcttttccagacatcaaaccaaacactagctacgcttctctctctttccttcccagagcttcctgtggctgtggaatcatcgtatcttcttacgtccgaagcaagcctttgtcttgcgtgtgttcttcccccttccgtcaggttcgcttttcttcatttacatttccacaatatcaaaatacccttacctctgtttcttttattatttgatctatttgttgtcaagaaatactttcgatgcatatgtctctgtgatttaattcgaaatagtggacag

SEQ ID NO: 21252 - DNA, 285 bp, Glycine max
  Clone ID: PAT_MRT3847_119196C.1
acggctgcgagaagacgacagaaggggtattattactagtatttgtatagtttttgctaaatgcaccccacttattcttttttttacagtcgcactcattaattttaattttcagaaaagaagtcaagatggcgcccccctcagtaatatgtcggtccgcccctgtatgtatcccatatatttccacatttacattcatacataacaatgataatgttaatctgtagctaaaaataatttaaaaacaagcttcaaatcagctacagtaaactccaactgatttcg

SEQ ID NO: 21253 - DNA, 295 bp, Glycine max
  Clone ID: PAT_MRT3847_119197C.1
gccagttaaattttgaccattacttgggcacagaggcattcaaaccacctatttttcaagttgaccaattcgtgtccattactacgcttattactggactgcctgcgtgggaactcgagaactttttttggtcaagcccttagcttagccttggggatctgatcgagcttgacgaatgaggctcttaagccagcgtttcccttaccgagcttttttggggccatggggttctgattcaggcttaaacgggaacccttttcattgtacgacagcttctttcctggggtcgccttgg

SEQ ID NO: 21254 - DNA, 539 bp, Glycine max
  Clone ID: PAT_MRT3847_119198C.1
gtctcagagctgatgtatcgccctaaaaaccacaacagctattgaaggcatcagccttttgccatattttgttcaaaaaaaactaccatctaaattttaaataaaaatgcaacaattttttggatagaaacacatctaaagtatttcttcattaaaaatgagcggattcaatctcgaccaagaaaaactcgaaaacggcgctttgtctttaacatctttaaaataccaagcgacctaaacactaaacagggaagatgcgggattgaaaagaagggttagcgtaaaaagggggtgcaggattcacgcgggaaaaggcgccaccttacgtttctcctatttcggacaagggttctaaaaatccgtattgatttaaggtaaacgtcctctttatacacaaaccaagacttggggttttttttttggcacagggacgatccgaagtgaatactataccaattacccaacttaaaaaaagttatttttacggactcagtacctcaaaaaatcacgtactctttattactaaggaacaagattgc

SEQ ID NO: 21255 - DNA, 2405 bp, Glycine max
  Clone ID: PAT_MRT3847_119199C.1
tgttatccacgccagctgcatctgcttttttttgttattccctttggttctggggtggaatctacgtataaaagttgaaatcttggtttcgtttcttggttgaggagaattgtttggggctgacttggtgttgggttggtcctgaatttttttaatgcctttttgtttgttttctagttttttttttttttaaattgcgtactagtaactctctctctctctctgggaattgggtgcttctatttgtttaatggaagattatttatgggtttagattattgggtttaacagttcatgcctagtcaccaatacgcgtttggtatacgtattgaaatctttctttcttcttttgtgcaaatttgcttggtctagcagccatatctgcatctggttttgcgcgtgtacacccagacattctcgctgatctagttgggataaagtgttaattcatgtgctgggtgagatttctctaggggtgaggcgagatgagtggttaaaggctttaccactggtgattgattgctggcttggttaagactgacagagaatttgagaaaggagaaggtacttcggggaccacagctacagtcgtagtagtgggtaggtggcctgttaatgatgcatctgttggagcttcccgttgtatactagatacccagggtggtgctgttgcctccttaactgtggatcaccgacttgaggagaatattgaagagagggaacgtgtcacttctagtggaggtgaagttgggagacttagcattgttggtggggctgagattggtccccttcggtgctggccagggggtctatgcctttctaggtcaataggtgacatggatgttggggagttcatagttccaataccatatgtcaaacaagtgaagctatcaaaggccggtgggaggcttataattgcctctgatggcatatgggatgctctatcctcagaaatggctgcaaaatcttgccgtggtttgcctgctgaacttgctgctatgcaggttgtcaaggaagcactaagaacgagagggttaaaggatgatacaacttgcatagtagttgacataatcccacctgataacgaattgccaccaacacctcccccccccaaacggaacaagctgagagatcttctttccttcaggaagagctcccgtgattctgccagtaagctgtcaaaaaagcttttccgctataaatatagtggcaggaacttgtttggtgaagagtcaacaatgcttgcggggagttcatagttccaataccatatgtcaaacaagtaaagctgtcaaaagctggtgggaggcttgtaattgcctctgatggcatatgggatgctctatcatcagaaatggctgcaaaatcttgccgtggtttgcctgctgaacttgctgctatgcaggttgtcaaggaagcactaagaacgagagggttaaaggacgatacaacttgcatagtagttgacattatcccacctgataatgaattgccaccaacacctccccccccaaaacggaacaagctgagagatcttctttccttcaggaagaggtcccgtgattctgccagtaagctgtcaaaaaagctttcagctataaatatagtggaggaactgtttgaagaaggatccgcaatgcttgctgaaagattaggaaatgatgacaacttgaactcagggcaatcaacatctggcatttttgtctgtgctgtatgtcaagttgatcttgctccaagtgagggcatctctgtccacgcaggttccattttctccaccagctccaaaccctgggaaggtccttttctatgttttgattgccgtgataagaaggatgctatggaaggaaaacgtccaagtggagttaaggtgtcataggctcaaaattgatttcctgttatagtattctttatgctatctttggccatttttgtattcacaatttttataggcaaaaattaattgattgaatctcactatctagcagcaacagctgtatatgtgaattgtgatatccacgaattcatctaaaatggggccattgcatttgagtagcaaattaaaactgggagagagtgcctggaatgggtttttgggcggctgaagattcttcatctctgatttggatggttaagattgttgccgggtagattcttttgtatagtagtttatgttgcttaacttaccacaaaagtgggtattctcttgattaagtatgcctccccaaattctgtatataaatttccatggaccttttctacccctggggattggaagcttcaaatctctactatggattgagaaatcaattcatctaaatttagaaattgcttgttaaatacaatatgaaaaaaaaaaaaaaaaaaaaagcggccgctcgaattcggacgcgtgggcggacgcgtgg

SEQ ID NO: 21256 - DNA, 296 bp, Glycine max
  Clone ID: PAT_MRT3847_11919C.1
gcctgcgccgctgctcaaacgacgtcgtccagctagacctctccaccccaacaacaggcaccaccaccaccaccaccaccacaaacaacacaaactcttcttctttctcctcttcttgttctctctccatcgacgtggacgaatcaacggaagcccgcatccagcgcctgatctccgagcaccccgtcataatcttcacgcgctcctcctgctgcatgtgccacgtcatgaagaagctcctcgccaccatcggcgtcaaccccaccgtcatcgaattggacgaccacgagatcgct

SEQ ID NO: 21257 - DNA, 561 bp, Glycine max
  unsure (1)..(561): unsure at all n locations
  Clone ID: PAT_MRT3847_1191C.1
aagaaacaggcctacttggcccaattttttcctaagatccaaacttcggttgttagatagcttgggcccaacaacaggggggttctctgtttccttccttactttgcgttacctaagagcttctcaacgagcaaggcaaacccctaagggaaaccttttgttcgcggggtttttacaaaggtccccgggaaattaaagggatacttactgacaacctttttgctgtctcccaatgtataacttgatactattggcagttttccgggggggggcctccnttttttaactagcttcccttttttgaaagttattgttgccctgaaaaaagggggtttggggatcctctccggggaaacccggccggcttgttttttcccccggggggaaggaagagctctttggggactgcttccccggggtggccttaacccctgtntcggggggaagggaaaaaccacttggggaaaggcgggaagacccccaatccggggcgcggggggcccccaaccccttaatcctggaaatgtaacaggtggctggaaacaacctggaaggggtaaa

SEQ ID NO: 21258 - DNA, 1449 bp, Glycine max
  Clone ID: PAT_MRT3847_119200C.1
cgctacggctgcgagaagacgacagaaggggatgagtctcataaaaccattcacaagacaataacactttttgtccgttcaagcttgcgctttttagcttttatccattgaatagcaatagacccttttgttgcccttttgtttctgaggccttcaaacattcttggcttctttgcaaagttggaattttcactcttcaacttattgttttgatcccaaatcagaaaaaaataatattgggttttattttgatccataagctgaaaggctgaggcaagtatcattggagatacccttttcatctcatgatctgaggttgataaacaagatccttttgttcagagttcagagtgatcatggcatgttccatgaacagtgttttctgtgttcctgaattaaatgagagcatatttggttccaaaaccaaaggggttttgttgccttgtccctcaaaaactgccaatgcaaaatcatggggttgttctgttttgagcaatgctttcatgggaaaatccattgctcttggtgagaaaggctcaggatgttgcaattcaaaattctccagcaatgttcctgttcatgcacaagcaacaatttgtgtcagcaaggctttgaagtggtggaagaagaccctaaagcctaatatgattgagatccactcggcacaagaactggtccattctttgctcaacgctggtgattcattggttgtggttgatttctattcacctggttgtggaggctgcaaagcccttcatcctaagatctgtcaaatagctgaattgcacccaaatgcaatctttcttaaagtcaactacgaggaactgaaaaccatgtgtcacggtttgcgaattcacgtgttacccttcttcagattctatagaggtgcggagggtcgagtttctagcttcagctgtaccaatgccactatcaagaaatttaaggatgctttgacaaagcatgggaatgaacggtgtagtttaggtccagcaaaaggtttggaagaatccgagttgaaaattttggcttctattggtgaaattaattcttctccgttactaagtcccaagcaagggaaattggaagatttgcttacggagagccatgattttgctggggtttggaacatggaaaataatagcaggggacttatgctggatgctatatactagtatttatttaattttcaaactagcaagtagggaatttatttatttatttactttgtcatgttacagaatgaagatcataatggagtaaagcagctccatatcatttattttcctatgaggtttactgatttttatatcttgctgtaaatttattttttggaggggtttgatgggacttgtaacatttttttggttggatttgagccctgcaatttagcaagtgttgctggataataatatcttccgtattcaaaccctgtcctcaaaaaaaaaaaaa

SEQ ID NO: 21259 - DNA, 1254 bp, Glycine max
  unsure (1)..(1254): unsure at all n locations
  Clone ID: PAT_MRT3847_119201C.1
tcccgggtcgacccacgcgtccgcccacgcgtccgaattcgagcggccgcttttttttttttttttttttttttttttttaaaattgcgtactagtaactctctctctctctctgggaattgggtgcttctatttgtttaatggaagattatttatgggtttagattattgggtttaacagttcatgcctagtcaccaatacgcgtttggtatacgtattgaaatctttctttcttcttttgtgcaaatttgcttggtctagcagccatatctgcatctggttttgcgcgtggtgtacacccagacattctcgctgatctagttgggataaagtatctctttatattgccaagaagagtttactgtgtgggaggagtgttttatgtttgaggtcttatatacttgtgagaaaagagctttttggatttgagtagtagggtgatagaggaaggcgaaggttctttggtggggctagatatggcctctggtgaagggaggcggcgtcatcatgatcttgtgcctcttgctgcattgctcaagagagagatgaagagtgagaagatggagaagcctactgtgagggttggacatgcagctcagtccaagaaaggggaggattactttctaattaagactgattgtcaacgagtgcctgggaactcttcatcatccttttctgtatttgcgatctttgatgggcataatggaaacgccgctgccatttttaccagggagcatttgttaaatcatgtgctgggtgctcttcctcgagggcttggacgagatgagtggttacaagctttaccaagggcattggttgctggctttgttaagactgacaaagaatttcagagcagaggagaaacttcgggaaccacagctacattcgtaatagtggataggtggactgtgactgttgcatctgttggagattcccgttgtatactagatacccagggtggtgctgttacctccttaactgttgatcaccgacttgaggagaatattgaagagagggaacgtgtcacttctagtggaggtgaagttgggagacttagcattgttggtggggctgagattggtccccttcgttgctggccagggggtctatgcctttctaggtcaataggtgacatggatgttggggagttcatagttcccataccatatgtcatacaagtgaagctatcaaaggccggtgggaggcttatactngcctctgatggcatatgggatgctctatcctcagaaatg

SEQ ID NO: 21260 - DNA, 2061 bp, Glycine max
  Clone ID: PAT_MRT3847_119202C.1
aatggcgctcgaggtccccaacgactggttctgttttctctctgctgcttcgattcattcacacaaccatgactagccttactaatggcgatgctggctccctcaacaaggtccccacgatcaagttcaccaagctcttcattaatggagacttcgttgactctctgtcaggaaagacatttgagacaatagatccaagaacaggagatgttatagcgaggataagcgagggagataaagaagacattgacattgctgttaaagcagcacgtcatgcatttgacaacggtccatgcacacaaccatgcctagcctttgagaggaatattgctgaaatgggcaaataattgaggaaaacgcagaagaacttgcagcactagattgatggggacttcgtagcatctctgtcaggaatgacatttgagactatagatccaaggacaggagatgttattgcgaggataagcgagggagataaagaagacattgacagtgctgttagagccgcacgttccatgcctatacattgcttgaaccacttggtgttgtgggacacattactccctggaatttccccaataccatgttctacatcaaggttgctccttctttagctgctggctgcaccatggtcctcaagcccgccgagcaaacacccctctctgctttgtttaatgctcatcttgctaaattggctggaatcccagatggagtgatcaatgtagtgcctggatttggcccaactgctggtgctgcattaagctcacacatggatgttgataaggttagctttactggttcaacacaaacaggccgtgagataatgcaggctgcagctaagagtaacttgaaacaagtttcacttgaattaggaggcaagtcacccctcataatttttgatgatgctgatatagacaaagctgctgagctagctctactaggcatcctatataacaagggagaagtttgtgttgcaagttcccgtgtgcttgttcaagaagggatctatgatgaatttgagaaaaaactggtggagaaggcaaaagcttgggtcgttggggatccctttgatcctaaagttcaacaaggccctcaggttgacaaggaacaatttgaaaaggtcctttcatatattgagcatggaaagaaagaaggagctacccttttgactgggggtaaaacagtgggaaacaagggctactttattgagccaacaattttctccaatataagggaggatatgcttatagcacaggatgaaatatttggcccagtaatggcactgaagaagtttaagaccattgaggaagcaattaagagtgctaacaataccaagtatggcctagcagcaggcatagtgaccaagaatttggatacggcaaacacagtgtcaaggtccattcgtgcaggcactatttggatcaactgctattttgcctttggcgatgatgttccctttggaggatataagatgagtggatttggaaaagatcatggattggaagcccttcacaagtacctacaagttaaatctgttgttactcccctttacaattcattaagagtgctaacaataccaagtatggcctagcagcaggcatagtgaccaagaatttggatacagcaaacacagtgtcaaggtccattcgggcaggcactatatggatcaactgctattttgcctttggcgatgatgttccctttggaggatataagatgagtggatttggaaaagatcatggattggaagcccttctccctggctttgaatgtctactgcatggatcttggaaaatggtccattctggccatttcctatcaatttgcatctgccatgaggcatggaaattcagttcttgaacagtggtgtctattatattgtcaacaagctggccttttcctacttttcagtcatgctttaatagaaaatgtatggaagaaaaacagtaattttatttttgtttggtttgtaattaaaaggaaatatcaacacaatttaacttattgcttcaacagaaaatatgaattgttataaatctatatttattttttattcatatt

SEQ ID NO: 21261 - DNA, 376 bp, Glycine max
  Clone ID: PAT_MRT3847_119203C.1
aaaggaaaacatgaccccttttaaacaaactttaccggcataaaagtttttccccctgccaaccgaccttaattgttttatgtacaaaagaaccccccccaaataatgatccctcctttccccactcaaagcaggaagggttttatcccattccaaaacccaaataaagaagacgggaaattcctgtaagcttttaatgaaaaagcccaacccccgacttgaaacaaaatatttaagccaatgaaaaaaaaaagaaccccgtttgaaaaaattaaatccctccccccacccccaaatgttgttgtggttgtaatgttaaatataaccggaaccgtaacctccttttttaagttactctccaatgggtttgggcttg

SEQ ID NO: 21262 - DNA, 251 bp, Glycine max
  Clone ID: PAT_MRT3847_119204C.1
gtcctaaccgtgagatgtcttctcaagagaatgcagcttactgtattaggactcggaggccatagattctactccagtccatttcaaccgtcaagaccatgtgagccccactactctacccacaaggctaccaagccttccctccttgacagtgggtgtcctctccttagtctttgctactctatctctcttgtatccagaagcagatccgttcgaaattctcctcttctatgtcgcactctctatactgc

SEQ ID NO: 21263 - DNA, 387 bp, Glycine max
  Clone ID: PAT_MRT3847_119205C.1
aaaaacccccccttggtggaagcaaatcaatgaaaaaatttaattcagggaacaagggtgatcgataattgttgcccctaaaaaacacactgatcccaccataaatattggtgggaaatcatgggcaaaaaagcagctagtgcaacttttccgagcattttcttttttaactaatgtaaggggagttttatcaagaaactcaactttgagaatcaccattttttttaccatgaatcaacatccgggtggtttcaagaaattatcataccggcgtgatgcttgcaattgaaaaaagggaaccttatgctgtttttctgttgcacaaagccttggaaaaaagtcaggcaatgggtgggttgaatttcaagtcaaatttgaatcccaaaa

SEQ ID NO: 21264 - DNA, 382 bp, Glycine max
  unsure (1)..(382): unsure at all n locations
  Clone ID: PAT_MRT3847_119206C.1
ctactgcataattatttcgctctctcncncaacgcatggccgcgaattctagttgccgagggatcacggcctccttgaatcgagacgccaaccagatctggacttccaacccccccttagctactctcacttccaggaggggagcaatagcagctgcctacagcagcagcggcggatcatgacatgacacgagctcagaccatcagatcacactgtggtgcctttcgcaacaatgatatatcaaacaaccatggcagcataaggagtcatgaacttggacaacgtgacatatataatgtttccgagaggtcgtctgctatgagaaaagagaatattgctgaggagatgcaggatattttatttgctgaagcactcgatgcta

SEQ ID NO: 21265 - DNA, 444 bp, Glycine max
  Clone ID: PAT_MRT3847_119207C.1
gtgaattcttatacttatctatgtagtattcttttgattatcttttactcatataatacttccaagaattccatcaaagctaaatctttcaaggtaatttaaggtatttaaatctgtgattgcagttcattggaatttttcaagaaacaattgtgcaagaactggttggggagctggtaagtacacattgattttgaatgctgatgacaaattgtaatgttttataattagggaactaaaaacaaggttaacagaacgagtattgtttgtaactttccaatcttgtgatgttaaactttgaaacacaccacttaagattaaggcagttacttgttagtgacttagtgtactgtcctttgtgcatcagtaccataagtttccacaagttttttatgcttctttaccagcaccgggcctgtgtttttaggcaattatgaatatgct

SEQ ID NO: 21266 - DNA, 608 bp, Glycine max
  Clone ID: PAT_MRT3847_119208C.1
gtctcatgggaaaaccagggaaatttatgagaagttggaggagttgggagaggaaatggcgaaagccggttatgttgcagacacttcttttgtgttgaaagaagtggatggggatgagaaaagtcaaactataaggtatcatagtgaaaggttggccattgcgtttggacttattactttccctccagaatggcctatcagggtaatgaagaacttgcgagtttgtggtgattgccacactgccatcaagtttattagcaagtgtactggaagggtgattattgtgagggacaataaccggttccaccgatttgaggatgggaaatgcacttgtggagattattggtgatgatgataaggtgctgcatgacatgagactgatgagaatcactgaaaaaaatcatctcacgacttgtttttgctatctcaccacgtacaaaatcgtggtaattttgacactttttgtcatttatttattttttgatattactgctaacatgatccgaggaaaaataggaagcctatagtactgtactcaaagaagaacttcaaaagaaaattcttaagactagctattatttcatttataaaatcaagtgtgtcatttg

SEQ ID NO: 21267 - DNA, 399 bp, Glycine max
  Clone ID: PAT_MRT3847_119209C.1
tgcttctaactatcgatttctgctaaaatacacatactttggctaaccctatcttcaaatgcatcttcttagctttgattttcatccatgtctcttaggcatgttcagttgatcttaacatatctttgaaactttaatcataacaactatgttggacgctccttgtttttaggatccacgataggtgcaagcttccattgacgagttgaactcatatttgctaaatcttaacttttgaatttatttatctttatcttcatctggtatatcgacaacaacttggctaactgatttatcatatcaactggttgaatttggctaacaaattttttctgggtaataacaataactaaaggcacaaagctctctaaaaaagcaattaaacttgtgagttatgaa

SEQ ID NO: 21268 - DNA, 232 bp, Glycine max
  Clone ID: PAT_MRT3847_11920C.1
gcgcagaagaagaggaacgtagacggagaaagagcaagaagaatagaagataaagaagtaacaggagcaggaagaagagaagatctatgcgattcagactgagatgtgaagatgagcgagatgcgatgacctctgaaagcatccggaagaaagaagaagaaacgtctcctctttcttctaggtcctcgatcgaagcgtatcattagagagcagcagaatatcataagggaag

SEQ ID NO: 21269 - DNA, 752 bp, Glycine max
  unsure (1)..(752): unsure at all n locations
  Clone ID: PAT_MRT3847_119210C.1
gtaccgcccctgcaggntaccccggtncggctcgagtccccatttggaatcacccagaaacagaaaaagagctcttctttctcttcaatgcgatttctcatctttctctcctcgctttcctttttcaggtgcaaggcttcaataacgtaactgccatttttatttttaatttaattatcgttgctttacgtgcaagcttctacattttttcccgtccagggaaagaagaatccctagttatcatttttggggaaattcaacccatgattctgtgagatttgtttgagtgtaaacgttgcttgtttgggtatttggggtcacagaggagagaaagctgaaaactttttatgccttgtgattttgttgatttcatgggtttagtgttgttctcatcagacaaatggggtttttaaatgataggctattattaattttgctctaagtgtaatttttttttttgggttttgtctaggtcagatttggaaagaaaaaaaagtttctttttttgaggggtgttctatgtaaagtcccagtggggattgagggttgacttcttttgaaagtttggaaattgattggtgattgggttttgaattggggaggttgagatttgtgagtagggttgattgaggtttggtttgagcgatggatgatgcacagggtagttcaaattctctgccccctttcctggcaaagacttatgagatggtggatgatccttncacggattcggttgtttcgtggagtgtcac

SEQ ID NO: 21270 - DNA, 804 bp, Glycine max
  Clone ID: PAT_MRT3847_119211C.1
gaattcgacctcgttacccggggatcctctagagtcgacctgcaggttggctgaagtatggaatttataatgtctttgttattttttgtttgaaatttaaaagtatcacatttgtatttgaatttttctttcagcatattcctattgggtcttgctccatttatcacatgattgtctgtaatatttatggttgctgtcaacccatactctgcgtgatttctaatatactataggcttataatttgtcttggaatgttgattttggcctaactcaatcccacaaaatcaacttttgaggtgagggttatcctttatttatatacactattttagccttatcactagttgatgtgtgacttgggtttttctcaatacaccccctcatgcctaacactattgggcttggtacgtgaataatatagcgggtggcccaataacagatctaggactgggtctgatatcgttttagaatgtgagtttgggtctaactcaatcctacaaaactgatttttgaggtgaggtttgtccccctcttatatacactattttggccttatcattagttgatgtgggacttgggttttcccaataacttttatttgtggatcacttgtttggtatcatagttcttttccagtgaaagtgattgggatatactttgaacgaagagtaatccttattccaagtactatgctttgaaagccccaaaatatgtttaagcggctaccagccaattgacaatatattaacaaagttttttaggagattaaaccaaaaagcccattgtgtcccaaattttcttgc

SEQ ID NO: 21271 - DNA, 229 bp, Glycine max
  Clone ID: PAT_MRT3847_119212C.1
actatagatatgactatgacatgcactccacccttacctaagcattcaattcgagtttagaccagccatagcatagcttgaggcggaagagtgatactatatcagcccgagagaaaggtagtacaccaatggcgcaaggccaaacatggctgcaacttcaggtattgtaacagccacaggtccagattaccctatatgtgaatgaactcaatatggtgatgtgaacaaa

SEQ ID NO: 21272 - DNA, 275 bp, Glycine max
  Clone ID: PAT_MRT3847_119213C.1
gggggggggggggtgggggggggggtgggggggcgtgccctagtgaataatcgcccccttatggacgatttggaaacagccgttaatagatctattctcaaagtaaccttttattttaattttccctaaaattcctattctgtttcctcctttaaaaaattattctccatcttttaatttggaacctttcctaaaatttcagcatttacttaattttttgcccccctccttttttttttttttccccaatattccccaaattttttcctattttt

SEQ ID NO: 21273 - DNA, 547 bp, Glycine max
  Clone ID: PAT_MRT3847_119214C.1
aatgagaacagcatatccagaatctcgattgatttacacgatgggcaatgcttactgtagcaaggcattttcaatctagctcttagtctcgttagctggcccaaggaaatttatcggtacgcgattgaggtatggtaatctgaaaaagtatgatcattgtcgaccacggccgtcgctaagcgggatgtccaagacaactatattgcgggtatggaaatcctgagtaatcccagaaagaatataagagagagagagagagagagagagagagagagagagaatctctgcaatcttccacgtcattgatgagcacgatatcggtggactgagtcaacaccctgtcgtctactaaaagcgccactgcagtgttatacacggaaggaatcacaagggattaccatcaggacgatgtctgctcagaataacctatgcgaaaacgcgcaaagcagactctttctttatggacatttgcgctgagtttaggtcacggcgagtccgaatccgcggccgtcggttgccagtagatactgttgaagcacgataacac

SEQ ID NO: 21274 - DNA, 822 bp, Glycine max
  unsure (1)..(822): unsure at all n locations
  Clone ID: PAT_MRT3847_119215C.1
agcagatgcttcattaccttcgaagtcgaaggtggcaaatgatatagataccaatgaatctgtaacaggaagagaaccatcaaccaaccatagtcatcttgctgattctatgacaagtaatcatacttctggaaagaaagaaggggcaaaggtttcttcccagaaacacagggtatctgatagttgcaaaggagcaagacactaagtangagagaaaagaaatgttgaacccacaaaacagagaaatgatatgatgaggaaaggtgtggggaatgttggtttgagaaactgttctaaaagtggtaatcttgccgtacgtgttgcctcctgaagaacttaccacttcactttacaaattgaggaggcatttcaggttccagcataaaatgcagtggaatgattggaatgattacaaccaggcagatattaaggtacattgcacattgaggtagtagcatttcttgtatttttttcatgatattcatttcatggtatagctgaggcaagttatagaacaacatgatccatgttactacttctaaatttggtagaagttatgtatggaacaaacttaggaagctacccagtaactactagtaatgggcatgtttttactggacttattggatcttctgggctccccctccataagaaagtgtgttcatttgcttatcagataagaaatggaatggaattcatggaaattttaatttgtaaataaattatcttggaatttatcattataaactggcggactactatagatttgtctcccttatatatcataagctttcagttgatataaattttagcctttatttg

SEQ ID NO: 21275 - DNA, 1490 bp, Glycine max
  Clone ID: PAT_MRT3847_119216C.1
acgagaagatccgatttcaaagctccattaattaaaattcctgagagttttgagaaaatagttgttcacaccttgactcacaactttcggaatgctaccagcatagtgagaacacctctgagattacctgtcaaaccaaaacatgttcttgttaagataatttttgctggtgtcaatgctagtgatgtaaattttagctcaggccgctattttggtggcaacaacaatgatgttgtttctcgtcttccatttgatgcaggatttgaggctgtagggataattgcagcagttggggattctgtcactgacttgaaagttggtatgccttgtgcattcatgacttttggaggctacgctgaattcttaatgattccttcaaaacatgctcttccggtgcctagaccagatcctgaagttgttgccatgcttacatcgggattgactgcctcaattgctctagaaaaggcaggacagatggaatctggaaaagtggtccttgttactgctgcggcaggaggaacggggcaatttgctgttcagctagcaaaattagcaggaaatacagtggttgcaacttgtggaggtggggcaaaagccaagcttctgaaagatttgggagttaacagagtcatagactatcatagtgaagatgtaaaaactgttctaagggaagagttccccaaaggtattgacatcatctatgagtctgttggcggtgacatgttaaacttgtgcttgaatgctttggctgttcatggacgactcattgttattggcatgatttctcagtatcaaggagagaagggttggacgccatcaaaataccctggactattggagaagctcttagcaaagagccaaacagtgtctggctttttcctggtgcaatatggtcacttgtggcaagaacatcttgacagactatttaatctttactcttcgggaaagctaaaggttgctattgatccaaagaaatttataggcctgcattctgctgcagacgctgttgaatatctccattcaggcaaaagtgttgggaaggttgtcgtctccgtggacccaagcttccttcctcaagtggccaaattgtgaatcaacccatgtcaaatgacctcacagattatattatagctctttcaaattaaaaaggataagttaaacgtgcagctcttgtgcaagtaattttgtcgaatgtttctgaaatttgctgcatcagctcaatgccaaagctgaaacgttctcaatgctttttcattttttaggttacttatgcaattgtgagtttaaaaaataaaaatctgtaagaaaatggagcaaggtataccacctttacgttcatagtttatactatagaacacctttcatatcatgaacaattgtatattttgactctcggtgaaaactggccactctttcctttatttgcattgttacttaaaaagttgaaactgttgttcaatcgaataactgctaatttggctcaatagttt

SEQ ID NO: 21276 - DNA, 200 bp, Glycine max
  unsure (1)..(200): unsure at all n locations
  Clone ID: PAT_MRT3847_119217C.1
ngcangcacgcgtacgtaagctcggaattccgngcgtgnnncctctagagcngnngccgactagtgagntcntcgacnngggaattaatnncggancggtaccnncangngnaccagcttnccctatnntgantcgtattngagctnggcgcaancngggncatagcnntttcctgcgtnaaattgttanccgctcanaa

SEQ ID NO: 21277 - DNA, 488 bp, Glycine max
  Clone ID: PAT_MRT3847_119218C.1
acatataaaacattcacgagactataatctcacatccttgatacaggggctttatatgatgagaccgacacacattacatacatgtgatgagcacaagttctacagcaaaagacctaagggtccatttacagattaacctaactagagcctaattcatgtacggtacacattatggtcatacattattaatgaagcactgtaaatgcaggttaatttcctaccaacacgaattaatgggccttttgaagctaatgattttacaaatgcattgcattctttgctattactattgacgatacagatttgcagtatattgtgcagctacgaggcaatactggtgatattcttgctaggatctgatgcattttatgcggctattaacaggttggcctgctgctatggcacacatgagtgagagttcccctgctaggactgaacctgctactacggttgctaggaacctagaatttgtacctggggaatcctt

SEQ ID NO: 21278 - DNA, 364 bp, Glycine max
  Clone ID: PAT_MRT3847_119219C.1
gccatagccaatatttttgccatgtgttatgtaaagtggccatacacagtttgtttgaggatcggatggcttacttccactagagctgtatactgctacctaccggatcaccgctacgcatccctacattccaaacgacttatgctggaatacttatttgatgtgtactagggagtccattcccatccaatttcaaattgatggcgttccaagatggccatcatgctgctggatgtctacagcgctgctacctcaatctccagtgtgtccaacggaagtggcatatcactaatggaagcttgcctacgaattcaaccccgatgctgtcttcacgcatccgagcgcattgtccgcggcacctact

SEQ ID NO: 21279 - DNA, 1033 bp, Glycine max
  Clone ID: PAT_MRT3847_11921C.1
gatacatggcactgttttctctccaaaacaacctctttccacttccattgctaactactccttcctcaacgaagagctttccctctgttacgacgcgtcgagccacaatctttggttccagcctcgttcttctcaactcaacaccacccacacttgcacagcagctgccaaatgatcatgatgagcttcagcaacaagaagaccaccttgtgcaactctttcaggatgcttcactgtcggttgttttcattaaagaccttgaattgaccaaagttcccaagtcctcttctaagggagccatgttgaatgatgatgaagatgcaaaagtggaaggcactggctcgggcttcatttgggataaatttggtcacatagttaccaattatcatgttgttgctaaactggctactgacacaagtggtttacaacgttgtgttcctagttgatgccaaagggaatagctttgacagggaagggaagataattgggtttgatccagcgtatgatctagctgttctgaaggttgatgttgatggatatgaaataaagccagttgttcttggtcagtctaacgatttacgtgttggccagagttgctttgccattgggaatccttatggatacgagaatactctcacaacaggggtaatttttaataatttgtatcttaacatggtggtcagtggtttaggccgcgagataccttcaccaaatggaggggccattagaggagctattcaaactgatgcagcaattaatgcaggaaattcaggtgggccattgattgactcgtatggccatgttgttggagtaaacacagctaccttcactaaaaaagggactggggtgtcatcaggtgtcaactttgcaattcccatcgacacagttgtcagaactgtaccatacctcattgtctacggaaccccctatagtaataggttttgatttttcttggtacattctataaactcaaactttgaatatccttttttcattcaagttggacatgaaaaaccatgtctatttttgctgg

SEQ ID NO: 21280 - DNA, 2116 bp, Glycine max
  unsure (1)..(2116): unsure at all n locations
  Clone ID: PAT_MRT3847_119220C.1
ttcccgggtcgacccacgcgtccgtacggctgtgagaagagacagaaggggagcccaatctattcttcttgttcatcatgcctggagctgttagggttttggttttggtttctccgaccttgaacgcttcccatcttggtgagtaacacgaatctgaggaaaaaaaatgtcgattatgcaactttacgggcgcagcaagagcgtggtgaagcggtcgaagaagtacttggaagaagcgctttacatgaagctcttcaaagatggaagctcccagctcatcgttcgccagagcctcaacaacttcgtcaagagccgaaagcgcgtttacaaatgggaggtaggcgacacgctcaagaagcttcgcgatcgcaagctctatcaacccgctcttaagctatcagaaaccatggctaagaggaacatgatcaagaccgtcagtgaccatgcgatacatcttgaccttcttgcaaaggctcgaggaattactgctgctgaaaattattttgttagtctcccagaaccttctaagaatcatctttgttatggtgcccttctgaattgttactgcaaggaattaatgactgaaaagtcggaaggtcttatggaaaagatgaaggagcttagccttcctttaagttccatgccatacaacagtcttatgacgctttatacaaaagtagggcaacctgaaaagattccatccctcatccaagaaatgaaggctagtaatgtcatgctggattcatatacatacaatgtctggatgagagctcttgctgctgttaatgatatctctggtgttgaaagggtccatgatgagatgaagaggggtggtcaagtcactggagattggactacatatagcaacttagcatctatttttgttgatgctggcttgtttgacaaggcagaagtggcgctcaaggaattggagaagagaaatgctttcaaagatcttactgcttaccagtttctaattacattgtatgggcgaacgggtaacttatacgaggtttatagggtgtggcgttcacttaggctggcatttcctaaaactgcaaacataagctacctgaacatgattcaggtgttagttaacttgaaagatctcccaggagcagaaaaatgtttccgggagtgggaatgtggctgccccacttatgatattcgagttgcgaatgttttgatacgggcatatgtaaaattagatatgctggagaaggctgaagagctcaaggagcgcgctcggaggaggggtgccaagcctaatgccaaaaccttggaaatctttatggattactatttgctgaaaggagactttaagttggcagtggattatctaaacgaagcaatatcaatgggtagagggaatggtgagaagtgggttccatcgtcaaggatcatcagtatcatgatgaggcattttgagcaagagaaggatgttgatggtgcagaagaatttctagagatcttgaagaaatctgtggaatctccaggggtggaggtgtttgaatccttgatcagaacttatgcagctgctggtaggatcagttcggctatgcaacggcgattgaagatggagaatgtggaggtgagtgaaggcacccagaagttgcttgaggcaatttctgtggagtgacactctcgatgctttcattcttcaagatttgattgttgtaaactgagatgtgatcattctacacattttgttttggtgataaaatttggtatttagatttaaacattttggaatggcgcatgctgtagaacattgagggcctcttatttgattactgaactaataaaatactgggggtgctcggtgcataaaaaaaaaaaaaaaaaaaaaaaaaaggtaaaccgctcgagatgaacaaatgggatctaatcatggaacgccttctaagcatgaatcatttcagtcagtgaaaggtgagttcatatcagttcttctgacgacattaatttggttattgaagataattattctctctgggtaaaatgaaaagtgaaaagaaaaggacattacattacttgaaatgcgtaagagtttcaatattgtattgttacatgatattttggtatctaaatgaacatgcacgcacacannnatttt

SEQ ID NO: 21281 - DNA, 245 bp, Glycine max
  Clone ID: PAT_MRT3847_119221C.1
attataaccagattttccgtataacagcatgcgtaaactcatcagtacactctactcccggcgtttggacaaacctaacattaaacaaagctctaattaacgctacataaccctgtatcaatagctgaacgttccagatcaatatcgtcaagcaccacttattataacgtaattatcacttcggagaacatcaccaaagaaataagagtaagcttaattactggtactctacaatagtaaaaaga

SEQ ID NO: 21282 - DNA, 259 bp, Glycine max
  Clone ID: PAT_MRT3847_119222C.1
cttgaaagcaaggcagcagaagaaatagtggtctgggaatcttaacactgttggttgtttctaaggaaattaattaaagggtatagtggcaaatgagtggtgatcataacagttctgtttccatggttgggaagaagaaaaagaatggctctcttcggtctattttcatgggtgctgatggcttagactggttcctcatgatttttggtctctttggggccattggtgatggcataggcacccctttggtgttgtttat

SEQ ID NO: 21283 - DNA, 2120 bp, Glycine max
  Clone ID: PAT_MRT3847_119223C.1
ctgacaagcagccactacatgtggttatggttgatccaaaagtatcaaataagtgcccgttttgcacaagaggttatctcaactattttgatcactgtagctgtggggttggtctggtttatgggtgctgctgcacttcaaaatacattggaagcttgggtgggattggaccttcaggagttggatcaagttcttcctatgccccaaaggagctgaataaggaagtgatgcctgaaaagaatgtaaaaacctttaaggatgtgaaaggttgtgatgatgcaaagcaagaacttgaggaagttgtggagtacctaaaaaatccatctaagtttacacgccttggaggaaagttgccaaaggggattcttttgacaggagcacctggaactggaaaaactctgctagctaaggctattgctgacgggactggtgttccgtttttctatcgagcaggctctgaatttgaggagatgtttgttggagttggtgctcgacgtgttagatccttatttcaagcagccaaaagttggagttggtgctcgatttttattgatgaaattgatgctggcggataaacaagaaaacaatgggagggccacacaaagaagacattgcatcagctacttgttgaaatggatgggtttgagcagaatgagggaataatattaatggctgcaacaaacttgcctgatattcttgacccagctttaactaggcctggcagatttgatcggcatattgttgtaccaaatccagatgtgcgaggtcggcaagaaatattggaactctatcttcaagataaacctatagctgatgatgtagatgttaaagcaattgctcgtggtaccccagggtttaatggagcagatcttgcgaatttggtaaatgttgctgccattaaagctgcagttgaaggtgcagagaaagtaacagctgcacaattggagtttgcaaaagacagaatagttatgggtactgagcggaaaacaatgtttatatctgaagagtcaaagaagcttactgcttatcatgagagcggtcatgcaattgttgcccttaacactgatggtgcgtatccaattcacaaggcaacaatcatgccacgtggatctgctttaggaatggtcactcagcttccctcaagtgacgagacatcaataagcaagaaacagttgttagctcgccttgatgtttgtatgggaggaagagttgcagaggagcttatctttggccaggattatgtcacaactggagcaagtagtgatctccacactgctactgagcttgcccaatacatggtatcaaattgtgggatgagtgatgcaatcgggccagttaatataaaagagcgaccaagttctgaaatgcagtcacgtattgatgcagaggttgtgaaactccttagagaagcatatgatcgcgtgaaagcccttttgaaaaagcatgagaaggcattacatgtgctggcaaatgcattattagagtatgagacacttagtgcagaagaaataaggagaatacttctcccatatcgggaaggatggctgccagaacaacaggaacaagaagcagcagaaggggatctggtgttggtgtaattgttctctccacttcctgtctattactgtactattttaagagaagcactgtacagtatacctagaagccctacaggtatttttcttaatctggtttctgcagcttccctcctttgtgcatgccattctcgttgtatgatgcatataggaaaaaggatacgcagcgttggatatctgcgaagcaacgattcctgtgtacaacagcaagggtctgctattagagtatgatcgccctttgctaagggcctgagggcaatattttttggtgagaactgtgtaatatgtaggaatttgacattttcagaaatgtgttttatagcctacgcattcttcattttttaagaatttattaaacataagctttctagcatatactgcttgaatttatttaataacaaataatagatagatcctgggtttataataaatagatcctggatttaatatactccatgcacacactgagtgcaaccaccgatgatttaatatataaagtagtacatggtgatcttaacttgctac

SEQ ID NO: 21284 - DNA, 158 bp, Glycine max
  Clone ID: PAT_MRT3847_119224C.1
ttggtttaaagatttttattaccaccttcaaaaggccgtcccacctgtttccgaaggaggggaggtccgtttaaccctttttttcggccgggaccggtcttttattttcgccaggcatttttttgtggccgccgatgggtttaagtcccgggatccgg

SEQ ID NO: 21285 - DNA, 717 bp, Glycine max
  Clone ID: PAT_MRT3847_119225C.1
tatcgaaatgtgggatgagtgatgcaatcgggccagttaatataaaagagcgaccaagttctgaaatgcagtcacgtattgatgcagaggttgtgaaactccttcgagaagcatatgatcgtgtgaaagcccttttgaaaaagcatgagaaggcattacatgtgctggcaaatgcattattagagtacgagacacttagtgcagaagaaatcaggagaatacttctcccatatcgggaagcacggctaccagaacaacaggaacaagaagcagcagaaggggatctggtgttggtgtaatttttctctccacttcttgtccattactgtactattttaagagaagcactgtacagtatacctagaagccctacaggtatttttcttaatctggtttctgcagctcccctcctttgtgcatggcattcttgtcgtaagatgcatatgggaaaaaagataagcaacgttggatatctgcaaagcaacgattcctgtgtacaacagcaaaggtccgctgttacagtatgatcgcccttgagcaatattttttggtgagaactgtgtaacatgtaggaatgtgatagcctacgcatttttcattttttaagaatttattgaacataagctttctagcatatactgcatgaattttatttaacagcaaataatagttgaaagtgctacaaataataaatagatcctggatttaatatactcc

SEQ ID NO: 21286 - DNA, 5936 bp, Glycine max
  Clone ID: PAT_MRT3847_119226C.1
cccagtgatatgttttatgggaagatcatacctgcacttaaagagaaaggaatcaagagagtgatttcccgaagggattggcctcatgaagtcaaatgtaaagttcttcttgatctcatgaaggaggtgcctaggcatcttctttaccaggagctatggtgtgctagtgaaggatataaagctttcagctcaaaaatgaagaggtattctggaagtgttgctgcaatgagtatggttggtcatgttttggggctgggcgacagacatctggacaacattcttatagatttttgtaatggggatattgtacacattgattacaatgtgtgttttgataagggacaaagactaaaaattccagagattgttcccttccgtctgacccaaatgattgaagcagctttagggcttactggaatagagggtagcttcaaatcaaactgtgagacagttattggcgttctaaggaagaacaaagacatacttttgatgttattggaagtatttgtttgggatccacttgtggagtggacacgtggtgattttcatgatgaagctgcaattggcggtgaagaaagaaaaggcatggagttggctgttagcttgagtctatttgcatctcgagtacaggaaattcgtgttcccttacaggaacatcatgatcaattattgactagcctgccagctgttgaatcagcacttgagagttttgctgacattctaaaccactatgagcttgcctctactctatactgtcgagctgaccaggagaggtctggtcttatattgcgtgagacatctgcaaagtcgattcttgctgaagcaaccagtaattcagagaaaattcgagcttcttttgaaattcaggctcgggaatttgcccaagcaaaggctatggttgctgagaaagctcaggaggcaatggcttgggctgagcagcatggaaggattcttgatgctttacggtgcaacttaatcccagaaataaatgtttcttttaagctgaataacatggaagcagccttatctcttacatctgcagtcactgtagcaggggttccactaactgttgttcctgagccaacacaagcacaatgccatgatatagatagggaagtttctcaattcgtagctgagttgggtgatggactaacttctgccacaacttctttgcaagcatactccttggctctgcaaagaattctaccattaaattacctttcaaccagtgcagtccataactgggcacaagttctacagctatctatcaatgccctgtcatcagagattctctctcttgccagaaggcaggcttctgaacttattgcaaaatttcatgtagatagcattgattctatcaaatgcagtcatgatgatctttgtttcagagtggagaagtatgcagtagaaatagaaaaattagaaaaagagtgtgctgaaatagagagttctattggctctgaatcagaatcaaaaactaaagatcgctgtttatctgctttcatgaaattcatgcagtccattggtcttttaagaaaggaagatgtgatgtcttctgttcaatctagacctttaggtgagctagaagaggagagggaaaaggcactatcaattctcaatattgctgtgagttcactttataatgacgttaagcatagaatacaaaatatatataatgatatgtctggaggaagaaatcaatacaatatgttgcagaatgactctggaactatttttgctgagtttgaagaacaagtagagaagtgtaatcttgtgacagagtttgttaatgatctatgtcaatttattggaaaggacactccttctgttgatattaacaaagttcgttcaaagttttcttctgaaagtaattgggtttccattttcaaagccattttgatttcctgtaagggattggttagtcaaatgacagaagttgttctgccaaatgtaatacgagctgctgtttcattaaattcagaggttatggatgcatttggattgatctcacaagttcgaggatctatagaaactgcactggagcagcttgtggaggttgaaatggagagagcatcactgattgaacttgaacagaattattttgttaaggttggtcttattactgagcaacagcttgctcttgaagaagctgcggttaagggcagagatcatctttcatgggaagaggcagaggaacttgcatcccaagaggaagcttgtagagcacaactggaccaacttcatcaaacttggaatcagagggatgtaaggacttcttctcttataaagagagaagctgacattaaaaatgccctggtttctgtgaattgtcaatttcaatctctagttggttcggaagaagaaagggagctacatattttgagaagcaaagcactattggctgccctctttaagcctttcttggaactggagtccatggatattatgctgtctgcagctgatggttcagttgcattgccctcaagtaaatttcatactttggcagatttgataaattctgggaattctatatctgagtatgtctggaaagttggagatctattggataaccattcattctttatttggaaaataggcgtcatagattattttcttgatgcatgcatacatgatgtagcttcgtcagttgagcaaaatctaggctttgaccaatcactcaattttatgaagaaaaggcttgaaatccaacttcagaaacacattggtcattatttgaaagaaagaattgctcctagtttactgacttgtttagataaggaaaatgagcacttgaagcaacttacagagtcatcaaaggaacttgctttagaccaggtgaaaaaggatggggctgcgaaaaaggttttacttatgcttgaagaatattgtaatgcacatgaaactgctagagcagcaaaatcagctgcttctctcatgaaaaaacaagtgaatgaattgaaagaagctctacgaaaaactgcacttgaggtagttcagatggaatggatgcatgatgttagtttgaacccatcatataacagaagaatcagatttgagaagtatcttgatactgatgacagcttgtatacaatcatcttaaacctcagcagatctaaattaatggacaatatacaatctgccgtgtcaaaaatcacaacatcaatggattgtctacagtcttgtgaacgaaattctcttatagcggaaggacagcttgagagagcaatggcttgggcgtgtggaggtcccaattccagtagttctggaaatacttcaactaaaaattcaggaattcctcctgagttccatgaacatattaagactcggaggcagattttatgggaatctagagaaaaggcatctgatattgtgaagttatgtgtgtcagtgttagagtttgaagcatcaagagatgggtttttgcttataccaggccaaccatatcccttcaggagtagtgttgatggtaagacatggcagcaagtgtacttgaatgcactaacaagattggatgttactttccattcttatacacgtactgaacaagaatggaagcttgctcaatgcactgttgaagctgcttccaatggattatatactgcaactaatgagctctgcattgcctctctaaaagcaaagtcagcttcaggtgatttacaaagcacggttctttcaatgagggattgtgcatatgaggctagtgttgcactgtctgcttttgctcgggtttcaaggatccatactgctctaacttctgaaagtggttctatgcttgaagaggttctagcaataactgaagatatacatgatgtttataatctggggaaagaggcagctgctatccacctttctcttatggaaggcctttcgaaggcaaatgcaatcctttttccacttgaatcagtgttgactaaggatgtagctgctatggctgatgctatagctcgggaaagtgagatcaagaaggaaatatcacacatccatggacaagctatatatcagtcgtattgtttaagaatcagggaggcttgtcatacctttaagcccttggcaccctctctgacgtcagctgtgaagggactttattcattgttggctagactagcaagaactgctaatgtccatgctggcaatctgcacaaagcgcttgaaggaataggagatagtcaggaagtaaaatcagaggatattgctttgtcaagatcagatggtggtggtggtgatgctgttgaatttgatgataaagaaggggaaagtctctctaggtccgaagatgataagactgatgattttattggcttttctcgactttctttggaagacaagggatgggtatcaccaccagatagcatctactgtagtagctcgggatctgacatctcattagctgaagttagtcttcctgatagcttgaatgattcagcaggaaataaagacctgctttcacaggggtctggtagcagaatccccacaggttatatgcataccactctattgtctcaaactgatgtggaacaaatctcaccttttgagttgtcagaatcttctcctgtggaaactgatcttaatcgtgctggttctgtgaagtcaattaatgaggctactgaacatgctgaagctatatctttatcaggtgataaatctgttgccatccctggcaactcccaaattccatcgaatgagaacctagacaaatttgatggtgaagatgaactgctgtctgcaaaagaagttaaaaatgctgctgaacatcatgaagctcctgatccctacataaatgccaatactcgtgttggaaggggtaaaaatgcttatgccttatcagtattgaggcgggttgaggtgaaaattgatggtcgagatatctctgaaaacagagaaattggtactgcagagcaagtagattatctactaaagcaagctactagtgtagataatctctgcaacatgtacgaaggttggacaccatggatttgaggtttcaagaggttcctcagactcaagcatctcaagtcccattatattatgcaagatttggcctcaagaattgttgtgttgaccatggtaaggaataagtcctttggcctgattatttcctgatgataggaagctgccaggacaatgtttttgcaggtcccattagtctggactcgggccatatcttgaagtctgccattgatcacaatcactgatctatccatggccaaactgtttagcttctgccatccctttgatttcagcatttctcctggcagagttactattttccaccttgcagcgggcttgcttgcatctgtcattccatgtcatctcacagggaagtccttggctcccagctggtctcgtgagagatgaaaaagcatcaccatgccttcaattctgctggtttaaacggtagcttttaacacctaccacttgcattgccatattgattgaggagtatgttctggatccttagctcttgaaggctgaaagaaagaatatcgtatgctaacaaccaggcagcgaaatggctggagcatcatacttttgcaatagtgaagtccagatatgagttgcacatatccatgtatcatttatctgttgataggtgaaagaatcaactgcacattgctggtttattcttcatgtgattggacgtattgaatccaacatagtgattgttctttttgatcaattgacggaattgtaacttttttaatccatttactgtcttaccgctcttggattcttttttccttctttttagactggaaataccttacgagaccttgtatgtgtatccgaaagctgtctacatatgcctcacttgtagtactgttagatctagttgcttgatgtaagagattcaaacatgaaaattttcataataaatatcctattatctcatcaaaaaaaaaaaaaaacaaaaaaaaaaaaaaaaaaaaaaaaaaaaa

SEQ ID NO: 21287 - DNA, 1757 bp, Glycine max
  Clone ID: PAT_MRT3847_119227C.1
ggcggctgcgagaagacgacagaaggggagagacaatgcctagtgaattagctatgaacaatgatgagctacatgtggttatgttcccattccttgcatttggccacattagtccatttgttcagctctccaacaagttgttctctcatggtgttcatgtcactttcttgtcagctgcatccaacattcccagaatcagatcaactcttaatctcaatccagccatcaatgttatctcactaaagttcccaaatggtataaccaacactgctgaattgccacctcacttagctggaaatctcatacacgcccttgacctcactcaagatcaggtgaagtcccttttgttggaactcaaaccccactatgttttctttgactttgcacaacattggctcccaaaattagcttctgaagttggcatcaagtctgttcatttctcagtctactctgccatttctgatgcttacattaccgtgccttctagatttgctgatgttgaaggaagaaacatcacttttgaggatcttaaaaagcctccacctgggtatcctcaaaactctaatatttccctcaaggcctttgaggccatggactttatgttcctcttcacaagatttggtgaaaaaaaccttactggttatgagcgagttttgcaaagccttggtgagtgttcattcatagtgttcaaaacgtgcaaggaaatagaaggaccctacttagactacatagaaacgcaatttcgaaaaccagttttgctatctggtccactagtccccgagccatcaaccgatgtgcttgaggaaaagtggtccaaatggttagatggtttccctgccaaatctgtcatattatgctcctttggcagtgagacatttctgagtgattatcaaatcaaagaactagccagtgggttagaactcactggcttacctttcattttggttctgaatttcccatccaatctctctgccaaagctgagttggagagagcattgccaaaagggtatttggaaagagtgaagaataggggagtggtgcacagtggttggtttcagcagcagcttgtgctgaaacactcaagtgtggggtgctatgtatgccatggtggctttagttcagtgattgaagctatggtcaatgagtgtcaactggtgctgttgcctttcaagggtgaccagtttttcaattctaaactcattgccaatgatttaaaggcaggggtagaggtgaataggagtgatgaagatgggttctttcacaaagaggatatactggaggcattgaaaactgtcatgttggaggataacaaagagcaagggaagcaaataagagaaaaccacatgcaatggagcaagtttttatcaaataaggaaattcagaacaaattcatcacagatctggttgcccagttaaagtctatggcttagtcttgtctcttccaatggaaaataaagtctaccaagactagaaagtataaactatagttcaaaatgatcatattatcatatatcaattgagatatgcgtggtcagtctcgttgttcttgtgattttgctttcccgttgtaggttttattctgtgtctcctttctcccgatcaattaatgcagttaggagattcaccttaaaaaagctaaaaattgcttttgtaacttgaagttattgtattcctactgattttggtcaagaccaagaagttgtcttataatttgaaaaaaaaaaaaaaaaaaaaaagcggccgctctagaggatcca

SEQ ID NO: 21288 - DNA, 351 bp, Glycine max
  Clone ID: PAT_MRT3847_119228C.1
gactccgatatcgctcaagttttgtcctccatgggagggtccattgactatttcacgactggtgcgggttgaacctgcccttattttgtgtgcgtcaccgtctctgatctgcctgctgtgcacacgatagacatggatgcactctacaacgtccagagatagcacccttacactgtttcttttactgcggatcaccccacttttacggcgctgtttaaaatgccacctatggaggatgaccccacttatggtcctattatttgcagcattgctctcatgaagctagctactgcccttgaacgccaagccaacgcaatgatcaatgtaggttctgaacaactcacattgatg

SEQ ID NO: 21289 - DNA, 184 bp, Glycine max
  Clone ID: PAT_MRT3847_119229C.1
ttcgggtgcgagaagacgacagaaggggatcctgaatcagtaatatctcccacttattgacttactttgacattcacattctgaacacaaccacaatgcatagaggctcctccggtgagaaagacacacaccaactgctttgatattacggggttggacggaaactcctccgccagatttcagg

SEQ ID NO: 21290 - DNA, 182 bp, Glycine max
  unsure (1)..(182): unsure at all n locations
  Clone ID: PAT_MRT3847_11922C.1
cgcatgcacgcgtacgtaagctcggaattcggctcgaggganatcctnnnccagtcggtcctgactggcgtncgtngntctnagggnatcnaangtcccgctggtccccctggtcccnnnnggcntcctgggcctcctngtgtcagcggaggaggctatgactttngtttcgaaggagnant

SEQ ID NO: 21291 - DNA, 394 bp, Glycine max
  Clone ID: PAT_MRT3847_119230C.1
ggggaagagtaaaaagggaccagagcttgctgttatgaagaagaatgttactgccagagcaagggaaagctacgaggaagagggtgtgaacccgaaaaagaagaatcttatgaaggacaaggaacagagaaatgtaccaaatcatactacagcactaatggtgcaataacatacagaagtgggaccgccacatcctgatttggaggacaccaaatacatggattgggagatccagaataaagtgtatctggagaaagggatgatggactgcctatatacaaaaagcagcagatgtataaaagaatgagagagggcgcatatcgaaaactgagggccaggatatcgcgaagcgcgaaggattggcaatgatacacaatttgagagaaaactatgt

SEQ ID NO: 21292 - DNA, 281 bp, Glycine max
  Clone ID: PAT_MRT3847_119231C.1
acgaaccacaagggctccctgggatactttcaaattttatttcattaacgggtgtatggttaaagggtatatgataaacaactatgtacatcttcaggggggggattgtttgtaaaaaaaaagcaggggtggaatacccctatattacttaatttaaaaacacaatgggttacatactatggattggatattggtgggcattatactactaattccgggatttccaaaaatgaacggatacttttttgggcccctcttatatattggtttgaagcagtccc

SEQ ID NO: 21293 - DNA, 562 bp, Glycine max
  Clone ID: PAT_MRT3847_119232C.1
gagcgttctggcggaggctcattagccccctgcaaagtgcttctgaaagaattcagcctgcacgcgacaaaggtctcatccttaaccgggaagatgatcccctggatgaacaataccctccccctcttacggataccaccaaccaattagcaagtgaggcccttaaaactctatgccttgcctatgcctaaccggaaaacggcttctctacagaacgaccctattccagttattcgatatacaagcataggatcagtttggataaaagaacctgtgccaaccggagattaggaatttttaccaatgtgtcgtgcacctggactttctaacaaaaaggatactggggacgacattaacactgctaaggctcttaccatggagtgtgggagcttaaccggggattgtctcaatatataatgagcaaaatttacatataaaatcctgaaatagcttgttgagctgattcccaaaattaatggtatgggtcaatcctcaaccttctactaacgcacactggtggaacacttgcaaactactttttgggaagtggtggctgctacag

SEQ ID NO: 21294 - DNA, 407 bp, Glycine max
  Clone ID: PAT_MRT3847_119233C.1
ctcgagccgatagactcagacgctagcataagtacgaccgcaggggaacccttcggatattgcccttctgggctttgattagagtggtcctaggggcagatctctcgctgagaagagctgccctccactatgcattgcgcacttcatgcgtcttttgcgttccgttgctgctactggctatctccacttattccacttcagtttcagccacgaccgaacactgaacaacatgaagggaacacatgtgtgaaagtgataaaagaatgactaacacacccaaggctaaaaggcatgacaagaagcaatatcaactgatggcactcaaagacaactccctatacgctaaaccacactccaaagccaatacctattattaaacctatagcaaatgcatgatctaagcctat

SEQ ID NO: 21295 - DNA, 363 bp, Glycine max
  unsure (1)..(363): unsure at all n locations
  Clone ID: PAT_MRT3847_119234C.1
ctccatttcccaagcagatacggggcggagaagatcaaccaanccgccccacaactgggtcggggccctcatcaccagaaacaacaatatggccgcaagacaaagctttgaaggaaacgaaactaaccggagcaggaaaaagttaggcgacgcgctaaatcaaacttttttttaaggggggggtggaccaacttgctcgtaatgcgggaagataattaagcctgagaagatgcacacacacatgaactcttgtaaaggaacgaaagccttgtgaaagtcatccacacctggtgcggaggcacaccctgcagggaacaccaccttcatcttatacaaaccactctaagacccaactaaacacac

SEQ ID NO: 21296 - DNA, 160 bp, Glycine max
  Clone ID: PAT_MRT3847_119235C.1
gcagatattagtaaaaaccctaacggggaagacgatgaccctagaggtagagtcttcggacaccaacgacagtgtgagcgcgaagatcgattacaaggagggcatgccgccgaatcagcaggaccggatgtgtgccggaaagcagcagagggacgggcag

SEQ ID NO: 21297 - DNA, 1215 bp, Glycine max
  Clone ID: PAT_MRT3847_119236C.1
caactcagttcggtggtggtatccattctgagttgaacaagaaggtttacaagcttggcaaagctggagatgaatctcactctgctcttactgagtttgataggaccgagaaagacattaccccaataggtggtttccctcactatggtgttgttaaggatgattatatcatggtcaagggatgctgcgttggtcccaagaaaagggttattacattgcgccaatccctccttaagcagacttctcgtgttgctctggaggagatcaagctcaagtttatcgacacctcttcaaagtttgggcatggtcgcttccagaccacacaggagaagcagaagttctttggacgcctcaaagcataattttgttaattggatggaaatgctggatttctattcggttaccatatcttataaacatattgtagtgttttctgttttgacattatggatccccgagtagtgagttttttccccccttaagttggccaaacttttgttgagactgatcttttaaaaaattccaaatggtttgaaaaaaaaaaaaaaaaaaaaaaaaaaaaaaaaaaaaaaaaaaaaaaaaaaaaaaaaaaaaaaaaaaaaaaaaaaaaagaggaaaaaaaaaagggaaaacaagagagagaaaaagaaaaaagaaagtcaataaaacagatgaaaaagaaaaataataaaaaattaaaagggggggggctttttaaggggttcacctgttaacccccgggtggaaccccttttttttttttttgtgggaccaccaatttttaatcattgggttggttctaaaacgggggccttggggaaaaccctgcgggtaacccactaaaaagccttggaaaaacagcccctttttgggggggggccttaaataagaaggggcgccgcaatacccccctaccaaaaaatgcgcaccttttattgcgttagggccccccctttttgctccgtttttaaacgtgaccgggggggtttttcccccccccccatatgaggttttctttgggagggctcttaaaacggttcctttttagggttcttttcccctcctcttttaccccccaatatcccgggatttttccccccgtttaacctcatctttaagggggggggcacccccttttagaaaggccccgcctttttatagtttttttttaaagggctcctttttccccccaaaaaaaaatttgtttgggggggg

SEQ ID NO: 21298 - DNA, 128 bp, Glycine max
  Clone ID: PAT_MRT3847_119237C.1
cggacgcgtgggggagtcttacatgtgtgccagtcaaccggcgaataaacccctaaagggcaaggaagcttattggtgggatccccctgtgggttggacccgccaccgacccttatcttttgtgaaag

SEQ ID NO: 21299 - DNA, 2321 bp, Glycine max
  unsure (1)..(2321): unsure at all n locations
  Clone ID: PAT_MRT3847_119238C.1
cgtaagctcggaatnnggntcgagccacttcgataatataattccattcccatttaaaaagaaaccatcaaagcaagaacaaagctatgtgaaactacaaggtcttggtcaattcagtagtaattcaatatgtcctagttagttccccctttatataataccaagatgcagaagttctgaaaattaaccaaactcaaaaatttccaaaactgttatagaattagggacaacatggctggagggttgcttggagataaccttggattgaaggaagatgtgatcaagagggtgtgtggtttggcctccaaagctcacaatcacaagtcaacggacaagctctacttttacgataaggttcggacttcttcggggacataccatgttttcagcttctcgggatcttgggatcccgctgaatggttttttagcaaaccctttggcggatccaagatagatcctacccagtttccttcactcagaagtattggtaacgatgaacctgctttggtgaacgaaggcttcgcaaagagattcgatcgcgtattgaaaactaactttaaagatgtggtgaagaaggctatactagatgggaagcaagtagtgtttacagggcactcctctggtgctgcaatggcaactcttactaccttttgggtcttggaagagtatattaaccctacaaaaatccaaaaacccatgctacccttttgtgtcacttttgggtctcccttaattggcaatcatatattctctcacgcttcaaggagagaaaattggtcacgctatttcatacactttgttttgagatatgacatagtgccaaggattttgcttgctcccttggcttcattgtggtgaaaaactcagatgctgttttgcaactcttgaagttccacactgctcagatcgagcgatttggcgaattccagaagtttgaaacgcgccaatgttagcatattgcaacaccaggcctgaggctgattggatgatcatgggaagcagaatgttgtgtacttggagcaactagggatacgttcttgaaggatcctaactttattaggtggaaggatattctacctcaggaactcaaggacacttcttcctagctagtctagttactgctgtgaaaggatattctgtattagtcttttttccactcaatgaggaagctataagcttctgatgatgcttttgatgtgtatttgtcatgcaggtgtagtgttggttacttcagtgttgtaactttgtatttgtattcctaatgtttttgattcccaagttctgttgtctgctgatggttcaaatagcgatgttgcaacagccttggatggccttggtactgagcacaagagcaaggctgtgtctacgagcagctggtgagttggagaagcagaaacgcaaaaacgaggacaaaatcatgaaggagattcaggataaagccttgacaagcatgaaagagcttcaaaattacaaaacaacatgtgagatgcacaaggggaagggctattacgatgccttcaaggtgcaaaaggagtcgaacgacttccaagcaaacgtgaagaggcttgtgctagcaggggtatgggatgaagtcattgagatgctaaagaggtatgaactccctgatgagttcgaaggggacaaagaatggataaagcgtggaaccgaatatcgccgccttgtggagcctctagacattgcaaactattaccgccacttgaagaatgaggacacaggaccttacatgatcagggccaggccaaaacggtataggtacactcaaagatggttggaacatgctaaaaggatgccacctgctcctatcactgaatcaaccttttgggctgaagtggaggaactttatagctggattaacagcaagaagcctcttgatgatcatgtcgagcaaagggttaagcagcttcaaaaagaccttaaaaattggactgatgatgagaaagtactagccaaggatacgttcttgaaggatcctaactttattaggtggaaggatattctacctcaggaactcaaggacacttcttcctagctagtctagttactgctgtgaaaggatattctgtattagtcttttttccactcaatgaggaagctataagcttctgatgatgcttttgatgtgtatttgtcatgcaggtgtagtgttggttacttcagtgttgtaactttgtatttgtattcctaatgtttttgattcccaagttatgtattacttgtgagaaccaaaaatcattcagactgctggactaaataaatttgtttaatagtagggtctgaactagagcggtactcaaataaaa

SEQ ID NO: 21300 - DNA, 1258 bp, Glycine max
  unsure (1)..(1258): unsure at all n locations
  Clone ID: PAT_MRT3847_119239C.1
tgtcctagctcccctggacgagtggggaaaattaacacggcaaggaaaccaaactcaaaaaatttccaaaactgttgtagaattagggacaacatggctggaggatcacttggagacaacattggattgaaggaagatgctatcaagagggtgtgtggtttggcctgcaaagctaacaatcacaagtcaacggataagctctacttttacgacaaggttcagatttcttcggaaacttaccatgttttcagcttcccgggatcttgggatcccgctgaatggtttgttaacaaaccctttggggtatcgaagataaattctacccagttcccttctctcagaagtattggtaacgatgaacttgcttgggtgaacgaaggcttcgcaaagagattcgatcgcctattggaaactaactttgaagatgtggtgaagaaggctatactagatgggaagcaagtagtggttacagggcactcctctggggcttcaatggcaactcaaactaccttttgggtcttggaaaagtactttaacccaacaaaaatccaaaaacccaagctacccttttgtgtcacttttgggtctcccttaattggcaatcatatattctctcacgcttcaaggagagaaaattggtcacgctattggctacagtttgttttgagatatgacatagtgccaaggattttgcttgctcccttggcttctattgaggaaaattttggttctgttctccaattcttgaatcccaagtccaaaacttccacccaagatccaacaagggctattttgatttctgaagtttataaaactgtgatgagaaacgccgcgagtgttacaagccatgctgcttgtattctcatgggcagcacaaatttgttacttgagacagtggcaaattttgttgagttgagcccttataggccctttggaacatatgttttctgcaacggaaatggacagctgattgtggtggaaaactcagatgctgttttgcaactcttgttccacactgccctgttaagcgatttggcagaacttgaagaagttgccgacaaaagcatatcgcaacacctgaactatgtggctgagttgcaggaaagcttgggaatgcagaatgtagtgtacttggagcaacttgagcaacttcccttgtctgctgacggttcaaatagtgatgttgcaacagccttggatggccccttgactgatcacagagcanggctgtgtctacgagcagctggtgagttggaga

SEQ ID NO: 21301 - DNA, 211 bp, Glycine max
  Clone ID: PAT_MRT3847_11923C.1
aataaaaaaaattataaaaaaaaaaaaaaaaaaaaagggcaaaagaaaaaaaaaaaagggggtttacataaaaaatgggtcggacgttttaacggttccatgctaacaaacaaaatcttttataggggcgcgcacttttatagggtcaccccgtggtaaaaccactgcgcgacgtgtaaaaactttgtttttaggaaaaaataattttgtt

SEQ ID NO: 21302 - DNA, 480 bp, Glycine max
  Clone ID: PAT_MRT3847_119240C.1
gctgttaccggactcggaattaattccgggctcgacacatctcctaggtacggcggccgcgccttttttttttttttttgtggggagagagagttatagatttcatttgccttaataccctcgcgctaactcacattcaacttcttgcaactaattaatgagctcgatatataagtgccggccatctctgatggaccatttaatttttagccgatctatctcaagtaaaaagacgttttatttaaaagtggtaatgggagcttttctgtggaacagtataggaattttgagtgcagggttgatcagtcagagcaataaaaaccaacacagagaccattcttataaccagcattagccaagaggccatgccacttttgacctcttgagcatattcaccacaagactagtgcaaggaagggtacagggagtgataacgcccaccatgtggcggttaaccgctgtatggaattgtggaacatg

SEQ ID NO: 21303 - DNA, 252 bp, Glycine max
  Clone ID: PAT_MRT3847_119241C.1
gtagccagagaggggaaggggcagcaggagaaaaccccatcaacgaacgagggcaacatcttagcctcatctgataagggacaagttccgtcaaagaaacaagaagactccaaaaagcagtaatctttcgaaaaaaaaattgcttgagatgcagggaatgcttcagcagatgcggcgtcttgagaaggagaagactgaagtgctcttgaaggccgaagacgatgttctcaagcaaaaggatgaagagctcaa

SEQ ID NO: 21304 - DNA, 444 bp, Glycine max
  Clone ID: PAT_MRT3847_119242C.1
gttgtctcttcgggggaagaaaaaaccccgtttttttccccaaaaaacggggttttttttaaaccccgccggggggggggtgggggcccccccaaaaaaggggaaaggggggggggatttttgtttttttcacaaattggggccctggtgtagggggctttttttttttttaaaatggaatttggagagggggggcctttttggggttttaaaaaggggggggggagggggtttaaaggaaaaccccggttttagggggggattgccccaaccgtaagcctttttgggggggattgctctcccgtaaggggcctctttcgaagagggagatgcaaatttttgtgaggggcccaaggggtttttcttttgtggcccggggctttttttttttgttgattgggaaccctgggggggggagaaaaaaaggttttggggaccttttta

SEQ ID NO: 21305 - DNA, 134 bp, Glycine max
  Clone ID: PAT_MRT3847_119243C.1
ggctcgagcgaaaatgcatagttctccgataaaacgactaataatatctcaagatctgcgggggggaacagacactgaccaacctccacctaccagccccacttgcccacccaactatgtggacacataaaaca

SEQ ID NO: 21306 - DNA, 288 bp, Glycine max
  Clone ID: PAT_MRT3847_119244C.1
tcttcaccagcccaatttctttgacctcccgtctatctctctcttgctctctctgtccgatcccattcggttccaacgaaaagaagaaaccctagacctcgtcgtttctcacttctctctcatttcgcacctcgatccgtgtgcgtgaatgtccagaggcgcgtggcgatgacgacggggaagtctgatttggtgtcgatccgcgttccctacaagaacctccacgacgattcctccgcccccgaactcgaactcgtcgacgtccaccaccgcggcaaccaccgcaac

SEQ ID NO: 21307 - DNA, 256 bp, Glycine max
  unsure (1)..(256): unsure at all n locations
  Clone ID: PAT_MRT3847_119245C.1
gtggggaaatctttcactataaatttcacaatcactctactaatattaatgtatagaacaagacacgcaagggcaacagcctcatatgagagtcttccacaggagtgggcagtagaaacgacaaaaacatctgcatagcaccaactccctcgcaaccttaaggcaaacancaacgccancaaacccccacgccagacagcggggcaacccacacccaccagnaaagagggacaacagaacanagaacccagaagca

SEQ ID NO: 21308 - DNA, 463 bp, Glycine max
  Clone ID: PAT_MRT3847_119246C.1
aaaagcaatccttagtaattatatacaacattttgagaagtattagtcaatacaaatacttacaatcgcgaaggtaaaatacaaatgttttgaaggtattaaaatcacattatgacacaaccacccctaggggggggtcttttatttgccacctcaagatcccatttgagtttctgaatttcattattcgatgtaatttgaatcgatctataattttcctcagctttaagtctagcaacttttttttcctccaaacttttcaaaagggttgcactttcttccttcaactttgattcaaccatattagtaattcgttttagctcatcatcatatttttgctgcatttgcattttaatccccaacgtttctgcttttgaatatcctcccatggagtcaaccattttttgtgggttatctcgaattgtggctttctccttcaattctataaacaactcatttgtaa

SEQ ID NO: 21309 - DNA, 429 bp, Glycine max
  Clone ID: PAT_MRT3847_119247C.1
cggtccgagactcccgggtcgacccacgcgtccggccagaggagcgttcgagtgagcgagagagggtttcttctttccggttgttgtcgcggcggaaccctatctagtccggcggtgcgagaatcattgtgtgagagagaaagacgatgagtgggaaggtcggcggcatgccacaacaatggctggcggctatgctgctgtctcctgacgatgtccggggggatcgctggatgatgtgttcctaccttgaatgagattgtctccagtttccccgatcacgagatctacgccaccttcagtgactgtaacctggactctaactgcgctgcttgccgtatcctctctccggatccttttcgtggggtgaccagcatcggctactggagcctctgattattgtcccttctggttgcctgtctgctgcgggtg

SEQ ID NO: 21310 - DNA, 2236 bp, Glycine max
  Clone ID: PAT_MRT3847_119248C.1
gaacagtagaaaaaaagaagaaaatgaaagcttataaatatatgggagagaggtgctaaaattgttggagttttacatggagatgaagctgccattatactgcaaactactcggggaaacctagaatgtatatgccctagaaagttggttttggtttccatcattaatgcattagttcaaaagcgctttaaagatgcattacttatggttagaaggcataggataaatttcaatgtaattgttgattactgtggctggcaagcattttcacaattagcttctgaatttgtcaggcaggttaacaatctgggttacataaccgagtttgtttgttccataaagaatgaaaatattatagagaaactctataaaaatcacatttctgttccctgtccaaaggttgctgatgttatgctagttgggggcatccagaattctcttgctggtaacaaggtttcttccgttttgatggacggaagaaaagcacttgaggatcacataacagaaagtcctgcaagggagctttgcattttgaccactctagctcagagtgatcctccattacttgaagatgctttaaagagaataaaagttattcgtgaaaaggaattgtctcatgctgatgaccaggggagaatgtcttacccttctgctgaagaagctttgaagcatcttttgtggttagctgactctgatgctgtatatgaagctgctttgggtctttatgatttaaatcttgcagctattgtggcattgaatgctcagaaagatccaaaagagtttcttcctttcttacaggaattggagcgtatgccaactctattaatgcaatataatattgaccttaggctgaaaaggtttgaaaaggctctcagacacattgcttctgctggagattcttattatgatgattgtatgacactcgttaaaaaaaaccctctactttttcctttggctcttcaactttttactggccctaccaagcagaagccattccttgaggcatggggggattatcttagtgatgaaaaatgctttgaagatgctgcggcaatttatatgtcctgtttcaatctggataaggctctgaagtcttatcgtgctattaataactggagtggggtgcttacggttgctgggttccttaatttgggaaaggatgagctactacatcttgccagtgagctctgtgaagaacttcaagcactaggtaaacctggggaggctgccaaaattgccctggagtactgtggagatgttaacaccggtgtgaatttgttgattactgcaagggactgggaggaggctttgagggttgtttttatgcatagaagagaggacttaattaaaacagtgaagagtgcatctttggaatgtgcaagcacacttaccagtgaatatgaggaaggcttagagaaagtggggaaatacttggcacgttacctggctgttcgacagagaagattacttcttgcagcaaagctccagtcagaggaacgtgcagcaagtgatcttgatgatgatgctgcttcagaaactagcagtaattttagtggaatgagtgcatacaccacagggaccaagaaaagttctgctgcttcaatgagctcaactgcgactagcaaggcaagagaaactaggcgtctgaagaagagaggaaaaatccgtcctgggagtcctgatgaggagattgccttggtggagcatttgaaaggcatgtccctgacagtggaagctaaacgtgagctgaaatctttgttggtctcccttatgatgtttggtgagggagaaacatgtaagaagctacaacaaacgggggaaaactttcaattgtctcagatggcagcagtcaaattagctgaagatacaatatctaatgataccataaatgagtatgcacatacgttggagcaatatacccaaaaagtaaggaatgaaattcacaattcagaggctttctcgtggcggcttaaagtttttttgtcctatgagtgagcgtagcaaattaacataaatttttgttagatgtatctgcatgcagtttgatgttattagcatcgtttcttttgagcttgtcccataactatgattgtataatcactctgaattgattgtgttgcactgaacatctatattaacaatgaaagccgattagtgctcgatgagagtggattgatcagactttataaatcatttaacaaaaacatttaaaaaaaaaaaaaaaaaaaaaaaaaaa

SEQ ID NO: 21311 - DNA, 324 bp, Glycine max
  Clone ID: PAT_MRT3847_119249C.1
ggccggggggggaacacggccatgacccggtgttgtcgccggtgatattccggccatcggagacggtgaatcagtttagtgtgatggcaccggcgtcaagacctaggttgtatcactcttcagcggtgttgttgagagatggaagagttttagttggtggtagcaacccacacgttttttacaatttcactggggttgagtaccccactgatcttagcttggaagcgttttctccgccgtatttagcgccggatttcgctccggtgcgaccagtaattaggtatattactaacaacaatgtgttggggtatagggttttttggt

SEQ ID NO: 21312 - DNA, 876 bp, Glycine max
  Clone ID: PAT_MRT3847_11924C.1
cgaaagcacggggtgcggctcgagcttcattcattctttatggatcaagaaacaacaagaagaaacaccatgcaagaatgtcatgtgatagccccaacaacaacaacggcaacatcatcgtatcgtggagttcgtcagcgaaaatggggcaaatgggtgtccgaaatccgtgagcctggaaagaagagcagaatatggttagggagctatgagtcaccagagatggctgcagcagcatatgacgtggcagcgttacaccttcggggacgagctgcaagactcaatttccccgaattagttgagacgctgccacgtccaacgagttcgaaacccgaagatgtccaagtggcagcacaacaagcggcggtgatgttcagaatatcaccaacaatgtcacctattaacaatcatcaaggatgtgtcaatgacaataacattattaagggtagtgtggttcctgtgagagtgggactctcacccacacaaattcaggccatcaatgagtccccattggactcaccaaagatgtggatggtgcaaatggcagaggcactcaggtttggtttcgatgatcactctatgatgatgctgccttctgatgatgatgattatgctttggagttgagtggatgggaagaaatacagcatgaatctttatgggactctccagaatatatgtaattaattacgtaactattaattaataatcaatgtacccttgatttagggcattatatattacatatgattaaagaatcatgtggttttagtgagactgattcaatgaagcaaaaggattaataaattatatatttgtaaattgcgtacagtatttcatgacccatttgtttctccaattgatttgtgtatgtgtct

SEQ ID NO: 21313 - DNA, 390 bp, Glycine max
  Clone ID: PAT_MRT3847_119250C.1
acacaatcgaggattattttttgttcatttcattgcccttgatcttcaaaaagaacattttattcaacatatcttattttcaaaaaacgggttgcacaagattttaaattataacacaagggcccttgtttaaaggcacgaatttttttataacaagccccgggttgcttttggttaactaaggctcccgcccaaaaaaaaggcccgggatcccccccccaaggggttcctccttttttccaatttcaaaacccgggcaagaggttacggtctttggtctaaacaacttttctttattaaaaaacccgcctttaacgaactttgttatcccccaccaccttaactttttaattgggattagggggggggatgaccataagggggtggggg

SEQ ID NO: 21314 - DNA, 719 bp, Glycine max
  Clone ID: PAT_MRT3847_119251C.1
ctttgcggtgggttcagttcttaattgtttcaacctcttcttacttacatgacaagaaaaataatgggtactctcacctcaaacataaaccttagcccacaatacaatgtttccaaagactatccaccccatggctgtagttgaggaaatacaagggcttattagagtacacaaacatggatacgtggaacgaccacaagttgttccatgtgtcactgctagtacaaaatgagtccagaactaaatgtgacatcaagagacatggccattgacagtgccacaaacacatgggcacgtttttatgttccaatttcccaacacaaaaaaatgccttttctcgtttattttcacggtggaggattttgtgttggatcagcagcgtggagttgctaccatgatttcctcgcaaggctatcagccaaagtggagtgtgtgattatgtcagtgaactatcgattggccccagagaaccctcttccagcaccctatgatgatggcttaaaggccatcatgtgggtgaaacaacaaatgctacatcaacaacacaacaagggtggtagtgaatggtggacttcaaaatgcaacttctcaagtgttttcttaggtggggacagtgctggtgctaacatagcctacaacgttgccacgaggctatgtgcatgtgatggcgctgctttaagacccttgaattgaagggtcttattttgatacaacccttt

SEQ ID NO: 21315 - DNA, 907 bp, Glycine max
  Clone ID: PAT_MRT3847_119252C.1
gaaatcttacatagaaccactttcttggaacacccggtttaaaatagctatcggtgcagctcggggactagctttcttgcacgcctccgaaaaacaaatcatatacagagatttcaaggcctcaaatatacttctcgatgtgaatttcaatgcaaaaatatcagattttggcttggcaaaattggggccttctggaggacaatcacatgtaactaccagggtcatgggcacgtatggttatgctgctccagaatacatagcaacaggtcacttgtatgtgaagagtgatgtctacggatttggcgtagtgcttcttgaaatactgacaggcatgcgggcacttgacacaaaacggccaacagggcagcagaacctagttgaatggaccaaacctcttctctcttccaaaaaaaagttgaaaacaataatggatgctaagatagtgggtcaatattcacccaaggcagcgtttcaagcagcacaacttactctaaaatgcctagaacatgaccccaaacaacgtccttctatgaaagaagtgcttgagggattggaagccatcgaagctatccatgaaaaatccaaggaatccaaaacctgcaattcttatcaacctcctcggcagagagttgtgagagtataaataaatttgtataccactagaatctgagattgaatagggtgttggatcactcacctaattgatgtgatttttttttcttgtgctgcttggaaggggagatttaccaggctttttacatgtatgatttttttgttgaattattcacatttttataaagtaggaaaatattttttatctgcaataagggaacatagttttgatgctaacatgtcacttttttttcaagacttctttttctttcatcaatgaaaagttagccggctc

SEQ ID NO: 21316 - DNA, 1726 bp, Glycine max
  Clone ID: PAT_MRT3847_119253C.1
attattcacttgtcttgtatctctctttctttagtttcttattcaacccaccaacacaaaaccaaaacccatcttttttgctttgacaagtaatcgctgatcacgttaagcaggagaggttcccaagatgggtcgctgcttctcaaccggttcgagcaactctcctgagcagtcgtgaggatgtgagggtactgacaggacgatcgtgcggatcttcgaatggccaagcatcgcggggtttagctttgacgagctgatttctgcctcaaggcgtttcaggtatgacatacaggggttagtgatcggtaaaggttgttttggcccagtttacaagggatggttggttgagaatacccttacccctgccaaagcaggctatggaatggccgttgcgatcaaaatctttaaccaagattacttccgagggtttgaaggatggttggatgagaagaaccctctccccggccaaagcaggctccggaatggtccgttgccatcaaaaagttgaaccccgaaagcacgcaaggcttccaagagtggcagtcagaagtgaactttttaggaaggctttctcaccccaacctggtcaagttgttgggttattgttgggacgatgatgagcttcttcttgtttatgaattcttgccaaagggaagcttggagaatcatcttttcagaagaaatcctaacatagaaccactttcttggaacacccggcttaaaatagctattggtgcagctcggggattagctttcttgcacgcctccgaaaagcaagtcatataccgagacttcaaggcctcaaatatacttctcgatttggtcaattattttttcgtagttgattttcttatgttgtttgttagtctaccttttccctttttctcttagagatggaagctaaaggaaatgtagtatcaaatagggatgaacagacagcttacaaatttggaccccattgttgttttactaccaacctcatgcggaaaagaatttcaatgcaaaaatctcagattttggcttggcgaaattggggccttctgggggacaatcacatgtaactaccagggtcatgggtacgtatggttatgctgctccagaatacatagcaacaggccacttgtatgtgaagagtgatgtctacggatttggcgtagtgctacttgaaatactgacaggcatgcgggcacttgacacaaaacggccaacagggcagcagaacctagttgaatggaccaagcctcttctctcttccaagaaaaagttgaaaacaataatggatgctaagatagtgggtcaatattcaccaaaggcagcgtttcaagcagcacaacttactgtaaaatgtctagaacatgaccccaaacaacgtccttccatgaaagaagtgcttgagggattggaagccattgaagctatccatgaaaaatccaaggaatccaaaacccgcaattcttatcaatctcctcggcagagagttgtgagagtataagtaaatttgtatacaaaagaagaccactagagagtgagaatagccatatggtccattgaatgttggatcactcacctaatagatgtgatttctttctttcttttttcttgtgttgcttggaaggggagaattttactgggcttttacatgtatgatttttttgtgaattattcacatttttataaaatgggaaaatattttgtaagtgcaataaagtaacaaaattttgatgcc

SEQ ID NO: 21317 - DNA, 2192 bp, Glycine max
  Clone ID: PAT_MRT3847_119254C.1
gaggaacagtaccaaaatggccttgattccttccatgatgctgttttcatttctttctttccttgtcatactcaaatctgaagccaacaacgaccagctacaattcgtgtaccattattgcaacaacgagtacggaaacattaccaccgaaacctactcagacaaccggaataaccttttgtccaatatgtattatgacaaagaaaatgactacggcttctacaattcctcctatggacaagaccctgacaaagtttacgccatcggtttctgcagaggcgatgcaaatctagataagtgccgtagttgcctggaaaagtccgcagtccttctcagagagcggtgtccagtacagaaagaggggatcgggtggtttgacgagtgcatgttacgctacaccaaccactcaatatttggtgtcatggtaactcaacctaacaacatcatgtgcaacacaaaaaacgccccaaaggatcctagatcggctgctggttttgatcaagtggtccacaacctgttgaacgaactgagaaacaggacgacgacagtggcagacccagaaagtgattccagtcgaagtcgcaagttcttcgctgaaggagatgctccggttcaatcaagcaatgtgaccatacatgctctgattcagtgcacacctgatatttctagtcaaaactgtactcgatgcttggagcacgctatgacgaatattttatattgtgatggaaaaaggggtggtcgatatctaggaccaagctgttctgttagatatgagatctatccctttttttgagcccatagtccaccatgcaccaccaccacaacctgccactcaggttaccacgaccactgggaaagaaaagagcaacccatcacgaactatcattgctatagttgtgccagtcgttgccgttgtcgtactcctggtggcctttacctacaattatttaggagcgagaagacgaagacaaaaaccttttcaaagtgaaggaggcgaaggtgaacttgataatgacattaaaatagacgagttgttgcaatttgactttgcaaccatcaaatttgcaactaataacttctctgatgcaaataagcttggccaaggtggatttggaattgtttataagggtacgctctctgatggacaagaaatagcaattaaaagattgtctatcaattctaaccaaggagaaacagaatttaagaatgaaattctgctaacagggaagcttcaacaccgaaacttagttagactgcttggcttttgtttttcaagaagagaaaggttattgatatatgaattcgttcccaataaaagccttgattatttcatatttgatccaaacaatcgtgtgaatttgaattgggaaagacgctataatattataaggggtattgctcgaggtcttctttaccttcatgaagattctcgattacaagttgttcatcgtgatctcaaaacaagtaacattttgttagatgaagagttgaaccctaaaatatcagattttggcatggcaagattatttgagatcaatcaaactcaagccagtacaaatacaattgtcgggacctttggatatatggctcctgagtacattaaatatggacagttttcagtcaagtcagatgtctttagttttggcgtaatgattctggaaattgtatgcggacaaagaaacagtgagattcgtggtagcgaggaaaatgcacaagatctattaagctttgcatggaaaaattggaggggagggacagtttcaaatattgtagatgacacattaaaggattattcttggaatgaaataaggagatgcattcacattggattactgtgtgtacaggaagatatagctgatagaccaactatgaataccgttttactgatgcttaacagtgactctttcccacttgctaaaccttctgaacctgcatttttaatgcgtgataagagttctttgcctacggctatgctgtctggtgggcaacattcagaggtaacaaggtcaggttattcaggaagtcaatctgctcaagaatcatcaattatggctccaatcaccgagccatatcctcgttagatatttgtcataaaatttactttttatgccaattgggcaaaaaggaaatgatcaattattgaaacttcatcctttggagttaacaacgtaaccacctacccttcctggtta

SEQ ID NO: 21318 - DNA, 662 bp, Glycine max
  Clone ID: PAT_MRT3847_119255C.1
caataattgatcatttcctttttgcccaattggcataaaaagtaaattttatgacaaatatctaacgaggatatggctcggtgattggagccataattgatgattcttgagcagattgacttcctgaataacctgaccttgttacctctgaatgttgcccaccagacagcatagccgtaggcaaagaactcttatcacgcattaaaaatgcaggttcagaaggtttagcaagtgggaaagagtcactgttaagcatcagtaaaacggtattcatagttggtctatcagctatatcttcctgtacacacagtaatccaatgtgaatgcatctccttatttcattccaagaataatcctttaatgtgtcatctacaatatttgaaactgtccctcccctccaatttttccatgcctgcaaaaaaattgctcaactgaaaataaaacgtttataatatgaaatttcttaaatgtggaaaatttcgtatgtacaactataagcttccgaacttcaaataaatagggaaattaactattaactaatagtcgtgaaaaggtatcacacttacaaagcttaatagatcttgtgcattttcctcgctaccacgaatctcactgtttctttgtccgcatacaaatttccagaaatcattacgcccaaaact

SEQ ID NO: 21319 - DNA, 435 bp, Glycine max
  Clone ID: PAT_MRT3847_119256C.1
ccacgcgtacgcccacgcctacataaggatgcaagaagatcacacacagagatgtcactcacacccgtgaataatcctctattaacattccacagtcaagttctagggttccgaaatggaatcaggaggggagatcaaggtaggcacgggaggtacaaagggcagaagcccatttcagagtccggtttcaacgtccgtcaaatccggtctcgaattcctcgtcgtaagaagtggacgtgaatgtaagaacagaatgtacgcacagcttctccgtaacagtgcgctcgtatacttgactgcagatctcgaatagcgatctacttaggtgcgagagttggatgtgaatgccgcacgtgacagcattaatcacaaggattatcctaggacacttacttatggcaatgaggaacgaaaatgacttgcggaaattgcatg

SEQ ID NO: 21320 - DNA, 1655 bp, Glycine max
  Clone ID: PAT_MRT3847_119257C.1
cccttttcgttcgaaaagaaaacaaaaacaaaacattaatctgcattttggcattgggctcttcttgtttagtttgtttgttccaatccaacgttggtttggttgtgtgtgtgtgtttgggttgggtggtgtattgcaacgattcggcgaggaaaagtaaagataaaacaaacttgcgagttgggattggggtcaagtttagtttgttgaaatacaagatttgtgggaagtgtttcacaattctcatctcattgattgcttaccatcaattaggattaggaaggaacgcaaaatcatcaaatcaaataaaagaattaatcatgaggagtgggaaaaagtctattcacgcgatcacgacatgggtgcggcggcagcccccaaaggtgaaggcttttctcgccgtcgtttccggcatggcggctctcgtccttctccgcttcatcgttcacgatcacgacaaccttttcgtcgccgccgaggctgttcactctcttggaatttctgttctcatctacaagctcatcaaagaaaaaacttgtgccggattatcgctcaaatcccaggaattgacagctatatttttagctgttaggctgtactgcagttttgtcatggaatatgatatacacaccctgcttgatttggctacttttgccacgacactgtgggttatatacatgattcgttttaaactgaagtctagttacatggaggagaaagacaactttgctatatactatgtggtgataccatgtgctgtgttagccttgtttattcatccatcaacttcacatcatttattgaacaggatttcctgggcattctgtgtatatctcgaagctgtgtcagtactgccccaactgcgagtcatgcagaacacccaaattgttgagccattcacagctcattatgtatttgccctgggtgtggcaagattcttgagctgtgctcattgggttcttcaggtgttagatagtcgtggacatttgttggttgccttggggtatggattatggccgtcaatggtgcttatttcggaaattgtccagacttttatcttagcagatttctgttactattatgtcaaaagtgttttcggcggacagcttgttctccgcctaccttctggagtggtgtaatagaagattcacttcactacatacttgcatttaaattaacttaatcaagcaatatggtcggttatcattgttggagtccatattgcattgaaaaagtatggttccttggaagaatctggttctttgtaaagttagagatgaagggaaaacaagatatttatgttgaaggtacagtatttgtagctggaaatgctttacacataacatgtctatttgcttaggctcttgaaattcagttcttgacagaacttttccatgttatcgtattttaactgcttgacttgagccaatgagggagtcgtcataaagttgctttgaagggattatattttccgtcacatttagattaaagtatttgttgaaggtttcagtaagtcttggattgaaccctgcctacgtaaaaatacgtggactgtgcggtttagatctattctatgcagttgaatactgtgagttttatgtatggtgcattgcagaaaacaaatctgaattattgagtccagagatgttattctt

SEQ ID NO: 21321 - DNA, 1270 bp, Glycine max
  Clone ID: PAT_MRT3847_119258C.1
cccacggttacggttctgcaagactgcaactattggggaatctttcgcagcctcccactaaatcttttgaaaaaatattgaatcctcaaagtgccgatcctcctaaatccaatgtttgctctttttagcccttctctccctatatattttttcacaagcacctctttcaattctctccgtttcactagctcttattccaaagcaaaagaagaagaaagggcaaattagtataatatggagaccatgaatgttcaggtgatgagaagcttatcagatatggtaattaaaaaaggaccatggactgaggaagaagattctgttctgatcaactatgtcaacgtccacggcgaaggccactggaactccctcgctcgctcttcaggtttaaagcgaacgggcaaaagctgcagactaagatggttcaactacttgcgcccaaatgttcgacgtgggaacatcacccttcaagaacagctcttgattctcgaactccattcccactggggcaatcggtgggccaaaatagcagaacaactgccagggagaacagacaatgagataaagaactattggaggactcgagtggtgaagcaggctaagcaactcaaatgtcatgtaaacagcaaacagttcagggacgccttgcgtttcgtttggatgccgcgccttatggagcagattcaggcttcttcttcttcctatggccttgatcaaaccacgttgtgcaacactcaaacccacagagacaactcaatggtttcatcgtactcatcagaggttgatcttcagcctccttctctttctgatacaagtataacttcatcatcttacaatttaattggtgatggaggcctgtcaacggaaagtgcagaaaaggggtccatatactctctttggcagcattgggactactctgacatacaagcatttgagccatgcaatggttttggtgatgcagacttgtggaccgatgaaaacatgtggttcttgcagcagcatcttgctgatgaattatgatccagttttgcaatttacactaggctttgcaattaacaagttcaacgatatatcgctaattaaactactgaatgtcattatttgagtgatgattgattgtttgtaattgtcctacatgatacattaattttcttatgaaataagatacttgtagttgaatagtacatttctctaagaacatgtaggaactcaatttaagttgaccctctgtttagtgtccgttattgttatatacaatataagaacattcatt

SEQ ID NO: 21322 - DNA, 289 bp, Glycine max
  Clone ID: PAT_MRT3847_119259C.1
tggaaagctaacctcggattttatcggcaccaacttcacaatctatgacaaccagccaacccataatggtgcaaaaccatcaagtggcatggtcagccgtctgtttgccaacaagcagataagcccgcaagttcctgcatgtaataatgatgtggggcatgtctcctacaaggtcaaccttttaaactcaatagggccatcgagaatgggctgttcatttaagtgtcctgtaactcctgtctcaccaactagtgtaagttcagatagcaagcctgtaaatggccatatg

SEQ ID NO: 21323 - DNA, 576 bp, Glycine max
  unsure (1)..(576): unsure at all n locations
  Clone ID: PAT_MRT3847_11925C.1
aattactgataatgattgaaactttaattctctgtgtagttgttacttacattcctgaaatataaaccacccaaacacactcccccaaatttgggacaaatttgtcttaaaccataaaatgatctcctataacctaagatagggtaaacatagataacatttacatttaggttcatggtttaatgacacattcatttacatgtaggctcaaacgggtgcaaggatttaatcatttatgaacatggtaaggctatttggctaagtaactaaatcaattcaatcatggccttcatcattttcaaatcatgcattcattcaatattcagagattcatgcaaaaatcggtacttgatgctagtcgtcctctcacagtttaaggttcacacaactcaccaggttacaaccattggttaccttcactattttcctatcatacaagctaacattttcactcacgcccctaattttcatgctattnttcttctacataaagcacttattcaaggtatatgatttatcagcgcaagtcactcatatcatgcaatcaatttagttcaaaccaatatcaaaacaaac

SEQ ID NO: 21324 - DNA, 3237 bp, Glycine max
  Clone ID: PAT_MRT3847_119260C.1
ttggaaaacaagttatagcaatggcactcacagtccatcttatcattttaatgcatgtttgcacccttgtagttgttaggagtgatcctctccctaaacccaatttctcatccattctagttttcggggattcatcagcagattcaggtaataacaactacatcatggggagtttggctaaggcaaatcatttgccctatggcaaggattttccaggtcatgtacctacaggaagattctctaatggaaaattggtaattgactttcttgcctctatattaaatatcaaagatggtgtccctccttatttgaacccaaacctaccaaacaaagaacttctaacaggtgtttgcttcgcatctggaggatcaggttttgatgattgcactgcagcgtcagccaatgccatatcgatgaccaaacaaattgagtacttcaaagcttatgtagcaaagctcaatcgaattacaggagaaaatgaaactaaacaaatacttggagatgctcttgttattattggtgcaggttctaatgactttcttctcaagttctatgaccgtcctcatgcaagagtgatgttcaacattaatatgtaccaagattacctgcttgataggcttcaaatccttattaaggtatgccaaagttattcattaaaactacattatgcattattttaagttaataacaacaagaaaatcatgagagaagacatatagataaaaaatgtataatttatttaagaaatttctatgcttgttctttcttttagataaacaatcatgagaggtgtaattatctgttttagtaatattgggatatattaaagtgtttacaaattttttaaagtacttaactggaatctctataatatactaaagttctttataaaaactaaatcttatgaattatcttttcttataattatagaagaaacactaaaaacaaaatatttttgacagtgtaataacttaatagaataaattatatttgctgaaattcttaacttccaagtcgattttcctactaattttattgaattcaaatcacatatcacttttatttgtatattttcttttgttgtcttttctatttcaaaataataccttaaccagaaacttaactattaattaagagcgggaatattgttatttttaagaggtagaaatttcttaatgatatatagaataaggatggaaaaagatcattcacaaaaaaaaaagggatgggataaagataaaggaaagtaatttcaatctaatttttttcagcaagaaacttgtaattttacagaggccacatcaaattccatttttttgttaattcattgtcttgttatccattttctttttgtagtatgcatctgcatatcgacaactaatatttatgcttgtttggtagatactataaattaaaaaatactttttaaaaagtattcttaagaaattaccaaaaaataattatttcataaaaaatccaaaccttcttatagttaatcatctttttgtgcgtaatattgtaggacctatatgactacgaatgccgaaaatttcttgtcagtgggcttcctcccattggttgcataccttttcaaataacattaaagtttgaaagggataggaaatgtgtattgcaagaaaattttgatgctgagcaatataatcagaaattggtgcagagattacttcaaatacaagctatgcttcctggaagcagacttgtttatctagacttatattactccatactcaacctaatcaaccatcctgaaaattacggtgagatgtatgtatatatatatatatatatatatatatatatatatatatatatatatatatatatatatatatatatatatatatatatatatatatatatatatatatatatatatatatatatatatatatatatatatatatatatatatatattggtatttaagtttgatttcttcaaagtaagaaagtaaacgcgtctatttattagcattaattttaaaaaaaaatttataaagtattttaatttaaattggtcatattttgcactcttaggagttaagtttttttgggggaaaggagttaagttaaacccttaatatttagaccaaaatattttgaattcttttgtacttaagagtatatgcatagagagggaacatatcaattaaaaaatatttttaatttgagaaatgagaacttttatttgaatcgtatcatcatacataaatgattaaagttaagagctagttaataattatatttttgagaggagttaatgattacataatcacttataaaagttatcttaatttttttattcttagcatttaaatataatctagattaactatatttatagttatattttttgggtgaattttatagttttcatttattacaataagattgaatcatatatacattatacatagatgattaagattaaaagttagttttttcagaggattaaaagttaattagttagtgactacataacattcgtatttttttattaagttaataaaaacatttgtattttgtattttgagcatttaaatacaatctaattatctatatttataatttttttttttttgaaatttgatagttttcatttattaaaataagaagagttctaatttgatatgttctccgtgcacgcgtgcacacatatacaaagtgcatgctaatatgtttcgaaaatattatagaatggtttgtgccttggaaaccttaggaaaactttcttcgtatttgctttatatttccataatgtttttctttctataggaaaaagttttctggatgattttaaaataatgaaaataatttgttcttatatgtattttgagcctttgtgggaattttatcaaatatataggtctggaggtaacaaatagagggtgttgtgggctcggcgcattggaagtaactgcattatgcaacaaactcacaccagtatgcaacgacgcttcaaaatatgtattttgggacagtttccatcttagtgaagtatcaaaccagtatcttgctaagtgcgttgaaataaatgtcctgccccagttttgtaatagtagttagttcttagtgagaactaactacaacaatattctcttcttatattttaagtgatgtctttataatttgcacctcgaatgtagttaaataattcatctttgtaataatggacaaatttatataagttcttcgtttgttactgtttattatttgt

SEQ ID NO: 21325 - DNA, 1031 bp, Glycine max
  Clone ID: PAT_MRT3847_119261C.1
gtgtgtgtagcaaagggtggtggtgtggtgcttgttgtggttggtggtggagtgcgctttctatatcactctcaactttactcctcttcaatcaaattcttctacatcactctcaactttactcctcttcaatcagttgcatattctttgctattccaatggccactgttgaggttgtgtcagccaaggttgccctcccagaggacacaaaagaggcatcattgaaggttgacgaggagaagaacacagaagaagttgttgagactccaacaccagaaactgtggtcactgagcaaaccaaggaggaaagtactgaggccccacgacctgcagcttcagaagacaagccctcggttgaagttcagactaaagaggtggcagaggaagttgtgtctgagaccatcacacaagagccaacagttgagaagcaagaagctgctgagggaacaaaagaaaatgccgatcctgctgagattaagacaccagaagctgcagaagatgttaatattaaggaagagaaagaagctgaggctgaggctgaagctaaggaggaagaggccccggcagagaaaagtgaggagaaggttgagacagaagggtcagctgaaaagaaagaggaggaagtgattgaagaagctgaggctgagaagaaggaggaggtcacagtcacggacacagaggctccaacagagtaaaagaacgtgaagaggggaaatgtgcagtttaagtgagtgtttgagagggtatttttttcttagttgcatcgtgtcttgttgctccatgcatgtcttttctttgtttagtggtctaataaaaagtctagctagggaagggatgagtgatgcgaatgccaaccactcagtacaagaaccacatggcatgtagtctttcaatctgatctatggggtgtgcatggctagctctccatccaatgaattatgttatggtcctttgtgtgattcgatctgcatgcacggtaactttctttgttcaaataaatatatatgtagattattagtatcttatatccc

SEQ ID NO: 21326 - DNA, 405 bp, Glycine max
  Clone ID: PAT_MRT3847_119262C.1
gtttttcgtgggatgatggggaaacgggctgactcccagggaccttgcggacgtgttcacagagtgtcccttggtatacggggaggagctgttgcacataatgcatatggtaacgaatctgccatatgctcgctttatagtgaaggagaaatgaggatgggaaagagagctttgaagtttgtaagatgacctctatctacaataaatgtgcagatgataaggtcatagtaattgggaaaaccactgaaggcactctttatgtggaggttgtctgccacaagctgttgcatgaaggagcgacatgacaaagggtggagaggacttggtcacaggacgaattgacagcactttggaacacgcaagtgcgtttagcaagaacggtgcatgttgactgaagtgcatatt

SEQ ID NO: 21327 - DNA, 1995 bp, Glycine max
  Clone ID: PAT_MRT3847_119263C.1
aattcggcaccaggaagaattcgccgccgcaggaattttttttttttttttttttaagaaattctcaaataaggcgaatgttcacttcaggtgaaccccaaatcattgcactcaaataaataggtgttttgcttgtcatcagggaaaatagcacgaaacgtccaaatttcacaagaaaatgtaatatagagaagaaagaagaggtacaagaggggaaaaaaatcaaccaggcaaaagaatataaatgagcaaacactcaatttccagccactgcttcaatcaagatcttttacgatcctgtcataagtcagtggtaaggtatgtaccggtagtatacaacaatgctactttcagtactatgatgcatatatccagctctaccctgaaagcatgagtgacagaatataaaagtgaaaaaggcataatcgtttaacgaaattcctcaccaactcagtcggtgacagttcaaaagaacattttcctgaaaaggcaacttcagtacaaaatcacatcattgagatgcccctgtgacagtaactgctgattcgaaccttcttaaaccttcaaagcagctttgtggaccatggtttccttgtgtatctgatgacaacttttctccacaagatcaagtaatttctccaagtttgctgcccatgagttaagaatgtcattgctatcctttgctgtttggaaacagactattcccaatggtctatcaatctttgccaccagcgccttagacacaaccatatctgagagatgcttctcagcatcctgtacactgaggcacaaaagctctgcaagtctcttcaatgtaattcttgcatagtattttgatacaacaagaatattatgttcaattattctttgccttagatcttctgctgctttttctcccaaagatttcccagaggccttctcattctcaaaatcactcttatatgtatcccatagagttgtccattggataacctccatggtaaccagctgtttcaagagtagcttgaagtttggaatctcagatagattcttatccgccaaggtggaattgagaaagcttgattgcattggatcatagggcgctagaaccaagtaccaacatattttccttaggattggaatccacttggcagggtcttctttgacagatggaatctcatatattgccttgtagcaacggcaaatttcaagataatcgttgttatgggaataatatcgaatcattagttcgtaatagatttgcttcaactccagcaaagatggtatatctgcaggggcctcttctacaacattatcaccttctttaggctttttcttttccttagataaatcagcatcaaatactcttgggctaatctttcttgagagtatttgtgcacgaacataatcctggcggtctagacacaaacgaacttgttcaagaatgaacgcaattttctcagtcttggccatggcaccgaatgtttccaccgcaatttcttgcatcaaatcagcagcttcagctataagcccttgttcttccttaatctttgcaagttttttgatcaatcgagctctctcaatttccacgtatatcttccctgcagacacactgttcaacgttttgatgagttctatgcgagtttcgatatctggtgtctcgtcaatatattgcatagcctgttgcaccatagctgttacagcctgcttgagctggccacgtcgttttgacaaaacgacaatctggtcattgagtgttttccaggctcgtgcatcgaagcagagctgcaaaatatcggtggctgcttttctggtacccgccacgtcaccggcgagcctcatctgcttctccacgttcagcaattgctctatcgccgcgtctaaattccccgtattcgccatggttggattgtgggcgagagagagagatctcggaaggagtcgtgaattattgaaaattggaagtggaaggaaggaaaggtaaatatgcgagcggcggctcgggatctagaacta

SEQ ID NO: 21328 - DNA, 757 bp, Glycine max
  unsure (1)..(757): unsure at all n locations
  Clone ID: PAT_MRT3847_119264C.1
ggtgtggaaataaactcagaaaaatatattgcactttactcctaggtaaagggaaggtaaagggaagaaaaaaatatacaaacaagttacaagtaaagttcctctttgcttctacttctactaacaagttgaaaaagttcacatctaattcctgcactatggtgagaatcatggcaaaaataattctcaacgacaatagacaaaatcatcatcctcacactctggaactcctagcatagctaaagccaagtgacttttcatctcattatttgtttcttgtaacttagggtaattatcaatcatatatccattgccaaaataaccagatttccttcttctagagagaacatgctctacttcacctttcaatattgcaacaatctcacctatgctaggcctcctagattcttcacttgtaacacagacagaagctgcatcaatcattcgaaccatttgatctgtgtaactcgaattgtacttgacttgaggatcaagcaactcctcaatggctccttttccttttctcagcaagggttttgcccatactactaagttttcctctccagggggtcnnnnngcttcaattggattgnnnnnagttaagagctccaatagaacaactcccnnngcatnnncatcagtcttatctgatactttcccatgttcaaaatactcaggagccnnntaaccaaatgttcctttcacagtnnnngcaaggaaaagggactgangnnncnnnagtccatgaagctagccc

SEQ ID NO: 21329 - DNA, 2077 bp, Glycine max
  Clone ID: PAT_MRT3847_119265C.1
cccacgcttccggtaagaggaggaagttcgtagggaaaaccaatgggcgtttgaataagttttatgattctgctgcttttgaaatttcaatgaaaagatatgccctatagtttctagtttatgtttctgactattttgtttgttttatttatgtttcgcgtatcaaacttgtcttcttttttttttttttttgacaatgaattaacaataaagctgagataccagattcaaaagcattcctcccaccatattcaactattacttacaatttcaagattgcccaagttcaaaaaagccacattcaatttccaataatttcacgactccttcggagatctctctctcgcccataatccaaccatggcaaatacgggaaatttagacgcggcgatagagcaattgctgaacgtggagaagcagatgaggctcgccggtgacgtggcaggtaccagaaaggcggctaccgatattttgcagctctgcttcgatgcacgagcctggaaaaccctcaatgaccagattgtcgttttgtcaaaacgacgtggccagctcaaacaggccgtaacagctatggtgcaacaagctatgcaatatattgatgagacaccagatatcgaaactcgcatagaactcatcaaaacgttgaacagtgtgtctgcagggaagatatacgtggaaattgagagagctagattgatcaagaaacttgcaaagattaaggaagaacaagggcttatagctgaagctgctgatttgatgcaagaaattgcggtggaaacttttggtgccatggccaagactgagaaaattgcattcattctcgaacaagtccgtttgtgtctagatcgccaggattatgttcgtgcacaaatactctcaagaaagattagcccaagagtatttgatgccgatttatctaaggaaaagaaaaagcctaaagaaggtgataatgttgtagaagaggctcccgcagatataccatctttgctggagttgaagcagatatattacgaactaatgattcggtattattcccataacaatgattatcttgaaatttgccgttgctacaaggcaatatatgagattccatctgtcaaagaagaccctgccaagtggattccaatcctaaggaaaatatgttggtacttggttctagcgccctatgatccaatgcagtcaagccttctcaattccaccttggaggataagaatatatctgagattccaaacttcaagttacttttgaaacagctggttaccatggaggttatccaatggaccactctatgggatacatataagagtgattttgagaatgagaaggcctctgggaaatctttgggtgaaaaagcagcagaagatctgaggcaaagaataattgaacataatattcttgttgtatcaaaatactatgcaagaattacattgaagagacttgcagagcttttgtgcctcagtatacaggatgctgagaagcatctctcagatatggttgtgtctaaggcgctggtggcaaagattgataggccaatggggatagtctgtttccaaacagcaaaggatagcaatgaaattcttaattcatgggcagcaaacttggagaaattgcttgatcttgtggagaagagttgtcatcaaatacacaaggaaaccatggtccataaagctgctttgaaggtttaagaaggttcacatactgtcacagggcatctcaatattgatgtgattttgtactgaagttgccttttcaggaatgttctattgaactgtcactgactgagttggtgaagaatttcgctaaacgattatcgctttttcttttttatattttgtcactcatgcgttcagggtagagctggatatatgcatcatagtactgaaagtagcattgttgtatactactggtacataccttaccactgacttatgactggatcctataagatcttgattgaagcagtggctagaaattgagtgtttgctcatttatattcttttgcctggttgatgttttttcctctcgtattttttccctatattacattttcttgtgaaatttggacgtcaataaaaa

SEQ ID NO: 21330 - DNA, 540 bp, Glycine max
  Clone ID: PAT_MRT3847_119266C.1
aaaaaaaaaaatttcctttttaaaaaacccttctaggggaatccttagattcatatccaaccgaaaactagtttacatatcatccaatatccaggggcaagatcccaagaagggcttgcaaagattttggggggcaggggaattaaaacaggggggactggatacaggagcataatcccaagacaattcccatagatctcaacttttttggtcccacaataggggtagccagatttaaagaggaaaaccggtttctgatccaaggagaaataaacaaagggggtgggttcatgggtcacatatgagccaaaattacgtccaacgatacaatgccccggggggccatgccttttatcgaactccttttttatctggtccgaaacggttttctccacattggacttttcaaacgcggggacggggatatcaacggcccccttttggatgggggggatcatatcagcgctcttgaggaagacctttttggggggaacaggtggccccggggccggttttgggtcatcggagtggggcctcccc

SEQ ID NO: 21331 - DNA, 449 bp, Glycine max
  Clone ID: PAT_MRT3847_119267C.1
cagacgacaaagtgcagcattgctttgcttcgttgttgatccattttggagagagaaacactttcaactctctctctctctctctaagatggtcgacgatccaatgctcaggtcgtcgcttcccgcacctcgagtcgctcaagccgcaatgttcagcttgattcccgaggattggggcgaacatgttagtccctgggtcaaagagatttctcagtacttcgattgcctcaagagcctccacttccgccgcatgattgtcaaggattccgatcttcagaatctcgctcgtgaccgtggtcacgtgcttcatgctctcaagcttgacaagtgcttcagtttcaccactgatggtcttttccatatcggtcgcttttgcaatgataagctgggtttaagccttgaactagattcctttgctacgggagtgatgatatcaacaacagatcttg

SEQ ID NO: 21332 - DNA, 789 bp, Glycine max
  Clone ID: PAT_MRT3847_119268C.1
ccgctcagcggcgggcgggctttcctgtgtccttttggagagagaaacactttcaactctctctctctctctctaagatggtcgacgatccaatgctcaggtcgtcgcttcccgcacctcgagtcgctcaagccgcaatgttcagcttgattcccgaggattggggcgaacatgttagtccctgggtcaaagagatttctcagtacttcgattgcctcaagagcctccacttccgccgcatgattgtcaaggattccgatcttcagaatctcgctcgtgaccgtggtcacgtgcttcatgctctcaagcttgacaagtgcttcagtttcaccactgatggtcttttccacatcggtcgcttttgcaaaccaatgaactttatcagttggcatcagtggcattctgcctacttgttgcttggtgataagctgggtttaagccttgaactagattcctttgctacgggagtgatgatatcaacaacagatcttggtcaacatacactggaacaagttgagccaattcgcaacttttttgctgctctgttcttggccagcattgggatgcttatacatgtccatttcctttggaatcatgttgacattttactagcagttgttatattggtgatcattataaaaacaattgtaactatatctgttgtcaaggggtttggatacaacaacaagacttcacttcttgttatccacatgcgtaggttgggatgtcactggctcaaattaaggaatttgcctttgttcttctcatcgtgcttcaatattcatttag

SEQ ID NO: 21333 - DNA, 788 bp, Glycine max
  Clone ID: PAT_MRT3847_119269C.1
tacttgtgtgccatggctccttaagcttatgatcagctgatcctctcagaccaatgaactttatcaattggcatcagtggcattctgcctacttgttgcttggtgtagcgataagctgggtttaagccttgaactaggttcctttgctgcgggagtgatgatatcaacaacagatcttggtcaacatacacttgaacaagtcgagccaattcgcaacttttttgctgctctgttcttggccagcattgggatgcttatacatgtccatttcctttggaatcatgttgacattttactagcagttgttatattggtgatcattataaaaacaattgtagctacatctgttgtcaaggggtttggatacaataacaagacttcacttcttgtaagatttgacaacagttattacaattacatctgcttgttgattacatcatacatttcattgacggaggagccttaggttattccacatgcgtaggttgggatgtcactggctcaaattaaggaatttgcctttgttcttctcaatcgtgcttcaaatattcatttagttaaggtatgtgcttcatttcgagacaaacattttagctactttgttgtgcatatgcttatgaagacagtgaaatttatctttctgtattttaggaaacaattttaacacaaaaatggatacatatttaggtgtcgtagctcgagaaaagtaatattaatacaaaaatgtaatattttaagacgatttttaatttgtttggcttgtcccatcaatattaacatttaataat

SEQ ID NO: 21334 - DNA, 184 bp, Glycine max
  Clone ID: PAT_MRT3847_11926C.1
attgagtccctgatcgtggtcaatcacgcgctcttcaccaccatctacaactcgctgccctaaggagagggaacaaaggccacgcctctgtggctacctgaaaaacactagtatgaggccatatgtcaactctcctgcttccagaagggtcgctagcaattgtcgcggtaccgtcccaacttgc

SEQ ID NO: 21335 - DNA, 535 bp, Glycine max
  unsure (1)..(535): unsure at all n locations
  Clone ID: PAT_MRT3847_119270C.1
ttttttgatatatttgaaagattggattgattgcaaaaattagatgctcctttggctccaagcagaatcgttatgggacgaaacggctttggtttgattattttttaaaagccacattttttggattgtgaatttacaaaaatgttgaatttttttaatgaatgttttattactatgnggattattcattttattcggtgaaaaaacatattttaattgctattggttatgttatgaaaaatgttttgttaatcctataatgatgttttcttttgggtatatatgtatacattaaaatatccttccctatttgatgattttggaaacgtttgataacttatcaaaaatattaaaaaaaattaaaatactttcaaaatattgaaattttaacgaaatgnacaaaaccacattagttgaattaaataaactatacttgaattttttgtaaaaacccaattttttaaaaaaaaaaaaattttaaaaaataacnaaaattttaaagcttttaaaatattttaaagcctttttttttttt

SEQ ID NO: 21336 - DNA, 218 bp, Glycine max
  unsure (1)..(218): unsure at all n locations
  Clone ID: PAT_MRT3847_119271C.1
gtagaagtngatgntagaggtgttcacaatctttncaagcagcttgttncnctctggacatgcntttggtgcaaaacgtttggttgcaacctnagatcgacaatgtgnaagnctcgctattgccatggcatcaaacattcccacngtaggtgttngcgtgataanangccanngacgggananagnncntgttgaggntgnctnganagagtggtgat

SEQ ID NO: 21337 - DNA, 402 bp, Glycine max
  Clone ID: PAT_MRT3847_119272C.1
gggaaagaaacttcaccctttttggcaaagtttacaaaaacctctaaaggaagctcaaacgaggcaaaataaaaaagttggctgcaacaagtttcgggggagggccccttttacaaatcccccggtgcaaaatcaaatttgaagccagaccctctttcgaaagaaaagcccacacttttaagcctcttgagaagatcaccattgttctttaggacaaccttctgcaaatacaggaagaaggaccctctgaacttgcaggctcgagtcttggtaaacagactttccttgaccaatcctaaatagttgacctctcccaaaaaaatgggggggcagaaaaagtgcactttcttcaccccagggattctcgcccagtaaattagaaccattttcctgcccattttt

SEQ ID NO: 21338 - DNA, 215 bp, Glycine max
  Clone ID: PAT_MRT3847_119273C.1
tatataatctttgcttctaaaaaaatcttttcttatattattttcatttttacaatccttcattttatttatttatggagcaccaactgtttatatcaataatcaaccatttagccgtataagagatcaacttacacaaccaatttttgaaggtgtttattatgcaaatggaagatatgttttttttaaatatacagataaaccagcacaagtaa

SEQ ID NO: 21339 - DNA, 466 bp, Glycine max
  unsure (1)..(466): unsure at all n locations
  Clone ID: PAT_MRT3847_119274C.1
tcggctcgaccttttttttttttatttcattcaatacacataccatgccgtgtaagacgatatggtcttcgtgttacttcagccaaaggggctgatgaagcccttaagctaaccatggccttaatcatgttaaccaggccgcaacaacgcaattacttgtctaagctttcccaccactatatgcattactgttgcttttgatgactgacatccactgatacaaggagataaaatttcggctttgcaaaaaggagccgtgatgcatgctattgcccattaaaccgagaactgcccaatgatgttgtccgcacaagacgaggagctctgagcccatgacgccatcttttgtnacaagagatggcgccaacaactatattggtggggtcaacgaccggcacctatggtctgaccgcgatagccttcgccctgcttattgctataatctacacttcggttcaaccttggt

SEQ ID NO: 21340 - DNA, 421 bp, Glycine max
  Clone ID: PAT_MRT3847_119275C.1
ggggggccatgggcggaggaataaaaaatgggacatacctacttcccttttttggaccaaataccccatttttaaacttttcaccctcaaaatcatttttaaatttatcattgggattaattggccctcctcaaacaaaagtttttgacccaggagtagtatctccttgaaatgactttacaaactcagcatacaggcgagcaggccaatcttcggctctttttttttttgcttcccccttttctttatgcttttggaacggggtttttttccgggggagggaaaacgaacttatccttgcataaaaaaacaaaaaatgggtgttgggctggaattgttgttcacaccttcctttcttttttccttccccggagtcgggggtaaaaacggaaggatgcccattaacaccggacccgtgggt

SEQ ID NO: 21341 - DNA, 468 bp, Glycine max
  Clone ID: PAT_MRT3847_119276C.1
ataaaacttctctcttcactttcttccacttcatcacaattctcgagagaaaagacacacaaaatcaatcaaggctttgaactatggccactcttcagagttggagaaaagcctacggtgccatcaaagacactaccaaagtcggtctcgctcatgtcaacagcgacttcgcggtatctcaattctcaatcttatttttattttcgttttcgttttcattttttttccgaaatatttctcgtgcgagtgatcggtttttcgcttttattataatattattaggagttggacgttgctgttgtcaaagccaccaaccacgtcgagcgtcctcccaaagacagacaccttcgaaaaatcttgttcgcaacttctgttgtacgggctagagctgatgttgcttactgcattcatgcaatcgcgcgtcgattggccaagacgcggactggacggtggcattgaaaacattga

SEQ ID NO: 21342 - DNA, 485 bp, Glycine max
  Clone ID: PAT_MRT3847_119277C.1
ggcttggaacctttgggctgatttatgtgcttgcatggtcgtgagaagatgatagacgggggggaccgccctcgcgcccctcaataagtaacggtcacgagactgcgggcgagctgaggaggacttacgatctgcccgacggatctaataaactgaggggtcccgagctggcctccgagtgataagggctgtacctctagtgaggaggaataggttaaagagaacgctcatacttagaaacgggagagggagaggccggagaaatagaagtaatcgctcgagaaggttaaggtctctatggataaagacgtcctcgtcgtcgtctacaagaaattcgaaggcgtctaaaaggatcgagcccactccctatataatttgctaaggctatcccgcgggaaacaagtacggagaacaaaatataccgatttcgagcgaatcccggctcccgcacagaccgcgccctccggccacccgcaaccctgcga

SEQ ID NO: 21343 - DNA, 455 bp, Glycine max
  Clone ID: PAT_MRT3847_119278C.1
gtaaaattaacaaaggcggttagaaccgaaaaacccaacccgaccggttgagcgtgactgtggcagtttttaattgcctggttaaccttaacctttaactttaacttctctttttctctttttttcatggtcttgtagcggaaccgttcttgctttttggagaacatgggcttcatcttctccgctgaacttaattacctcgtttatcgctacctttaagaattaggttttcacgccatgcttgctttttacttttggtttatgaagcttggtatttaacaaatggctccattttgattggaaatttgggtgccgttcaggttgcctctttgtttacaatttgtttcatgaaggggtctacagttacttttgaagatgtgaaggccaactttgagtaaatggttagccatttttctacttttttgcatttctttgatttaaccattcaactttaa

SEQ ID NO: 21344 - DNA, 161 bp, Glycine max
  Clone ID: PAT_MRT3847_119279C.1
gaccgtgaaaattacatttgtctttcctatcatattgggcgggactttgagacattgtgcttgtaaaaggacggtggtcaagcctggttgttacataactatggggcactgaggggcactggtactgtgcgacactggaggtataaaccggggatcattgt

SEQ ID NO: 21345 - DNA, 112 bp, Glycine max
  Clone ID: PAT_MRT3847_11927C.1
gagagttgaaaacatatagggaaatggtagcccattaacgatcaataagatcactttccttaatgatcgccaaacgatatttgtgctacccactctataaatcaatgttgat

SEQ ID NO: 21346 - DNA, 332 bp, Glycine max
  unsure (1)..(332): unsure at all n locations
  Clone ID: PAT_MRT3847_119280C.1
ccctccaaccctgccgaacgacggggggtgagtcccccggcttttntgcttngggtgcgagcgtttnagagaatggggatagccgcggtggggagcaatctnataaccggggggagcagtgagatncacttccctttntgcaagggggcgaacctagtcactaactttntgnggaccatctttctcctcnccctcctcggggggatctttccagtcttacctcngggcgtctgggccatgcgcatcgttgggttcntgnagctgggcggggtcatattgctttctgtgcaagctcatggtcctcaggtnaggccacccccatgcgatatcaa

SEQ ID NO: 21347 - DNA, 695 bp, Glycine max
  Clone ID: PAT_MRT3847_119281C.1
caacattattcctgcggttatctccccttcaggcccagcagtcttcaagccagatccctcttgtgtatccctgtcttgctgactggatttatctttcatcgattttaagtttcccccactttgttgacttgtttgaggactagttgccctatttagaattgactgttctgcatcaagtgtctttttggatgaccggttcttaagctcctcttctcggcgttgcctttccattcttccaagaccaggcgttgcatttgcagaagcagaaacaagatccacaagcacgcgatgtacctcatcaacacacaatcgtgatggctccttcgccagttcaagaacgcctttaattaaggatctcaaacctttctctggagagatcagataaggttgatatccatctgcttctaggacaatcctcttgacattgtttatgtcaaagtgtctgtcaataggaagttgcttgattctgttaggaaaattcccttcaaaactggcaacaactttccaaccattaccctcgcctccagtaagatgttgaagaaatttgtcctcaaattcacggcataactgcaaggctagagctcttgtaccttcgggaactactaaccatttgttcaccaaactttcactaactcttcctgaacaatttgagactttccctgaagaccagtgaggaaagttggaagcctaagctt

SEQ ID NO: 21348 - DNA, 363 bp, Glycine max
  Clone ID: PAT_MRT3847_119282C.1
atagtaaaatctccagtatggggaattctttcactctacaacagtgattagtgggctccgagggagagtttacaaaattggctaactctttgggggctccttcaaccttgcggataaaaacttgccaatctatgaattttgcctctctgagggattactcaaactggagggtaagacctttcccacaatcttgacttctcctttctaagagagaagatattggatcgcgaagtctataggctcccactcgagcgagccgttatagggtgactagctaatgattaagcctttagaaggaatgaatttggatggctaagtctacggcggcaaacttgagcgcgccggcgtagacttacccaatcc

SEQ ID NO: 21349 - DNA, 2289 bp, Glycine max
  Clone ID: PAT_MRT3847_119283C.1
ccgcaatcgtatgaggcttaagcttacaactctcctcactggtcttcagggaaagtctcaaattgttcaggaagagttagtgaagtttggtgaacaaatggttagtagttctgaaggtacaagagctctagccttgcagttgtgccgtgaatttgaggacaaatttcttcaacatcttactggaggcgagggtaatggttggaaagttgttgctagttttgaagggaattttcctaacagaatcaagcaacttcctattgacagacactttgacataaacaatgtcaagaggattgtccttgaagcagatggatatcaaccttatcttatctctccagagaaaggtttgagatccttaattaaaggcgttcttgaactggcaaaggagccatcacgactgtgtgttgatgaggtgcatcgtgtgcttgtggatcttgtttcttcttctgcaaatgcaacgcctggtcttggaaggtatcctccattcaagagagagattgtggcaattgcaagttcagccctagaggcatttaaaaatgaatccaaaaaaatggtggttgcactagttgatatggagcgtgcatttgttcctccccaacactttattcgtttagtacagaggcgaatggaaaggcaacgccgagaagaggagctaaagaaccggccatccaaaaaggcacttgatgcagaacagtcaattctaaatagggcaactagtcctcaaacaagtcaacaaagtggggggaacttaaaatcgatgaaagataaatccagtcagcaagacaaggatacacaagagggatctggcttgaagactgcagggcctgaaggggagataaccgcaggatatttgttgaaaaacaggcgaggtcccagtcgtggctgctgtcgattctgaaagtgcagttttgttaaaggctgagagtgtggcacctaaggtcgagtggagcgacatgtccgggggggttgcacgggcgaggggtggtcaagccacgagatttctgatgatgatgaagcctccacaaagagttccaaggataaaaagtcaaatggacctgattctggaaaagcatcaaaccttattttcaagattacaagcaaggtcccttacaagactgttatgaaagctcaaagtgcagttttgttaaaggctgagagtatggcagataaggttgagtggatcaacaagttaagaagtgttgcacaggctaaaggaggtcaagccattggtgaacctagttttcctatgcgacaaagcctttctgatggttctcttgatacgatggccagaaaacctgcagatccagaagaggagctcagatggatgtctcaagaagtgcgtggttatgttgaagctgttcttaacagcctcgctgcaaatgttccaaaagcagttgttctttgccaagtagagaaagccaaagaagacatgctcaaccagctatacagttccatcagcgctcaaagctctgcaaaaattgaggagctgctccaggaagaccacgatgtcaagaacaaaagggagagagttcagaaacagtcttcccttctttcaaaactcactaggcagcttggtgtccatgacaacagagcgtctgcagcatccaattggtctgaaaaagggagtgcagcagaaagcagcccaggaagctctggaccctcatcagttgatgattggaggtctgcatttgattctgctgccaatggtccaagcgacttgccgtctaggtatggttctggtggtcatagtagacgatacagtgacccatcccaaaatggtgatgtgagctcaggctcaaattccaacagtcgtcggacgccgactcggttgccccctgctcccccgcattctggttcaagatattaaatgacgccacatatggttttaatcaaaattatgcattcttgtcggatggacactttcagttttttctacttatatcgagactgtccctcctccttttagactttagtcggaatgttttagttttgtagataacgaaagtattgctatcgcattcatcttaaggtcatacgcagtatgcgtccaattttattcccttactgggtatgtgggggcattgttgggtgagatgattttgtgtcttcccaacattctttttctttacaaatgtaattgttttgtatgcaatgtgattatcagcatttacataaatgcgcattaatcgcgactgccttttgttttttctgctaccccattaaacactaaattgtttctggttagatatatgaacaagtttgcgattttaatggttagaattcaatatt

SEQ ID NO: 21350 - DNA, 797 bp, Glycine max
  unsure (1)..(797): unsure at all n locations
  Clone ID: PAT_MRT3847_119284C.1
ccggtccggnattcccggtcgaccccgcgtccgcccacgcgtccgcccacgcgtccgggtgaacctagttttcctatgcgacaaagcctttctgatggttctcttgatacgatggccagaaaacctgcagatccagaagaggagctcagatggatgtctcaagaagtgcgtggttatgttgaagctgttcttaacagcctcgctgcaaatgttccaaaagcagttgttctttgccaagtagagaaagccaaagaagacatgctcaaccagctatacagttccatcaggggatcaacacaaagacactttgggcatacaagtaggcaaagcttgtgaagttgcatagtgtatttggttggagcagtgtgcttgcatatttaatgatgttccttgcatcttcaacttgttcttggataggattatatttttggtgtctctgatgttttgcctatggctacttcaagggagttgccatttctgatatatagacagactgggcagatgtgctagtcttgattattttagcgctcaaagctctgcaaaaattgaggagctgctccaggaagaccacgatgtcaagaacaaaagggagagagttcagaaacagtcttcccttctttcaaaactcacttaggcagcttggtgtccatgacaacagagcgtctgcagcatccaattggtctgaaaaaggagtgcagcagaaagcagcccaggaagctctggaccctcatcagttgatgattgggaggtctgcatttgattctgctgccaatggtccaagcgacttgccgtctagg

SEQ ID NO: 21351 - DNA, 1340 bp, Glycine max
  Clone ID: PAT_MRT3847_119285C.1
cccacgcgtccggttcgttctctctctatctctattaagttgtaactctatttatcactcagatatttgagaaggctttaaaagatggtgcttttgggacttctcatggtgggatttctctctctgggttcatttgtttcagcttctggttatggttggatggatgctcatgcaaccttctatggagggggtgatgcctcaggcaccatgggtggagcatgtggatatgggaacttgtacagccagggctatggaacaaacactgctgctttgagcacagctttgttcaacaatggtttaagctgtggggcatgttttgagataaagtgtgttaacgaccaaaggtggtgccttccacgctcagttattgtcactgcaaccaatttctgtcccccaaacaatgcactccctaataatgcaggtggatggtgtaaccctccccttcaccactttgacctttttcaacctattttccaacacatttctcaatataaagctggaaaataacccgtgtgttaccgaagagtaccttaccgaaatagagagggcatctgattcaccagagacagggacgcatactttttcagaatcctaatttttcccgttgaaggtgattgtgatgtttgagcagtttccatctgcctagcatgtgaaaaaggcaaagataggaccattaactggcaggggtgcttgcaaagcaacgcctatctcaacggacaaagcctctccttcaaggtcaccactagcgacggacacaccgtggtctctaataatgttgcaccctcaagctggtcctttggccaaaccttcaatggccaccaattcatttaagaaaacaacatagacccttttacatttagtagctaaaaattgttgtatttgtgattatacttagtggtacaatagatgtgttggtatatagaagaaaaaattaagtaatatgatataggagttgagtcatggatggggcttattttaggatggtcctttttccttgtaatttgaattgtgttttgtgaggaattttgttctgcctagcatttgaaaaaggcagagatggtttaattagggggcaggggtggatgtttaaggtttaccacccgccaatttcgtttgttgtgtggttcgtgttatgttatccacaattggaaaatgaaaaaaaaaaagtgatattttctagcttagcgaatgagaatagaataggaaagagacaagcgtttttgcttctataggaagtcattaatgtcttgaacttcatgtagtttagtgagtgtaaaagtgaattgtatgacatgtaaggaataaaattactctcctcattagttccgaaaaagagaaaa

SEQ ID NO: 21352 - DNA, 941 bp, Glycine max
  Clone ID: PAT_MRT3847_119286C.1
gttcatgttccagtgattttgtgactaggaatatattccatttaccaagtgacccttttatcttgatacctaagtttgccactttgctttggtactccttttggttcaaacattatgattctttcttttttaaacttttactatttgataacgtacagggtcccttgccgaaagagagagggcatcagattcaccatcaacggtcactcatacttcaacctagtcctaatttccaacgttggaggtgcaggtgatgttcacgcagtttccatcaaaggatcaagaacaaattggcaaccaatgaccagaaactggggtcagaactggcaaagcaacgcctatctcaacggacaaagcctctccttcaaggtcaccactagcgacggacacaccgtggtctctaataatgttgcaccctcaagctggtcctttggccaaacctttaatggccaccaattcatttaagcaaacaacatagacccttttacatttaatagctaaaattatagtatttgttggtatatagaagaaaaattaagtaatatgatgatatataggagttgagtgatggaaggggcttattttaggatggtcctttttccttgtcatttgaattgtgttttgtgaggaattttgttctgcctagcatttgaaaaaggcagagatagtttaattagggggcaggggtggatgtttaaggtttacctaccacccgccaatttcgtttgttgtgtggttcgtggtgttatgttatgtcatccacaattggaatatgagaaaaaagtgatatttttctagcttagcgactgagaatagaataggaaagagacagaagcgtttttgcttctataggaagtcattttcttcaactttatgtaatttagtgagtgtaaaagtgagtgtatgacatgtaaggaataaaattacgctccttgttagtt

SEQ ID NO: 21353 - DNA, 334 bp, Glycine max
  Clone ID: PAT_MRT3847_119287C.1
gtggttgggctgagcgaaaatatgtattttagagattcatggcgtggacctgtggagagtaacgcgactgactgtgtgactgatgacaagcgggaccagaacctgcatgacgatgacagggcagcgctgtgccgtaccttgtgttagacgcagcagagctggctacttggccccggggagcagaataagaagaagtacgaacatcttgggtgcatgatagccagccgcaagatcttcaaggggaccctatgtacattacttttcgtacactttctggccggccttatagtgctaattgtgaacaccgttcactgctccagcacatacgcctcac

SEQ ID NO: 21354 - DNA, 574 bp, Glycine max
  Clone ID: PAT_MRT3847_119288C.1
aaacaaacaaaccctctttcttctctcttcactcttcgctcttcgtttctaaatctgcttccaccaatactccaacaccctttttgcaaatatcaactaattcctacctcgtgctccgcaaacttttcttcttttgcaaatgggtaactgtctgcgcacgtcggaaaagctgacggcggagatcgttccccacggcggcgccaccgtgtaccccgccgtgcgcctccacggctcccccaacagcattttcgccgcatacactcgcttcgcggtccttcacaacgccgttcccccggaccctgtcctcgccgccgcaccaccaccgcaggccccaacagcattttgtggcggaagatctgaggcggcggttcccgtggttttccacgtgggacacgacgtcgcgtcggggtcccgcgacgcgctgctccggtttatagacttgaaattccccgacctggcggaggaggagacggcgccaccctcccccgcggaaaaaggcagagggaaagaagaaacgttattggattgtgaaggtgacacggcctgaacataaaagatagactggcaacttgga

SEQ ID NO: 21355 - DNA, 493 bp, Glycine max
  unsure (1)..(493): unsure at all n locations
  Clone ID: PAT_MRT3847_119289C.1
agaggtggaagcagaagtaatgtcgataataaaacagtgccgacgcgcactgaagtttactaaattcatgagcagattcaagaagagttaccgaagcgaagaagagataaaaaagaaatacgagatattctcgcaaaacgctcaggtcatccactcccacaacaagaaccgcttagcctacactctctgtattaatcattttactaattaaacgtgaaagaagttcaaaacacacagactagacactagccaaaattactctaccactcttaacgacaaccacaagctgactaatactattcttgctcccacgaaagactgnaggaaagaagaaatagggagtaatagtaaacatcaaagcaggtgcggatcatactagacatgcangagaactagaactgtagaagcagcctatacacaagcatggaggaagagtatctctggtggtgagcagcaggtacaaaattatgctggcgagttgaacaactttagc

SEQ ID NO: 21356 - DNA, 541 bp, Glycine max
  Clone ID: PAT_MRT3847_11928C.1
cggcccgccttttttattgttttggtgggcaacaaacataatctattcctggaggagagagacatacaagaggaatggtgaatgcgattgtcacattgggaagagggagtcttgtgttctatcactgggcctaccgcaataatacgcttgtgtttgttatctcccatgacttaattgaacttatatgctccctcgccattctcaggcttctgattatccctatggggagtcctccttcatgtagatccactttaggggaagatatatcttgagaaagcgaccgctatcgtgccctggatgccccatcctaaagactgactcgagtccaccgatagggtggggcatcctgcgcacgaacggaggctgactctgaaggtaattctttcactcaatgtgttctacgctatcgtaagactccacttagggattacaaatacctataccggactatgctcgtatagtgactacatatacgtcgaaagctataaatacattgccttatttgcgagaactactgagactgtacaacaaaataccattt

SEQ ID NO: 21357 - DNA, 477 bp, Glycine max
  Clone ID: PAT_MRT3847_119290C.1
tttcagtgtgtcaaagtgagcattcgtattatcgttgcaagcttcatcatgtgactcactttcttcaaatggttgtaagcatctaaaacggcatgtcttgggccgtttcgccttgtaggttcatgtccattcctttcatctgcttcatcatccgcatcatgttctgcggtccacccatctgtgccaacatcttggggtccatgaccttggaaagctgctgcatcacagcgttcgggttacgggccatttgcttgcccagcgcgacgtcccccgtcttcatgaggccactttttcccatacggcttacaacagtcgcgaactgcttgtggcacttcagtaagaactccacctcataaagctggcagcccgagccacgcgcaactcgcatctgtcgcgattccgaaagcgaaacgacgccatcgagctcagcatccgtcatactgtccatcatgaagaggaaccgccgaagtcgtttcg

SEQ ID NO: 21358 - DNA, 257 bp, Glycine max
  unsure (1)..(257): unsure at all n locations
  Clone ID: PAT_MRT3847_119291C.1
ggaantgggtgtggagagatcgaagagcaaggntttnganggtngtnntgggntggatgtggtttcagaggcanagttaacggtgaagggttttncggggttnangaanaccaagctcntgtgcactgntggtcctgcttgcaactctatggaggatttgagnactnggctcttggaggcatgantgttgccaggctcaacatgtgccatgggaccagggagtggcaccgtgatgtgattaggaatatcaagattgc

SEQ ID NO: 21359 - DNA, 1242 bp, Glycine max
  unsure (1)..(1242): unsure at all n locations
  Clone ID: PAT_MRT3847_119292C.1
attcgttttcaatctctctctctctctctcgctcgctaccgcgaactcgatcggcatccatcggcacccacccgaggagaaacgcgattcccttttcccttcgcaactccttcttcaggattccaatttcatccctataagctttctttcttattttcattttagggtttctctcattattcctcttttcttatttcatcttcttcggtttcttttcgcacgcaaattctttcgttcttctcctttttccgtccttatcttatctccttttttcccttcccctttgaatcctcaggcctatcggttgttgacgagacaaaaaaaaaaagacaaaaaaagaagagagtagggatttcgatttgtaattttattttttgttctgtggatatattcgattctatttttcgtcctctgattatattctagctgttgtttttagggaaattattgtcaattgggttattcgcaagaaactctgtgaagtttttggtgcgtcgttttagtttgccatccgaaatcgagggttttcttgttagatctctgctagtgccacactttttttttaaatttttttttaggtttttatatttttttttccttttcatcttgtatccttctgttattctgagaaggaaaagaaaaaaaaaaaaaagcgtctcgataaaaattagggtttgtttattgatttagggttgtgtacatagataggtagatagatacatgcgatggcgttgaatttctcgcatcgaccgattttttctgaggataatttggtttcgccgatgaggatgggaattccagagaagagtgttgttgacaattgctttgattatgggagagagaggggtggtggtggtgcgaaccacgatgacattctcgatcttttgccttcggatcccttcggcatggacatcagcaccaccgtcacagccatcaccgggtggctcgaggatttggagattgttgattatggtgggtaccgaagggatgagcttggggcgagtgatggcaattaccagctttttgctgggttgaatttcatttggaacaatgctatgagattccatgcttcatgtgttgaggagaagagagggtttggcgagagctgttctgtgagaaatgatggggctgctgctgcatcgaacaattttgggtttggatctgttaataattatgatgaagtgtcgggtttgcctgctactagcgggtctggtgatgttgtgagacggngtggaggaggag

SEQ ID NO: 21360 - DNA, 270 bp, Glycine max
  unsure (1)..(270): unsure at all n locations
  Clone ID: PAT_MRT3847_119293C.1
aggacagcataccatagtaactaggtcattattnccgtagctattatttgggggccaaaataacataggtattnnnnattnnaagnnnccttttttnaaaanatnttttnccccttttaaagaaccccttttttttaaggggggaaaatggggaaaattgggggaaaaaaaaaaaaaaaggcccctatttnnncccccnnnnnnggggaaaaaattttcttgaaatatatattgcttgataggtgcctattcagtggaaaaatgtttccc

SEQ ID NO: 21361 - DNA, 468 bp, Glycine max
  Clone ID: PAT_MRT3847_119294C.1
gactcaaaaatattctgagtttgattacctgaaaatctacattagttaagaaagtgacacaaatatgaaaagaactacagagggaagaagaggtggagaaaatatatgtgcaaggcctcgccaaaatggaaaaaacaatctaaaagataaaccagaagataacctattctatgataaactaagagatataatatctgcatcagacagaaatctaagcaattatctcggacactctttttctaacattatctctatggttgactgaaatttattaaaaataataaattttggtgtattttacttctaaattaagatagagaatcattaaaccagaagtatgactcaccaaaattgattatttccaatgaatttcagccaataatagaatgagtgttagaaaggaagtgtcagcaagtgtgtccttaattaacattcttcttacgagaattattactttcaacacaatca

SEQ ID NO: 21362 - DNA, 2130 bp, Glycine max
  Clone ID: PAT_MRT3847_119295C.1
ctcaccggttgctagaatggaatttgccagactcaggcatcgtctttgaccatcctcttctctcttgctctggcaggattagagccatgtgcatgcatggctacctgaggaagattatctaggaagctggtttgcgccaaacactcccattcccactgcactgcgagagcttctaaagcctctccctgcaggagtcgaaatcgatgaactccctaagcaaattgatgatacacagtacccaaaaacattcttctataaagaagaccttcatccaggcaaaacaatgaaagtacaattcaccaagcgtccctatgcacaaccttatggtgtatatacatggttaacggatattaaagacacctctaaagaaggatatagttttgaagagatatgcatcaagaaagaagcgtttgagggagaagagaagttttgtgcaaaatccttgggaacagtaattggttttgccatttcaaagctgggaaagaacattcaagtactttcaagttcctttgtcaataagcaagagcaatacactgtggaaggagtgcagaatcttggagacaaagcagtgatgtgtcatgggctaaatttcagaactgcagtattttactgccataaagtccgtgaaacaacagctttcatggttccattggtggctggtgatggaaccaaaactcacgcacttgctgtttgccactcagatacttgtggaatgaatcatcacatgcttcatgaactcatgggagatgatcctggaactaaccctgttgccatttccttggaagcaaggccattttatgggtacccaatttatctatggacactgcctatcagactaacgttgttgtttaattagtccatgcatctgcatcttgggcaccataagattgtatataaaataaattatggtgtgttgtgtatgttgtgcaagacctggaacttcacctttctacgtacgtgtgctgttaggatgcagtgtgctttgatgatgctttgatgaatatgcagtgtgcttttttaagtcaaagcatcatcaaagcacactgcatcctaacagcacacgtacgtagaaaggtgaagttccaggtcttgcacaacatacacaacacaccataatttattttatatacaatcttatggtgcccaagatgcagatgcatggactaattaaacaacaacgttagtctgataggcagtgtccatagatatattgggtacccataaaatggccttgcttccaaggaaatggcaaacagggttagttccaggatcaactcccatgagttcatgaagcatgtgatgattcattccagaagtatctgagtggcatacagcaagtgcctgagttttggttccatcaccagccaccaatggaaccatgaaagctggtgtttcacggactttatggcagtaaaatactgcagttctgaaatttagcccatgacacatcactgctttgtctcaacgttcctttgtcaataagcaagaccaatacactgtggaaggagtgcagaatcttggagacaaagcagtgatgtgtcataggctaaatttcagaactgcagtattttactgccatgaagtccgtgaaacaacagctttcatggttccattggtggctggtgatggaaccaaaactcaggcacttgctatttgccactcaaatacttctggaatgaatcatcaaatgcttcatcaacttatgggagttgatcctggaactaaccctgtttgccatttccttggaagcaaggccattttatgggtacccaatttatctgtggacactgcctatcagaccaacattgttgcttaattagtccattctcatggtgctcaagatgcatggactaattaagcaccatgagaatgagattgtgtataaaataaattatcatgtgctgtgtgttgtgcaagtactaccttctctagctagattgctagagctagaatttcaacctacctatgtgtactgataagatctgcttccctacttaaagagagcatcatcctgtgatcagtgtgcttcgtattctctctctctatatatatatggtaaaaagtggttatctcgtgcctcgccttgagctatccatcactttttttttttatctatcactttcttatttt

SEQ ID NO: 21363 - DNA, 971 bp, Glycine max
  unsure (1)..(971): unsure at all n locations
  Clone ID: PAT_MRT3847_119296C.1
caatatctagtcataataaatgtcatcatccccgcaggagttgggatcacaaatctttcgctaacactcattaattgcaagaatggcacttcgttgcttggtgatgtccctttctgttctcttcactcttggtcttgcgagagaaagccatgccagagacgaagatttttggcatggctgtttggccaaacactcccattccaagttcattgcgagatcttctaaagcctggccctgcaagtgttgaaatcgatgatcaccctatgcaaattgaagaaacacagtacccgaaaaccttcttctataaagaagaccttcatccaggcaaaacaatgaaagtacaattcagcaagcctctctttccacaaccatggggtgttggtacatggttaaaggaaattaaagacactactaaagaaggatatagttttgaagagctatgcatcaagaaagaagccattgagggagaagagaagttttgtgcaaaatccttgggaacagtaattggttttgccatttcaaagctgggaaagaacattcaagtactttcaagttcctttgtcaataagcaagaccaatacactgtggaaggagtgcagaatcttggagacaaagcagtgatgtgtcataggctaaatttcagaactgcagtattttactgccatgaagtccgtgaaacaacagctttcatggttccattggtggctggtgatggaaccaaaactcaagcacttgctatttgccactcaaatacttctggaatgaatcatcaaatgcttcatcaacttatgggagttgatcctggaactaaccctgtttgccatttccttggaagcaaggccattttatgggtacccaatatatctgtggacactgcctatcagaccaacattattacttaattagtccatacatcttaancaccataagaataagattgtatataaaataaattatcatatactatatat

SEQ ID NO: 21364 - DNA, 461 bp, Glycine max
  Clone ID: PAT_MRT3847_119297C.1
cttagccataataaatgttcgacaagaatgactacaaaaaagagtcgaatgtcacaaactacacatggcgatgcattgacttttgagatgcaagtagagactgtacacggttcagccaatggtgcagtggaagacaatgttcaggcaacatcattgggacagtgaagaaattaggagcaaaaactgacatttacagggtctaagcagtttcttataagtgcataattttaacgtgctatttatgtttatttttctatttgttttggtgcaattattattgtatgatggatcctttttgcatgaaagatgtgttcaatgtaataccctgttgtggcaacatcatcgtttgcttaaatgtaaacagatttagtcacatttggttgccataaagtgactctaaaacgtgttgtagaattaacttttctcccatgagtctggtcccttcaaagttgttgtttgat

SEQ ID NO: 21365 - DNA, 2246 bp, Glycine max
  unsure (1)..(2246): unsure at all n locations
  Clone ID: PAT_MRT3847_119298C.1
cccacgcgtccgcccacgcgtccgcggcccacgcgtcccctcatcttcctctttttctcaacaaaaaggggttcaattctagctagttctattacatcgtccgcgaccatgaacatggcgatcgtgcttctgttcatggttttcgcagtttcatcagctttagacatgtcaataatatcacatgacaacgctcatgcggatagggccacgaggcgcaccgacgacgaggtgatgtcaatgttcgaggagtggctggtgaaacacgacaaggtgtacaacgcgctcggtgagaaggagaagaggtttcaaatcttcaagaacaatctgcgctttatcgatgaacgaaactctctgaaccgaacctacaagttgggactcaacgtgttcgctgatctcaccaatgcggagtacagagccatgtacctgcgaacctgggacgacggtccgaggttggacttggatacgccgccaagaaaccactacgtgccacgtgttggagataccatacccaaatccgttgattggaggaaggaaggtgctgttaccccagtcaaaaaccaaggagctacttgtaatagctgttgggcattcacagcagttggtgcggtggaatcactagtcaagataaaaacaggtgatctaatttcattatcagaacaagaggtggtggattgtactacatcctctagtagggggtgcggtggaggagatatacaacatggctatatctacatcagaaagaatggcatcagtctcgaaaaggattacccttaccgtggtgacgagggtaaatgtgactcaaataagaaaaatgctattgttactattgatggccacggatgggttcctacccaacttgaggaagccttgaaacagggcattgcaaatcagccagtggccgtacctattccagcagacgactatgaatttcaatattatacatcaggtgtattcaaagggaaatgcggtacagaattaaatcatgctctcctgcttgtggggtatggtacagaaaaagatggagattattggatagcaaagaattcatatagtgataaatggggagagaatggctatatcagaatacaaagaaaactgagcacttgtaaatttggaaacgggggttactatcccattataaaagtcaccgatcaacaagccaccaaatatgtgtgacaatggcatcggctagctgtgcccattgagcctttggaagtaattaataacaaggccaaaatttcaaggagactatctttgagctattttatctttatataagtattgtaatttctgttccctaaatcatctggttgctgcacgtgttggccccagattgagtatctgtttagtctatctacagtatctatctaaataaaggtgcgatggctctatgggcatcattataaatgcatactcattttgtttttaaaaaattaaataaaacaaaaaaaaaaaaaaaaaaaaaaatataaaaaaaaacccaaatgaggaagattattgggaagctgtttggccaaacactcccattcccactgcactgcgagagcttctaaagcctctccctgcatgtgttgaaatcgatgaactccctaagcaaattgatgatacacagtacccaaaaacattcttctataaagaagaccttcatccaggcaaaacaatgaaagtacaattcaccaagcgtccctatgcacaaccttatggtgtatatacatggttaacggatattaaagacacctctaaagaaggatatagttttgaagagatatgcatcaagaaagaagcgtttgagggagaagagaagttttgtgcaaaatccttgggaacagtaattggttttgccatttcaaagctgggaaagaacattcaagtactttcaagttcctttgtcaataagcaagagcaatacactgtggaaggagtgcagaatcttggagacaaagcagtgatgtgtcatgggctaaattacagaactgcagtattttactgccataaagtccgtgaaacaacagctttcatggttccattggtggctggtgatggaaccaaaactcaggcacttgctgtttgccactcagatacttctggaatgaatcatcacatgcttcatgaactcatgggagttgatcctggaactaacccctgtttgcatttcccttggagcaagggccattttatgggtacccaatttatctatgacactgcctatcagactaacgntgntgtttaattagtcatgcatctgc

SEQ ID NO: 21366 - DNA, 475 bp, Glycine max
  Clone ID: PAT_MRT3847_119299C.1
catcgtctagctatctcgatcgaactgtccaaggtcctgtcacttggttgtgtttcggtgtgtgttattgtttttgtgttgtttgtttgtgttctctgtgttggttgttcttctagtgttcggcttcttaattttgtttgttattctctttgttgttttaatgtgtttgtttgttctctttgtgttatatgtcttatgattgttgtttgtaatcattttattttgaatgccgttaattcgtttttcaacaaattagtggctgtcatcatgctcagggtcaatatccgtgtcgtcgtagccacaactttcacccagattttatatgtcagcatagtagtcagcgtgatagtaaaataggccttaacagtagtccaacgcaacaccacgtcacaagcaacagagaggtccgtgtcatgccgtatgatgggctcgaccccatgtggcacgtcaacactgggtggataacaggaaacaa

SEQ ID NO: 21367 - DNA, 641 bp, Glycine max
  unsure (1)..(641): unsure at all n locations
  Clone ID: PAT_MRT3847_11929C.1
attgtgagaattatgattttattccgatggtttcgtctcgtaacccttattttgggggctatataaattgagagtattggatggactgggggtggagtagactccatcatgttccattgcatgctttccatttatttaagaaatctaaacaatgatatatgataatatgatgatgttccatttgatttccctcttctttttttcccatccaatccagttgtagatttagtgtactttactagttgctagcatgttttcttggcactacttatgaaactaacttctggctcttcagtatgctggctgatgaacatgctaaatttattgttataatgtggcatcttttttttttctttttctttttcattgaggatgtgatggatgtcctgttgcaaaagactgttgatgatagacaccttgcgtatgctaaagtacaaataatgcttttggtacagctagaaatcagactctctctgtattatgcaggaatgctatctagcatggagaggagcttttgttatgtacccttggtctcttgttaagcgtgtaaaaaggtgctgggatagaataaaaacctggttgaccaataattntcctgaagcggaggccactctttgtaaaggtgcaactgaagctgacat

SEQ ID NO: 21368 - DNA, 416 bp, Glycine max
  Clone ID: PAT_MRT3847_1192C.1
ggctcgaggaggagagaagaaaagtcaaaaacattgtttaggatcatccacatactctcgacaccgtgagtgtgttaggccacatcaaggaggaggaacacaagggctagcaccaccatggtggcaaacacatagggcagcatcctggtgaacacagtactgcatacactggatagcattatgttggtgagcacacccctgatcaccatggaggatatgagctcatagaggggttgctagacgagaccaacgacctgatccacagcgaggatggtgccgccaccggcgacggcgagaagacagataataatatggagaacacccagcatgaacatggccattacatcagcacgatgcaatacagcgatcatgatattctccactgacggatcacctatataggtgataaagagtat

SEQ ID NO: 21369 - DNA, 530 bp, Glycine max
  Clone ID: PAT_MRT3847_119300C.1
gaccctgtaaatgtcagtttttgctcctaatttcttcactgtcccaatgatgttgcctgaacattgtcttccactgcaccattggctgaaccgtgtacagtctctacttgctagcaataaattattaccatgttaataacttgctcaatacacaaatttcaactcacctatgccaggtattgactaaatgctataaaaattatataagaaataaacagactaaaaaaaatatatttatacaatattgaaagaatctgtcttcactaaccatctcaaaagtcaatgcatcgccatgtgtagtttgggacattcgactcttttttgtagtcattcttggcgaacatttattatggctaagttcaccaaatttgcgacaacgggttgtttctcttgcttctgcttgatccaccattgcttgctgtaccacaaccctttgttctaacagcactaggatcttcaatgttttcgtcaatggtatcattttttttttttttgcacagcaaaaatctgatagtattaaaagataatca

SEQ ID NO: 21370 - DNA, 237 bp, Glycine max
  Clone ID: PAT_MRT3847_119301C.1
ctcataacccttttcttttttgtgacatcaaactcaaaccgcatatttaaccaactaaacctacccccccaaaaacaaaatcttcaaatacccttgaaacaggattggaacagacctacacctcacttaccactgtattactcataacactttattgcccatctttcacattttctccaaaatatgccccctgtgacttcatcactgcatctataaccaaagaaaataaggattttt

SEQ ID NO: 21371 - DNA, 542 bp, Glycine max
  unsure (1)..(542): unsure at all n locations
  Clone ID: PAT_MRT3847_119302C.1
gcacgaggcctcttcctcctcttcttgcgccnnncctacgcttcccttcccttttcacaaagattctaagagtggctccaattctgtttccatctttttattgagcgcaaagcatggtggagtactcaaaactgggtcaatgagcgttcttgcaacaaggagaagaacaaaaggtggtggtggtggtgatggtgatggtgatgatcgtaataagaagaaaactgggttttggtccaagttgcttcatcccaaaaccaaaagcaagagaatggatgagatcaaaggcactaagctggttcattctaggtctctaatagaaactagacatagctagtgatcgatgatcattttttcatctctaattaattagtgattctttctttcatttgttaatcccaccctttaattttttggtggattatatgttgttgagtattaattagttcatctttccaatttcctgtaagcgaaaaaggaaagaaaaatagagatcttgtattgcatgatatgctttgggtatatttttttgcatataaatgaac

SEQ ID NO: 21372 - DNA, 241 bp, Glycine max
  Clone ID: PAT_MRT3847_119303C.1
ctcattttaattctcaaatccaagcttgggagacagagacagtgaaagtgcattgacgccattgattctgagctcgatccgctgagagtattcgcaaagggcagcgtgtgggccgtgaagtgctgttactaccctatcgtaaggatgtcttcaaggctgctgtgtggactgctattggctccgtcgatatgggcatcgtcggttcctccgtcgaggtcatcatcataccctataataacat

SEQ ID NO: 21373 - DNA, 1581 bp, Glycine max
  Clone ID: PAT_MRT3847_119304C.1
tatacggctgcgagaagacgacagaaggggaaaacaagtagggaataacgtgtaggaaactacattggttttacgacacgacttgaatcacaaactaattttatctgaaatatctctttcatagaacggagaaagacacgatgcaggaagcgacgaaggtgataataatcggtgccggaacttctggtatcgccaccgccggttgcttaacgaagcaatcaataccttacataatgctcgagagagaagactgtttcgcttcgctgtggcagaaatacacctacgatcgtctccaccttcatttgaggaagcaagtttgcgagttaccgcacttaccgtttcccaagtcttaccctcactacgtgcctcggaagcagttcatagactacttgggaaactacgttaaccactttgagatcaagcctctgtaccagcgtgcagtggagttggtggagtatgatggatggaaagggatttggagagtgaaggctcagaatagaagatctggtgagcttgaggaatacgctggaaagtacctggtcgtggccagtggcgaaaccgccgagcctcgtctgcctcagattcaaggcttggagagtttcaatggaaaagtgattcactcaactgcctacaaaaacgggaacgagtttaagaataaacatgttctggttgtcggatctggcaattccggcatggagattgcgctagacttgtccaattttggtgccaaaccttccatcattgttcgcagcccggttcattttctttcgagggatatgatgtattatgcgtcgcttatgctgaattacttgtcgctgagtacggtggagaaggtgttggtgatggttagcaaggttgtgtatggagatctgagtgagtatgggataccgtatccgagtgaggggcctttcaccatgaagatgaagtatgccaagttcccaatcatcgatgtaggaactgtcaagaaaattaaatctcgagagatacaggtgttgccagctgaaataaagagtataagaggtaatgaagttttgttccaggatggcaaatcgtacacattcgactcaattgttttctgtacaggcttcaagagatcaactcaaaagtggcttaaggggggtgatgatcttctaaatgaggatggctttccaaaaaacagtttcccaaatcattggaaaggtcgaaatggtttgtattgtgttgggctgtcaagaaggggtttctttggagctaacatggatgcccaattagtagcaaatgatattgcctcgttaattcctcaagaagaaagagaaggaatttgtgtcatgtaatgatctattatctattattggttgcagaaacagtatgtacatgacactttcttcttttggggatatgaattaggtatgttgttttaaattacttgttgtgattctcgtaatgtgatattattatggtaagaaattcatatataattttgtttcaataataaattttttactattgtagaaacttacactttgaggctgaagatttactcatatcgatactgcaaaaactcattcaatttgaaagaatttgaggctgaagatttacttg

SEQ ID NO: 21374 - DNA, 976 bp, Glycine max
  Clone ID: PAT_MRT3847_119305C.1
cataaaagcaattgtctattgatatttgaagtgcccatccaaagtctaaaattctcaaccgtaacatgtttgcatgcatgcattcaagtagcacctatcaattctagcgcggcagagacagcagtggattcatctcattgaccatcaaaaagaaaataatagaatatactcatgaaatcaatcacgtcccaacaaaccaaagatgaagtacaagacaaaagttatggacaatgcatttatctctttttttcttttttcccctctcttttctaacaaatataaataactacttaatcagcttctacccttgatacttacttttcagtagctctatgaacaagtcattccaggtatctgtaattccaggtaaacaccagtgcatgcaatcatcgggttttttccctccagctgaagctgggtgcgcatcagccctgaactcgctcaagtgagtgatgtccaaaataatgaaactagaccccttaagagccttatagaggtgtttattcaccagtcgagtctccacatttgtcccattattcttctcagagaaaagttcctctacctgctctatcgacaaaggccgatccctttgacaggaaccaccctgatcccagtctcccccttcaaaatgcctgggtgactgagtacggaaaaatttgagagcacctagtcgtgctttttcctccatatatgggatcatgtgcttcaaaaccatatccaggccttgatctggacgtaatggagggattactggctgacccttgttgaagaaaagcataggggatttcacaggggcaaattttgaaggagcccaccaccagaaagcatgtgttaaaaattagaatattgtggaaacttagagcttgtgcccatggtggtgtctgggacatcaacatcaactctatatccttctctgaatccaagagtttccaggcacccacgtttatcagtagctgaccagctaccaaaacgagcg

SEQ ID NO: 21375 - DNA, 152 bp, Glycine max
  Clone ID: PAT_MRT3847_119306C.1
attctgttcttttttatctactaacgcatagaggaaccttagatatgtatagcataacacgatcaataaatcctttattcagactgacaggacagtgaattatctgtctgagccatagatttgcgaaacaaatgaacacacgattgtactgt

SEQ ID NO: 21376 - DNA, 325 bp, Glycine max
  Clone ID: PAT_MRT3847_119307C.1
gaaaaaataataggcctcccctccattttttccaatgggaaatcatgggactaacaaaacgaagtgggggacaatttcccctaaaagggacattttgcatagtttgagactttcagggccttaccaataataatttagaaaccaggaacccgcttggtggcccctttccacccctttatcaaaaaacagaaactccccttttttaacccttccgggggaagatttacccttacaaagaacttaaatcccatttttcaagggtttttaccggtgttcttttggaaaaaactgaaggtttacttggataatctgaggaaaactaacc

SEQ ID NO: 21377 - DNA, 299 bp, Glycine max
  Clone ID: PAT_MRT3847_119308C.1
ccactcgttcgtacaggtgttgaagacaactgttagttttacacacaggtgtggtgcatcagaggcccgggtttcatgcctacttgcactgcgataccatctcttactgaaacaccccatatggcacctcaaagctcacaacgtaacataccttacgatatctaaggtgacgtcaccttcactaagagggatgatatggacatcagctccgttcactcttgcttatgctaattccatatccatggactatcaacacagaccatacttgtatgctaaagctcttcgtgtttgcgatactt

SEQ ID NO: 21378 - DNA, 522 bp, Glycine max
  unsure (1)..(522): unsure at all n locations
  Clone ID: PAT_MRT3847_119309C.1
cagtttgtgactggcacatccaaggtgcctttggagggttttagcgctcttcaaggaatttcaggtgcccagaggtttcagatacataaggcatatgggagttctgatcacttaccttctgctcatacttgtttcaatcaattagatttgccagagtatccatctaaacaacatttggaagagaggttactgctggctcgagagcaaatgagggattcggatttgctttggttgagaagttttttaacctctcttccaaatgttttttagatggatactgcttgccattcatgaaccaaatgagggattcggatttggttgacaagtttttttttttttcttttttctttttgggggggttggggaggaaacaaactgtattacatttttaggttagaagctatttaaaagctttttactgggggttgacaagatttaacattatatcatgttaatatgttgtacagttctatatttgcaatgggaaatgccttcggcggtttttcaattnnnaaaaannna

SEQ ID NO: 21379 - DNA, 516 bp, Glycine max
  unsure (1)..(516): unsure at all n locations
  Clone ID: PAT_MRT3847_11930C.1
tttttttttttttttttttttttttttttttttttttttttttttttttttttttttnggacggacggggggacccaccaataaataccgggcccctaccggcgggccaaccatccttaaaaaaagggggataaaaaaaagggggaaaaaaggaaaaaaatagttcctgggggaaaaaaatagccgtccacaaacacacacaaaaaacaaaccggaagcaaaaaaaaaaaagccggggggggctaacaagggagcaaactaacataaattaagtggggctaactgaccgccttcaatccagaaaaaaaaccgggccagccggtttaataaatgaaccaacccccggggggaggggggtggcttattgatcgcccggcaggttttttttttttccaccgagagggacaagcaaccaattgacttccaccccaccggccctgaaagaaaagaataaagcgggcccccctggttggccccaccaagaaaaaaaaatgtttgatggggggtaacaacggg

SEQ ID NO: 21380 - DNA, 243 bp, Glycine max
  Clone ID: PAT_MRT3847_119310C.1
gaagacgacagaagggagataaatagttctttaaaacatccatactagtaaaaagttttgcaaaattactcattttgataaaaaaatatgaattaagagaaaaaaatgttaattagtcctcttaagaaactacaagagaacaaatatgcgtaaacttacattactaatgaatttttttacattctcctactatgtttacatcaaatatttgatatattgtaatttctgaataatactggttat

SEQ ID NO: 21381 - DNA, 437 bp, Glycine max
  Clone ID: PAT_MRT3847_119311C.1
cacccccatcacatgtggttgcaattacaaatggtgatgcccgtcttcttgaacttggggacaaacaagaactcaagcgtcatttttcattaggttctctctttctcgtttaattgaattccttccttcattttgtgttcttttttggtttatcattaatttccaattctaggttcttagcttgatcagggccatttgaattttcgccctctcgttttctgttttatcagtgctgactggcatcaccaattcaccaccctctacaacactgggttgaactacggtggccccgtttcaatgcaatatgggtggtttatggctttagctttcaccatgcttgttgcactctcaatggctgaaatttgttcttcaatccaactactggaggtctctattattggagtgccaaacttgctggccctagatgggcacccttt

SEQ ID NO: 21382 - DNA, 263 bp, Glycine max
  Clone ID: PAT_MRT3847_119312C.1
gcactgctatcaatgttttcttctttgcttgaagtttaaaaccagcaatactttttctatggttatttatttcctagtgttagtggctagtgttgacaatttgataaggttcttgtaaaattgatagaggtgaagagatgatatgaggggagagccgggtgattatggcttaaacaatttcatgatgccactcacgtttatggaaagttcttttaaagtaatatcaatatatggtgccaacctgttaaaagaaaaatgtggtt

SEQ ID NO: 21383 - DNA, 138 bp, Glycine max
  Clone ID: PAT_MRT3847_119313C.1
agctttatcatttccctgtaggcgatattgtcatctaactatagtactatatactatattgcatattgatcacttattgattgcatagtaatagaatggcatcacgtgggtatttctttgttgttctccatgccttag

SEQ ID NO: 21384 - DNA, 257 bp, Glycine max
  Clone ID: PAT_MRT3847_119314C.1
ttaatgatttcttgttccccgtttttttctttgggctatgagatagccatcgtccttgggacactcatacattgtgtacacttggggggcacaaccagggcaacccacagtgagcggcaaaagattgaggcattacgagccaactatatcattcctataattgaactacttacatgagaacactggcaactaacatctcaagtggaggcctgtagctaatcatcactaaacacgatcttgcaggcaagttgatttcc

SEQ ID NO: 21385 - DNA, 1853 bp, Glycine max
  unsure (1)..(1853): unsure at all n locations
  Clone ID: PAT_MRT3847_119315C.1
acctgattgcgattatagtgatgctgaccttgttgtcgagggaattccggttagtgttcatcgatgtattctggcctctaggagtaagtttttccatgaattattcaagagggagaaggagtcatcagaaaaagaagggaaattgaagtataacatgaatgatttgttgccttatggcaaggttggatatgaagccttcctcatattccttggctatgtatatactggtaaactcaagccctctccaatggaggtgtctacttgtgttgacaatgtttgtgctcatgatgcgtgtagacctgccattaactttgctgttgagttaatgtatgcctcttccatttttcaaataccagagttggtatcacttttccagagacgtctacttaactttataggaaaggcccttgtggaagatgtcatcccaatcctcactgttgctttccattgtcaatcaaatcaacttgtcaatcaatgtattgatagggtggccagatcagaccttgaccagatttcaattgaccaagagcttccgcatgaactctcacaaaaagttaaattgctccgccgcaaacctcagcaagatgttgaaaatgatgcttctgtagtggatgctttgtctctaaaaagaatcactagaatacacaaggcgttggactcagatgatgttgagcttgttaaacttcttttgaatgaatcagacattactttggatgaagccaatgctctccattatgctgcagcctactgtgaccccaaggttgtttctgaggtacttggtttgggactggctaatgtcaatcttcgaaattctagggggtacacagtgcttcacattgctgccatgcgtaaagagccttccattatagtatccctacttacgaaaggggcttgtgcatcagatttgacttttgatggtcagagtgctgttagtatttgtaggaggttgacaaggccaaaggattatcatgcaaaaacagagcaggggaaagaaacaaacaaagatcggatatgcatcgatgttcttgaaagagaaatgaggaggaatccaatggctggggatgcctgtatgtcttcccataccatggctgatgatctccacatgaaactactgtaccttgagaacagagtggcatttgcaagacttttcttcccttcagaagccaaactagccatggacattgcgcatgctgagacaacatctgagtttgctggtctttctgcgtcaaactcaaaaggttcaaatggaaacttaagggaggttgatctcaatgagactcctatagtgcaaaataaaagacttctttctagaatggaagcccttacgaaaacagtggagatggggcggcgctacttcccacattgctcggaagtgctggacaagttcatggaggatgacctgcctgacttgttttaccttgaaaagggtactcatgaagagcagagaatcaaaaggacgcgtttcatggagcttaaagatgacgtccacaaggctttcaacaaggacaaggccgagtttagccgctctgggatttcatcttcatcatcctcatcatccctcagagattctgttgtacattacaaggctaggaaagtgtaattttaaaaccatacatagtgtttttgattttgacatacatattatatatagtgcaaattttaaaggtgaagcccaccaactcatctgtaaaattctcgaagcaggaaagttgatgtaaacaacctgcgcatatatttttgaaaatgttttcatatgctttttggtggagaaatttacggtaatttttttttgaagataaatatataagatgtacctttaatctcccnnanaaaaaaaaaaaaaaaaaaaaaaa

SEQ ID NO: 21386 - DNA, 341 bp, Glycine max
  unsure (1)..(341): unsure at all n locations
  Clone ID: PAT_MRT3847_119316C.1
tcctctagattggccgctttgggtaatcttttttttttttttttttcgaccaagggaatgtcccatgtacgaaccaaaagcacccaaatggagtctatgaaccaaggattttgaagtccaccaaaccgcattgaaaggcgcagaagccaaaaaaaacttgccaatgccctccntaaaggggatggaaccaccagaacaccccttctggcgcaatcttccaccctgaacgggggggtgggtttatcacattcgtaccgttttgtcgtgagctcgcagccgtaccccaaagacgtttgagcgcaaagacactgacgcgagggacgacccggaaatttcggacc

SEQ ID NO: 21387 - DNA, 544 bp, Glycine max
  Clone ID: PAT_MRT3847_119317C.1
agtaaaagacttttttctaaaatggaagcccttatgaaagtcgtggagatggggcggcgctacttcccgcattgctcggaagtgttggataagttcatggaggatgacttgcctgacttgttttaccttgaaaagggtactaatgaagagcagagaatcaaaaggacacgtttcatggagcttaaagatgacgtccacaaggctttcaacatggacaaggccgagtttagccgctctgggatttcatcttcatcatcctcatcatccctaagagattctgttgtacattacaaggctaggaaagtgtaataataaaagcatacatagcgttttttattttgacatacatattatatatagtgcaaatttgaaaggtgaagcctaccaactcatctgtaaaattgtgaaagcaggaaagttgatgttatagtaccttttgtaatcaacttgctcatgtattttgaaaatattttcatatgtttggtggagaaatttacggcattttttttgaagataaatatatagtatctacctttaatctccc

SEQ ID NO: 21388 - DNA, 380 bp, Glycine max
  unsure (1)..(380): unsure at all n locations
  Clone ID: PAT_MRT3847_119318C.1
gaggaccggccgaactccgggcgacccacgcgnccggcaccangcaagcacaggacaagggggaaaatagacaagacgggggagcccaaaacgaacannngaaaagagnacnggcacgcgacgacccggacaaggccagangccgacaacagggagaaggccgcagaccaagcccaccccggaagagaccccacaagcagccggggaccaacngcgccgggacagagagaaaaccaggccaaaaaacaaccccgcagaaccgcccccccgcaaacaggacaccgaaaccggccaacaccaacccgagcgggcaccaaacaagggccgagancagcgacaaccaaagcacaccaccgaaggaaaccacggcagaaagcaag

SEQ ID NO: 21389 - DNA, 907 bp, Glycine max
  Clone ID: PAT_MRT3847_119319C.1
tcctggtgctattgtggctgcggttcttgggatcattattgacatgcctgttatatcagttgttgccatatttaaaggccctgacatgcttttcaaagggtggaagcgtttgtttcatgatctcatgggtcgtgaaggccctttcttggagacaatatgtgtgccttttgctggccttgctattgttctgtggccactggctgttgttggggcagttctggcatctgtgttagccagtttcgttcttggtggatatcgaggccttgggaagcaggatccttctttcatgtcaagaatatcattgctgtattcatcataaagggacacagctgcaacaatgtaccccaggcctcgatatcgaaaaattactgaattgaaattgtcaaggacaccttctcgttcaatttccctcccaaaaacaaagtccttaacaaagacactttctcatgcatattcactgaaagataatatacccgagttcaaaccatttgagctgttggatggcttgttcaaggaatgtcatcagcttggagaatcactggtttctgaaggggtgataacacatgaagacatacaagaagcaaagtcaggtaaagggagtagagtcattagaattggtttgccagcatattgccttctccaagtactcttgcgttctgcaaaacccatgcatcctcactgattgataagtgaagatactgaactaactacctcaaacaaaccgacttgacaattttttgaatggtttcttaatccccttttgtttctgaaagaacaaatcaacattgaaaatcacaagaagcaaggagaggtttagggtggagaattattacacttggatggccagcatattgccatcaaaaaatcatcttgtggcgcgcaaaacccatctgaccgtcgacgtgct

SEQ ID NO: 21390 - DNA, 339 bp, Glycine max
  Clone ID: PAT_MRT3847_11931C.1
ttgattaaaaaaaatctgagcatcattggccttattaatcggctataaagtttgcaatatatgtaccccaaaattgttcaaatagatgataaattataatccattttctacatagcctatctgaggccacaacccatagctaccttgtcaattcaatgcatcattcgacccgaaataatgaactaagcagcccagcataatttaaattggaggaggtgaaaatgtagattcgactgaagtgaaatggctaagcttgatctgtattcgaccaaatgaccatgatatccctgtctgtttcataacccatgtgtaatttttgtaccgtgagcaataacgcct

SEQ ID NO: 21391 - DNA, 380 bp, Glycine max
  Clone ID: PAT_MRT3847_119320C.1
ttttccgtttatatcttccactttctccgtatgcctctgtttcatctctgtttttccctcattatcatacataaaaaaggggggactaattccatttgtgtacacaagctttagtgcatcgcatgattgggacacaagggcctatcttttcatggttttgtgagtcaccttctttctcatacatgaaacttccctgggactcgggtcgggtatatacctctgcttcttctctgattgggtcatactatggtttttcagcttcttcaccattttctatgcttgcttcttatacaacccaaatcataggctcttccagtgtgcaatgcgccgcaccgttgcgtggatttaccaagagttccaacatgaactttttgactaac

SEQ ID NO: 21392 - DNA, 642 bp, Glycine max
  Clone ID: PAT_MRT3847_119321C.1
ctgcgatatcttcctggtgctattgtggctgcggttcttgggatcattattgacatgcctgttatatcagttgttgccatatttaaaggcccttacatgcttttcaaagggtggaagcgtttgtttcatgatctcatgggtcgtgaaggccctttcttggagacaatatgtgtgccttttgctggccttgctattgttctgtggccactggctgttgttgggccagttctggcatctgtgtaagccagttccgttcttggtggatatgcacattttattacttatcaggaatcctctttcgtgtttggcctggggtagctggttgcagctgtgtccctgtattgtcatcagcttgatgatttacttgacattgaaggggtgataacacatgccaagagctcggaagcaaagtcaggttgagggagtagtgtcattagaattggttttgccagcattattgccttctccaagtactcttgcgttctgcaaaagccaattcccctggtatattgataagtaagtgatcacttgttgcagaactagttgtaatttccttcttccctctaattattatatagaataaataataggtttaaatatgtttatgatccctaatatattaaaacttttatattaagtgaa

SEQ ID NO: 21393 - DNA, 269 bp, Glycine max
  unsure (1)..(269): unsure at all n locations
  Clone ID: PAT_MRT3847_119322C.1
ttcattaataattgaactttgaaatcttacatatccgggcncctgttggagacataaaatccttacacactttacattactttacagttaggcgggtaacaaaaaaggggaacaaactccggggtactatataatgcgaaatgtggggttcgtctcgaaccgacgatggcaacacttgtcaaatgaaacggggaatacaaaccaaaccacgcgaaaccacacaggagatgaatcatcacgctggaatgtgaccccacggggaatgttcc

SEQ ID NO: 21394 - DNA, 430 bp, Glycine max
  Clone ID: PAT_MRT3847_119323C.1
ctaagactgcgtcccataaagtagagaggtattgaacaacgagcattatccactacggcgggatcagagatatagactgtcttgtaaggccactcctcaaagatttctggaatatcccgagcttgatctgatccatgacaaggctaataacggttaaaacgcgattgttgatactgcaaagcttattgctgaatcagtctcacatgcactaatctgacagaactacgtccatataagcttaggcttcgctgactatcgtcgtactgtgaatgaatcactctgaatatgtacacgcgcaataccttggtcacgttactatgatacgtggcatacggtagaccttaatatcttgtctccactgctcgaaaattctatctatggctttacaacgcgatgactagcttggatgcttcaaggaaaactttgcata

SEQ ID NO: 21395 - DNA, 543 bp, Glycine max
  unsure (1)..(543): unsure at all n locations
  Clone ID: PAT_MRT3847_119324C.1
tctgaattacttaataattatttatagaacattcacgtgatcagcctggagagcgagggtttagcatcgcttgcgctgtatgaagcaacacagcaaacaacaggcaattcttcacttactcccttaaggaagatgaaagaaaagttaattatgtgacgaatggcatagttagcttgtcgagaaattcctatgattagctattgagctgttaattagatttgggacaagccgatgatcggttacggccatgtcaacggttcttcggaaaagcgcatctagaactggattctgtctctcttttgttttgactgatgaacaatgattggcttctggagccttagcaatgggatcgtcgatagatgggtaagtctattagcagaataagcatgantcagttgcactgatatctatcgaggtttattgagatcgcacatactctgtttttaaaaaaaagattgacagcctttctgcaccatagtagaatgtgttagagatgcctatcttttcaaacaattcgcggggatagtgtatgggtacaaaaag

SEQ ID NO: 21396 - DNA, 565 bp, Glycine max
  Clone ID: PAT_MRT3847_119325C.1
ctcagcaaaaatagatatatattaaagtgaaataataccagaggtactagagatacaactattgaaataagtgtatagctggttcgtgtgaatacacagacccaagctattacatgattataaagatagaccacccatccccacctagctaatgaaagcttcctgtaggtttgaggaccattgattgaaatgtacaatgaaatccttctccatagatttaatccacaaccagagtacaagtactgcattgtccagtactctactcccattaagcgtgtggttttggaacactattttatttctgtggttccaaatcgatcaagttaagacaatccaccaacattttcatcttgtaaggttctttactgagaaaattggactttgattcataataaagcttaaatacacgaccattacatacttgatcttatttaatgtcattagaatgtctagattgaggggtttcgggtacaggaaagagcaataaaacattgaaatatgtaattatatgactagtgtacaattgtgattttgatatcctattttacaagtttggttacttggg

SEQ ID NO: 21397 - DNA, 358 bp, Glycine max
  Clone ID: PAT_MRT3847_119326C.1
aatgacatttgataaccataaggtactctgtgacatgaacactgaagagaaaatcggagctgctggtaataacaatgataatggaaaagtgctatttaaagctaattcgtatgctggagcttgctaaagatgtaaaatggccgctgattgcatagaatatcattcctcctctggtgtggagtagacataagcagccaagaccttgtaagtcgcctgctatctgaacaatgctgcttgcacgtcgacgtttatcgactacaaacactcaaagacatcgtgtactatcgtgttctacctcgatagagcaaaactgtatgccatttatcaaatggccctttcatatgtggaggtgactaac

SEQ ID NO: 21398 - DNA, 493 bp, Glycine max
  Clone ID: PAT_MRT3847_119327C.1
ccacgcgtccggggtgcgatgatgggtagatatggtcaggggtgcttcgattctcaaacctgtgtgtatgaaaaaaatatttttttattaggagaaatttattccttaaatggatttccataccccataaattagtttctaaccctggatcaggggttatgctgggttcaagcaaccaaaaaagatgtcttatggtgtgatatgattgatagatagtcatgctgtttaagtatgtcatcagcggttcaatattcagtattactatgagccgggcaccagaaggaagtttcgttctttgttatctgttcagagacatctagcaggagaaacaggagactatgttgttgctaactcaatcatataaaaaaatgaaagcactgtaagctttaagagtgtcttttgcaagtttgtgtgcctttttggaaatgaaatctgtctgaatacccccagaaagaacttgaagagcagaaacattgaacatttttatgtttag

SEQ ID NO: 21399 - DNA, 485 bp, Glycine max
  Clone ID: PAT_MRT3847_119328C.1
aaagaacgtccaggacctagttaagggcgcatttctgcaaccgatctagcgatattctggcggcatgtacagctacatggaaggtgctcatgttggatgtgcgctcaaaggagggctacacgacgctgatgagggaaacaaacgctgctcacagactatcacggattgttcatccggatatatagaaccatgacttgtcaatagaatggtgctgtacttcgtagcaaagagacattgataaattgctgcctgcatcacagctccagaagcgatcataccatcaagtgtaaggattgcctgaagctacaaacccaatcctaacattgctctcgaatgaaccaaattctgaggcttgatacaccaattgacacattcatgttgatcttactaccatattgatgatacggtggacagtagcagactcttgatatgctgtctctgattctcatgaacatatggaacatctgcctgcccatatttgtata

SEQ ID NO: 21400 - DNA, 1761 bp, Glycine max
  Clone ID: PAT_MRT3847_119329C.1
attgttgttgtattagaattatgtgtagccaaagcataaagtaaaataaccgcagaatattctttgctctgttgcacagattatcccttccttccttccttcttatcatttctctcattaattttctcttctccaaaacaaccaccatttaatccctaaacctaatccttatactttaaacccttactcaccaaactgttcatagttttgtgatttttttttccactaaaaattgtgttatggagcttctgacggtggtggatgatttttttgtcacggcttccctggcgcttcttctcaccttcatcgtcttaaagctcgttgaggtcatcaacgacactcacgccataccaaaacgtcacgtcgtccaccgcgaaccggatcgtccggtttctcatgccgaacaacgcttcacggttcagcccgctccagccaagaccaaggtcggtttcgttagtccggttcaggaggaatttgccacgtgtgcagtaggaaccgaacacaagatagaaaaaaaggctgccgtcaaaccggttcgtcctcgtgggaaacggttcacggttcatcccgctcaaagcaagagtggcgtagaaacagaatgtaatagagaagagattgcagtcgaaccggaacgcaagatagaagaggactgtggtcgaaccggttccggttcagaccgaggtcactgttggtttaattagtccggttcaagatgacacgtgtgtaggaaccgcagagaagatagaagaggctactacggtagaatccgataaaaacgttgaagaggaaatcgctgagggcaatgaaggaacacaagagttggatgattctgcggagaagaggaacgtgaaaagcgttgaagaaatcagcgtagaaccttcaactgaaattgaagcttctgttacagatagcggcgtaaaagagaacttcgatgatgatgttgatgattgggaagggattgaaaggagcgagttggagtaggagttgatggccgctacgaaatttgttagtggcgtggaaaatcgtttgcggggtgctggacgcagtttgaggatgtagtcgtctgggcttcactaggttgccaccgaaccgcgctgaggggggcctcagctgattgctctcaagcacggcgcacgtgccaagtggaatgcttggcaaaaactggggaacatgaatccagaggttgcaatggagcagtatgtcagccttctttcggataaatttcccggatggatgaaagatacttctgctggaataggtgaacatgaaaccacaaggcctgaagtttctgagtctgctgcttctgatttgagcacaactttgtctaatcaacaacaaatgatcacaactgaaagggagcttgaacaagagtctgattccaaggaccgtagcccacttacagtgtcagatttggagaacagtgttaacaaatgatggcatctctctgctaatatcccgcgcaacgggacattctcctgcatttatttcgtcaaaaagaaagagtgattcaagtatataaggaagtacgagagattcttgggctgtttgttttctgctttgttccttaaattatttgttgatcatgatgtgttctattgttcttcaatatgctcaagttgttaatatattttttgtacataaataaatgtgtgtataggatcatatgcgcagccgaagattacgtacttatggttgttaaaaactaatttatcaatatcatgtcactcctgtggcatttcagaatgttaaaaaaaaaaaact

SEQ ID NO: 21401 - DNA, 557 bp, Glycine max
  Clone ID: PAT_MRT3847_11932C.1
gaataaagcttgaaattctcttggctacaggaggtccatcgatgaaacacaggatacatgatataatcacttccaccgactacaccctatgatccattcggaactccctagccggaagggcggaaagctctacaagatcgatcaccacctatacactgattggatgatccagtggctgtgcgcactaacaatttaccaacagtggtggacggaaccactggatgatagctccccatgaaactttgtcaattgccaaacctggaccacttaaggaaaaagctgttatgagagtcctttgatcgcacacctatatttatcacttgcagacggccaactcgtgatatgactggaacgcatcttaaaatgggataccacacacatgctgaaccactgaccaaacgaactcactgatcgttcaatctaagcctccaggttcctgcaaccttaatccaccgcctttccatggaatggaatggtatcaacccaggacgttgccccgaatgctcaaccctgaaatccttgaacactgaaggccatatcagagctctcaaacaata

SEQ ID NO: 21402 - DNA, 655 bp, Glycine max
  Clone ID: PAT_MRT3847_119330C.1
atgtacaaaaaatatattaacaacttgagcatattgaagaacaatagaacacatcatgatcaacaaataatttaaggaacaaagcagaaaacaaacagcccaagaatctctcgtacttccttatatacttgaatcactctttctttttgacgaaataaatgcaggagaatgtcccgttgcgcgggatattagcagagagatgccatcatttgttaacactgttctccaaatctgacactgtaagtgggctacggtccttggaatcagactcttgttcaagctccctttcagttgtgatcatttgttgttgattagacaaagttgtgctcaaatcagaagcagcagactcagaaacttcaggccttgtggtttcatgttcacctattccctgcgaaagggttttgcttcaattccattgccatgtgagttaagatattaaaacacaatatgcctcaacagcaaaaactcacagcagaagtatctttcatccatccgggaaatttatccgaaagaaggctgacatactgctccattgcaacctctggattcatgttccccagtttttgccaagcattccttgcacaacggaagcagtactggtcgatcactcatacaaagcagctctcaaccctgttattataactagcaatcaagc

SEQ ID NO: 21403 - DNA, 654 bp, Glycine max
  unsure (1)..(654): unsure at all n locations
  Clone ID: PAT_MRT3847_119331C.1
gtaacagccatggatagaaaacgttgacacttgtggaaattgaaagaacaaaagagcaagatcacacaaatttgaatacaaaaaggttcccttttttttgtggttttggtgctagcaaagagcaaagcaatgagcgtgaagaaaagggcattttcaattaacattgaagaggctgctgtggacttcttcaaccatctcttgcaggagaagcctaggattccagtatttgttcctttgattctgattgcttgggcaattgagagatgggtcttctctgcctccacttgggttcctcttgcacttgctgtctggactactatacagtacgggagataccaacgcaaactgctcgtggaggacttggataagaaatggaagcgaatcatactgaatgtttcgcccatcacaccattggagcactgtgagtggctgaataagttgttgacagaagtctggtccaactattttaatcccaagttttcaataaggatatctgctatagttgagaaacgtttaaagctccggaaaccaagacttctagaaagagttgaactgcaggagttttcactgggatcgtgccctcctagcttggctttgcagggatgcngtggtcaactattggtgatcagagatttctggcactgggttttgact

SEQ ID NO: 21404 - DNA, 282 bp, Glycine max
  unsure (1)..(282): unsure at all n locations
  Clone ID: PAT_MRT3847_119332C.1
gatcctctagagcggccgcttntntttttnnttttttntttttttgttgcttgattcataccctgaatccaattgacccttttggacactcctttctgacctggacctgttataagtgctgtcaccagcatctcctttgtagtctttgccatttctttgtctctgttggagactgggtgatctttccctgtatttgttgacctaatagcgaccctaacttcatcatatttcatcttcgctggactgatactctgaatctgattgagccatatgatgtctctc

SEQ ID NO: 21405 - DNA, 511 bp, Glycine max
  Clone ID: PAT_MRT3847_119333C.1
ggctcgagttccaaaattcctggtagatcccactctgcacaccttacgcatccctgcttttctgataaaaaaagattacaagagactctacgatttcttctacgagtcctccgggttcgcgcttgacgaagcggcgcgtttaggagttcccagagaagaagcgtgccacaaccttttattcgccacgtgctttaattccttcgggggaatgaagatattcttccccactattctgaaatgggttgggcgtgcgggggtgaaacttcacgctaggttggcggaggaagcgagggccgccgttaagtcaaacggcgggaaggggacgatggcgtcgatggaggaaatgccgtcgatgaagtcggtggtttacgaggcgtttcggatagagcggccagcgccgatgaaggacgggagggcgaagaaggagttggtgattgagagccacgagaatgcgttcgtggtgaaggaaggggagatgctgttcgggtttcagccgtgtgcgacaaaggat

SEQ ID NO: 21406 - DNA, 562 bp, Glycine max
  Clone ID: PAT_MRT3847_119334C.1
taaataattttagtatcctctcttcttttgtaagatgtcacccaccacaatttgatcatatgaaacttgtaaacggactcctttagggatgaaaatgcttgatgttgctccaaaattttccatgccatattaccatctactcttcctatctctgtcattgttagaattaattcagaaattgaaattcgtgagtagattgcatagacattagttagcttagcatggaaacttttcaggttaacaaatgatggcatctctctgctaatattccgcgcaagggaacattctcctgcatttatttcgtcaaaaagaagactgattcaagtatatataagtttgtttcgaagtacgagagattcttgggctgtttgttttatcctctgttccttaaattatttgttgatcagatgtgttctattgttcttcaatacgatcaagttgttaatatattttttgtacataaataaatgtgtataggatcatatgcgcagccgaagattacgtacttctggttgttaaaaactaatttatcaatatcatgtcatcctgtggcatttcagtt

SEQ ID NO: 21407 - DNA, 242 bp, Glycine max
  Clone ID: PAT_MRT3847_119335C.1
tcggctgaatcaaggtatgggggtgaatcaagggttgatgatttataaaaaagaaatggattgaagagggtagaggagggggatgtaaaagaccgccagggatggtggtaatggggtaagcttttgccattatagagagtgtatcagatgagctaagctatatctacaattagtttttcttcataatagtctattggaccgaggtttgcttgcaatcatatatactgagctcttggtatatg

SEQ ID NO: 21408 - DNA, 496 bp, Glycine max
  Clone ID: PAT_MRT3847_119336C.1
ggaatttttcaccaggcaatattccactagttttgacatcccgctcaatgaagcaaagtttctacttttgcagctatcttaagtttcatcatgcatgccaaggtacttgggagactaattatattatgctctctgcattgctaattaaatattttccctgctactcattgccttataagcttgtgataatcttcaattacaatttacagccattttgtattcttattgtgttgacctattgctatttccccttatccttgtgttagcttcgatttaaaccactccttattggtgttactattaaacatgactgaacactttgtactgactaaaattgtctcaagttttgctgtatctatcttttcattgttgaaattaaaccactcctcattggttattaaactagagtgcacactttgcaccaactaaaattactctcaaatattgcttctctctcttttgccactatttagtttgattttacgtcactgtgact

SEQ ID NO: 21409 - DNA, 408 bp, Glycine max
  Clone ID: PAT_MRT3847_119337C.1
ggcccaggcaaggctgcaagcatttatttcctggggacaaataaaagccatcctcggggtaagagggaaaccacaaatttttcttcctctttactaaattcaaaatttatcattccattaataacaaaaattgggcatttattaaaaaaaattcaaataaaaaagcaaccatgttacctccttcaaagggcaacctctttcttaaaataaaagcaccaaatgtcaacctaccaaattggagaccaatgggaaaacaagggcctataaaacccaggttcaacccattttggcgttcctgaccccttgaaacatttcattgccttccatccaatgaatacttgggcattatataaccctcccgggggttttttttattttggagcaacagtcatgcccccccacaattgc

SEQ ID NO: 21410 - DNA, 428 bp, Glycine max
  Clone ID: PAT_MRT3847_119338C.1
ggggttaccaggggcatggcaccggccctgcccgggacttttaagaattccaccaggctggggtttttgggtttaaagattttattttggtcaggaggaccactggccaaccaggccgtaccagaggcaaccttaaggagggttggttcccacccatgggaaaaattaattttaagggatccacaggatccttccactccaaaggcagtttcttccaaaccagcaccgggggagaacctgttagggcggggttccaccatggtggggatcatgggggcccaagggggcgacctcctcgggggccccagaggcgaaggcaggacctttaagcttcctaatcccctgtcctccattcagtggttccttaacctttaaccaatttagctggctcctatctatctttatgtaataggatgcgttcaaatagg

SEQ ID NO: 21411 - DNA, 321 bp, Glycine max
  unsure (1)..(321): unsure at all n locations
  Clone ID: PAT_MRT3847_119339C.1
ctgngtgggtgagggagaggcacaaaaccatcactgnncgagaaaaaggaggagcgaacttgaacccgattagagagtcggtgcagaacagagaggagaggacaacacacacaatcacagggttgagttgagttgagccgagagaaaagaaaaaataaatgtttttttgcaaaggagatggcgcctatcacagcttcgggctttgtttcttcaagaaattccacacttgcaccgtataaaaaatcatgggtcagatacccggtcaagagcatgggaagctccaggaaagcgggtaaccctactcaaatagaccgaaatgca

SEQ ID NO: 21412 - DNA, 276 bp, Glycine max
  unsure (1)..(276): unsure at all n locations
  Clone ID: PAT_MRT3847_11933C.1
ctttattttgatgtttccttaatgtgtaatttacttattataagcatgatcttttaaaaatatatttggcttttaaagtanaaaaaaaaaaaaaaaaaaagaaaaaaaaaaaaaaggggggccccccaaaaatgaaccccgtcaccccggaaataaatccgggccgggaacctgagggggaaccattttccccaaaagggagccgaataaaacttgggggaaaccagggcaaaaccttttcccggggaaaaatttttacccgcccaaattcccaaa

SEQ ID NO: 21413 - DNA, 594 bp, Glycine max
  Clone ID: PAT_MRT3847_119340C.1
gacgacagaaggggtcatggtgatttaaactatggatatttgaaggttgaggagagtgtggagaatgagacaagtagagggtattattcttctttgatgttgtaagaatgatagtgaagcaacacaattttttatcaaataaagtatacgaaatgaagaagacgacagaaggggtaatgggtgattgtgctgccggagaatggtgccacttaaaagatgcagacaaagatttgaggttctgctactgattttttgtaggtttggtaagctgaaaatatgtaactctctttggcaaaatatttatctattttttattaattctttcttaattatttaaattttgattagttcaattaataaattttatgcatgttcgatataattgagggccactcaaatataactatcatcttatgctcatacattttggttccaagggatagaacatataaataatgttagtacgtaaactataaaaaagaaaatgcatgtcatgagacggcttgatgttttatctgaaaccggggtgaatggagacttgtgggaagttttgtgccattggctcgtggtttccatgtttgctgcttggttttg

SEQ ID NO: 21414 - DNA, 287 bp, Glycine max
  Clone ID: PAT_MRT3847_119341C.1
cctcaaccgtctcggatgagatgatcgtgttcagggagcttaacaagcttgaagtccaaggggttacgggaataatgttcaagaaggcctttgaccaggttgaaggccaaggacatcaatcttcaagtgaccgagaagttcaaggagcgggtggtggacgaagctacaaccctagctatggtgcacgcccgctgaggcgagccatcatgaggctgctggaggacaccttgctgagaagatgctcgcagggagtaaggaggcgatctgcatatagatgtgatcgaggg

SEQ ID NO: 21415 - DNA, 461 bp, Glycine max
  unsure (1)..(461): unsure at all n locations
  Clone ID: PAT_MRT3847_119342C.1
aaattttaactaattagagatagtgtatttaaagggtgtgttcctagcacttctcaaagtctgttaggcttcaacaattagcagcctttaatttgtgtgaacctaaatatagatatttcatacatttgtgttactattaatctaataccttgaaatacaaagaaaaaagtaaatgtagaaactgaatcacataagaattcttgatcgtacgtacagtgtttgagtagacaataaactacttactaatgatgtgaatatagttattaagagcattgattcttttgctagctgcattgttaggggcttacttactgttgtacatttgactgcaggcacccatatggtcttctttgccttgaacatagttgaagcacttggattattgatgttgttcaaaccattccttgctgaanagaagaaaaggcactcagatcagttacactgatgcctatcagttttgc

SEQ ID NO: 21416 - DNA, 385 bp, Glycine max
  Clone ID: PAT_MRT3847_119343C.1
ttcttctgtgcatactcctctcagctcgagaacccgcgactccatatactctaccacggtcgtgaagtgctctgagatacccccacagagaactcccccgctttcgtactcgtatctatcgctctcttttgtgcatatgagcgcgggagctctccttctaccacactctccatcacaggcgcgcgtgctactctgttcttatgagagagatacacacactgtacttgtgtggctctaagatcaccaccacgcgctgcatctcgttgagcgcactctgtgtgtgcgcccatatatagccgcactgtctgagcacgatatatatgtactcccacaccggtatacacgtctggtcaccgctctctctcatctcgttatctcttctatt

SEQ ID NO: 21417 - DNA, 192 bp, Glycine max
  Clone ID: PAT_MRT3847_119344C.1
gagagagagaactagtctcgagttttttttttttttttttttttttttttagaaagaacatgaaaatataaaataaatataaaatgcaacttttccccaagatacagccaagttatgatggttggagttcaaatttctaaactagacatgatgtaacttttcaagcagactagttaagtaacttaaaaagta

SEQ ID NO: 21418 - DNA, 186 bp, Glycine max
  unsure (1)..(186): unsure at all n locations
  Clone ID: PAT_MRT3847_119345C.1
ggcgcgcgtncgtgagcgcggggttgggntccgggtgcacaccagatcccaatacangtgatagtgagtnnatacaagagcctaacccggntgccaatantcagcanctccanagctgtgtgantcctagtgctttgganttgantccatccnctccgccaatcaccaatgagattccanangata

SEQ ID NO: 21419 - DNA, 879 bp, Glycine max
  unsure (1)..(879): unsure at all n locations
  Clone ID: PAT_MRT3847_119346C.1
ttngcangcacgcgtacgtaagctcggaattcggctcgaggacagagcggccgaggcccaacaccttcatcatccgctgcctgcagtggaccacggtcattgagcgcaccttccatgtggaaacgcctgaggagcgggaagagtggaccaccgccattcagactgtggctgatggactcaaacggcaggaggaggagacgatggacttccggtcaggttcacccagtgacaactcaggtgctgaggagatggaggtggccctggccaagcccaagcaccgtgtgaccatgaacgagtttgagtacctgaagctactgggcaagggcacctttgggaaggtgatcctggtgaaggagaaggccacaggtcgctactatgccatgaagatcctcaagaaggaggtcatcgttgccaaggatgaggttgcccacacgcttactgagaaccgtgtcctgcagaactctaggcatcccttccttacagccctcaagtactcattccagacccacgaccgcctctgctttgtcatggagtacgccaatgggggcgagctcttcttccacctgtctcgtgagcgcgtgttttcagaggaccgggcccgcttctacggtgcggagattgtgtccgccctggactacttgcactccgagaagaacgtggtgtaccgggacctcaagctggagaacctcatgctggacaaggacgggcacatcaagataacggacttcgggctgtgcaaggagggtatcaaggacggtgccaccatgaagacgttctgcgggacacccgagtacctggcccctgaggtgctggaggacaacgactatggccgtgcagtggactggtgggggctgggcgtggtcatgtacgagatgatgt

SEQ ID NO: 21420 - DNA, 524 bp, Glycine max
  unsure (1)..(524): unsure at all n locations
  Clone ID: PAT_MRT3847_119347C.1
gaagctactcagagagagagatattgttttgtgctttctcaatggccaccgcaccggctccggctccggctccggctccggctccggtgaagtcgcagcctctgcacaactttgccctccccttcttgaaatgggngcgccagcggcaagaacaacaccaccaacgccgnccaccaccaccgcttccgccgtccctccgatcacgcctccgagcccgactcctccgaccccgactcccgcccccaccgcctcggatccagaaccgcgcgcaaccgattctcactccccctcaaaccaccaccgccgccgcctccaccacaaccaccgcacgacgacgacgccgacgactccgtgcagaagccgtggaagctacgcccccgcaaacccgcgctcctccccaacaagaccgccctcgagatcggcaccggaccttcccgaaaccaccaccaccaccaccatcacgccaccaacaacggagaattcctcgacggcggcgacaacaacccggcgccgaagtcgctccg

SEQ ID NO: 21421 - DNA, 408 bp, Glycine max
  Clone ID: PAT_MRT3847_119348C.1
gggccccctgaaacaagggaaattttttttttacaagctggaaactcctttaattacacgggcaaacttgggggctaagcatttactatatttgttttaacgggtttaaatctggggaggcaaaagaaaattttattttcctttttttgaaggtttgcccttttttaaaagctttacccctgacaaaagcttaaaaacatcctccattgatgggcgatcggaagacctgttttgggggcaaagaattccaacctcaaaaaccagtttaatttcatgcaaagaacttggaaaaagccctttattctcattataaaattttctcaaaaaaaccccccaagggttggtggggatgccggcccccgcatttggaaaccctccgccaggcacaattttcaaaaatatttcccc

SEQ ID NO: 21422 - DNA, 366 bp, Glycine max
  Clone ID: PAT_MRT3847_119349C.1
ccagcaagaaaatcatgagccctgtattagagactgaaaaggcaaaattgtaccaaagcacacctaacactggttttccttccaaatttgaccatcgcatattaaatagacagcgaaagaacagcaaacctagtaaaattgtcataaaaatttaacgcctttgctccctctgaatcctcaaaacaattaggagataaagacttcttaggttgcaccatcaaccaacatatgagctttttaatttaagtacaacttcaaggaccatctaatagacaaattcccatgacattcatgagtaaataactcttaaaaccctgaacaagctgcaacccaagataccagttataagattgcttaacagaaatc

SEQ ID NO: 21423 - DNA, 402 bp, Glycine max
  Clone ID: PAT_MRT3847_11934C.1
ggacaacctcataaaacaaatttttttcaagaagggacaacatgggcataagccagatgttccaattacaacatggggaacttttaacatgggaaacaagggagcctttttttcccttccttttcctacttaaggaagaaatttaagggaagggcaataacaatttcactcagttttgcatatgctaggcagagcaagcccaacatttcttgaaggaaaaacattttattcatagggccccccataaaagttaagtggaagaagctttttttccaagagttgaaaagcataccattgatcacaagtaatgcatgccgcagtttttgctttttatggagatgggggccaatacattcctggattttctatccctttataaaacccgaactgaagctcatttag

SEQ ID NO: 21424 - DNA, 1099 bp, Glycine max
  Clone ID: PAT_MRT3847_119350C.1
ggaaggcttgactgcggaagacattgaagcactgacgacggaagtggccattttgaagcagatgaatcacccgaatatcatgatcttgcatgacttcttctcggaagagaagtactattacctcgtcactgaattcatggctggtggggaacttttcgaccgcatcgttgaaaagtcttactacagcgagcgagaagcaagagatttggtcaagctgcttcttgaggctatcaagtactgccacgatgccgatattgttcaccgtgacttgaagccagaaaacctgctgctgacgagcaaggacgacgatgcgtctatcaagttggcggactttgggtttgcaaagaagatcgagttcaacggcgatggtctcgtgaccgcgtgcggcaccccaggttatgtcgctcctgaaatcttggaaggacaagcgtacggtaaaggcgtcgatatttggagtattggcgtcattacgtacatcctgctttgtgggtaccctcctttccatgatgacaaccacaacgctcttttcaagaagatcaagaagggtaaattccagttcgactcgccatactgggaccacgtatctgacgaagcgaaggacttgatcgccaagatgcttgtcgtgaacccagcggaaagagctaccgttggacagcttctcgagcaccgatgggtcactggcaccgaagtcgccactgtgcagctcacgagtgccttggaagagctgcgtcgtttcaacgctcgtcgcaagttcaaggctgccgtcagcacggtccaggccacgatcgcgctcaacaagaccttcagcaagagcaagtcgactacatctgatgaaggtgcttccgcgaatggcgatgaagtgctgtccgccgatggcgatgaagtgctgtccgccgatggcgtcgcgctgcaactggagaagagtgcgtgattccaccagtcgctgcagatccgagatgcaacgcgcgtggagatggcgagagaactatgaggtagcggccatgctgacgcagggagaaagcgcttcccagctccgcatccgacggcaccatcacaacagcagcattttgtctcgcaatatattgtatttacccattct

SEQ ID NO: 21425 - DNA, 455 bp, Glycine max
  Clone ID: PAT_MRT3847_119351C.1
ccaacgccccactaaaggaaaacacgctttctttaagaattttggttcaggggcgatggaggcagattgtgaaaaaaaaggtagctccggggcaagcagccccgctggtggggtcatcatagggggaaaaaaaagccttggggcatgcggaaaaaaaaatttttgtaatagacgcgcgggtaagagggcccgagggggggcataagatccgggggggctttaccggggcctataagaaagcaagagcaagggatttggcaggcccccccccgcttgaagacccgagagccaacttggaggcctacgggggacatggagttcaggtggggcccccacccccagtttctgaaaaagggggggagcttttataaacagatccttatggccccgatggattaaaaaaacattcccacgaggtagaaaacctaaaaagtgcccctgggaaaaaacggcag

SEQ ID NO: 21426 - DNA, 567 bp, Glycine max
  Clone ID: PAT_MRT3847_119352C.1
cctcgtgccgaaggattcagtgtgatgcttgtcacaagtggcgaaagcttgtagacaatagtatggctaattctagtgcagcatggttttgtagtatgaacactgaccctctgtatcaaagttgtagtgtccctgaacaacattttcataatatctgtaagataacacacttgccagggtttcatttgaaaggaacttgtggaggtgagaaacaaaatgtttcttttttcactagcgtgcttaaggagcactactccttgataaattctcagacaaagaaggccctgacgtggttggctaaaatttcaacagacaagcttgcaggaatggaaacaaatggcatcaggggtcctattttaaacatttgtactgcatctaatagacatttccacaaaatatttcaagcatttggcctcttaaagagagtagagaaaggtgtttgcaagtggtactaccctcaacatcttaacaatttgacttttgatgtggctgcccttggcatggctctccgtgaaccattagattttgttaggttatacttgtcaagagctaccctggtagttgttc

SEQ ID NO: 21427 - DNA, 321 bp, Glycine max
  Clone ID: PAT_MRT3847_119353C.1
gctcgccctttttttttagttttttttttttcaagcgggaccaaaggtgccggaactttgttttagacgaatgcacactttaactaattataatattggaacccggggatattattagcagaagcctattgtatagttacaacggcctttttagctctgtactcattagaaactgatgtaagagatagttccccttttgttccatcttacaccttattgcattggtcggcaacatccacaggaatataattgttctcgtgcagttttggcgtggcctacgatgcaagatggggagaaagctcctctgatacgaagagaaac

SEQ ID NO: 21428 - DNA, 538 bp, Glycine max
  Clone ID: PAT_MRT3847_119354C.1
gccacgcgtccgggacaattcggcaaggaagcctatagggccacacattggcttaccatctctgtgtctctcgtgggacacatcatgtcagactaaagtcactacaattgcatatctgacacatgcatacctactcaaaccctaaaataaaactgatatacgtcaccttttcgcgttgatacagaagtcaccaaattgtacagctattgctggtgcgatgagtcgcaactgtgtaacacggagcttgttgtattgaaaacggaccctgagaggtccatcatcagacccgatgtcagggacagtggggggcttcaccatgaagagatccggaactactgaggagaatacctgttacccggttgcatcagaaggccaagcagatgctccaggaactccatttgaatccagggctgacggaactctaactgaaagaagatggaacgcatgatcttgagcaagatgggcacttgcatgctgcataagtgctgaaacgaatacggagggggggtgtgcatcctccactcaaggggtaagtgtg

SEQ ID NO: 21429 - DNA, 223 bp, Glycine max
  Clone ID: PAT_MRT3847_119355C.1
ttcatcaccaaagcgttcaatccagacgcagggcgagatacgcactgacggtacctatacctgacgatgtgacatacgtatatcttctaactagccaggtccgtagtacctggtctgccgcggtagccctgatccgaagatcgtgaatcatgatgatcgtatgcagtagacgggtgcacatggagttcgctcctaaggccatctcgccagtagggcgtgctca

SEQ ID NO: 21430 - DNA, 601 bp, Glycine max
  Clone ID: PAT_MRT3847_119356C.1
gccactcagtttctctttcgtttttctttttcttttctccttttcttcttctttcacttatcctattagtatttccctcagtcggtttattcattctctctgtttttttccttccaccgactgctagttttcgtttacaccactaacttcaaggttggtagcattatcttctcctttaaattatactaatcttacttcccttaactttcgtttggtttttattcttccatttattgtattttacatcatgaagaagaggcttttgggcaagtcaaggttctttcttctttcctcggttcccttccctccaagggaagaacctctttagataccctttttgctctgagaacacatacgaccacactctcttccatttcatccataaagcttggactgcagtcaaagagtcaacgattcacaacatgtttccgaggggcagagggagtgacattggtggccatggcaacacaaacgtggctgaatgggaattacggccaggaggaatgctcgtgcagaaacgtaactcggatttgaatcaaaattctgcatctaaattcaccatcaaagtcaaagtgaagtatggctcatcctatcaccaaat

SEQ ID NO: 21431 - DNA, 554 bp, Glycine max
  unsure (1)..(554): unsure at all n locations
  Clone ID: PAT_MRT3847_119357C.1
gagcacatagatggctattcctgtgatagatttcagcactctcaatggagacaaaaggggtgaaaccatggcgcttttggatgaagcttgtcagaaatggggtttctttctggtaaagagaattagatttgcgttaattcctccttttaatcaattgttagtttagttggctttgttgtttaatacattacatgtgcagattgagaaccatgaaattgacaaaaacctgatggaaaaggtgaaggagctaattaatattcactatgaggagaacctgaaggaaggtttctaccagtccgagatagcaaagcccttggagaaaaaacagaacacccctgatatagattgggaaagtgcctttttcatttggccccgtcccncttccnncccccccccaaaccacccaatttcccaggggctttggttagtccactccacctgggtgacttttaatgtagaaaaatgctggccatatattttccgccttttttaaaccccccgtttactataggtttaaattattggaaaaaaaaataaaaaaccccttacctcaa

SEQ ID NO: 21432 - DNA, 493 bp, Glycine max
  Clone ID: PAT_MRT3847_119358C.1
agggggcccaaaatccgaggccttttttaggcttttttttcaaccccggtttaagaaaacccttcctatagggccttacattttttctccccttttaaaagaaaccaaaacctatgggtttatcccccaaagccttttggccgcaaattttttaaaaaacccccaaatgatttattttctttaggcgtgcctgccgaaaacattaattgggaatggggcccccaaagaaacttccttttaatactgggcaagatcccttttttttagggctgccccccaaaaaaaggcctacggaaaaaaagcttcttcccaaaccctttttgggggggcccccccccaggggtaatatgaaacccgggttccttttgataacgaggccccccagctgtatgaaaaataagaccacccttgccttcaaaaccggggccccgggggtttcccttttacaaaccgtttccagagccccggggtcggttttcaaaaaaaaggcccc

SEQ ID NO: 21433 - DNA, 235 bp, Glycine max
  Clone ID: PAT_MRT3847_119359C.1
caaccagccatggggatacaagaagcagaaagaggtgcactcgcaaaagcgtgaacaagcagtccatgcagaaacgggctcttcactgatggcatttgtagcacgctggggtgtcacgttcactgtccacatgtcgtcagttatatgcgtcctctcgctctcaaggaactcctcatcacacatagttgtggctagtggtggcatgaaggtcctcacagacaggcgttattgaatt

SEQ ID NO: 21434 - DNA, 341 bp, Glycine max
  unsure (1)..(341): unsure at all n locations
  Clone ID: PAT_MRT3847_11935C.1
atgcaattgaaggtgctaaggagagatacgagagagcaaaaacaaaaacaacaagtaaagcttccaaagagagaaacgtgaaggcaaatganggggctgaaggaggaagaagagaagcagaaagtggtgggggtgttcatcatgtggctaagtttgaagagaagaaaacttcagtggggaaagcataacccgagggaagaataagaaaggtattggaaaaaaattggaacaaagaaaaaaaccaaggaatttgtccagaagggaaattgaaggtaaaaaaaccaggaccattggaacctaattgaaaagaaaaatttgaaaccagaaaggtggtggtaagg

SEQ ID NO: 21435 - DNA, 111 bp, Glycine max
  Clone ID: PAT_MRT3847_119360C.1
ggtaatagtggacgcgtgcatgttgtaagtttaattttgtgcatacatacttcatgacaaaggactgcttttggttcacaataagacttgctaatcattacttctcatgta

SEQ ID NO: 21436 - DNA, 729 bp, Glycine max
  Clone ID: PAT_MRT3847_119361C.1
gcttacaccgtgtgaactagtagtattttaataacggaggcatgatcaggggaaaatttaaaaggtacgtggtgaaaaacgatattggtgccattaacatggcgaaaaaaaatctggaaattgaattttcctagtaccaacttgtatgtatgctgtgaactgaagttaccgaaaacagctttccgcatatatatccataaaatttgacaaccaaaatcaagggagaaaaaacagccaaaattcaaggtgacaaattgacaaaaaatacaaaccttaccagttgtttcttaattaccacacttacatataaattggtcccacaaattttatggaaatccaacacatactagacttttgaattaaccataacagggtggagcaagccatttttgcttgagggggctaaagaaagaaataaaatttgaggaagccaaacccaaagaaaaacattaaaaatcaattaagagttactagtaaggctttgaaaaatattataaataaacaaacagttttcttaaaaattatgaaaataaaataaaaatatgtatagtataaaagattttgttttccttttaagttagccaatactatcccatgaatataaaaggaaacgccctgaataatgagttcttccaatgcaagaactaaatcggggaaaattgaatagcagaataaatttaacaagaatttgtaactataatttaagaatgtgttataagaagatgaaaa

SEQ ID NO: 21437 - DNA, 710 bp, Glycine max
  unsure (1)..(710): unsure at all n locations
  Clone ID: PAT_MRT3847_119362C.1
ccacgcgtccgagattttattagcaatagggaaatggacttgctctcaattcctagtaatgcaggaagtctgagattagttcaatggcctttatttcttctaagcagtaagatcctgttggcgattgatttggctttggactgcaaagatactcagactgatctgtggaacaggatatgtagggatgagtatatggcctatgcagttaaggaatgctattacagtgttgaaaaaatattatattcattagttgacaacgaaggaagactttgggtggagagaatttttcgtgagatcaataacagtattatagagggttcgcttgttataaccttgtctcttaagaagcttccagttgttttatcaagacttacggcattgaccggactcctgattcgaaatgatcctgaacttgctaaaggtgctgcaaaagctgtacatgacctgtatgaagttgttactcatgaactggtatcttcagatttaagggagaatcttgatacatggaaccttttagctagagctagggatgagggacgtcttttttctaggatagtatggcctaatgatcctgagattaaagagcttgtaaagaggttgcatcttcttcttactgtaaaggactctgctgctaatgttccaaaaaatcttgaagccagaagagaattagagtttttctcanattcattatttatggacatgccttcagc

SEQ ID NO: 21438 - DNA, 223 bp, Glycine max
  Clone ID: PAT_MRT3847_119363C.1
tacaggctgtgagaagatgacagagaggaaccatggggcgtggtgccagacgacgacagacagacacggttagtaaaccacgaccatagagggtcggtgcggcatcaactgcttgtaatcacctttctgctcttcttttttatacttgcctatcttgcctactgctgccttagattgactagatattggattacgtcacccaaaatggacttacttcgcgtgg

SEQ ID NO: 21439 - DNA, 363 bp, Glycine max
  Clone ID: PAT_MRT3847_119364C.1
aaaaaaacccaccctttacactttttttccacaattaaaagggggggggaaatttttaaatgggccgagcttaattaaaaagaggggcatgcctaatttccttttttgaattttcccaaccaaccagcgaaaaaaaacccaaattccaaatcatgccggggattcccccttttcaaaaaaactggcaccagccttgggaacaaaaaaagctggcataagagttttacccccaatttcaaaattttgagaaaatcccaagaaaatttaaaaaactttgaactgtttgggattgttaaaaaggaaactcaaatgccatgaagtttgttttgcccccttcaaactccacatttaaaaacctttttt

SEQ ID NO: 21440 - DNA, 752 bp, Glycine max
  unsure (1)..(752): unsure at all n locations
  Clone ID: PAT_MRT3847_119365C.1
gaattcggcaccaggttacacctaggccttgaccaattttagcatccttccaattatttaacctagtattttacacaagaaaattgttcaattatagtgttccatcatttccaataataataaatttctttcttatatctgttatttcagccctatgatgacgagatatcatccgggagagttcatttgaaagacggcacaccaaagaagttttaaaaggcttaaaaataggaataatattatttatcacatccgaagtgtttttttttctaagatttttttgagcgttttttcattcttctctatctccggatatttttattgggcaaatatgaccatgtcaaggtattaaaactttcaaccctatagccatccctttaataaatactttaatcctacttaggtcaggagtgtctgtaacggcttcacaccacttcataattctacgaataaaaaaaaaatccatcatttatctatatataactgtaattttaggaatttatttttctattcttcagtacatcgagtataaagaggcatcattctctatttcagattcagtttatggatcatgtttttttatagcaacaggattccacggattacatgtattaattggtacagtattcctagtagtttgtctaatacggataataaaaaaacatttttcatctaatcatcatttcggatttgaagctgcagcatgatattgacattttgttgacgtagttnnactattcttatacatnnnt

SEQ ID NO: 21441 - DNA, 278 bp, Glycine max
  Clone ID: PAT_MRT3847_119366C.1
atcgcacatactctcataatggttgatctaatgtcatataatataatacaatctgggttaggggttattatactcaacctcaacgttaaatgcatcacatgatgtgttcatgatcaactgcttgattgactcttgatacacatagattcctatactcaacttagatacacgctcacgacgatatttgttgtacgtcgaggtatctacattacatacctatgctcgagcttattatccgaacctaatttgaaaggaccgttaatgacatctcatttgat

SEQ ID NO: 21442 - DNA, 352 bp, Glycine max
  Clone ID: PAT_MRT3847_119367C.1
ggctcgagagtatgataccgatgttcgttcagtgtgcatagccctaacgtagacaaggtgatcattgctagcactcctgcggttctatgattgagcgataaccgttgagtgaatcatcgacaaaaatatcctatcctccactctgattcttttacagagtttaggagcccaaattcgctgaggctcccaggatggggggcgacataggtgacctctgtcctccatcgctcggatattgcgacgcactggcgtctctgctagtcaatcccatgacggctcggcgagcttctgagaacctgataagaagatgtttgtaatatttgtccgacatggggtctgagcaccttacgat

SEQ ID NO: 21443 - DNA, 322 bp, Glycine max
  Clone ID: PAT_MRT3847_119368C.1
ggaccaacgaattgatatatcatatccaaaacaaactcaatccctttaatatcacagttccagggtggggggagatttagggcggaggaacaaaactctaatataatggattttcactgctgaggaccactccgttccctcagttcccagttcccttctccctctaacttctccttcaactatctcaccttctgcatccacaagcgcaagctcatgtcctaggaccacacgcctcccttccccccctccttcttctccgcctacacccgcgacggtgcccttacctccaacgacgaccttgagagcatattcgcccgggggg

SEQ ID NO: 21444 - DNA, 1247 bp, Glycine max
  Clone ID: PAT_MRT3847_119369C.1
ccacgcgtcctctctctctctctctctctctgctcctccgtttctatttcccagtcatcatcatgttgggttgaatagtgtgagcgaggaacaggagaaacagtaatggggaaggtgtcgccgaaagagaagggttggaaggttaagggtcggaggcaggttcggagctccgggaacaagtacctcaggcccggagccctggctcagcttcggtgctccaagccttcaggttcgggtggtggaggtaagtgttgctgcaccgatctcggaaaaaagagagtggcgttttttcacaccagaaagagtggttgtggttgtggtggcggtggtggtggtggttctgcgcatgggtattatggggagaagaatattagggttttcgataagagtcctttgatgttgtcgccggtgaatttggtgaaacacaacggtggtttctttgggacccccaaaacccctcgcctcgacgattcgctatcggaatcgtcgaagcttgagtctctccccatggatttgttggttaaaattctatgccacctgcaccatgaccaactgagggctgtcttccatgtttctcaaaaaattagaaaagctgttataattgcaaggcagtttcacttcaattatactactccagatcgctctcggcaggagatgttaagtacaatgactcctcgtcctactgagcattggccttttttgtgcaagggtgatgggaagggagttaggattccaagcccacacacacctaaagcacctagacatggccctcgacctccttctcgcctaaaaatttcagagatgaggcaggttacagctgttcttttcccagagtcagcattcccttctcattgcttggtgccatcagttatatcaaagcccctatgcaaatccttggcttcgaatagagttctcttctatgaagatgaactatgtcaggcagttgctcagaataaactacgctgaagcaattgtcttcaaaattcctttttcttcactgcctcatagtcatgtttctctgctgtgtatattctctttcggtctctctagcaaatgttaggatagtaaaaatgcaattttgtagtctgtcttggggcagtttagctggtgtggatatttgatatgtctaaatagatgtggagggttggttatgttttctggtgcagtttagcttggcgtaataatattataatataatcattacttgtatatgttttgtatgcctggaacaattgagtttcctttat

SEQ ID NO: 21445 - DNA, 259 bp, Glycine max
  Clone ID: PAT_MRT3847_11936C.1
gaacagtatatttaccgattccctccacatataaagggggtgggtattactaggcccatattcttcgattacctatacaagcttccttactgaagctcgtagccactatagcctagctaaatgttctcacgctgtccaccaccaatggggatttttatcccaaagcaaatgacagttttttgtaggaatcttttattacccaacaaccggtttttggcaaaaaccttcatctatcgcctgccgctattttatttgcctg

SEQ ID NO: 21446 - DNA, 255 bp, Glycine max
  Clone ID: PAT_MRT3847_119370C.1
aggtatacctgcgagagtgaaatgagaaggtaaatttgtaagactcaaatacaagaaagcagttatgggaaaggtaggaattattgaaggattgattgataagggtgattggatgacttgtctcatcatggactatatatgtaagcactatattctaattgaaatcacaaaccatttttattagtaagaaggactattggaattaccatcaaacaccataaaatgagttttacatgcgcagatgtatggtgtgca

SEQ ID NO: 21447 - DNA, 634 bp, Glycine max
  Clone ID: PAT_MRT3847_119371C.1
ttttcgcatcagaaaaaaggttgaaatttaaataacacttcactgcatttgttcatgaaactctataacaaaatgttgctctatatattccatatgctgttcttttaactttaagtaacccttgtcaaaacctggtgaaaataaaatgtgcaacagtacctgtagctgcaacatatcactgccaacagacagaagggatgtctcaaaattggaagcatgtaaactaaaagcaacccccaacttcttagcagtcggatcttcatggttgtcagcttctgaaaaacatcattcatctctcctaaattaacccaacaccaaaccaaactttaaagttacatttttttactccccaaaatcaagggtgatttaaaattctaagctaggagacaaagacccattgatactgaaagttggtgcagtgaagacgcacaaaattgttgattcactttctcaatgaagctcaggatatgactgagggtcacttgttattttcccttttgaatgtggcttttttgggggataacaaggtgaagctgcgaggttttggtgtttgatgtccaaaaactttcctcaatggtgtgaattctgattcatcatcatcactgtcaatgttatcaggagtatgcctattctg

SEQ ID NO: 21448 - DNA, 432 bp, Glycine max
  Clone ID: PAT_MRT3847_119372C.1
gaacagctggagaatgggcagggcagtgcatttcaacggaaatatcaaaatttttagccacccctatttccttcctatgtcaaaccaactcacatgcggcggcaaccaaaaaaacctttaccgcccaccatgacaaagggaacacttctagaaggaaaaatccaggggggtataagccccagggaaagagggatcccttgggctcctcttttttaaggggaaacaacaggggggcattttttatagggaacaaaccctttcccacatgctttagggtccactctcaccttaagcttggattttgctgaggggacaatcgctttaaaggggccaacaaggtccaatttgcccttctccatggagaaggaaaggggttccccgcgaatggttagaggaatatttagccccaagcgtccccccccccgtccggaa

SEQ ID NO: 21449 - DNA, 669 bp, Glycine max
  unsure (1)..(669): unsure at all n locations
  Clone ID: PAT_MRT3847_119373C.1
cggaattcccgggtcgacccacgcgtccggttttaaattgtggtatgtaattaccaagattttaaattgttgtcacaatccttaatattgtagaatattacagacaaatgtagtagatgtagttgtgattgcggtcgcaatgtgatggcaaagatcccaaaaaccttgacattgtggccacaattgtggttgcttatggtttttcaaaacctttgcaattgttgatgtgatggattttggggtctactgaaaccacgcagtgaccataattgcagtcacattttgcctagaattttgctaactaccatgcaaccataacttaaaaccatgaatgcagtaatcttaattattgtccttgctgtcataattagttgtttggtggtctggtctgggttgacatcattgagtttttgcttttattgaatgcagggattgtgggaagcaggtctatttgggtggatttgacactgctcaagctgctgcaagagcatatgatagggctgcaataaagtttcgtggagtagaggctgatataaactntagtttaagtgattatgaggaggatntgaagcagatgagaggtttgagtaaggaagaagttgtgctcttacttcgtcgacaaatcaatggaagctcgagaagttcaacatacaaaggtgcattagcccc

SEQ ID NO: 21450 - DNA, 196 bp, Glycine max
  Clone ID: PAT_MRT3847_119374C.1
tgggttgaggctgctttggagatttttcttcccctttaagatgaacccgggcctaggtccaattttccaatgattcctaatccttttggaccaatccacttggggaagggctcttaatagaaggttaatagaattcttttcaaaattaaagaatcctttaaatcctaaggctgaaaaactaaaatcaaaggtttta

SEQ ID NO: 21451 - DNA, 235 bp, Glycine max
  Clone ID: PAT_MRT3847_119375C.1
accaccggtaagctccatacctgtctaattctctactctctctcacttctctctatcacatttctctcacaagatggcaggatcatcagcacgccttgtagggaatgctttatctacacggggtaatagactaactcttgagaaggacttcaatggaatgggatatctctactcatcttggcgattttcatctattgaactacaataaggcatcgtaagcagtttccatcaaagg

SEQ ID NO: 21452 - DNA, 142 bp, Glycine max
  Clone ID: PAT_MRT3847_119376C.1
gtaccggttccgggaattcccggggtcagacccacgcgctgccgcacaaagtggatttacggaagctgtatcaggttaaggctatgggcgctaatgagacagcgcccatgttgactatatgaaagccagtaacacttggtca

SEQ ID NO: 21453 - DNA, 472 bp, Glycine max
  Clone ID: PAT_MRT3847_119377C.1
caagtgccgaacctgatgttatgaaggaagaagcaacaaaacatggtgatgctgatgggaatgagggtttatgccctaaacccttactggacaaaccaatcccaatttttccacaagaagaaaatgctgaaacatctaggcagaaccctaatccaaccccccggaaaaagaagaagaagaatgttgaaggtgcagagcaagttcagacatgtgatccttcaatcctgactggtgtggaacctgatgttatgaaagaagaaggggcacaacaaggttcagacctgccagctgaaacaactagacagattccatgccccaacccccaagaaaaacaagaagaaggatgtgcaaggtgcacaacagcaacttcagacatgcgacccttcaatcatgataagtgtggaacccaatgttatgaaggaagaaggagcacatcatggcggagctaatggaactgcgggctttggaataa

SEQ ID NO: 21454 - DNA, 460 bp, Glycine max
  Clone ID: PAT_MRT3847_119378C.1
actcgtgttaactgtgaaggaaccaaaatctgttcaacacccaaacatgctttcatttcatggggtccaaagcggcatcggtatatgaatccaaaataatgcaaagtatgtgcgaacagtattatggcttgcctcacctatgtgccaagaggagaaggagttaagcttgcattcggaagtacactgctgctggagcttgtgtatttggaaccgcgaaaatattccacattatctgaccaccccctttatgcctggggcaagttgctgctatgctgatcagtgcctaaatgcaccgtaagctattgactttgtttcgcgctgcgagtttagacctattatgcaagcattcataacttgccagatcttgagtttgttgtttaagagtggttaattccattaaaataaactgttctccctgcttgggctggagggaaacactgcacgtattcctgacatgact

SEQ ID NO: 21455 - DNA, 479 bp, Glycine max
  unsure (1)..(479): unsure at all n locations
  Clone ID: PAT_MRT3847_119379C.1
ttcgttccaggaaggtttcccgtcatcactgtatgacgtcctccttctttgggggggggggggggatgtaatgacggcaactggcacggtagtggaaggggactgtacccgtagatatgtaatacaataagcgaccggtaagtatacggagcaggcgataaagaatgtagtaaatgtccgtgaaatggcgcgtcatagaggtaaaagggaaacgtggggacaagcgcataaaaaaaaaaatgataaacgaatgtttaccaaaaagggcatacattagggtaaaaagcacaacacgagcagacgagtaatatttaaacgcccagcacgcaataaaaagaaaatgaatttagttattaaacgacgacgacgtgtgggacgatagaccntatagcagcaacagagtaaagatgatagtgggcttactagtttactataacggtaacaacagctgtaacacgcgggagatccgcgagtcattt

SEQ ID NO: 21456 - DNA, 170 bp, Glycine max
  Clone ID: PAT_MRT3847_11937C.1
gataagggaattaatagggtatagagaagggttgcgcaagtgaagttttttttttggttgtgtttttggcaaagcccactgtatttggagcagaccaagaaggcggagacactagcggacgggccctacggggtagttacaacaccggggccattgggaaaactcataca

SEQ ID NO: 21457 - DNA, 304 bp, Glycine max
  unsure (1)..(304): unsure at all n locations
  Clone ID: PAT_MRT3847_119380C.1
aaaaaacttgatatgggggttatgtngagagagagactcagtgangaaagaaagatttgagataattccttctttatcttttttcatagcagngaagaaaaaactgagaaatttttttttttggnctactacaattttggttaggggggtgtttttgccaaanatgaggatctcaagattgcttatcggagggtatctttttagtggcaccctggtgagaacccttccgccangaaagaggctggagcttanttcaagctggtctgcggtgcttgtggtgtttggggtgatccacatgtgcggg

SEQ ID NO: 21458 - DNA, 154 bp, Glycine max
  unsure (1)..(154): unsure at all n locations
  Clone ID: PAT_MRT3847_119381C.1
ctcacgancgatattggtgttgttgntgtnntggatgatgatggggagcctcaagggttcancatatatgttngtggtggaangggangaactcataggntagaaaccacnnttcctcgcntggccgaaccatctaggttaccgnaccaaanga

SEQ ID NO: 21459 - DNA, 1756 bp, Glycine max
  Clone ID: PAT_MRT3847_119382C.1
tgaaacggcaaagcaaaggtcgcagctgctgctgaatctggtttaacgcaacgcaacattctccatcaaatcaaatcaaagttccagatttggtggcaatggataatagggacaacaaatcgcctcctcctctcccaccttcttcttcccgttacgtgaaatcggaacaacaagcttcattatcagcatcgtcgtcgttcagccacgacgacataagcggaatgccggagaatccaccgaagaaccagagggcacaggcgcgcccattcggagattataaccctacccgacgacctcaccttcgacgttgatctccccgatgacaacgacttgctttccatctaccttcaattcgatcaactcgattcctctccacttcctcttcctcctcccggctcgagcaacagcattgctaataataataataataataataataagaataataataataataatgaaaggcctactagggttcgacaccaacacagcctctccatggatggctccatccacccggatatgctgctctccgctaccgctgccgctgccgatgatgtctccggtggtggcatcgacaccaaaaaggctatgtctgctgacaagcttgctgagcttgccttagttgatcccaagcgggctaaaaggatatgggcaaatagacagtctgctgcaagatcaaaagaaaggaagatgcgttacatttccgagcttgaaaggaaagtgcagacattgcaaactgaagcaacttccttgtctgcacaattgactctcttgcagagagatacaactggaatgactgctgagaacagtgagttgaagttgcggttgcaaaccatggagcaacaggtccacttgcaagatgcattaaatgatgcattaaaagaagaaattcagcatttgaaagcactgactggacaagttatgccaaatggaggaccggtaaattttgcttcatttggtggggggcaacaattctatcccaacaatcaggctatgcacactcttttagctgcacaaaagtttcaacaactccaaattcattcccaaaagcagcatcaacttcagcagcaacagcaatttcagcaacaacagcaatttcagcagctgcaacagctgcaactgcagcagcaacaacaactgcaactgcagcagcagcaacaacagcagcagcagcaacaacagcagcagcagcagcagcagcagcagcagcagcaactgcaactgcagcagcagcagcagcaacaggaacagtaatatcaacaaatgggggacatgaatagggaggggacacacctcatcaaatgtacttcagcggcagaggattttagagactacaaattgctttctcttcatcactttacccttgtgtttagagtttgtttaggtcacagtcattatatttcttattcatgaaacggtacagatagtcctagttagagattgagaattatgcattggatcttggctatgtaaaattctttggcacctttggttatgaatatgcggggcggatttatgtttgttaagtcttacaattgcttttgcctatggctatgcctgcataagtggtctgtttagattaaaaatcacgttgtctcgcaatttccaccggaattgccatatgtactcctaaactaggataccaacgaaacacctggggtgtttagtagagggggtttccttttaagtttctcttaggttgttaatgttaaatttctatatttgctatgacaattttaaaaattattctcag

SEQ ID NO: 21460 - DNA, 1770 bp, Glycine max
  Clone ID: PAT_MRT3847_119383C.1
ggagaaaagaggaaacgagaggagcattgcagaggtggggaacctggaatggaatctctgatccattttgtgtgttgaatttgattttgtattgttatagattacagatttggtgggcaatggatagggacaacaaatctcctccaccttcttctctttatgtgaaatcatcatcttcatccttcagccacgacgacataagcgccatgccggagaatccacccaagaacagaggccacagacgcgcccattccgagattataaccctaccggacgacctatccttcgacgctgatctccttcccgacgacgacaacgacttgctctccctctacctccaattcgatcagctcgattcctcttcacttcctcctcctcctcctcctcctcctcctcacaacaacattaatgaaaggtcaactagggttagacaccaacacagccactccatggatggctccatccacctggagatgctgctctctgccgcctccgccgccgatgacgtctccggtggcatcgacaccaaaaaggctatgtctgctgacaagcttgctgagcttgccttagttgatcccaagcgggctaagaggatatgggcaaatagacagtctgctgcaagatcaaaagaaaggaagatgcgttacatttccgagcttgaaaggaaagtgcagacattgcaaactgaagcacatccttgtctgcacaattaactcttttgcagagagatacacatggaaatgactgctgactgaagcgagttgattgtccgattgcttccatggagcaacacgtcgagatacacatggattaactgatgcgttcagtgagttgaagttgcgattgcaaaccatggagcaacaggtccacttgcaagatgcattaaatgatgcattaaaagaagaaattcagcatttgaaagcactgactggacaagttatgccgaatggaggaccggttaattttgcttcatttggtggggggcaacaattctatcccaacaatcaggctatgcacactcttttagctgcacaaaagtttcaacaacttcaaattcattcccaaaagcagcagcagcatcaacttcagcagcaacagcaatttcagcatcaacttcagcagcaacaacagtttcaccagcagcaacaacagctgcaactgcaacaacagctgcagcaacagcaacaacaacagcagcagcaacagcaacaacaaacagcagcaacaggaacagtaacatcaacaaacgggggacatgaatagggaggggacacagatagcacctcatcaaatgtaaatccttctgcggcagaggattttagagactacaaattgctttctcttcatcacttttaattacccttttgtttagagtttgtttaggtcacagtcattatatttcttattcatgaaacactacagatagtcctagttagagattgagaattatgcattggatcttggctatgcaaaattctttgccacctttggttgtggatcagcggggcggatttatgtttgttaagtctttcaattgctttcgcctatggctatgcctgcacaagtggtctgtttagattcacaatttccgcgggaattgctgtatgttctcctaaactagcatcccaccgaaaacacttgggttgtctggcacttaacagagggggttccattcaagtttcttttaggttgttgatgttaaatttctacatttgctctaacaatttttataattattctcagaaattttacattctcaggaatcatttt

SEQ ID NO: 21461 - DNA, 483 bp, Glycine max
  unsure (1)..(483): unsure at all n locations
  Clone ID: PAT_MRT3847_119384C.1
ggctcgaggcgggagaagtacatgatggaagtgacgaaagaccctaattcagatttcgaactcgaactctacaccatcccaagctcttcaagatggttcgcgtgggaagaaatccacgaaacggagagaacagcgttcaaggaatacttcgacggaaactcaataacgcgaacccctaagatatacaaagagtaccgagacttcatcatcaacaagtacagggaagagccctcgaggaggctcaccttcaccgaggtgcgcaagtcgctggtcggcgacgtcacgttcctgcacaaggccttcctcctcttggagcattggggtctgatcaactacggcaccgcgcaaccttttttcggtgcggacgcancggaggaggaggaggagcatcgcaaggttcgtctcgaggaaggcgcccctggtgggattcgtgtcgcggcgacgccgaattcgttggagccctatgttgtgcctcgcatggga

SEQ ID NO: 21462 - DNA, 376 bp, Glycine max
  Clone ID: PAT_MRT3847_119385C.1
cgggcccggatttccgggttggaccaacgcttccgttaacaagaacggcttcaactaatggttataaaaccgggggtgagtcaaggatccgggactggtttgatggactaagaaaatgaaggggctttaagtcgttttttaagcaacaagggtggggttttaagcaaggaggaacaggccaaagaaaacgtttacttccaaaaatgggaaagggggaggttggaaaaccaaaaccaccaggctgggaagaccaaggcagccaagggcaaagatgctgctgctgttaaaaaaccggaaggttctaaaaagggctaagttattccttaaaacaacccggcagggccacttggggggaaataagcttgttggagattaa

SEQ ID NO: 21463 - DNA, 313 bp, Glycine max
  unsure (1)..(313): unsure at all n locations
  Clone ID: PAT_MRT3847_119386C.1
ncgtcgcaggcacgcgtacgtaagctcggaattcggctcgagntcttcccttctatntgantcacnccnccacacngcntncgntgnggggnncntatanccccccnccagnnagnatagnatgggngnagnnggnannnccnanngantngnnnngnggnnnngcnnnnnannnnancangngccngnggcngngngnnnngngncnaacgtagaggntcaganatcctngntcgtcangaggtganagnnntgaggnngacgnggngggnaagncagaggananaggganangtaggnngtgnngncnnag

SEQ ID NO: 21464 - DNA, 309 bp, Glycine max
  Clone ID: PAT_MRT3847_119387C.1
cgaccggaattccgggtcgccacgcgtacgctaattaaatactatggctgtcatggcaacctcaaccctctattgaaacccctaactctggttctgcaacggaaagcccggcacatattcttaccgcgtcgcgcccaccaccaaattatcctcatccaaacaaggcacaattaccatgtccttaaccccaccctcctacgacctgcagtgcttcaaatttcagcccatcaaagaatacatcgtgtcacgggaaatgacgcagccgcttcatgaccgacatgataacctacgccgacaccgacattgtta

SEQ ID NO: 21465 - DNA, 1606 bp, Glycine max
  Clone ID: PAT_MRT3847_119388C.1
ggtccttttagtaaaagaaagacaagattaggtaattaagcacagaaccatcgagttgagagaataatcaaatcaataatatgtgcatgctaaatagagataagtcctgacttagactgtcaaatgctaaggaccctatcaaaatacataacacagcatttactcaccatttaaactcagtaatatctgaccattggtccccaaccaatttgtttacaccctcttctctctccctcttctacagactcaaacaagtcatcccagtcagaaattttcgggttgcttacacagattttgtgttcttcatatgcagcattccccccaccaccttatttgactaaccagcagaaccaggaaatggtaaatctttactacgataaaagatttcctgtcgtaaggaatgcatggattcaggcaaaaccgtggttgagaagatacagctttttcaccattaaagtctgagagttatatacaatcaacatgagaatgaattagtgatgtgacactaatctaatcccaagcacttgtcacaccttgaccataccctccaccataattgccaccatatccaccaccagttccactgccatagtaatccgttgctttattaaacgaaccctctttcctaaaatcgcggccaccaaaacgagatcccccagacttcctatttctgttgccaccactgtaaatagcccttgctgcatatcggctgagccaggcaggtacttcttgatttgcctcttgcatcaaatcagccaatgatttagccaagttcaaattaccttcgttgaagaaggccgttgctaatcccattttaccagctcgtcccgttcttcctatccggtgcacataatcgtcaatgtcatttggaagatcaaaatttaccacatgtgctacccgtgggatgtcaagaccacgcgctgcaacatctgttgccactagaattggtgtgtttccagtcttgaacgacctcaatgctagttctctttcttgttgtgttctgtcaccatgaatgctagctgcaggaaacccattaacacacaagcagtgttccaatgcatcagctcctttcttcgtttccacaaaaactaatgtcaaaccttgcttgccattaactccagtttccctctgagcgtgaagaaggtccatgaggtggcttctcttgtctgactcgagcacgtattctactctttgagcaattagatcagtactagaaccgacccttccaacagccagaaacacataatttgaaagaaaatccgaggcaagagcctgtatctctttgggaaatgtggcactaaacaacagcgtctgtctcatgcctggaggaggcatgtccatttgttcaactatctttcttatttgaggctcaaaacccatatccagcatccgatctgcctcatcaagagccaagtatcttatcatctgcaatgacaaccctagccctctcaagcaaatccaccaatcgtcctggagttgccaccagaatatcaacgcctctctcaagctcccgtaactgttgggtgattggtgctcctccataagcaaccaccactttgacaccagtttgataagaaaactttttggcctcatcatgtatctgacc

SEQ ID NO: 21466 - DNA, 505 bp, Glycine max
  Clone ID: PAT_MRT3847_119389C.1
aatggggcggaagcacgcacaaaggatcggaaaaggacaaagtttattacctattgagaaacaaagatggctggcgctctttacacccgtgaaatgcagtgtccatatagaacagaaatgaaactttctagtgatatggtgacgactccctcgtttggggggctagccctcgcctgccttgctttgccttggttatagaccctgacgagcaaaatttggatgcgacagcgctggcccaagcctggcttgcttaggtatgacaatattgcttctaacataacacaccattggggaggaccgatgcaaaacggaacctacatagcttgcacgaatgggtggtggaaatacacggggccgtctttaatggccataggagcgaggggcttcttccacaaatgggtcttcagaagggatggcttgggccagctttgtagcaagaaccagtgaatcctggagtgcacaacaagctccatggacaacatttggggccattggaggccatgct

SEQ ID NO: 21467 - DNA, 463 bp, Glycine max
  Clone ID: PAT_MRT3847_11938C.1
ggtttttctttttttttttttttttttttttttttttttttttttttttttttttttttttttgggaccaaggggtaattgcatattaaaacaagtttttcctaatcaaaccccccacttttatcaatacccttttcctaaaaatattgtaaaaaggggagggaatccccttgaaacaccacctccccttcctatttaaggggccaagaggattctcattttacagtcctttcaggatttaaaaaaatccagggtttttttccaaaaccttgaacaacaatgttgtttacccaaaaatacagtttgttagtaaaaaaaggaattttttttttccaatcagaaagagtggggtggagctttcccgcttaatattttggggaaaaaaccctccccacccacaaaaattatgcccctccaaggaaaaaataaggagcccaattttaagtttttaaattcctttccc

SEQ ID NO: 21468 - DNA, 535 bp, Glycine max
  Clone ID: PAT_MRT3847_119390C.1
ataaaacatcgtatggatttttaatttttaaaaataatgaaaataacaaaatttgatttttacaatttttttttataacatctcctgataaaaaaaatataacaataagataatatcttataattaaataaaagtacaatatatagaaaataaaggccacttaagatttaattgagagtttatttagatcaactcatttttagagtgaatttttaaaaattattcaaaccatttctgatcatgcattgagtgagttgtttgacaatgaatggaatttaactatagtttacggatagttttcgatccagtgaacctgactcaatgagcctttctgaagtttttggtttctatcgtcgagagaatcctctagttttaaatggttcttatttgacccaatgaaagtcgggtctaataattattggtcaattgatctaatgatttttgtgatccgatattacatcgggcaattcagacgagcccagtggatctagtgtcctttgggcccgagattatggcccaacgtactttaactaac

SEQ ID NO: 21469 - DNA, 1340 bp, Glycine max
  Clone ID: PAT_MRT3847_119391C.1
ctatttgtaaagacccctgtgatagaagtaaaagaaaaaatcagtgtgaaaatagtaggtgccttgatcctgggcagacatctacttcgacttctgaggattcatcccgctcaaaattcagcaaaaaaagtgagagaacttcatattcaaatgaagcatcaggatgtacctttgaaaaagctaccacaagtctcccatttgatgcttctgatctagccaatttcttaactatggacaggcatataggatttaattgcagtgcccaaatttttctgagatcgaggcttgcagagaagcaacagttatgtttctctgtagtatcactactatggcagaagttgattggatctcctgaaactcaaccttgtgcagaaagcacttctgctcaacaggggtggagacaggttgctgatgcattatgcaaggttgtatctgcatctcctacgaaagcagctatggcagttgttcttcaggccgagaaggaattgcagccatggattgccaaagatgacaatctaggtcagaagttgtggagaatcaatcagcggattgtaaaattgataactgaactattgaggaatcatgataatttggaatcattagtaattgtggcaagtgcatcagatttactactacgagccacagatggaatgctggtggatggagaagcttgcactttaccacagctgaagctattggaagcaacggcgaaagcggttcaaccagtgattgagttgggagaatctggacttggagtggcagatgggctttcaaacctgttaaagtgtcgcctaccagctacaatcagatgcctttctcatccaagtgcacatgtccgtgctctgagcagttcggttattcgtgacattttgcatactagttcaattggatcgagtcctaagccactgcaaaagaatggcatccatgatcagtacttaaattttgatgtcattgactggcgagctgacgtagaaaactgcttgacatgggaagctcacagccggctttcaaatggattgtctattgaatatcttaacacagctgcggatgacttaggctttgctatttctatctgaaatgaaatgagaccatatgtaatcatcttagtaatttatgtttaggaacttaaattaagcttttcatgacagatattatctcaagatttgtataaaaccttgatgtaatctatgtttaggaacttaaatggtttgcaaataagtaaaccttctcattctgctagtttttgttagtaagtaaaaagctagaaattgttatcccatctctctttttcccaaacacgacttcaagcaatgatgaccgtatatagaaactagtttcgt

SEQ ID NO: 21470 - DNA, 325 bp, Glycine max
  Clone ID: PAT_MRT3847_119392C.1
cgtggaataggctcactacgtgagaatagtagggaaggggattgaaatcgtgattcttgctcatgggtgcggctcgtaccattcggggtgaaatcacgttgatccgtatctggtttatgattaccaagtgatattttaccactgcatatgtgcttgtaccaccagcccatactacttctacttgcgacgttactacactagcgatgggcttgtttatggctctctctccatcttgtacgatcttcaggcgctatgttttatcttcgatggacactctctttctgctattgtggtcctccttgcttacatttctcatcgtcatctc

SEQ ID NO: 21471 - DNA, 317 bp, Glycine max
  unsure (1)..(317): unsure at all n locations
  Clone ID: PAT_MRT3847_119393C.1
gggnnggagccnggtgatagtgatattttgaacaatgtattagcccaaagagagggaacagctggaggaattggaagacccttgatggagaaaggcacaaaaaggaaggggagcataaaggagagcaccaagcttgagaatacaaaggggagcaccatggtgacacacaacagtgaagtccaaggagaaccacatggtgaacaccaagctggagagtaccatagggagcacacgccaaagcacaaagagggggttcttgacaaaggcaatgacaatatacatagttagggcgggggcgaactgggacaaaaaaagaa

SEQ ID NO: 21472 - DNA, 294 bp, Glycine max
  unsure (1)..(294): unsure at all n locations
  Clone ID: PAT_MRT3847_119394C.1
ggaatatggaattgcttgagagatggagactttgaagaagaagaagtttgggctgttttcaaggaaaaacccgattacatttctggaattcacaagcccaaggggaaaaggatcttctnncccctctggcctgtcccctaggactcnccaaggtgagcanggatgctccccagggcntagnagggnnaatagtnntactgnttccctctcatgaaacaaaggtncnccagnatcnagccncngctaacatncccgctnggcccaganttgtagacnccnccccanccaggnant

SEQ ID NO: 21473 - DNA, 139 bp, Glycine max
  unsure (1)..(139): unsure at all n locations
  Clone ID: PAT_MRT3847_119395C.1
ctagggngaattattttggcacacgttagcctncngcacctngttgagnaacngttgggggtcnttgnaaccctnnttttaaaaatgttnaaggggagcaaggaaccataaggtnccccgntgggnccacaaacccttt

SEQ ID NO: 21474 - DNA, 704 bp, Glycine max
  Clone ID: PAT_MRT3847_119396C.1
gagctagctctaaaaaacaaatgcattttttctgttcaaattaccacagatattaaaatagttttttcccaaagatcagattttttaatgtggttctttattcaagatgcttagtaactttagctgacttctgttcctttccccatcccacccccttctcctttctgtgggatcttttgacaaatatttaaagagatatagaaaagggttaataacagtagtccacctcttcccttgaaaatctctgttccacttgaatttttatcttttctagatgtttagaagttatttggcaaagagaaagtgtgttcactaatagactgaagtgctagctaatccctaagatgaattattttaatattctttagagctgtttaaaaaataggctatactttgtaattctgtttccttccctcacatttatgtctcacctcgttgatatccgcctttgacctcactactcagatgaaagtgttctccaagacttttctaaaggctgcttagttactatattcattcagtaaaaactttctgagtatctgctatgtgtcattgttccaggcattagatagaaagcattgatcaaaatagataaaaatcataggccttttaaagttcaaattctacttgttgagtcagacaataaacaggataaataagcaaaacatatactatgttgataagaactatagtttaaaaaaaga

SEQ ID NO: 21475 - DNA, 418 bp, Glycine max
  Clone ID: PAT_MRT3847_119397C.1
ctcgagccgaatcggctcgagcggctcgaggtaacaacagctgaacttggttccgtcgccggttcacccaccggaacaaccatgatcattccccgagaagaaccggaaagagatctggaaatacctttttcaagaaggaatttggtttgcgaaaaaagacttcaatctggccaaacacccaaagattggtgggcccaatctggaagggattaaactgatgccaaacttcaaattcaaaaaagatgggaaggaaacctttggggggatgccctattactgggttcttaacaaccatgggattggagttcttaagaccttccttaacctttctttccaaattggccctggcacttttaaaaaaccaggccaggccgggggaagaacattccgggggccaacccggggtccgcccaagggc

SEQ ID NO: 21476 - DNA, 144 bp, Glycine max
  Clone ID: PAT_MRT3847_119398C.1
tacggctgcgagaagacgacagaaggggatgagcttgagtaaacttatatgatatatatgtgcgtacattcacagtatggtattaatatttctcaatattgaaattatatactagaaaattgttatcatattacatttcttagg

SEQ ID NO: 21477 - DNA, 394 bp, Glycine max
  Clone ID: PAT_MRT3847_119399C.1
acaggcgagccgctttttcttttgggggttatctttttttttgggggacagagtaaaatgatccattcaattgaaagagcagactctacaagaaacacttaatagcatcttggtggtacaagttatataaaacttgtacttctaaaccaagcttcccaaaatttgggtaggttctctttaataggggggcagaacttgccgataattgctaggcagaacaccccaaaataagcacactatgggggggcatgaaagtgggcttgctcctaaatggacccccaaaggaaaggagtagccatcgctacaagagcaaaagaagagccctaaactagtttatgcttaatctttggacatggctataccatgaaaacagtttgagcaccttttctacttt

SEQ ID NO: 21478 - DNA, 776 bp, Glycine max
  unsure (1)..(776): unsure at all n locations
  Clone ID: PAT_MRT3847_11939C.1
ggctcgagtagcagtgtggtctctctcactccaactccaaccacagagacaacaaatacaacaacgttgtttccatgacaatggaatctgcgcttacagcttctaactggaaccgttctttgattcggattcgccacactaagccacgcttcggtgcaattcgccccacagcaatacggtgctccatcaactcgtatcgcttgtccaacctcactccctctgagcttcagagcctcaagagccgaccccgcatcgatttctcttccattttcggtgttgttaatcctattgtcgatgatgttcacaaaagaggggatgctgcggttaaagaatacacttcaaagtttgataaagttgaattggataagatagttgaggttgtctcggagctccctgaccctgtgcttgaaccgcctattaaggaagcttttgatgtcgcctatgataatatttatgcatttcatgctgctcagaagtcatccgagaaaagtgttgagaacatgaaaggagtccaatgcaagagagttgcaagaagtattaactctgtgggtctttatgttccagggggaactgctgtattaccttcaacagctttgatgcttgcagttcctgcacaaattgcaggatgtaaaactattgttcttgcaaatcctccaactcgggatggcactacatgcaaagaggtactgtattgtgcaaagaaggctggggtgactcacattctcaaagctggaggagcacangccatatctgccatggcttggggaacagaaact

SEQ ID NO: 21479 - DNA, 464 bp, Glycine max
  Clone ID: PAT_MRT3847_1193C.1
ctttagctctgcatttccatattctctcctccataaacacaaaaagcctgccaaagtgaaccccacaagtttgaaatctcatttaataccacatttgcacttccatttattatttatgtaagatcttctggactaagtactaacaatcaatttgtttccatgcaacacccttcaccaaatgtcaattatatttaagctgaaatcaaatgtatatacttaggaagattaaggtttaaactctctctctatcctgagccttctgatgagctttctctgacctcatattgatctcatatttttactgaattggtgacaactttttttgttgtactatctagacaagagttctcaccgctcagaatcctcacacacacacatagcaaaaagacaccaaacaaaaggataagcttcttcagtccttgagaaatcatattcagtttttatttttagaaagttatagtttt

SEQ ID NO: 21480 - DNA, 515 bp, Glycine max
  unsure (1)..(515): unsure at all n locations
  Clone ID: PAT_MRT3847_119400C.1
caagatccaactctaatttcagctgtcatccacaagtgctcaagaaaattttccttgtttttttgttttctttgttggaaaaaaggattgtttggttattgctgtcataatcttactttttctaacaaaccttcccaataggaagggtatctgcagttacactaagagtctgagaacttctattacattggttgtgttagcaggtactaagtatctggggtcttcattacagaataaaccccagtttccctttcaagacatatttcaaagcagcatccttttccccggaaagcatgctcaattctctcagagtggacgtgtcaaactggaagaggactcgatttacggttnccaacttgctgcaccggtcacacttgatcaggaatcatcaagctgtgctctctctcttctgtcagatcagtcacagtatccgtcatgccacgcagcangcaatccattagccagtccccaagtctttagtggcatccgcatacccgacagagacagccgagttt

SEQ ID NO: 21481 - DNA, 668 bp, Glycine max
  Clone ID: PAT_MRT3847_119401C.1
tgccatgtcaaattaaaggctagagacgtattcaccctctcgataagctgctgcaatggaaaagcaatcaaaatgtgccccagttaatgttaaataaaatgaacataagatcattttgaataggatattagttttatctttacaacattaacttcaaatgcttgcaatttcctgctcctagtttcttaacctggatatgatgccctccgatagatttttctcagaaacttctgctaaactttcctagttccacacttccacctccattattctgatagatgatctcctcttatttccacttctaatgcagcttaatttttgtttgtatgttttggtgtatttgatgattttacttgaaatttgaaatttatgtcctatttgatttcaaaatctaatttgcagaggtcagccaaatgtccagtcgcttatcatcagaatctcgcatatatgctgataaggctagagatttaaaccggcaggttagtcattatcagctttccggcatcatgcacatgatatcttatatttttggtattttgctagtctatcctttttctatttggatgatgacatgtcttaatttgattcgtctcagaaatatcatgctgcaattggaaattgcgtgctaggaattgctttgggaatttagattgaatatagaagcatgc

SEQ ID NO: 21482 - DNA, 288 bp, Glycine max
  Clone ID: PAT_MRT3847_119402C.1
atggaggttggtgttggaaatgatttgtagagtgtgagcgttggggttaaggaggtgaacgatgacagcggaggccttgatgagtgtgaccgttttgctatttctcctgcccccataagcctgcctcacatcgagggcacatttgacattgatgctaatttgatcgtatctgtctctgccaaatacatgtcctctggttaacaacaacaaattactattatttcatactctttactctcttatgatgatatttaaattattgtctaagattcttcattgcatttctca

SEQ ID NO: 21483 - DNA, 1246 bp, Glycine max
  Clone ID: PAT_MRT3847_119403C.1
atcgagccgaatcgaccacaacagaaggggtttaacttcaggatgaggataagccttttcctgagtttccctccttcatccccttccatggcagcaccttcactctcctccgctctcaactctctctcctccccctccctctctctctccttctccacctcctcccgccgcttctctctcctccctccaccctcacaccaaccctccaaacccctcttcctcaccctcaaatccaaaccctccgacgacattgacacatcgttcttcgacaacatcaacccgcaagacgacatcacattcaatcccccggagcccccggaagggttcgtggcgcctccctccttcgacgacggccctctggagaccgaggacgaaatcgccgccgcctacgaggagctctacggccccggctacagcggtgtctcggtcctcggcaacgacgtgtacgtgatggacgcgaaggtgaagaaagagaccgggttcgggtccggcgccaagaaggagaaggtgagggacgggttcgaggagagggtggtgcaggtcaggagggtcaccaaggtcgtcaagggagggaaacagctcaggttccgcgccgtggtcgtcgtcggcgacaagaagggtcaggtgggagtcggagttggcaaggccaaggaagtcattgccgcggttcagaagtccgccgtcaatgccaggaggaacatcatcaaggtgcccatgactaagtactccactttcccccatagagctgatggagattatggagcggcaaaggtgatgcttagacctgcttctcccggtactggggttattgcaggtgggtctgtgagaattgttctggaaatggcaggagttgataatgctttgggaaagcaactagggagtaataatgcactcaacaatgccagagcgactgttgctgctgtgcagaaaatgaagcagtttcgtgaggttgctgaggagcgtgggattccaatggaagaattgtggaagtaatgaaatttgtgaagggaatgtaatttttagatgtcgatgtttgtgatatacagctggtcatagttctgttaaggaagtgaaaaacattgttcaatttttgttgaaagttttatgaaagtgaacagtttcttcaaaaagctactttgttcaggttgaattcaatatattctttatctatctgtttaaaaagtatttatggtcgtccaatttacgcttggctaaatcaatgtcaatgactcaattattcagttgc

SEQ ID NO: 21484 - DNA, 451 bp, Glycine max
  Clone ID: PAT_MRT3847_119404C.1
ctttctttttttttttttttttttttttttttttttttttttttttttttttttctttttgaaaaaaaaggggaggccccaacaataaacctctaatttttggtgggttgtgggacgggttacctgtttataacttaactttaccccccaaggcttgtgatgagggccgcagggaaaattctgccccgaattaatcttttcccgagatatattcaagatttgctttcccctttagctggtttaagtataacaaaatttttcctcagccctcaaattttacccgcgcttgagcaatccaaaccagtgttaatttttttaaccaaaagggggggggtgccacttccggatttttagctggtgggctgaaacaccaaaaatgtaaatttctgtgcgcggactttgggttctaaatatcaagggcctgaattgggaaaataccatcccaattttc

SEQ ID NO: 21485 - DNA, 264 bp, Glycine max
  Clone ID: PAT_MRT3847_119405C.1
cttgcaaaaaaacaacaaattgcagttctagaaactgataatttctcatggaaacgcgtattttttatggggtagtgcccttactcagataaccttatcaatcacctaactaatacttacaacaaaccccactgtctttaatggaagctactacaagatcaaaaaccaacacagactctgccagatgctcccataattcatcaacacttattcaatcaccacctacaccttcctcatacgaatcacaccaattaatgcccaatc

SEQ ID NO: 21486 - DNA, 275 bp, Glycine max
  Clone ID: PAT_MRT3847_119406C.1
agtaacaaaaaatatccatagtataaattaatgacaattatttagaacgcggggcctacggtccccccgtttggttttatttcttacagaaccgggagcccaaattgccctctcttttgtgttatttaattttttaattaagcccaaatcctcctctattttgtgccattgcattttttaaaaaagcccaaatttttctttaaaccttttttttttgcttaaggggatgacccagggggggggcctaattttttgtactattccggccccggggg

SEQ ID NO: 21487 - DNA, 292 bp, Glycine max
  Clone ID: PAT_MRT3847_119407C.1
atcactcgtgctattcaatctataatcggtttctattctataccaatcttagctgcgtattgttaattccaaattactgtaaaaacatcataccaaagccagacgttcgttgagtctatatttataaaatgtttcactctactctatcagccattataacattttctactacttctatcttacttctatgtgcttatcattgctacaagtgattaatattcattgttaaactttcttgataatactccattggtttagctttaatttcatcattttctagtctttgtttatt

SEQ ID NO: 21488 - DNA, 345 bp, Glycine max
  unsure (1)..(345): unsure at all n locations
  Clone ID: PAT_MRT3847_119408C.1
cttgccatcttggcaatcaaatgcttaactcacccacaagggacagcttcaagagagagagagaaaagaaaattggaattctttgttgtttcttttgcttcttttttaacccataggtttattaaagcaaatctcaagagaaaaccaaagcatccaaaaagcaacacccaattttgacttcacttttaatcttcctactcagtgcaagaaattgctaataaagaccacttttgtcacactaatataattatggcccacattcaaaaattatgtttggaatctgaaatcatcttctgtcattgtgattnttgctaactactctctttaactacttttgttttcctc

SEQ ID NO: 21489 - DNA, 331 bp, Glycine max
  Clone ID: PAT_MRT3847_119409C.1
ttcgttcaatcaggcacctcccggcaatgtcaaatgcggtaacaaaatcttcaggaccaagtatgctcaatatcacaccgtctaaaaagaggccgagcacaagccaaaacccaatctaaataatttgtttagaaagcagtcgaacactacgtccggttatgcttactcttgagctaacaagaacatgagtatgacttagaaagaaaagacactatacgatgacttactgaaccccaaaaagtgtgttgcagaaaccaaaataggattgcctagtcttaagaaggctcgagagcgtgctaatcttattacgtatgtgagagaatccactgga

SEQ ID NO: 21490 - DNA, 763 bp, Glycine max
  Clone ID: PAT_MRT3847_11940C.1
gtctcctcctcaccttttccaccggcggtgcaatcatcgattctggcaccgtgatcacccgcctccccccaaccgctacggcgccctccgatccgccttccgtcaaggcatgtcaaaatacccctccgccggggaactctccatcctcgacacgtgttatgatctcagcggttacaaggtgttttccattcccacgatagaattttcgttcgccggcggcgtcacggtgaagctgcctccacagggtatactcttcgtggcgagtaccaagcaggtttgtttggcttttgccgcaaatggtgacgatagtgatgttactatatatgggaacgtacaacagagaacaatagaggttgtgtatgatgttggaggtgggagaattgggtttggtgctggtgggtgcaagtgattaatgattaaacatgctttgggctagttagggacaaaggaatcttaattggttctaggctttcattattactattgttgttgtcatgacataatgtaacagtggaaatagaaaagggaaaacaataatgtgggggaaattaaatagtgattaattgttggaaaacatataatataatgttgtaaaagaatggaggaggtgaaatatgtatgactctcaagctgtgcgattgcttgcaattgtacatatgtaagatgaaaaaaaataatgtaaacttgttcttgttattaattaaaggtttgttgaataaagcagaaacgtcttgttttggattacgaacaagtttacattatt

SEQ ID NO: 21491 - DNA, 650 bp, Glycine max
  Clone ID: PAT_MRT3847_119410C.1
tttcttcttttttttctttttttttttttttttttttttttttttttttgtcctttttttgttttctccttctttttttctttggcaagaggggcccacattttattaaacccgcaaaaaaaaaaacaactcttgaaactcatttactgaaccgggggccaccacggggcacccacaaataggaaacacacggcccctttttcaaccgaattgatttctaacctgtggcaccgcaccagctagattggggacagggaaagaaacaccttggcctgctcccggggcgctggaaactataaggggctagatctaacggatcagggccagaaggaaaacgccccatcggcccccaggggacccaaaaatggggcacccgggccttaataaaggatttcaacttggttccatgcttaaaaatgcttatgagggggcaggaaaccggggttcctatgaaactatatcttcccatggggaataaacgacctgtctttatttcatatttagaaaaaaagccgtatatccataatcattccttaaaaaaatatttgcttgatgccataacacacccacttggggtaatacctaacaaaaaaaagcagaccgacgtgaaggcccttctgaaactccccggtcaaaagaggcgacctttt

SEQ ID NO: 21492 - DNA, 604 bp, Glycine max
  Clone ID: PAT_MRT3847_119411C.1
cggacgcgtgggcggctgcgagaagacgacagaaggggagagcttccaagattgcagccgatttcactccctctctcctctctttcactctctcgaatgcgggtggagagtgcggaccggaagttctgccgtgtgcgcgacgtgcggcgtacagcggcagcgcgagccagcatcaacaggagaactgcactccagaaggttgtgcggtggcggcgtacggcgtacacgagcaagagaatcgcgcgtgcgaagctggcggagtgcgggttgacgcagtgggaacacgggttgacgaggtgggagcgcggtggagaaccacgaggcactagccaggtggctacattatttgatatatactaatgccactatgccagggacagaagtcaatcatatctgtcattatccgatcattaaggatgtctggaagtcattgatgacctaacaactcaaattagtgacaaaaatccataatattgtgaattcatctacttttctttttctttctttggataggctgagatgctaattaataatagtattatgttattataaaaacatgtgacaagtcacttgggtgtcaatgtaactattatgttattagccc

SEQ ID NO: 21493 - DNA, 194 bp, Glycine max
  Clone ID: PAT_MRT3847_119412C.1
gccacgcttacataacaaaaatttcttttaacacctttgccaagctacagttctctgcgagcgtctgcactcaaaaataaacatatatacatatatatatatatatatattctggcactacttcatagtcacacatcgttaaatttattaattactaggtaggaagaatagaatacggtttatgacaccttatt

SEQ ID NO: 21494 - DNA, 812 bp, Glycine max
  unsure (1)..(812): unsure at all n locations
  Clone ID: PAT_MRT3847_119413C.1
aggttaatgcaggcaatagttcatggaaaaaccgcagagcagtgtctcatgatgatgattctgaaggtaattcccacttgaagtatggtgttgctgccaagcccaagagtgccccaacaagtgtactcactagtcctgatactagtccatgtagatcaagcaatgtagatttctttgatcctaccgccaacttctctttggaagttaatgacaaatcaaaaatgttatcagcgcacgcggttcatagtccagaccaattttctattcattgccctctaagcctcactcgttacttcaatcctaagattgaggaaggatctcaaaaccataaatttttgtccagggtgtgccctgaaaataaccttcttgattcacatcccttaccccttcctcctagagcttcatcaccagaacaattatctgttgtgctgcatcaatcaagtaccatgaaccaatcaagtatcatgcatcacgctactgaaaatctgccttcagtgaaaggtcgatggcagaaatgaaaacttattggacgtggtacctttggaagtgtttttcatgcaaccaacatagaaactggagcctcgtgtgcaatgaaagaggtcaatttaattcatgatgatcctacatctgccgagtgcattaaacagctggaacaggaaatcaaaattctccgtcaactacaccatcccaacattgtgcagtattatggaagtgaaacagttggcgatcatttgtacatatatatggagtatgtctacccgggatcaatcagtaaatntatgcgtgaacattgtggagctatgacagaatct

SEQ ID NO: 21495 - DNA, 527 bp, Glycine max
  unsure (1)..(527): unsure at all n locations
  Clone ID: PAT_MRT3847_119414C.1
gggctacaacactcacttnctcctgtgcttgcctgccacctgacccagttaatctctcagtatctaatgataccacactagccccagaggacctgccaaccgtttcttctactgacatgtaccacaatgctacctttgactgggcctacttgtcaaagaaagagtgtgtgaaatttggaggaaagctcgtgggaaacaactgtgacttcgtgcctgacatcacactcatgtccttcatcctcttcctgggcacttacacctcttctatggccatgaagaaattcaaaaccagccgctattttccaaccacagcaagaaaactgatcagcgattttgccatcatcctgtccattctcatattctgtgtaatagacgccctcgtcggtgtggatactccgaagctaattgtgccaagtgagttcaagccaacaagccctcaccggngttggtttgtcccaccctttggaggaaacccctgtgggtgtgccttgctgctgctatcccggctttgctagtcaccatcctga

SEQ ID NO: 21496 - DNA, 2078 bp, Glycine max
  Clone ID: PAT_MRT3847_119415C.1
gcacgacacaatctaaacctcggaagagagagaaagagagggacagagaagaaaagaacctgttcttcaccagaacggagtttggttttataggaaccctcctattcatccatttatcgatccacgtccatccccatctttcttctcctattctctctgttttcttttcttcttctaaaaagtgagagaagaaaaaagggaattgaaggaagaagattgagaaaaaagggggaatgcccagataattaattcggtgaaatttcggattttcgtaagtgggtgtttctcttttcgtgtttttaccttcagtggtggaaggaagggggtcttgtttggtgagttgatggacttgatgagcgttgagtgtgtgtcatcctcggacggcatggatgaggatgagatccacgccaaccatcatcactctgagttttcttccacaaagcctcgcaatggaggcactagtaacatcaattctgtgggccccaacggaattgctccggcaacgcagcgtccatgagttgctggaatgtcctgtttgtactaattcaatgtaccctccaattcatcagtgacacacctgtttgaactaattcaatgtaccctccaattcatcagtgtcacaacggccacacactgtgttccacgtgtaaaacaagggtgcacaaccgatgtcccacttgtagacaagagcttggagatattaggtgtctggcactggagaaggtggctgaatcacttgagttaccttgcaagtactactctcttggatgtccagaaatctttccatactacagcaagctcaagcatgagacagtatgtaattttagaccatatagttgtccttatgctggatcagagtgttctgttgtcggggctatgccttcccttgtagctctcgttaggtgtgaccatatcctcgacatgcacagcgggtgcacattcagccatcgttatgtgaatgcatatccccgtgaagtagcgaatgcatcctggatgcccacagtatttcattgttttggccaatatttctgccttcattttgaagctttccagcttggcatggcacctgtatacatggcattccttcgttttatgggtgatgagaatgaagctcggaattatagctatagcctagaggttggggccaccgtagggttctcgtttgccagggtgcgccacgaagtgttcgggatagtcaccgtaaggttagggatagccatgatgggctcatcattcaaagaaacatggccctatttttctctggtggggatagaaaggaactgaagctcagagtcacaggaagaatatggaaggaacaacagcaacagaattcggaagctggggtgtgcatgccaaatctctgtagttgacacgttatttgaaggggaatttttatcgtgtgtttctgacactcttttgagatatatttataccaactttgcgcatgttgtaatagattaaggcactaaggtgactctaaaattttcagatttcataagctgtataataaacaagttttcttctttccaattttaacatctcatgtttggtatcttttggtgaatttgatgactcttagaaggggtttgagtggatttggtttagcagattttgagtttttcttcagtttttctaggggcaggggataaggacaacctagatttggttgactagaattgatgagtctgcaatgttgattgtggaattatgagattacttgcaattcatggtgatatggtgtcaaatagagggatttgctatgttgtcaaattttaatcttgtcttggctgtatgtatttggctacggagggcttcttggtgctgtttgacactcctttttctgcttattgcttggcagtgtttgtaactctagacatgtttttgcatttgagggaaggatgattttaggatagtttacatattttgctttcaagcattgagtaaagtattaggtttttggagttaggtaacaagaatttctgatctttacagcatgatcatttgtttctcgagagagcaagacccaaaattttaatagatttttgtttaatagatatatcttgtgaaaaatgcttcat

SEQ ID NO: 21497 - DNA, 198 bp, Glycine max
  unsure (1)..(198): unsure at all n locations
  Clone ID: PAT_MRT3847_119416C.1
gggcgagcacgcgnncagcacacggccgaaaggatatttttttttctgttgattgcttggactatgggtgggtcttaacatactcccaaactcccaatggctttgctttggaaaagcaaaaaaaaaaaaaaaatattggatggaggaagcactgtaaatttcaaaattggcctaaatggatccctattccccccgggg

SEQ ID NO: 21498 - DNA, 1526 bp, Glycine max
  Clone ID: PAT_MRT3847_119417C.1
cccacgcgtccgctcacgttgaagaaaagaacctgttcttcaccagaacagagtttggttttataggaaccctcccattcatccaatttatcgatccacgtccatccccgtctttcttctcctattctctctctctctcttgttcttctttttttcccccaaaaaagtgagagaagaacaaagggaattgaaggaagagattgaaaaaaaaggggggatacccagataattaattcggtgaaatttcggattttgattagtgggtgtttctcttttcgtgtttttattaccttcagtggtggaaggaaggggaaggggtttttggtttggtgagttgatggacttggagagcgttgagtgtgtgtcatcctcggacggcatggatgaggatgagatccacgccaaccatcatcatcactctgagttttcttccacaaagccgcgcaacggaggcactagtaacatcaattctgtgggccccaacggaattgctccggcaacaagcgtccatgagttgctggaatgtcctgtttgtactaattcaatgtaccctccaattcatcagtgtcacaatggccacacactgtgttccacatgtaaaactagggtgcacaaccgatgtcccacttgtagacaagagcttggagatattaggtgtctggcactggagaaggtggctgaatcacttgagttaccttgcaagtactactcccttggatgtccagaaatctttccatactacagcaagcttaagcatgagacagtatgcaattttagaccatatagttgtccttatgctggatcggagtgttctgttgttggggatattcctttccttgttgctcatttgagggacgatcataaagtggacatgcacacaggatgcacattcaaccatcgttatgtgaaatcaaatccacgagaagtagagaatgccacttggatgctcacagtatttcattgttttggccaatatttctgccttcattttgaagctttccagcttggcatggcccctgtatacatggcattccttcgttttatgggtgatgaaaatgaggctcggaattatagctatagcctagaggttggggccaatggtaggaaactcatttgggagggtacaccacgaagtgttcgtgatagtcaccgtaaggttagggatagccatgatgggctcattattcaaagaaatatggccctatttttctctggtggggatagaaaggagctgaagctcagagtcacaggaagaatatggaaagaacagaattcagatgctggggtgtgcatgccaaatctctgtagttgacatgttatttgaaaggaattcttacatgtgtttctgacactcttttgagatatatttgtaccaactttgtgcatgttgtaatagattaaggcactaaggtggctctgaaattttcagatttcataagctgtgtaataaacaagattttcttccttcaaaaactctaaaattttccgatttcataagctgtataataaacaagttttcttccttc

SEQ ID NO: 21499 - DNA, 250 bp, Glycine max
  Clone ID: PAT_MRT3847_119418C.1
ggggccttgggttgttccaaaatttctcatgctttttctgggaaaacctactggctgtatatttaacaacctgtttttctgattcttaaaccaggttccttattttttaaatccttctaaaaagaaaaaaaattttttgtttaattttggaaacaattgggtcccctttgggcccatcaaccgggaactcttgagtttcttccctcccagggtttttttcctttagaggggctgggggccttaaagccct

SEQ ID NO: 21500 - DNA, 483 bp, Glycine max
  Clone ID: PAT_MRT3847_119419C.1
gcaatgtttagtttcatcctctcatcttttccatcaacacattgaattaaaaccccctctcataaataaaagagtgggaaaaaatggaaagagcaattcccaccaacctgaatccaaagtcatcacccacctttaaagatagaagtgtatctttttcttctcctcatcatctcacacctgatcaaccaaacaaatctgaaccaccccatgctatgatgatgaggcctaatgatggacttagaactctagaccctgatcctattacttctgagcttagcacttttggtgcacacaggtacttcaaccaagggaccaacaataataatgacaacaccatccaaaaagcgaccatcaatagcaacagcagagtctcccccctgctcaacatggacacagaacacaaacacaataatcaagttcaagagcaaggtgacatcacaaagtccacaaggtcattctcctattctgcttcatcatcagttg

SEQ ID NO: 21501 - DNA, 1202 bp, Glycine max
  unsure (1)..(1202): unsure at all n locations
  Clone ID: PAT_MRT3847_11941C.1
ccacgcgtccgctctctctctatacaatccctgcttcgttagagaatctagggtttccaactcccaaactcattcttcaccttctaaacaaacgcaggaggcaacatggcatttcttgtttccattacaaaagacggggctaactaatcttccaatatatggcaactgagagtccaattagaatctctgaagctgggagtaaatggccgtctcttaaggaagctgcaacttttggctcgccatcccgtcacatggcaacagaggatctgggtatatttttaaatggccataggtttcatggcagtggaaaggatgcagtacccaaccgcagtggcagtgcacctccgagcatggaaggctcatttctggccatagaaaacttgttatcccagaacaccaccaggaatgcgagcttgggatctcggaacagagctatgcaaaaatatgatagtggtaaagggtcttttcatttgtcacaaggaactcttgcaacacacaaggaggagtctgaggatgatttgacccaaaagctgtataataatttgttagacaaagctagtggaaaatggcatagacaggatgcggcttcaacatcatctcaggacacaaatttagtactggaagattttccccatatcatgtcacctgtatataataagtctcttggagtggtggatgaactaattgatgtggatactggttccagttcttctcttggccctcctgtcaccacagtggatgctgtaaaacctaccataggtgcagatgatgtaaggctgtcatcaactgttgattcccgtgcccctgtcacaagctcatcatctctcaattccactggaagcatgggatttaatgtcttagatgttacaattgtagaatctcaattaagggctctcaatggatctaatctaccaaattcagaaagccagagttatgaagataaatggaagaacaggtgccagaataatttgatgcaacaccagcaaccaaactatccatgtggggggccctaccaccaattcttaaagtgaaaaatgcacatatgtttggtaggngagcagtttcttcacaatccaagcaggttctcctcctgatgtgcaccctgtactgcaatcattaagggtattacgccctccactatatgctacaggcagcagcaagcttatatgaccttcagcaaatccatttttacactaatttgc

SEQ ID NO: 21502 - DNA, 222 bp, Glycine max
  unsure (1)..(222): unsure at all n locations
  Clone ID: PAT_MRT3847_119420C.1
nacaaanaacgngacgtnagctcggattccgaacntaggtcctctagtgcngncgcngactantganctcgtcganncgggngatnnttcngngccggnacnngncaggcgtaccancttnccctatanngngangtatnagcgnttggngtanatcanggtctngntgnatcatgngngaanngnntcngntctcattccaacnacntacgcgnnncccan

SEQ ID NO: 21503 - DNA, 286 bp, Glycine max
  Clone ID: PAT_MRT3847_119421C.1
aattcggctcgagacttgtataataatcatcctattgattattctgggtcttaatgtatatatttttttaaaagtacagaaatgatgtaccttgtccactgacagttaaattacaaggtgctttctgttacataaatatgatgcctagagaaagcagaatgtcattcttactaggagggatgcgtttaaacgacatacaaattagcctctgcaacttacagattgtgacattttacaaaaattcggctcgagcaaattgactttcaatctggaattcgttttctga

SEQ ID NO: 21504 - DNA, 657 bp, Glycine max
  unsure (1)..(657): unsure at all n locations
  Clone ID: PAT_MRT3847_119422C.1
tttgtcggcaccaataccacgtaattatgtcctatatatagagttaagacaaaatgaaaatgaactcctataagctcaaaacatgggcttgctaaatttcactatcctccaaattgttgattttgagcaaaccccatacctcccttgcattacattagttcctccatatatatgatgaaggtgctgcactgaaatcagggcaatctctccccccagtgatcagattgatggcatttacagcattcgacagaagcaccaccacctgatcccaaaggtagatttctaatatttgggcaaagaagagagctatggccagagcctccacaattggtgcatgacatatatgaaccaggagcacctgctgaaacaaaattgttatattggctttcataccgttgacccacttggtttgttggcatcccaaaatcaaaatcactactgctatttattggattataagctggaggcgtaacttgcccggtggcaaggttcatggcactaaaatcatttgccagcccactgacaccacctgcgtgtgaacagctattcaaagattgtgaattcccaaaggtgaatccagannntngaccagtggcaaattctgcaggtgctgcaacaggttgtcctaacagctcacatttctccagcacaacatct

SEQ ID NO: 21505 - DNA, 314 bp, Glycine max
  unsure (1)..(314): unsure at all n locations
  Clone ID: PAT_MRT3847_119423C.1
aacgcacgagagagagggggaaagcggaccgggccctcctacacttccaagctcaccgacacggagcgctaggacagccaaggcagagcgaacggcatcaaagcactctaagggagaaagacagacatccacaaaatcacaggagaaaccaccctcctcaagagggggaaaagncannagaaagacatgaagagaaaaaaaaccccaatggtggggggcggcgagggcaaaaactcctgaaaacatgacaaaaaaggacgctcaatgaagaaggggggaaacccgacgagactataaagataacagggcggccc

SEQ ID NO: 21506 - DNA, 269 bp, Glycine max
  unsure (1)..(269): unsure at all n locations
  Clone ID: PAT_MRT3847_119424C.1
caagcttcagagcgcaggcanacaacttcttctcagacatggcatctcaagtaagcctctttctttctctctctgtctctgcaaaatcttcatcttaaaaatcctatcttatgtgctcacaaatcgcaatncaatggncttngctaaatatgaagaactatgaaanggatgaaattttgatcttcttttctgtcgtaatggntccgtagccaagggtttnancngggaatccanngantggggntnccnanggnttntttttnggggng

SEQ ID NO: 21507 - DNA, 292 bp, Glycine max
  Clone ID: PAT_MRT3847_119425C.1
cagtgctgtcggtttatcgatgaggctgcctcattatgagagctgatgtgaacactgctccacgctgtcggacctctgagctcgtcaacccagaaagccttagaacctgatcctatgacatatatgtacccctgtggtacatttgcgatctatcagaatcatgagctatctattatagaacatatttcccataactgcccttaatgttacccagttctgaactggtgtgcacactaatgcccgacagcataactcttagagagatgcacaattagctccatgagttctagag

SEQ ID NO: 21508 - DNA, 1000 bp, Glycine max
  Clone ID: PAT_MRT3847_119426C.1
gaattgctatcctttccctacatatattcctttgattgagtttcttcccctgcttccccccttcccccaagaaaaagaaaccccaatcactctcacgttatgatctttgttatatcctcatataacttgttatatcatatcctttatgattttgtcctcgtatatctctggaccctgctatttaatacatcttattggaattgaaatgctgattgggagttaagtcaagcttgttataattatctttacaaataatacctgttacatagagcttgttatcccctcctctagcctggacccttaactcccgcaaagaaagtgaacagctacacataataattgtgggatgagactcatgtaatgcaaggtcattaacctctttctcttcttggttgggaagttgtacatctccactaaattcaagaatcatttacatcatataaatgtaataattgaattcttgctcactagaacagtaatgacacctttactcaggaggaaaaggatgctttgtctcgttctcaaagtcctgatgtcacaactaccaaaaaaaaagaaaagtatcgatgttccacatttagctatggtaatggctttcatatacagcatggtcaagcaagactatttgatgcaggaaaagattgtttctgctttggatgtcaagatgccatcagaagaactagaaagctactgccaaatgtggtctttacgccccttcataaatgatgagatcgtgcatcaagcttgggaacatattcactgaaccgtattttgtttcttattataaagaatcagttaccattaggctggataaaattataatgctatagaagcaccattgctttcctagaatttcactttattttgacattggtcctcctcccccttccccatttttgctaacaaaaaataaataatttgatttgatgttaatttaacgttcagccttttacaaaaaaaaaaaaaaaaaaaaaaaaaaaaaaaaaaaaaaaaaaaaaaa

SEQ ID NO: 21509 - DNA, 623 bp, Glycine max
  Clone ID: PAT_MRT3847_119427C.1
atgcataatatcaataaatggttactggttccttacttattatggatggttatatttattatcattccagccattttacttgtttacttttcttttatagatattcatggtcactttagtttcacaaattatgagcaggtattttcaacaagatatttaaaaatgtttattgattcaatatggtatgccgctttaattactatgattaccttaataataagttacccagctgcgtactttatttcttattcaagatttcaaaatatacctgttatgttgttaattatccctacttggattaatttaccttctaagacccatgcatttattggtttgttggggcatgatggagttattaaccaagctctacatatatttcaaataccctaattaaatttagtagttacaagtggtgcatttttattggtggcgagttatatttatatgccatttatgattttgcctatatgtaacagcatgaaagcaattcctaacatattttgcaagcctctaatgatttgggcgcgagtcatgtactacgtttcgtaaagaatcgttcctttacaagagagggtataaacaggtgtggcagtacatgtataccagctctttactgttatgat

SEQ ID NO: 21510 - DNA, 308 bp, Glycine max
  Clone ID: PAT_MRT3847_119428C.1
ccccccaaaaatttccccaattaaaaaagaaaaaaccttgggggggtttttttctcttaaccaaaaaataaggcaattgttggcctgccgaccgggtttagctaaaaaaaaagtcccctttttgtaaaaaaggaaaaagaatttcccaacctcgttgcgaaaggaaaagaaggggaaagcccaaaaaaaaaacccgaattgggataggggagggggaaccccccaaatttgggattggatgggttgaaccataaaagtttgcgtctgcaaaagtcaagggaaatcccccggggggcagggaagccccc

SEQ ID NO: 21511 - DNA, 136 bp, Glycine max
  Clone ID: PAT_MRT3847_119429C.1
tgcaaactgaagttccggtgtgcagctgttaaagaaaaaggacattggatgactgtcactggaacataccttgtttccaccacccagccgtgggtaacatgcgtaccacttacgtgctatttactactgactacta

SEQ ID NO: 21512 - DNA, 418 bp, Glycine max
  unsure (1)..(418): unsure at all n locations
  Clone ID: PAT_MRT3847_11942C.1
gacccacgcgaccgcncnnggcgggcgcagaaacacacccnaanggcagagcgcggagggggcgancgnggcggcgaccgnggcggnnncggacggggangcggcgggcgaggacgcggaggngacaggggccgaggccggcgccgaggcccccgccgcgaggaagaggagaagnggggcccagggaccaaacagggccgccgggggaaggagggaagaagccgaagcccggaacagagcgaccggcacncgcncccgagcaaggagcaccagancaccgacacgcgcgggggncccacccgcaaggacgaggggaggaagagcacgccggcccagaagcagacccgggccgggcagaggacccggcgcaaggcccggggcggcggcggagacaacagcggacacgaccgggccgggc

SEQ ID NO: 21513 - DNA, 613 bp, Glycine max
  Clone ID: PAT_MRT3847_119430C.1
ccacgcgtccggtcaggtttaggcatggtcgtgcagtagtagagtcttacgtcaccagtaacatatgatttggtagatggctaagaagatcaactcatttttcctgctagagatggataaggggcaccttaaagtgtgcagattactgcatagaccatcaatgctctacaacggtcgaacagttttgaagttttcttggcgtttaggagagagcacgaatactcgtcatttgctgaactatgatggagaagtaccatttgccgcggtgctctgcatattgcaagacaaggatcggtatcaagactggtgctttggttcacaaatttgtgagtgactgaggagttccgtgtgatggcagactctgtgtagaactaggtagcttgtaactactacaggtctgatctcaagagggcagctaggttgagaatgcacgctgtacattaggatcctcagaaggataatgttggtgttaagaagagtacagcttgatggggatgctcccgggaaaaagtgatcttaaactaggcaatttgcattataaagatcatccttcctttaccgtaatgtgatttgatttccggtacttaattattgattttctagctttgtttgg

SEQ ID NO: 21514 - DNA, 534 bp, Glycine max
  unsure (1)..(534): unsure at all n locations
  Clone ID: PAT_MRT3847_119431C.1
ctcagatctcatccgatcccatactagggtttcaaattgggaattttccccccaattcggtgtttctgaaccgaccataatctccgacgcatcgaattcaataaaaaaattcccccatgcatcgtgacgggagctccatgtccatataaatggagacgcagcgaattatcgagtttccgcataggaatatggacaagaggccaaggaagaagcaacgtttaacatgggacatgcacgtgcctcctcctcctcctcctccaccacctcttcctccacccaagttgcaggttcttcctacaatgtattgcaagcaggaggttgggaatggagtggttccaaatcatgcttatccatctctgttttacaggggaatgccgcgcaatggatcacccccctggaggcctgatgataaagacggtcactacgtttttgccgttggtgaaaatttaacacctcgatacaaaattctcagtaaaatgggtgaaggaacttttggccaagtgttggaatgtttggacnatgaaaaggaagaaa

SEQ ID NO: 21515 - DNA, 272 bp, Glycine max
  unsure (1)..(272): unsure at all n locations
  Clone ID: PAT_MRT3847_119432C.1
gcgtgcgtgcgtacggctgcnagaagacgacagaagggtttattactgatacattgaactttaagaaagatatgggaaccatatttgacaagtaacttgtgatttcaaattttcaatacattttttaattaaaaaaaagggggaaatttttttttcaggggggagcngcgaacccccaagctggcatgcacanaaagcgnctcaaaagaaggaagggaggcagggcacaancactgcaacgacataacangaacaggaangaccaccaaaca

SEQ ID NO: 21516 - DNA, 316 bp, Glycine max
  Clone ID: PAT_MRT3847_119433C.1
caaatttcacgactgtgcaagtcacttattacaacattttttttaaaaaaaactattacacaacttgtggtgatattttaaagactgtagctgaagcaaataccaaactaaggctcatcccttcatacatactatttttgaaccctactattaagacttacactgcaaatcacgtacgataccgcttaataccaaatgcatcatcttatccccctctcaaaaaggatgattaccctcccacacaataatctttcaccaattacaatgcttcccttacaccttacaataatacttaaaatttagctgttgtactttt

SEQ ID NO: 21517 - DNA, 472 bp, Glycine max
  Clone ID: PAT_MRT3847_119434C.1
gaaccttgggctatacttgttctcgtttcttttcatctttttttacaatgaagtgttgtagcagcatgttaggatctaattgcaaggtatgagaattgagttcatcatcatttctctgacaattgataggttgtgaagagcttctcatctggtaaaagagaaggcggagactttgttgcagcctgtgtttcacctaaaggagaatggatttactgtgttggtgaagacaggaatatgtactgctttagctatcaatctggcaaattggagcatctaatgaaggtatgtgtaattgtatcttgagttagtcagagattagatctataaatttgtttcaaattggtctcaatttccatcaatattggaaatactggtttttatatatggtataatcggaataacatggtttgaataatgggggctttcctttgggatttttattgtcacccagaaatggttatttgtccaaaat

SEQ ID NO: 21518 - DNA, 364 bp, Glycine max
  unsure (1)..(364): unsure at all n locations
  Clone ID: PAT_MRT3847_119435C.1
ctcttgagcatctcaagccatgaattaccggtatatccatcatacatggcttgagatgccccagagggggcgcactggccancgcatattcacacttgcattgttatcttctgggggctttgatgtgcatcacatttctctttgcttccccacagcatgtccttttcatactgggctttttttattgaggtattatcgtggcttgatatttatttaatttttacgtcgagttgtattttgtattgtttgatctaatgaggatttgatggctcgaaaaagaggaatctatgttttgctagaaagagcagcggagtgtatgtttatgtatttttcatcaatgttattgtgtattatatttatatat

SEQ ID NO: 21519 - DNA, 258 bp, Glycine max
  Clone ID: PAT_MRT3847_119436C.1
agaggaaaggaaaagtggcaaaaaaagcgagtcatttattagagtcgcgagctagaaaattcttcttagaccaaattgctaagaaaattgactcaagtaatggtagggagaggcggaagggtctaaagatgttgagaaatgtgacaaatggtttcattgatgtgtatgaaggtgggagttctgatggtctacctggtttgcaaatttatacattgctgatgaattcaactgatacacagcacgagattttgcatgaac

SEQ ID NO: 21520 - DNA, 350 bp, Glycine max
  Clone ID: PAT_MRT3847_119437C.1
attaaattggggatcatttgtacatcccaagttgggtggttagttgttttctgaagtcacaggatcatcttaggcaggaatcaagttaggtgcatgatatggagacatgcttcaggtttaatttgtaatcgtggagtggttgtttaactctagggaagattcttctgtgtagttatggcttacaagtttgttaatgctctattgaagcaaatgttgggagtagggaaagtgcagataagggcaagaaataaatgtggaagagattagagtgatgaggtggcttaatggataaatgcaatattatgaagaaaatgagatggaaggagtagcacctattgtggaggaaaagc

SEQ ID NO: 21521 - DNA, 347 bp, Glycine max
  Clone ID: PAT_MRT3847_119438C.1
ccgcgctggccgccctttttttttttttttaaagaaatcctttaggcaatcaaaaatcacaacactacatgacaagaagttctgctctcctaaacaaatgaaaaaacgttctattcaccataaaaataacaagttcttggtggatttgtcttaacaagattatacctaaatcacttttagcatcctctaaagcatcatgccgctagcgcactctaggagttatgcgcccaacacttatctgtaataacttggggttgttaccttaggacgttatcaatcctgttatggcagggcgcgcttgatgcaccttgctagtttcccgtacatataaactgagacaagatgga

SEQ ID NO: 21522 - DNA, 731 bp, Glycine max
  Clone ID: PAT_MRT3847_119439C.1
cgagcggtggccaacaccatcgcgtcccctcacgtactggaccgttgggttgttcttcgagaccctctctgactcgccgggttgactcgctcgagtttgggggtttctgattcacccggggacggatctcaattttgtctcaggaaaagcaaagggcatcatattactatgaaggcactaattcttgttggagggtttggaacaaggttgaggccattgacactcagtgttcccaagcctcttgttgattttgctaacaagcccatgattctgcatcagatagaagctctcaaggccattggcgtcaatgaagtggtactagctatcaattaccaaccagaggtcatgttgaatttcttgaaggagtttgaggcaaaacttggtatcaaaatcacttgttctcaagaaactgaaccgctaggtactgcaggccccttggctcttgcgagggataagctaatagatgactctggagagccattttttgttctcaacagtgatgttatcagtgagtacccacttaaagaaatgattgaattccacaaaacccatggaggagaggctaccataatggtgacaaaggtcgatgagccatcaaaatatggtgtggttgtgatggaggagactaccgggcaggttgagagatttgtagagaaccaaagttgtttgttggcacaaaataatgctggaatctacctattgaacccctcagttttggatcgaattgaact

SEQ ID NO: 21523 - DNA, 347 bp, Glycine max
  unsure (1)..(347): unsure at all n locations
  Clone ID: PAT_MRT3847_11943C.1
taagcgatacgttaacaatgcgtaacaaatgacacgtatagagaagggagagggaacaaccaagcgggcaatgacgtccgcttttagaattattccaattatcattcaacgttacnttggttgttaccattatttttaaaacaacgttgcgacgtactaccagtgttatttggcgtattgaaagtattgttaccgttgtcgccattgttatccgagttagtatccgtatcgttcaagtgttgtgtgttcgtaaagtcacggcccgttttgcccgtcagtatctccgcccttattcaagccgtggttcctccctggccttgctggtggcacacgccgtacccataagg

SEQ ID NO: 21524 - DNA, 374 bp, Glycine max
  Clone ID: PAT_MRT3847_119440C.1
actaactaactcttacaaccagactcacttactgaaatgttacaaaaggggtacgagcttaaatgagtgcataaaccacacaatatcttatctttgctacacatttatagtaactattcatactctaaaggggtatgctgtaaatgtgcatatcgtgctatcatatcacacattgtctatagagcatcctatcaagaattacttctctactgcaggacatcagtccttacgctctgccctgacatgcacacgacataaaaatgacctctcgcactatacgataagacgcgctattacagaacgactgctcctattcctgctccatagacatatagatgaccaatagatgctattggcttgcacatctacggtga

SEQ ID NO: 21525 - DNA, 639 bp, Glycine max
  unsure (1)..(639): unsure at all n locations
  Clone ID: PAT_MRT3847_119441C.1
ccacgcctccgcacgactggagaccgttgggttgttcttcgagaccctctctgactcgcctggttgactcgctcgagtttaggggtttctgattcgcccgcggacggatctcaattttgtctcagttaccatctttagctgcattcgtgtcacactcctttgaacacccgtcacctcaggaaaagcaaagggcatcatatcaccatgaaggcactaattcttgttggagggtttggaacaaggttgaggccattgacactcagtgttcccaagcctcttgttgattttgctaacaagcccatgattcttcatcagatagaggctctcaaggccattggcgtcaatgaagtggtgctagctatcaattaccaaccagaggtcatgttgaatttcttgaaagagtttgagacaaagcttggtatcaaaatcacttgttctcaagaaactgaaccgctaggtactgcaggccccttggctcttgcgagggataagctaataagtgactctggagagccattttttgttctcaacagtgatgttatcagtgagtacccacttaaagaaatgattcaattccacanaacacacggaggagaggctaccataatggntgacaaggtcgatgagccatcaaaatat

SEQ ID NO: 21526 - DNA, 1632 bp, Glycine max
  unsure (1)..(1632): unsure at all n locations
  Clone ID: PAT_MRT3847_119442C.1
acggctgcgagaagacgacagaaggggggtgcgtgcgggttattatatataggggaagatcaacgggacgtatgtggcaggtgtgggttcttcaattcattctagttctggattccgactagccgcgttgactcggttccgtttttcattctcgcggatctaatattaaggaatagcttaagggcacattacaatgaaggcattgactcttgttgattttgctaacaagcggcttgggaacactgagtgtcaatggcctcaaccttgttccaaagcctcttgttgattttgctaacaagcccatgattcttcatcagatagaggctctcaaggccattggcgtcaatgaagtggtgctagctatcaattaccaaccagaggtcatgttgaatttcttgaaagagtttgagacaaagcttggtatcaaaatcacttgttctcaagaaactgaaccgctaggtactgcaggccccttggctcttgcgagggataagctaataagtgactctggagagccattttttgttctcaacagtgatgttatcagtgagtacccacttaaagaaatgattcaattccacaaaacacacggaggagaggctaccataatggtgacaaaggtcgatgagccatcaaaatatggtgtggttgtgatggaggagactaccgggcaggttgagagatttgtagagaaaccaaagttgtttgttggcaacaaaatcaatgctggaatctacctattgaacccctcagttttggatcgaattgaactgaggcccacttctatcgagaaagaggtgtttccaaagattgcagcagataaaaagctatatgcaatggtcctgccaggattctggatggacattggacaaccaaaggactatatttctggcctgacactttacctggactcgctgaggaaaaagtctccttctaaactggccagtggtcctcactttgtggggaatgtcattgtgcatgaaactgccactattggtgagggatgtctcattggacctgatgttgccattggtcctggctgtgttgttgactcaggtgtcaggctttcacgctgcacagttatgcgaggagttcggattaaaaagcatacttgcatatccaacagtatcattgggtggcattccactgttgggcaatgggcccgtgtggagaatatgactatccttggagaagatgttcatgtttgtgatgaagtttacagcaatggtggcgtagttttgcctcacaaggagatcaagtcaaacattctgaagccagagatagtcatgtgaggctactgtcttaaattcatagcatgtgattaggaagttgtaagtttttgtgtctgaaatgtttgtttgtttcttttttttttttttttcccgcatcccaatccgtttttctttgttacatattttacaagttgtgtaatattcagtgttatttatctatctttttaagccaagatttctctgtaattatttgagataaattccgctaagaaccagataatggtggacctctgtcatgaaacgaaaaaacttggaaactttttcctagtcctaggtatatttccatattacgggccgcnaaaaaagacaaaaaaaaaacgtaaggactaacattatattt

SEQ ID NO: 21527 - DNA, 700 bp, Glycine max
  Clone ID: PAT_MRT3847_119443C.1
ctcacgtactggaccgttgggttgttcttcgagaccctctctgactcgccgggttgactcgctcgagtttgggggtttctgattcacccggggacggatctcaattttgtctcagttaacagggtcttacatcttaagcttctttgacagactgttctttctaatttaagttaccatctttagctgcattcgtgtcacgctcctttgaatgcccgtcacctcaggaaaagcaaagggcatcatattactatgaaggcactaattcttgttggagggtttggaacaaggttgaggccattgacactcagtgttcccaagcctcttgttgattttgctaacaagcccatgattctgcatcagatagaagctctcaaggccattggcgtcaatgaagtggtactagctatcaattaccaaccagaggtcatgttgaatttcttgaaggagtttgaggcaaaacttggtatcaaaatcacttgttctcaagaaactgaaccgctaggtactgcaggccccttggctcttgcgagggataagctaatagatgactctggagagccattttttgttctcaacagtgatgttatcagtgagtacccacttaaagaaatgattgaattccacaaaacccatggaggagaggctaccataatggtgacaaaggtcgatgagccatcaaatatggtggggttgtgatgga

SEQ ID NO: 21528 - DNA, 2132 bp, Glycine max
  Clone ID: PAT_MRT3847_119444C.1
gttctctgttactccttgatctggttctaaagttataattaactacaggaaaagcaaagggcatcatattactatgaaggctcgaattcttgttggagggtttggaacaagactgagctcattgacaccgagcggtggccaacaccctcgtaacacctcacgactggaccgttgggttgttcttcgagaccctctctgactcgccgggttgactcgctcgagtttgggggtttctgttactcccggatctggttctaaagttttagactagagaccgtttgggggttggtgttcgtcacttctcttcttcaattcattctagttctggattccgactcgccgcattgactcggtccgggttggggtcgactcagttcggtttttcattctctcgcgaatctaatctataggaaaagctaagggcaacattcacaatgaaggcattgattctgggttggggggtttggaacaaggctgaggccattgacactcagttttcctaagcctcttgttgattttgctaagaaacctatgattctgcatcagatagagccccttaagggtgttcccaagcctcttgttgattttgctaacaagcccatgattctgcatcagatagaagctctcaaggccattggcgtcaatgaagtggtactagctatcaattaccaaccagaggtcatgttgaatttcttgaaggagtttgaggcaaaacttggtatcaaaatcacttgttctcaagaaactgaaccgctaggtactgcaggccccttggctcttgcgagggataagctaatagatgactctggagagccattttttgttctcaacagtgatgttatcagtgagtacccacttaaagaaatgattgaattccacaaaacccatggaggagaggctaccataatggtgacaaaggtcgatgagccatcaaaatatggtgtggttgtgatggaggagactaccgggcaggttgagagatttgtagagaaaccaaagttgtttgttggcaacaaaatcaatgctggaatctacctattgaacccctcagttttggatcgaattgaactgaggcccacttctatcgagaaagaggtgtttccaaagattgcagcagagaaaaagctatatgcaatggtcctgccaggattctggatggacattggacaaccaaagggactatatttctggcctgacactttacctggactcgctgaggaaaaagtctccttctaaactggccagtggtcctcactttgtggggaatgtcattgtgcatgaaactgccactattggcgagggatgtctcgttggacctgatgttgcaatcggtcctggctgtgttgttgagtcaggtgtcaggctttcacgctgcacagttatgcgaggagttcggattaaaaagcatacttgcatatctaacagtatcattgggtggcattccactgttgggcaatgggcccgtgtggagaatatgactatccttggagaagatgtccatgtttgtgatgaagtttatagcaatggtggtgtagttttgccccacaaggagatcaagtcaaacattctaaagccagagattgtcatgtgaggttactgtcttaaattcatagcatgtgattaggaagctctaagtttgtgtctgaaatgtgtttgtttgtttcatttgtttttccttttttttccgcatcccaatccgtttctctttgttacgtattgtacaagtcaatttcgtttagtttagaatgagtgatgccataatttacaatgttgaaaggtctgtgtctttgtaaagggtataaagttggtttactgttcctaagttgtgtaatatattcagtgttgtttatctctctttttaagccaagatttctctgtaattatttgagataaattccgctaaaaaccaaataatggtggacctctgtcatgaaacgaaaaaacttggaaactttttcctagtcctaggtatatttccatattacggccccacttcatggcatttctttcctttctataagtcagtttttggattagaatgagtgacgccattgcattgatgtattttcagtgtggtcgttgtgtattttcagtgtgtatagaaataaattattgtttagttgtttctcgcc

SEQ ID NO: 21529 - DNA, 418 bp, Glycine max
  Clone ID: PAT_MRT3847_119445C.1
ggcccgtgcgcgcggtcggtctgaaggcgaggttaagcatagaagaaagaagagaatggctagagacagcgtcctaacacgcgtggcgaccggagccgccgttggcggtgctatcggcggcgcagtcggtgctgtttatgggacttacgatgcaattaggtataaggttcctggactcctcaagataaggcatatagggcagaccactctgggaagtgcagctgtatttagcttgttcctagcggcaggaaccttgatacgatctcactagtttgtttccttagattgtgcagtcatggtgacgagttttctttcaattttagccagcaaaaattgccatgtaacctcacattaatcttttgggtgttgacattatataaagttctttttaataaaaaaacagaaaattatgacaaaa

SEQ ID NO: 21530 - DNA, 1354 bp, Glycine max
  unsure (1)..(1354): unsure at all n locations
  Clone ID: PAT_MRT3847_119446C.1
aataatgtttgtatttttatccatcttcttcttcatactaatttcctttctttgtctgtgtctgaaacaatgaaacattgagttgcaagttactgtgtggaatgttcttctgataataataatgaagtgtttctatttctcaaacggaggagaagacgaggattccgtggcgggagcggcgccgccgagttcgcgcggcggcggctccacctcgcgggtgtcgtgggcgcgttcgctgagcctcatggacacgcgcagcaccagccgctcccacttcgactccgaatcaacggagttctccgacacggtggacttccaccacttcctggcgcagcgccgcgccaaccacctccgcctcttctctttctccgacctaaaatccgccacgcgcgccttcagccgcgccctcctcgtcggcgagggagggttcggctccgtctaccgcggcctcctcgaccaaaacgacgtcgcgatcaagcagctgaaccgcaacggccaccaagggcacaaggagtggatcaacgagttgaacctgttaggtgtcgtgaagcaccctaatttggtgaaattggttgggtactgtgccgaagacgatgagagagggattcagaggcttttggtttacgagtttatgccgaataagagcttggaggatcatctccttgcaagagtgccgtcgacgataatcccttgggggaccaggttgaggattgcgcaggatgcggcgaggggtttggcgtatcttcatgaggaaatggattttcagctaatatttcgggattttaagacatccaacatcttgctggatgagaatttcaatgcaaagctttctgattttgggctggctaggcaaggaccctcagaagggtctggctatgtttcaacagcagtaagaatttgtctatactcttgagaaaactcattatatttacaatattgcatgacaacatcagaatagtgtgccttctggcagcttattttgagtaaattaactatatttcaccatattcaatgtgaatgattctaatttataaaaagttacaatgataatctgaagtctgaatctttgttttgttcctgatattttgctgttacgcaaaataaatgacttatttcttcactaaggttgtcggcaccataggttatgttgcgccggagtatgttctgactggtaagctaactgctaagagtgatgtgtggagctttggtgtagttctttatgagcttatcactgggaggagagttgtagagagaaacctaccaagaaatgagcaaaagcttttggattgggtaagaccttatgtttctgatcctagaaagcctcgtgccgnnttcctgcngcccgggggtccnn

SEQ ID NO: 21531 - DNA, 415 bp, Glycine max
  unsure (1)..(415): unsure at all n locations
  Clone ID: PAT_MRT3847_119447C.1
ggccggcccatttacccatctgtggataggggctacatgactcactttgttgctggcgaatctgaatacatataacctatgttttcttaggggcctgtggatgaggatctccacacccacagtttcgtactgcatgtgacgctgctactgatggaatccaaggtcacttacagactgcaatttgagcgtgcgaacaatacaggggtttaaggacgggattcattgaaacaagccttgatgagatattnacagataccggaccaaactgggagtttaattgtaaaatcattctggaccggaacatggtgcaaccctatcacgtaccgatagcacaatacttgtgtgtcaatccagctattctgtttactataaagcattatggatgttaagccaggggtctttactcacacagacc

SEQ ID NO: 21532 - DNA, 1064 bp, Glycine max
  Clone ID: PAT_MRT3847_119448C.1
aaatcaaactggccttatttgtcctgatcaattctcccttcataataaacccactgatcgcttctctttcctcttctctctctcagtagaaagcctacaaccttcttttatctgcgtttcctctctctctctctcgatcagtgctagacaaggactggtaaccaaaaattccaagaagggtacattaattcatggcctttgaggagcactatgtttctcaggaattgaaaaccatccccagctccatgacagtgacagaaaatttggatgggtgttttgattgcaacatctgcttagattttgcacatgaaccagtggtcaccctttgtggccacctatactgctggccctgcatctacaagtggctccatgtccaaagtgcttctcttgcaccagatgagcacccacaatgccctgtttgcaaagatgacatatgccacaccacaatggttcctctctatggccgtggccagggcatagctcatagtgaccatgatggaaaggcatcatcctatagaggcagttgtataccaccaagaccacctgctttgggtgctcaatcgctcattgcaacatcatctcaaagtgttccatatcgcaacacttatcaaaatcagcatttataccaagaagaggatgcatcatcatcacaaatgctgaaccctggtgccaccattttggcaccagggttcccccaccttgtgtttgggatgtttggagagatgttttataccagagtctttgggaactcggaaaatttatacacccacccaaattcttatcacctgggggaaagtaataatagtcccaggttgagaaggcaagagatgcaagcaaacaaatcattgaacagaatttcaatttttctgttttgttgtttccttctgtgtctaatcgttttctgagcaagaaattggattattattctctattgccctgttgtataattttaaagaaacacgggtgttagcttgagaatgagatagattgagcaattgtatgtagggtaaaagaactggtgttcttcatcatttactataatatatttgagctcgatttttccc

SEQ ID NO: 21533 - DNA, 377 bp, Glycine max
  unsure (1)..(377): unsure at all n locations
  Clone ID: PAT_MRT3847_119449C.1
ncanaactnacagcccccannttgnctangtcnnagngnntgtnagtcctntcgnaaagtcctcgantncagagncgncgatgtgntantnngaaaggtgncngcngacntnngnncttgcacatcagtgtgnacagagattgtgtggtcggnagncngtcnnngacgntnggnngngcactatnggannctattccgcaatagaannctgggntgatggtgcgcacnnctcgcngnggngaaancngcnnnttngannctnctagtggannctnacaagctctnnggatttaatancntcntnaancantgcgncgcgngnnncnaaggaatacatccatgngcgcgacaatatagatcagactccnaaacagntc

SEQ ID NO: 21534 - DNA, 730 bp, Glycine max
  unsure (1)..(730): unsure at all n locations
  Clone ID: PAT_MRT3847_11944C.1
catgcctcgcgtataaagctctcactaaagacagttctcatgcttgctgataaatggtaggtcttcctcatcttttgagtgaaggagagaaaattcctatgaactatttcattcaaatgatactattaattaattactcgtataggtcctctaggtcttgtttatgcaactgattagaaataactacttggctaactaataaactaatagtaactacttgtattttgttttttggtcagatcaaccgtgttgagtttgttcattctaaatcgtttttacatcgggatatcaaaccagataattttctcatgggcttgcgaaggcgggcaaaccaggtggctgaccctgtttacttgtaagcctttgatgtattgtatgttaatgtatcatgtatttatccatttgaatctacatgtaggtttactgtattgattttggtctggcgaagaaatatagagatagttcaacccatcaacacattccttacaggtacaatgattcagatactaatctaggttatcccttttgttggaccttgttacctaattgaattgatatgacttttgaagttgtaattgtaacttttcatgtttagggtggttgttcttgttacttctcatgttgttacatgttgtcaatgctatattactgttcatcgtcatcttcattaagggagggtgttttcatatgatttcgnnagagcataattatatgtatgcgctagcaaatt

SEQ ID NO: 21535 - DNA, 310 bp, Glycine max
  Clone ID: PAT_MRT3847_119450C.1
gtgaaaccatggtctatccgtccttgtccagtttgattttcatttgaaaccttactctctcaccacatgagacttaccatagctacaacgagaagtagtaatggctgagtaagagactgcaagattcagtgtctgggctgtacagagaccagctgttttcaccaagtataaggcgccgtgcggctgaggaacctcgatatatcaaaactgttgtcgtctgcagcatttttgttcgcaattgaggaccctctgatgagattctggctcgctgcatattccatagtgagaaagaaccgatgaaagggagggc

SEQ ID NO: 21536 - DNA, 508 bp, Glycine max
  Clone ID: PAT_MRT3847_119451C.1
ggcgaatggtccccccctcgaggtcgacggtattcataatccggatcgagattgagtgtaacaggatcattttcttgttatcttatataaaggtcctcaaggaaggtattgtactgagatgactgagacaagggttaatactctcatggtcacgagttacggcaattatggcatgttgcacaacatcagaattcatttgaattgccaattccttggtctcgggcattccatcaaggaacatggtaggtttgcgttagagtgctcttcatcacttagaggtggtggtaataagatgaaacttatagtgaagaagaccgggaagcaaagttgtttaccaaccatgatggtagctctcaatgagggtcatgacgccatctctgaggagtccactaccgtgaagctcttggctctggtggctgcgacgaatagtaaagatcataacaaggtgattgcaaatgagatagcgaataatccactaaccattgtctggcctcagaaccagaccaag

SEQ ID NO: 21537 - DNA, 391 bp, Glycine max
  unsure (1)..(391): unsure at all n locations
  Clone ID: PAT_MRT3847_119452C.1
attcggctctatgagctagttgtagacgacaacgactacgtctactattttttcttatttccatccatccaatatattggttatttcttacaaatttggtgtctcccaaccacataaacatcatcatacncctccaacttattattaccaaaaacaacaccaaaaccccattcttactattaaatattcatatagaaaaaccctatttcacataccatcaactttcacaattttatctctacacactcaccaattatctaatatacacatataatcttcagatatgtccataaaactcacacaaatactcacaatatactcataaactaactttcacatacacatcaatataattacatatatttattacaaaataacaatttcaaacaac

SEQ ID NO: 21538 - DNA, 537 bp, Glycine max
  Clone ID: PAT_MRT3847_119453C.1
tgcttataaagatatttatgaaatatggctgcaatcacagagaacaagcaatgtaagagacaagacaccggagagagaaaagtggactgaagatgttaatgggaagaaaatggctcttattcgccagaaatttatggaagctaaacgtctgtctacagatgagagactacgccagtccaaggagtttgaagatgccttggaagttttaagttccaataatgatctgttagtcaggttattggattctcaaaatctttatgaacttcagtctactccagtagcagagacaaagcgtattactgttcttaaaccttcgaagatggttgacaatgaaaattctggtggaaaggggaagaaaaacgacaagcagattaagaaaccagcaaatgttggtgctggatgggagaaatacagtcctgcatactccccagccagtcagaaaattgacgagtttgcagttcaacctactcgaatagtggtattgaagcctagccctgggaggcacatgagattaaggctgtgtcttctcctactatg

SEQ ID NO: 21539 - DNA, 256 bp, Glycine max
  Clone ID: PAT_MRT3847_119454C.1
gtctcaaaagaataagttttatcttcctgcccaggcccactgactgtaaggaaaatattgccaaacatttccaacatggacccgactttacataatgaatgataacccggaaatagaaacttttcatgaaacaggaaatgaacagatgaattctcctagtagctacattggcgtgaaactgggtggcaacacccaataacatcttgatgtgtggggacactttatgattttttgtacaaccacaatcctagccctt

SEQ ID NO: 21540 - DNA, 131 bp, Glycine max
  Clone ID: PAT_MRT3847_119455C.1
ctgtctacctgcccactgtcgtggggattttttcaccaggctagaggtagctaacttgctctacctccgttccccgatcgagcattcgtcatagacattgatgatattgagagcgttgtcttcaatgtaag

SEQ ID NO: 21541 - DNA, 292 bp, Glycine max
  Clone ID: PAT_MRT3847_119456C.1
tttgatgccagttacattgagggacatcgtcggaatcaatgttcccgaagtgccccttgcccttctgcagaaccgaacgttgcctatcccttataggatgacaccctgtgtgcctcacaacttctgctattggggggcaaaatttcccgtccttgcagccacccttggccgtctcatcaacagagtcactatctccattatgcgttttcgcgctaataacccttgttttcccatcccttacacctaagcgacgacaatttttacaccttctccttctttgacgacgacaacg

SEQ ID NO: 21542 - DNA, 196 bp, Glycine max
  Clone ID: PAT_MRT3847_119457C.1
accatccttcaaagaaattatttttcatattataattccactgattccgtctgaggggggggatcttttcttatggtagaagaaccacatgatgatacagacccttccaattatttcaaacatctacactctaacccctttccacgaggcgatcaccccctttccctgatatgcctcgcccacaaagattcaccac

SEQ ID NO: 21543 - DNA, 222 bp, Glycine max
  Clone ID: PAT_MRT3847_119458C.1
gagcgaaaggattctagagcgaatagggggcgggtcaaaccacgggagatcgaacaaaaagctttcacaaaatttagaacattaattggtgttatccaacattttgttttttttattatagaaccatgtacactgcaacttttttggcaagggtaactacttctctatgtatcccagacaaaatgcgcaaagatgaggctatacgcgatagttgcttttttt

SEQ ID NO: 21544 - DNA, 1528 bp, Glycine max
  Clone ID: PAT_MRT3847_119459C.1
ccagcgtccgcttgcccacttccctccatcctcttctcatctccgtcactctctgtaagactaatccagtgcctgttgtcaatgtcaattgcttcacactgtctgaccatactgcatagttttatagtcatagctgctgatttagtaacatttttcaatacataattgccatagaaagaaaaaaaaatattgctttttgtaccataactagaattccaaattaaattttgatgctttaggtctacccatcatcattggaaccttaaaaatgtcacttgtaatcccctcatcctgtgcagcgcccttgcatttttctcaacgggagattaggagtttgagttcccaccaaaaatttgcctcttattattccatcaccccttttcaacataaagtggctttgagttgtaaaacgaggcatataaggactcacttgagaaatgaactaaatgttcttcataagtatgcagttaggtctaaggggcatgattttgagtcaattaatgatgagtccttgggttgggatgatgatgaagaagtcgaagatatggggtcgccttgggaaggtgcagttatatacaaaagaaatgcaacaattttacatctggagtactgcactaccttggagaggttaggtctagcaaagctttcaagtgatgtctcaaaaactagggctgctgcaatgggattacgtgttacgaaagccgtgaaggactttccaaatggcactcctgttcagatatctatagatgtgaccaggaagaagaaaaaattgaggcttgatgggatcataaaaactgtcatcactcttctttgcaataggtgttgcgcgccatctgctgagagcatattctctgagttctcacttttactcactgatgaacccattgaagaaccagagactattgatatgggtgttatttttggggaagacaaacttacaacctctggaaacagtggtgaggatgacgacgacgatgcacttattgacatggatgatcaactatattttcctccacaacagagacaaattgacatttcaaagaacataagggacagggtgcatcttgagattaccatgaattcagtatgtggtcctgggtgcaaaggcatgtgcctgaaatgtggtcaaaactttaacactggcaattgcaattgtagcaaggaggaagtacaagagaaaagctttggcccgcttggaaatttgaaagagaagatgcagttgtaacaattatgaagttcatgtgcagattttgctcacagtgctgtatcgttatgtgtagaagtcctgaccttaatgaattttattttttttatgttctgacattgttaagcgcctaccaagagctcttggatccatgatcatacatggcatggatgatggatgttattgaatatagatccatggagcattgttctggttctagctacgccttaaagtatgcctttggaatgcttctttccatatgtattagatccatgatcatacattagtactatttaaatataatatataattaatattacacag

SEQ ID NO: 21545 - DNA, 478 bp, Glycine max
  Clone ID: PAT_MRT3847_11945C.1
cttagttctaaaaggactaagatttcaatttagaaaactgctctgtatctatctaaagagaccaatggctgtgcatgtaccaagaaggtgggatgtgaaatgggttgttggaaaggctctcattgcttttcttctccttgtttcagtctcagctacttcttctcatcaaaatacagacaacaaaacaacttcaccatccaatggaactataggggttgatcatcatgctaaagcattttacaagcaccattggccgagtatgaaatttgggtggagaataatagtaggcgccgtagttggattcttgggatcagcatttgggaccgtgggaggtgttggtgggggtggcatctttgtgcccatgctaaccctcattgttggattcgatcaaaagtcagcaacagctatatcaaaatgcatgattaccggtggagcaacagcaaccgtgttctacattttgaggcaaagacaccccacc

SEQ ID NO: 21546 - DNA, 309 bp, Glycine max
  Clone ID: PAT_MRT3847_119460C.1
tttgtttccgatggggtatccatgcgattcgccattgccggaaaatgagtcctccggcgagtgtccggtgatgatcgctctcgagagaggctgttgttgttgttcttcttcgacgtcatggttttgttctgaggtgctgtcagtgctcacagcgcgacgctgttgagttgaaatttctctggttttgagttgctttgagactatttttttttctcggcaaccaaacaggaggattcaaaatttgcactgattagtaaagtatatttgtgaaagtgaagatagaaatggttgttgttgttgatgttgtga

SEQ ID NO: 21547 - DNA, 538 bp, Glycine max
  unsure (1)..(538): unsure at all n locations
  Clone ID: PAT_MRT3847_119461C.1
agctggagctccaccgcggtggcggccgctctagaattattggatcccccgggctgcaggaattcggcacgaggtcaggacaaagcatggacgaccaaagggatataaaagtaaggctgaagaagctggaaacaattttgacaagggagggaaaaagcgtggcaggccaaagggttctcatagaaaggaaaaggagtctgcttaccattttgattcactgattgagaggcatggtcttgtagctgagaaagaaggangaacttctgctgaatctgcctccaaaaatgatactggtcaagagaaaaaaatttatagctgtcaaagaagttctagaattacaagacaagctattaagcaaagccaatcaaggggtctaaaagagaagacaccagctgctgttactatagcagatgagaatgagccaaatggtgttactgacagatccatgacaaatgctagaggacaatccttacaaaaacataaaagcactcgtttcagcaaagttttgagtaagattatgccacagaatgatttacag

SEQ ID NO: 21548 - DNA, 529 bp, Glycine max
  Clone ID: PAT_MRT3847_119462C.1
cccacgcgtccgcaaatttcaaaacacacaacacaacacagcctgagacagacaacaaacaactgataacaacaacatggtaagaaaacaaagctggatcaaattccattaatcaacaaaacccaaataactggttgggtcgggttcgggttttttggatccgcttctctggttcaaccgttgttgagtcggtgattatagtgttctctttcatttttctcagcaattcattgttctctaggttaggtgttcataaggtgaggtctgaatggctgggattgatgataatgttggccttactggtgattggggtcttgctagcccaagtccaaggaccttttttttccagaatgttcgaagaagatagtgtgacaagatcaatctcagaacattctggaagtggtagaactggggatctcttttctggacatcgtcatcctagtgagacagggaaagaaaacatgaatgatagggcacaagatggtgattcttgagcccaattgaccgatgtgagttttcagaccgagca

SEQ ID NO: 21549 - DNA, 219 bp, Glycine max
  Clone ID: PAT_MRT3847_119463C.1
agaccacatttattgcatgattcaacatatatgtattgtaagatcattttctaatagaagtgttcactagtgacattatttttaaagatttttctccattttttattttattttatgaaaaatcatttctttctttatacagattaatactaatttttttttataatgggaagtaacaaattatatcagttattaggatttgaattttctttattattt

SEQ ID NO: 21550 - DNA, 287 bp, Glycine max
  Clone ID: PAT_MRT3847_119464C.1
ccacgcgtccggtttgttgatccggttgtaccagagcaaattgtaattaaacttttgcagttaacttgacatgttgttttggtttattggtaggtggaatttccagattgagtgctgaaacttgaaatgttgacaaattaacttaacgaaagatttggcactaggctttttgtcctttggatgaaactaagttgaagaagtgctttctagtactggccttgtccttcgggtacttgttgttttaggatgttaatcttttgttgctcaagtgaatttcactaacgctt

SEQ ID NO: 21551 - DNA, 425 bp, Glycine max
  Clone ID: PAT_MRT3847_119465C.1
ctctagcctggccgcccttaatatcttattattaacacagagcagggtagtgttatggtctcgaggaaactaaaagatacggattatcctgaggcgctagccatggctcgatatatattgctgtggagatgcactacgagaaagtgaagtactacatctgtctatagcgctgtaccacacgctaaagggagtcaagccatctacacattaacaaaagctacatccaaaacagcaaagctaggaatcgacagcacttatagcatatcttaagacaacattgacttcgctctgaacatggcctcttacattgcactgcagatcgatgatttcctcatcaaggagacaactttccatagacctatatcgcatcctataccaggggatgaacattccatgcttgcaggggaaattgtcaatgaaatgca

SEQ ID NO: 21552 - DNA, 153 bp, Glycine max
  Clone ID: PAT_MRT3847_119466C.1
tgaaggttaaaccccctttcgcctttcgatttccgcccccgccttaccgccttagctgccggcaaacaatttctgggttggttattttaacctaaaagttcctatctttaccctcgacttggcgaaggtaccaagctcaaaactgaccattgc

SEQ ID NO: 21553 - DNA, 317 bp, Glycine max
  unsure (1)..(317): unsure at all n locations
  Clone ID: PAT_MRT3847_119467C.1
gaattcggcacgagcttatgtctttttctgtcaggatgcaccttctaacgaagcattccgacactttggagcctcctcagcttgttagatgtgtaacctcttagcatgttagatatgtaatccaaggcactatggtaaagaaataagtttgacaacatttttctgttgtagatttgtttcatgaattggaatggagatagaagggtggaccagagtagtacccttaattccatatgcaaatattaattggaagtttatataacaatctgtattatccaaatttatgaccatgagaaaagattgaatnnagaaatggg

SEQ ID NO: 21554 - DNA, 1109 bp, Glycine max
  Clone ID: PAT_MRT3847_119468C.1
caacttcgcgcgtcgttttgttaggaaaatataggcgaaaagaaaacgagtattaatataatgaacgggtagttgaatagtgtctacgttcaattgtgcatcctcaattatttttcttgcaaaatcttttcttttagaaaacgaatataaatattatgaacgggtaggaacttcacttcctcactcaaccgagtccattcacagttcctttggcaatggcaactcacagactcgctttgatcatccaaaacccttcgaacgacgacgagtttttgctcgtgaagcagtcgcgtcctcccaaattccacgatgaagaatacgactctttcgtcgattctgatctctgggacttgccctcggcgcagttgaacccgctgcttgcagaatcagagccaccggttgagttggaacttgcggtctcgcattcggaatcccaggacgtcgatttgaggaaattcgacatccgttcggctctcaacgaggtgtttggacaattagggtttggggcggttgacggaggaggttggaagttccataagtatgtgaaggaagctgcctttggacccgatttacccgtcaacactgtcttcattgttggaaaattggtagcagctgaggacaaggactttagagattcatatagatggaaatctgtccgaagttgtcttaactggattctggaagtgaaaccacatggagatcgggttggaccattggtagttattggtcttataaacgaatcatctatctctacaaaatggaaagtccctcctgccataaactatcaggagtacccgcctggtaatataattatacctatgggaagtaggacattaaggccttttcacacaacaaatttggtggtgtttgcacctgaaaatgtttcaaatgattcaggggaaaacaattttattgtacgtggagatgcactaatagttgatccaggatgcctatcagaattctatggagagctagagaaaattgttactgctttgccaagacgactagtggtctttgtcactcatcatcatcctgatcatgtagatggtctctcagttatccagaagtgcaatcctgacgctactttgcttgcacatgaaaagaccatg

SEQ ID NO: 21555 - DNA, 990 bp, Glycine max
  Clone ID: PAT_MRT3847_119469C.1
gaataataaacagttgcttcttattagaaaatttatgagcccatacacaaaacaaacttccatatacacagatcatgactagaaggatatataaagatttttttttttactgcctacggggcttcacaattaatttcttacactattgaaggttttgagcaacttgtagtctaactaattaggaagcttcactggtagcaggagagggaggaccagtcacagtgccattctccattgtgaaatcaatgacaatgggtgtctcatccatagcttcttcctcactgctgctgctgctagaggtctccccttcagacctttttgccttctttccctttcttccttccttcttcgtcttgaatatgcgatacacagccatagctgacaccatggaaggatgcgatttcgagacgaggcgaaattcatgcatcacccaattcgatttggcaaaaccattgcccttggcttcccagaaagccaaaacgttctttcttgcaacaacctgttctttagagagctcaaaatcttgagctttctctattgttctccattgaccgttcccggcttctctcttgttgaggttttcgaacacacgggtcctcaaatcatggaagaaaaacctctgccaattcaaattcttactaccacctcctggcagctcccaaggcactgtttggtaaacatcacagtcttgaatgaggtcattaggggatggttgggccatgatcctcttcctgagatagtaaccagcaagaatttcatcacttggatcaaatctgtatccaactgggagcttgtaggtcttgccttcaatcgggtttaagacttccatctcaaagacctttgcctttggagaagaagaagaagagaagggaagggacttgttgtctcagctcttagagtgaatcactgtggcaaggcatgatgtaaggaatttaatttatagatacaacaagacatgcagagtgatggatgtgtctgataagagagagc

SEQ ID NO: 21556 - DNA, 359 bp, Glycine max
  unsure (1)..(359): unsure at all n locations
  Clone ID: PAT_MRT3847_11946C.1
aagagttgagaggcagttaggagatacaggtgtaaatggaaatggcctattgcgataccagcaatgtagtgtttcccctgaaattgttgaagttcaggatgattctgtcaaagttgattccaaagagtcaatgataacagaaggaaccatattatggctggaggattcagattggcaaaagggttatcagataaaagaggtaatcaacactagtgagttgacatacttcattgcatcccatgttgaagagccaggaaaaaatctggtcctattaggtggggtctcatccgtcccagctgggaaccgcaatgggnagatatgcattatggtanccagttcagangcngaccaagtatgac

SEQ ID NO: 21557 - DNA, 411 bp, Glycine max
  Clone ID: PAT_MRT3847_119470C.1
agttcagtgtctacaataccatagcatacaaatatggacactgaactatcatgcaccatagcatacaaatatggacacccatcaaccatcatagatggggcgggactcaccagaatcgtccataggtgtgtgctacggagcatgatagagaagagactacattcccagcagacaccggatttggcgtttataagacaaccggaaacaggttgtggaactatagacgctggcctgggagtattaccagtagtctaaaaatctcgagagactcccaagagaacaaaaaaaactggttagctgtctgggagtgccaataaggaaaccaaaaaggcttgactatggacatgaccgcttagaacttcacattatagaaccaataggaggaccacatactctttttgggaagagcaa

SEQ ID NO: 21558 - DNA, 608 bp, Glycine max
  unsure (1)..(608): unsure at all n locations
  Clone ID: PAT_MRT3847_119471C.1
ccacgcgtccgtgaaaagtctagccagctttttaacaatccatcttttggacagttgcaaggtgtaatacccatggggaatttgtgtgttgatccttctcaacttcagccaccacaagagatctttcccatgagctctcagatgccaattcccagtgtgcataatgaccatagttctaattctttgaatttaccaccgaaagatagtcaagacacaagtggtaatgtaagcagtgaagcttctatacatctgcctcaccaattatttggtggtaatagttgaagccctaatcttactgaacaaattagtgaaaagtatcagaacaaaaccttccccatatcaactcttgatgagagttctccgttgcttgatcagaacagacccagagaggaaccacacattgggctggaaccccattctgtttctgattacactgctaactcagtggagcagttgccacctagcaattttacacctgatgttgtcgtgacctcaatttctaagcctgatgagaactctggacatctacattgtgttgcacccaccattgccttatcttcagctggatctaacnaggatgagttaccacctgtgagtggtcctggtat

SEQ ID NO: 21559 - DNA, 106 bp, Glycine max
  Clone ID: PAT_MRT3847_119472C.1
ccacgcccacgcgttcgcgtgaagtcacggattgggacgttctattaaatgaaacacaggctgccatattcctgggtgctaaatcccctccactggtgagaggatt

SEQ ID NO: 21560 - DNA, 230 bp, Glycine max
  Clone ID: PAT_MRT3847_119473C.1
acggggaccctttgactaaaaattttgggggaggactggccgctatcaaaagtttcaggggaccttttaaggctttgagttttgtctttgaccttcacaaactgacattgcttgaaatgtggcacgccagtctcctagaaacttggatctcttggattgatacaacaacctttacaaacggaaattttaacccgccaagtttgatatgcccccaaattaggactggaaaa

SEQ ID NO: 21561 - DNA, 251 bp, Glycine max
  Clone ID: PAT_MRT3847_119474C.1
tttaagaggtttgaaggggccagtgacaatggttgtgaatttacaaagttgagtgagccacggagaatgataagatcctttatgatggagaggtgggggtttgagaagactaatatcatgaaagaggattggcttattgtttatagtgatcaaagttttgtcatgctcataactagacctaaaggtggaattaggtctctttgcatttacttggatgaagttaatgcttgtatagatcttttattttattt

SEQ ID NO: 21562 - DNA, 250 bp, Glycine max
  Clone ID: PAT_MRT3847_119475C.1
tttggttatctcttcttccacgaactttcggagatttctgtcgttaatgaatacaatctttggttaattaatgtgtccttgctggaggggtaattaatgaattactctctggtagatatttatacatatggagagtctggaagaatgagtgtttatgttcatggatgagcgatattatgatggcgattccaatgaatcatgagctgcatatgcatcatcatccctctgtgtctgcggagaaatatcgtgg

SEQ ID NO: 21563 - DNA, 216 bp, Glycine max
  Clone ID: PAT_MRT3847_119476C.1
attaagacattctactgagtcactaagatgctgcacttgcataagtttgaatgcttgctatctataatatctatcctaggtgtgaagctttggaggtcgcagatactactcagtgaggcgctgctgaagatgcggctcaaccatcatgctgatgtggctcatatagctgatgcagaaatacctccagtacgatgctgagatggatctcttgactga

SEQ ID NO: 21564 - DNA, 484 bp, Glycine max
  Clone ID: PAT_MRT3847_119477C.1
agcgaacacgttggtccactacggaacgtgcaacctcgaagtgacaccttttgtcgaagtccctatcatactccgcgaaaggatgaattctacccgtcaggacacggtcactggatgcacatgatcgggaagctccatatcgtcacttcatggcaaccgtcaagtggaggccagcttcagataggatcgagatcgtgacccagggataagccatagtcatacttagtgacactaccaaactggggcaattccttatcactatacagagcgactgcactgctttatgaatcataaaagacccttgaatcataacctcatgctacttaaaagcgctccataagcacctatgatcccctaatcaagaattctgaatggagactccgacactgcacatatgcatcaccagcgcacacaattttacttataaacaaaacgtggaagactacaattttggctatggtgtgggccatctctccgaagggta

SEQ ID NO: 21565 - DNA, 468 bp, Glycine max
  Clone ID: PAT_MRT3847_119478C.1
tatcaatatgtgtgcccatgttgaattgtttttccatataatgtttcaacgtcttttacctactaacacttttccatgaaaaccgtccccaaggctcaatttaaaagttcaagaggtgtcatcaggcgttgagatagaaaagaaaacatgaggggaaaggcaggttcaggaaagaccattttgtttgtatgcattgcatgctttcttgcgggaaccctcttcaatggccagatgtggacacgcccctccaaccatgaaaatgaaaatacactactacgtctaccacccagacctgattgtgatcataagcgaaaactgattgaaggcaaacctggtgatgtaatggaggaagtcgtaaagactcatcaagctatcaagtcactggataaggcagtttcgacactggaaatggaactgacagcaagccaaactggtgggcggcaacggtcttctaaccacagtgtacag

SEQ ID NO: 21566 - DNA, 197 bp, Glycine max
  Clone ID: PAT_MRT3847_119479C.1
ttcatttttttgaactcagcatacgccgacttggagggcggcgtgagcaacaacaaactaggccatgtcctctggcttgtgtattccaaattatattggcttaaaaatctaacccgggggtgaaccctttcatttactccccaccgcgggccttttaaacttaaactccccagggtttgttttttggcggaggggaa

SEQ ID NO: 21567 - DNA, 257 bp, Glycine max
  Clone ID: PAT_MRT3847_11947C.1
cgaaaatacaatatttaattgctattcatcaatgggtatttctataaacgtagtccgaaaaaaagttgtctgacggtcattcagatttattgactaactgaaacaactgggaaggaaacaatgaatctgatgagtctcacattttttctacaaaagaaaaatgtgtattaatttcgcttagtggatatcattttattaagaagttcgttactaatcattctccaagcgatactggtaacgcttggcaataaaatgat

SEQ ID NO: 21568 - DNA, 467 bp, Glycine max
  Clone ID: PAT_MRT3847_119480C.1
tacgaatctcgaaattcgctcgagccctctgagagacgacaacagaagagtgttttaaacttaacttttttcgccttcaatcaaaacaaacaacgcgcattcttttaatggctgatggggagcttcaaactttatagaatcacccatcttctcctaaaaccattcacttctgaacacctacctttaaatggcgcatcagcattacctacattcctgatttctcaaaaccacctgtgaaacttccctatcctcagcaaatatccatcacagttactgaaaatatctagtctcgctacaccactgtcatcaccccacaaaactttaacctctttaatgtccacattgcaatggcaggtacagccatataccaactatcacgcacatagccgcataattattcctcacaggcgcatgtgccacccgtcacaaaaaaacaatcctcaattttttaaaatctccaacgttat

SEQ ID NO: 21569 - DNA, 473 bp, Glycine max
  Clone ID: PAT_MRT3847_119481C.1
atactttttttttttcattataaagaaggcccacaaaacgatgtttctacgggggcacacaatttgagtttccgacaggtaacatgcttttgaacggcagagcaccatgaaaataaggatcaacttggtcaaaataaaaaagggaccaaaagtctaaataataagcttctaaaaacccacaaaattttacatattaacctggggaaaaagagatcaagtaacttgaaaatagctaagtgctgatgttacaaaagggctaggatccagacctgagctcttagaagaaacacaagaagatgtcacttccggaatagaacttaatctttctgaaagaacaataaacccttctgctgggaagcgttgggcgaaccccaaaaaaaatttaccaaattggccccaaggcttacgccctaaccctgagaaaaaatatattagcgggcatagactttacagattcccgaaattgtcattaa

SEQ ID NO: 21570 - DNA, 343 bp, Glycine max
  unsure (1)..(343): unsure at all n locations
  Clone ID: PAT_MRT3847_119482C.1
tattcaaacctttcctgcctctttctttaaccctaactcaaacctaaaggctggccttggttgtccagggcttgacacctctgatctaattgcaatctcaggtgctcataccatttggagaactcactggcttttcattctttggcgatggaccaattagtggcacagcaacctgaccaactttgacaccactacttgcaacaaattgctccaaantatgccccgaatgggggaacccaaccacctctgtgaaatttttgacaccctgtcacctccctgataaaaaattgaccagggtcttactttcttcaaatcttccaaggtcaaggatagggcgttgctt

SEQ ID NO: 21571 - DNA, 575 bp, Glycine max
  Clone ID: PAT_MRT3847_119483C.1
gcaccagaattcctacagctcaaaatctggtttcggcatcacatccaccattgcgtaaaatgtctcgtaaagccaagttttcacgagagagagcatctcttggcatatcaaatttgatgcccttcacttcatcccatggacattccacacatgtggaaccaccactacagccttcacaggtggcacaatcttgtgctcctactattacgcttgttccaccgtcaattgctacaactcaaaatatggtttcaccatcggatccactattgcataaagtgcctcataaagccaaacattcaaaaaagaggggatctcatgacatatcaaatttgatgcctcatgcttcatctcaaggacattccagatatgtggagccaccactacagccttcagagttggcacaatttcatgctcctactctctcccatattccatcatctattcctatagctctggatccactttcacgctgtacatcaccaacatttgtacatccaagctagaatcaattggcgtttttttttaatgtcaattatttgcatggttataattgtgggtaaactgtgaattgatac

SEQ ID NO: 21572 - DNA, 264 bp, Glycine max
  Clone ID: PAT_MRT3847_119484C.1
aggggcagcgaaagaacagaagatcctcaattttctgagcagccaaacactctctctctgtctctcgaagattctcagtttgcagagaaaatccgaatcatgtcatggcaggcgtatgtcgacgatgaccttctcggtgagatcgaatgtaaacaggtcacgcacgcggctatcatcgggcaacagaggaacgtttggggtcagaggagcgacttcgctcagttcaaacctgaagagatgactgccaagcatattgactgtaat

SEQ ID NO: 21573 - DNA, 270 bp, Glycine max
  Clone ID: PAT_MRT3847_119485C.1
ccatgatcaacatcatgatcatggcaggcactcttcttattaataaactccacttgttcatcaggagcaattccatcaccattttggacacactcaattatttatttattctaatgttactgcttaccccaccaagagctttcaaatgttaataactaccatgattattaactaccaactatacttttttgatatatctacctgcacaaattttatttctattttaattgataactcagtataacctttgctcaaatataaacaacaaaa

SEQ ID NO: 21574 - DNA, 276 bp, Glycine max
  Clone ID: PAT_MRT3847_119486C.1
gggggtaaaaaaattcttttaataaagaatgaaaaaacaaaccaaaaaaaaaaacgggggaaataaagaaaaaaagaatccggggggacaaaaataaactgtccacaccacgggccgggaagggccaaacttgccaccggggcgggaaagggttatcgggggaccaagcatctcacttgtacaagcggcaaaaaaatagacccgggtaaaaaaaaaagggaagggggtgagtgtctttttcctggggaaccccttaggggccaaaaaaccaaaaat

SEQ ID NO: 21575 - DNA, 230 bp, Glycine max
  Clone ID: PAT_MRT3847_119487C.1
aaaatcattaggtcccaccccttaatttccattgggggccgaaaaccgaacccaaaaatcccgggtggtgaaatttcaaaaagcaaaaacaaatgggaatgttttttaagccccaaccaaccaagggggggggggggtccaaatgctttgcaaatttttcacccttaaaaacctgggggcttgtgggcaaaaaaacttttgccctgcacttggggaacgttgtcaaatcc

SEQ ID NO: 21576 - DNA, 405 bp, Glycine max
  Clone ID: PAT_MRT3847_119488C.1
ccacgcgtccgccttctctctccggtggctcctccgctgtcaccggcggtcagtcaccacccaccaccgccacaaacgcccccccccccccggtcaccaccaactctcctccactcccctctcccccttcttccccaaatctcctttcctcctcacttgaatccgacgtgggtgtccatttccctaaagggagaatacggcaactatggcacctgagggtcagcaacatcacctctgcgcatggtgctctgtgaaatctgcgagcaaacccgacaccaccgcgcatgtcaccgtcaaggacgttgccgacacactctgcctcgcctgcgaccgagaatccaatttgccaacccctaaactgaagcgatatattttttaaaaagtgagtgactaagaactgaatga

SEQ ID NO: 21577 - DNA, 571 bp, Glycine max
  Clone ID: PAT_MRT3847_119489C.1
cccataagagcccccaggcgggggaggatcattcccccttgggaaaaaaggggggtaatccatttttaaaggggcaaaacggggggaaacaaacagaaaacggggggcaaaaccatttccaaattttttttttcctcaatcaaggaaaacaaagcgggcctaacaacagggaacatgttaaactaaccgggcaaaattcccagtcaccgatgaattcattcgagcaagcaaaaaggccaagggctaaaaaaaagggcaaaacaaaataaagcttttccaaagctgattttccatagttaattaaattttaagggcccccctccaatggatcaaagaatgggccaatacaaaggaaaccacactttttttaactggggcaacccagtttaaatttcatcccatttatccccactttaagaaaacttctccttaatcgggtaaaaaacctccttggcctaatccaccttaaatgcaccagggagcccattcacaaaactcttgatgggagaaaaattgggaacccaacctttccccatacactctttagaaacctccaacggggcctaaaact

SEQ ID NO: 21578 - DNA, 152 bp, Glycine max
  unsure (1)..(152): unsure at all n locations
  Clone ID: PAT_MRT3847_11948C.1
aaagcggagaggttatatgaatctcagggtggtccaaaatcatgtcccaaattgaaaatggatatgggacctatggggtatgaaattggtgctggtaggtacagcttacactaagtgggccacacagatggctatgggactnggtactgggg

SEQ ID NO: 21579 - DNA, 355 bp, Glycine max
  Clone ID: PAT_MRT3847_119490C.1
tatttttgagaagggataataaacatcacaattacagaccttcattatactgctaaagggggctggttcatattaaaagcattaagaatacatagatccatgacgcgacacatgctccacctaatacttataaggggacatttgacacacaaaatcaaaggatttggttttcaatgatgacatgacatgtctgtagatcttactggaatgacacccatacccactaacttaggctagatttatgtgagtcgagaagggacacacttgaataaacccgttccgtttgggtgcatcacttgaacatctacggattggccgagaaaacaaacggctggttcagtgctgccagatctct

SEQ ID NO: 21580 - DNA, 262 bp, Glycine max
  unsure (1)..(262): unsure at all n locations
  Clone ID: PAT_MRT3847_119491C.1
ccacgcgtccgcttttttatctgtccgaacaacgaaacgcacggtcggacgcacgcgccccttcccaccgtgctcgctgctcttgctgcaaagtgcaaaccctaaacgctcgcgtttcgaggatcagcttcgcacttcaatggagctttctcaatgtcactgatgttttaataatttcaaggttaaatggttgttgctcagaggtgcatttttggacagcatcatacatacccggagaaactnttcttgatcttcctgctat

SEQ ID NO: 21581 - DNA, 538 bp, Glycine max
  Clone ID: PAT_MRT3847_119492C.1
ggccaaataaaaaaggtttattattccatggtacttggttgggggccctggggaacaaaactaccccttttttttggacgggggggggccaccttttaaaggggggggcctgaaaaaacccccccagaggggggagctcccccacctgggaagccaccaggcattcccccagggatgccacctgcactttggaacaatttggaaaagaaaggggtgcaaactttttccagttttttttggggaggctaaaaatcttccttttttggaggcggggttttatccagccaggtgatgatttcattgcccttggcaaaaaacttttggtgggccccaaaattgatcttgccttgaagtttctcaacttccacaggtggtttcatggtgaaggcataggactccagggggtttttggaggaaaccttatttttttggttttcatccccagccttggacttttaaagtttttggaccatgccctcaaaattttccttactcaagcggcccttggaattggggagggggaccttggtctcccttt

SEQ ID NO: 21582 - DNA, 102 bp, Glycine max
  Clone ID: PAT_MRT3847_119493C.1
aaacatacttcaatctaaatgaaatcattctttcatatacataatcaccatatataaagttaaaccatgtatattatatatccgaactaccaaacctgaacg

SEQ ID NO: 21583 - DNA, 174 bp, Glycine max
  Clone ID: PAT_MRT3847_119494C.1
gtcgagccgagcggccgctcgcgatctagaacttttccatctggtttctattcggctttatagtatttgtttctgtcactctggttccttttaagttccgcacgacataagaaatgcgaaaaaggaaaaagcagaatcggaactcacgagagtgacgccgcggccatggacaaa

SEQ ID NO: 21584 - DNA, 389 bp, Glycine max
  Clone ID: PAT_MRT3847_119495C.1
cccattatttcctaatttttccaaagtcttacaaaatcctttttaataaatccacaatccccgttaaaacaacttatgccataaaaaaaaatcttacccacaattaccaaggaatctaatttcaaaatttataaaccctcaattccttttcttatagtaaaccttcaataccaaaaatctcttttaaaccaaacccctttcttattttaaaccacttaaccccccaaatccccaaaacttttttaaaccctattaagattttttattcccaaatttcccccccataaaaaatatctttccaccaattttctattcttccacaaactactcttaatcatttccttccttatttaccctcctttttcccccaaaaaatttttaattctttc

SEQ ID NO: 21585 - DNA, 761 bp, Glycine max
  Clone ID: PAT_MRT3847_119496C.1
gttgataaacatatcctagcccgccaaaccggtctctccagaagtcaggtttcgaattggttcattaacgcgagggtgaggctatggaagccaatggtggaggaaatgtatttggaagaagagaaggagcatcaaaacgacgtagcatcgtcggagggaggaggcatcaatattctcggggatcagaagccaacacaggctcgactcgttcgaattgactcagagtgcatgtcgtctatcgtcaacaacccagatgacaaaaacgacacaaagagcggcaaaaccatccaaaacgacaaccaaatggacgcattcgggtcggtggagcttgacttttggtcctacacgcaccagtactcctccggacacagtggcggcgtgtcgttgacgctggggttacagcagcacggtgaaagcggggtgagtttagcattcccgccagcggcaacacagagctccatgttttacccacgggatcagattgaagattgccaaacagttcagtactctcttgtggatggcaaaggacaaaacatgccttataggaatctcatggggacacacttgcttcatgatcatttggtatgataatatatatagaatcaaataaaaatagtctcaattcaatatcatggaggacgtggatttaggtgtcacgtaagtaagtacatacattatggtagtcaacttaattaaagtagaaagttttgttttgtttttaattaatcagcacatatatatagtacatagttatataaaaa

SEQ ID NO: 21586 - DNA, 188 bp, Glycine max
  Clone ID: PAT_MRT3847_119497C.1
tttatttctacttcttggtgtacgacttttccagggaaagataatcacctctctgtgtggggccacagactttgtgaataaattatcttttccactcacttttttatttgctgaacactctcccttttgatatatgactctcttgtcagatttaaaacttttcctgtttctttcttaggtcatcctgc

SEQ ID NO: 21587 - DNA, 2008 bp, Glycine max
  Clone ID: PAT_MRT3847_119498C.1
gttggtaaacacatcccataccccaaaacctctctctcatgtgatgaaccttcgcattggctgtttaacgcagagggaccgcgatagattcaacctggcgagaaaattggttttgatagggttttccaacatccttgagcaaaaccatggaagcatcggggtcgtgtggacatgcttcttctgcaaaccccgtcaccatctggtccctttccctctcactctgatgaacgacccgggcacctctttctccaccacaggtatagatatcaagagtcattactaagatcctacatcatcgctgccatggaaggacagttgtgtgtatttttaattaattagtatatttggggcgaccccggggtccttgcacgtcccaaagggtgatcggtcctcgtagcaatgcttgtaaccagcatgctgttgcgtataatactaataagcaagacatttcatcaaggtaatgtgaatattaagagaactaaataaatggttgttattacatgcactcaagagtagattgtacgtacgtgttgaatttggaagcaggtttcgaattggtttattaacgcgagggtgaggctatggaagccgatggtggaggaaatgtatctggaagaagagaaggagcaagaaaacgacgtagcatcatcggatattaatgttcccgaagaggatgagaagccaacgcaggaggctccactccttcgaattgactcagagtgcatgtcgtctatcgtcaacgacgtcacaaagagcggcaaaaccatccaaaacgacaaccaaatggacgcattcgggtcggtggagcttgacttttcgtcctacacgcatgcgcaccattcttccggcgtgtcgttgacgctggggttacagcagcacggtgaaagcggggtaagtttagcgttcctgccagcggcaacacagagctcgatgttttacccacgggatcagattcaagagtgtcaaacagttcagtactctcttttggatgccgaaggacaaaacatgccgtttaggaatgtcatggggacacacttgcttcatgatttggtatgatatatcgcaaagtttattgagttcaatcatggaggacgtggatttaattaggtgtcacgtaagtagaaagtttagtttttaattttaatatatatagtgcatagttatatatatatattaatgcttccatatagaaatttaagctacacttgtagttaattacataatatatacacttcctagtttcaacatgctacccggcacaacaaggggcgaaacaccaaggcttagaatcgttgaccaatcgctgagacaacaaagggcctttcagcaaattagcatcatggaaacccatccttggagaccccaacgtggccttcccgaacgttccgtttctgttcttcgagcttggctttttgagcactttctccatccgtacccaagcgatgttgataaacatatcctagcccgccaagccggtctctccagacgtcaggtttcgaattggtttattaacgcgagggtgaggctatggaagccgatggtggaggaaatgtatctggaagaagagaaggagcaagaaaacgacgtagcatcatcggatattaatgttcccgaagaggatgagaagccaacgcaggaggctccactccttcgaattgactcagagtgcatgtcgtctatcgtcaacgacgtcacaaagagcggcaaaaccatccaaaacgacaaccaaatggacgcattcgggtcggtggagcttgacttttcgtcctacacgcatgcgcaccattcttccggcgtgtcgttgacgctggggttacagcagcacggtgaaagcggggtaagtttagcgttcctgccagcggcaacacagagctcgatgttttacccacgggatcagattcaagagtgtcaaacagttcagtactctcttttggatgccgaaggacaaaacatgccgtttaggaatgtcatggggacacacttgcttcatgatttggtatgatatatc

SEQ ID NO: 21588 - DNA, 275 bp, Glycine max
  Clone ID: PAT_MRT3847_119499C.1
gaaaggggaaaaaataaaaaccagggtagaaaaaaaatggagggtccaaacaaaggaaatttttacaccataaaggtgaaaaaaaaacctcctcattttttcaaaaaaaaaaaggccagaggtattgtttttcaaatcccaaaagaaataaaaaaggattgttggcattctcattgatgaaagacacatcacttgtgtttaataaaggatcaaatatttttgagccgaaatacgagcttacttacaaggggaggcaaaaaaataaattttccata

SEQ ID NO: 21589 - DNA, 684 bp, Glycine max
  Clone ID: PAT_MRT3847_11949C.1
aattcggctcgaggttccagatccgtcgcggcaccctccgacttacacaattcttcttcttcttcttcctctgcttcgatggctactgtgcaactccaatccctaacccttgttcactctttcgcactcccttctgccaccttctcccctctgatcgccgtctcctgcccccgcaactccgctgcgctacgccggcctccggctctagaaccgctcctcgcggtggaggtgtcaagtgcgaggcaggagacaccgttgttgaagcaaaggcataaaagaggattgaagaaatgaagtatcgcacttagcgcgacctcttcgtttagcgaatcagaaccattcagtccaagcaatccgcttggtgcataaagccacattagaagatagatgttgcgcacatcttgcaacttagggcgtgaccacttaatccagttgaacatgcgcgctcagtgcgaacgtcgcactatgcgcacaagaaagttctgattgaccaatcaattggaggagtatttaaaaggaatgaaacattcaaaacaaatactcggcaatggagaaagccaagaagcaaaggagcaggaagcaaaaaagccattgttgaagggaatccatttctaaagctctggtcgatccgtttcactctatttctcttccattttctttcatctcatctcatctcatctttta

SEQ ID NO: 21590 - DNA, 184 bp, Glycine max
  Clone ID: PAT_MRT3847_1194C.1
aattcggctcgaggttttcttggtgccgggtgatttatgattcatagttcatccagttaattgattttgttttattttttattactcaaaaagggtttttagtagattgtatgaatctgttctgttttggctactaaatcattaattagagagagttgtataagttggtatcttaaaaagagaa

SEQ ID NO: 21591 - DNA, 441 bp, Glycine max
  Clone ID: PAT_MRT3847_119500C.1
ttttgtccattcgttcgcccacgcgtccggtacagtagtggtgatgactatgtcaagccttactctagtggttctaaattgaaaagcgttctagctggacataagattagcattactgatggttttgacaaaactagtgcgaatctagattgcagacagatatcacattgcgattttctcaagagaaactttaagcagatgtctaatgttttgtgggtggctcctcgggacatggcgagtttatggacacagcttcattatggttcgtgatataatccggaaatgcaagaagcttatactgtgaatctcgaaactgtgccacgagaatagtctttgcacagtccatatgaagctcgccactcgagaaagagagctctctctcgtatcgtatgggtgcaaaaagccgatgtgcctaccataacacaaaaatgaagaggtcca

SEQ ID NO: 21592 - DNA, 754 bp, Glycine max
  unsure (1)..(754): unsure at all n locations
  Clone ID: PAT_MRT3847_119501C.1
gtcgaattcgggtttgtctgtgtctcctgttgttgttccggtgagtgaagaagggtgcctgaaacaggaggcacttctgcagcagctcaaaattggaagctcagttaatggtgttcaggatgttgggtggcttgaacagattaagtcaacgctgttggtgcccgtgaaccagaggttcgtgcttgatgtcactgggagagtgacgattgaaactgtgaggtcatttgtggcgtttttgctgtggagaatatcagatggattcaagagtagtgttagtaaggttcatgaagaggttctgggcaaaggactggaggtggttagatatgttggagctaagtcatcggttattcttaccttgtgtcttgctttgtatttgcatattatgggtggtagtaggattcttttgcctgcttagtgtgatgtttgatcatctaaccttatatttgtaatgcagttggaatataatggtagcaaaatcagatcattaagttagatagcatgtatatgtttccgagtattaaatttgaggtcatacttcagtgggtgaaaaagaaaaaatttggctgtaattttcaagttactacttttagtctttttccatacccaaaaagaaatgcaatgatttgagccatcttgctcaaaatttacattgcttcaatgctggatgtatgtaactcaacacctctgaaaattgtgataattaccattaaaataaaacccaattttgagtacaaaaattcttgaanngaaacaa

SEQ ID NO: 21593 - DNA, 348 bp, Glycine max
  unsure (1)..(348): unsure at all n locations
  Clone ID: PAT_MRT3847_119502C.1
gaaaaagntgggtcctaaaactacccaaaaaaacaaagtaaaagtaatttcacaagtattttatcatgggcaccaaaaaagcaagcgcagagggcaggggaattcttaatttcccatatttgataaaaatttaaactaatttagagctcatggggggaataatccttgttttagcctttgccacctgcaccatctgggggttctcctgatttttgaaacacaaaattgatgattgggttgcaaacggtttcaacctcttttaggttttttataaaatcttttttctccacactctgggtgtgatccagccattccaaggcgttttttactgggggctaaaatttttcc

SEQ ID NO: 21594 - DNA, 439 bp, Glycine max
  Clone ID: PAT_MRT3847_119503C.1
gacgaatgaaatcaattattgattcagggcaacaaatctatgggtggcattgatacaaacatccaacactaccaaagagtgcttccacgaatacctaattacagctaccaattaatgatcacaacacacgctcattactaatcatgcgtctgtatgctatccaacataagtttgccactatgacctgtgcatcaaattcatcatgtaatgataaggcctgtcctatataactggaagcacgagccttagatgtagaggaactcggtgacgcataaatatctctggggggctgtaagagcgactcaataaagataggcataggaggactcatatgctcaagtgcattgctactgagtagcagtactacttgagacatagttgggctgatcaccagcgacgcttgagtacacaacagcgctagatctatgatatgcttcac

SEQ ID NO: 21595 - DNA, 642 bp, Glycine max
  Clone ID: PAT_MRT3847_119504C.1
ataactgtatcggaatcgtcctgagcaatctgatgggcatgcatcttattccaacgggcgagggaacgaatgatccgaaggatagcatatactctactcacttcatatacttttatttcaacgagctgtatacgtcttattgttcctcgtcattttcttcgctttttaaagctattacgagagttgcgcttaatattaccagcatcacctcgctcaagacctcgacaggaggtttacgtgaattctaaggttctaagaactgcgtccaatccgaggctgttgcttggttgaccgcctatgagcagatcaagaagaataattcacttcggcgagtccctgctacgtcgacgaggatacactgaaaaggctgctgcggcaaccctgcatcacattattctttaggctattgaggctcctgagaagaatgtctatgaagcctacgtgtgctcgatctcatgaaagtcactcctagaagttctcgagcgccagcgtgctgcagatgtaccatcattgtatctctggtgatatagacgctctcaggatggatatgatcctggacggcgattggtgctgagacgtgactctcgagattaggatgaggcacattatgcaagcatgactatacagatgaggtctaatgca

SEQ ID NO: 21596 - DNA, 598 bp, Glycine max
  Clone ID: PAT_MRT3847_119505C.1
cccacgcgtacgttgacttatctttatacttaaatgaaaatataaaaagaagagatttttaaacgggtattgacagcattcaccgaccatgtgagcctccgctgcggtttccagctgctctatacacagctgtcgtcacaaacgcccacaacgttatcccaaacgctatggatgccttaaacagtgaggaaaacggtgggggagatgctggccctggaacaattaacaatatagctggagatgccgatggagaacccaacattatactggccaagattgaagcaaacgatgaagctaactacagatatagctacagcgctgcgggtgcagatacattggcaaacacaacattacaacgtatcacattgcactccaaatcgaatggtggctccaatggaagctttactggcaagctcactgccaaatgccataccaaaggaaatgctcaccccatccaagatcaactcacaactggtgaagcccatgctgatgctatctacgatgacattgaggctaacctttagtacaactcctactacaacatatacaatatgatcaacatcacgatgatcatcgctatctctgaggctttatatga

SEQ ID NO: 21597 - DNA, 827 bp, Glycine max
  Clone ID: PAT_MRT3847_119506C.1
ttaagttcttccaagaaacacaacaaagcttaaaagaaaaaaagaaaggtagagagaaagatgatcaggttgagatcaaagaggttttcaagaagcagctccaagcctggaaacaatgggagcaaagcagcatcatcatccccagaaaaggattgcaaaagtattggtgaaatcaagtgggaacttaggcctggtggcatgcttgttcagaaaagggagagtaatcaaagttctggggaaggggtgatcactattagagtgtcaactgtgtcacagtggcatgacattaacattgatgccacttcaacttttggggaattaaaaatgattttgtcactggtgacaagtttggagcccagagagcagaggcttctcttcaggggcccagagaaccgggacaatgagttccttcacatggttggggttagggacaaggacaaggtgctgctgctagaggatccagcaatcaaggaaatgaagcttcttggcatggcaagaggccaacccattaacaatacttgttgtaccatcagtgcatgaccctttaatttgatcaaacttgttaattaattaattagtactaaccagaaaagaaaaaaaagtgaagtaaagtttaatatgtaatgatgcggtctttcttcacttttgtttgtcttagaatagaaacttaatcaaatatgtacttatccggtgggtagaacccctctcccttgatttaaaaatgtgtaggatgatgcaatgccatatcattttgcagagtttgctctattaaaaaaaaaaaaagaaaaaaaacagaaagagaagaaataaaaaaaaaaaaaaaaatt

SEQ ID NO: 21598 - DNA, 216 bp, Glycine max
  Clone ID: PAT_MRT3847_119507C.1
ggggcctatggccatttcaaccactcctttcccatcaccaccaccataggaaccttacccaaaaaagaaaacgaaaaaaggattgggtgttgattaccaagctggaaaattttttttgttcctgtggccgttgggggtctgaagcgtggattgattaattttcaggaccagaaaaccccttacgcttggccatcgtcgttttatttgttggaaaaa

SEQ ID NO: 21599 - DNA, 205 bp, Glycine max
  Clone ID: PAT_MRT3847_119508C.1
cttcctctacccgataaggaagatccctgtgctagctcgatcatagatcaaagatggaagagcggacccgcagcattcagatgttgatgaccttgctttgcatatccattgctggcgggaacgcatggagattgcagcatcataagggtaggcatggttagcaacgacgtcataagtctgatcaaaatgtgacatacaacgggga

SEQ ID NO: 21600 - DNA, 270 bp, Glycine max
  Clone ID: PAT_MRT3847_119509C.1
ttcggctgcgagaagacgacagatgggcactagtctttcaagtagagctttcttttcttgcaatcctagtttctctacatcaatttcattggtttcttttggagttcaattctttttgcaaaataatatcattaaaccttaaaaaagaaaaagataaaaaaaacttgatgtcaagaaataaagtgtattatatatgtaagtagaggatatatatagaaccatgtccaacaaggacgaatgtatcccatatgcttatttttaccttatttc

SEQ ID NO: 21601 - DNA, 1586 bp, Glycine max
  Clone ID: PAT_MRT3847_11950C.1
ctcgagccgaacactcataaccctctctctctttctcctctcactcactagtgccactaatgagaactcttcacaactacactccaaccctcactagaccacagtgcacaaccctcgttcaatccaccaaacccctacaaaagatggagaaaatgatgaacatgccccagttgcgatcatcgtcgttgccgccattgtccaagaaagttgggaagagatggaaggagtaccaaggaatgaacaattgggacggtttattggacccattggacgagaaccttcgcgctgagattcttcgctatggccatttcgttgaggcagcgtataagtcctttgaattcgacccttcttccccaaactacgccacatgcaagttcccaaagaacacactctttgaaaagtctgggttacacaacacaggttacaaggtaacaaaacacctacgtgcaacctcggggatcaaactacctagctgggtagacaaagcaccaagttgggtcgcagcacaatcgagctacgttggatacgtagcagtgtgtaacgacaaagaagagatcaaacgacttggtcgaagagacatagttgtggcgtacagaggaacgacaacatgtttagaatggctcgaaaatcttcgagccactctgacacatgtttcagttccgtcgatcacaacggagaccacaacagaaccatgcagcatggaagaaaatggagcgatggtagaaagtgggttcttgagtttgtacacgtcaacagttagtaacaacaaatcatttatgagtttgcaagatatggttaggaaagagattggtcggattcgtaaaacttaccaaggagagaatttgagtttgaccataacggggcatagtttgggggcggcattggccactctcacggcgtatgacataaagaacagtttcctccagccgccgccgctggtgaccgtgatctccttcgggggtccacgcgttgggaaccgaagctttcggcggcggctggaggagcaagggaccaaggtgttgcgcatagtgaactccgatgatgttataaccaaggtgcccgggtttgtgttcgatgacgtggacaaaactgaggatgttgcggcatgcaatggcggtgtccaagtggcgaagtttcagaggtggattcgaaaacgagcggaagaagttcagtggctattgtactctgaggttggaaaggagttacgcctttgtagcagggattctccgtacctcaggggtgtcaacattgccacgtctcacgatttgaacacctacctgcaccttgttgacggctttgtcagttccacttgtccctttagagccactgctaagaggttccttcagcattgagtttgataaatattgatttaacagtcaaaaacagttagaaagtaaaatgtgtttatagttggtttaatttgttttaaatcaacgataaatatgtttttattctaccactttttatatactatttttttcatttttgaaagaatgagtttgtaaataccagcgcaaatcttaacatggaaagaatcatgagaaaaagagaaagagccccggaaattagttactagtaattatgtg

SEQ ID NO: 21602 - DNA, 775 bp, Glycine max
  Clone ID: PAT_MRT3847_119510C.1
gtcgacccacgcgtccgcacagctcaggctagtgagactcgttttttctccatcggttcttcagttttcacttcctgtctcgtttcgatccgtgccaccgctcggaccagttagactcatggcgtcgctatggactcaactaatctccatggcctccctacttctatcccttgcgcggtgggtacctgtctccggtgactccagcaacgtgttactcttaccaagtcctcatcacgagggctctcgccctgccatgattctccccctacatcactccgttcccgattcttccttctctcactttaatccacgtcgtcaactcaaggaatccgactcagaacaccatcccaacgctcgcatgagactgtacgatgatctccttcgaaacggctactatacggcgcggctttggatcggcactcctccgcagaggtttgctcttattgttgatacggggagtactgttacctatgttccgtgctctacttgtagacactgtggtagccaccaggatccaaagttccgaccagaagattcagaaacctatcaacctgttaaatgcacatggcagtgcaactgtgacaatgacaggaagcagtgcacgtatgagagacggtatgctgaaatgagtactagcagtggggcccttggtgaggatgttgtatcctttggaaatcagactgagctttccccccacgtgccattttttgctgtgaaaatgatgagactggtgatatttataatcagcgtgctgatggcatcatgggtttgggcc

SEQ ID NO: 21603 - DNA, 131 bp, Glycine max
  Clone ID: PAT_MRT3847_119511C.1
aaacacagtcattgatagggcggatggaccatatgcactaggactacaaagaataggaagagagtctaagagagcaccaggggctttgttagaacagagacctagtgtacaatagcatcttgaacaaaggc

SEQ ID NO: 21604 - DNA, 253 bp, Glycine max
  unsure (1)..(253): unsure at all n locations
  Clone ID: PAT_MRT3847_119512C.1
cgtaccgtaagccttggnattctctttagnagtcggcncgccctctttcctttcttttcttttggttttttcttttttcttttttcttttttctttttttctttttttttcttttaaaagggctaaaataccctttgctttccttaatttgttgggggaatcgaaccttgccaatgctaaaaagtcagtttgatagtttttcactttttataaaggggcagggggcaactttaacattttttaaaaatgttac

SEQ ID NO: 21605 - DNA, 498 bp, Glycine max
  Clone ID: PAT_MRT3847_119513C.1
tacggctgcgagaagacgacagaaggggttgaggggaaggggaacaatagtgttgatgattggattggggtgtgtaggaagataaggttgttttatgatttgaatggtgggaggagcttagtggaactcgttggagggaacaatggtgttggtgtaggtgtcattttggagcatggggaagaggagttggttcaagcaactgagtatttttgtagttttggtgcgaagaaggaggatgtggcgcggttgattgtagatggacgggagttgttggagcttgatttggaggcacgggtggttgatgtggtgaagctgttgaagtactttggaatgagctcggatgatgttgaggatgttaggagggattatgctcatgtgttggggacagttaagatgggtaatctgcccaacgtgatgagagcgttaggtttacatgaatggttctttgataagatcaaggatgggaatcatcaattgttagttagttttgcacgagct

SEQ ID NO: 21606 - DNA, 438 bp, Glycine max
  Clone ID: PAT_MRT3847_119514C.1
ggacaaaaggccctggaaattatcaacgggaaaggccttggggaacaaaattttttttagcaaacaacaatattttttttaaaagcatagggggtttaaaaccaaaatctttgacaaaaggccttggaaattataaacgttcactcctgatcagggggagacttgaaaaaaaaaaaagggggaaacttttgggttttaaagctttccaaagtcccccaaaaacttacttccaaaggaaaaaattcaacccccaagctcctttaaaattgaggggacccccctaaaaaggcctttttttcaaccttaaaaataaaaaaattcccacaatgggaaaggcaaagcaaattcataagttaaaaacaaattcaacccgactgggatttttggataaaaacaagccttatttcgaataaataattcccccttaagcagggggtt

SEQ ID NO: 21607 - DNA, 101 bp, Glycine max
  Clone ID: PAT_MRT3847_119515C.1
gaaatctctcacggacaactcttataatgaagcaactgaattgcataatatcatcaatgaaaataaaatctgtgtgcagactctataccgtatgtgagatc

SEQ ID NO: 21608 - DNA, 199 bp, Glycine max
  Clone ID: PAT_MRT3847_119516C.1
agcctccgggacctaaccttgtcgttcttgttctcggtccactcgtgggccttcaagattatgaccttggcaccatttttttctattgtacatctttgtttccacataaagaaatgatactgacattcctcgccctaaaaaaactcctctttaaagaggggggaaaaaaccaagaaaaaaaataaaggggcgacccccc

SEQ ID NO: 21609 - DNA, 567 bp, Glycine max
  unsure (1)..(567): unsure at all n locations
  Clone ID: PAT_MRT3847_119517C.1
atcaattcatatttgtagtataatgatatgattattatggttcgttgcatagtagctaatagcaccacttttgtgtgctatagtggtgctgtggagcagctgactgccgctcctaagaggtgcattgcgctgcacctcactgttgtggccgtcacgccgctcttcatggccaaaatcgcggagttttgtgacagatgcagttgcaacagccaggtttaagtcatggggaagaagacgacactaaacatcgttatttgttgttttttcttaaaaaataattaggagcaaaatgttgcatttcatttaagggttcttttaaaaaaataaaataaaataaattaaaaacatgtctttaagtaaaatggtgagttttacttgctccaaagtccaaactattaaactcgtagtcgattatcnctgttcattttcaaccctagtagctctgttcccacacaatgctccaccctctcaaccctacctctgcccaaccttcaatccttttccggtagtgtctccggcggcattctcagcagcaattctggccactannaaaaaaaaaaaaaaaaa

SEQ ID NO: 21610 - DNA, 240 bp, Glycine max
  unsure (1)..(240): unsure at all n locations
  Clone ID: PAT_MRT3847_119518C.1
acccaacaaacccnaaccttttaccccatattaagaaaaataccttcaacttcccatccatatattccatcaacttttccataagtctatacaagacaacattccttattatattaatccacaacacacttatattcaacctactatttactacttaacatacacctctcccatctctcacaacaaatgttacaaccccattttcttttcaaccattcatacctacctcaaccattccaa

SEQ ID NO: 21611 - DNA, 279 bp, Glycine max
  Clone ID: PAT_MRT3847_119519C.1
atgcgtggttttttttttttttttttgtctttagcctgaagaacaaacatgggttttaaattgagtttggctcaagcttgttattagaaagcaatgtatctacccaggccaaaatataaatgggacccctgggtcaaaccggaaataaccgggagggacctacaggcaaaccaggtttgcctattgagagaactatcacagattggtggaatcaggggtaattgtggtaaatgagtgaaaaagagatgaagtgacaattgcacacaagaatcgaccaat

SEQ ID NO: 21612 - DNA, 475 bp, Glycine max
  Clone ID: PAT_MRT3847_11951C.1
ggctcgaggctatatctagtgttctctttgctgcaccaagatgtgcggatctgccagagttattgcaggttcagtcgctatttgcttccaaatacggaaaggattttgtatctgcagcaactgatctcacccctgactgcagtgttaatggccagttaatagagctgttgtcagttcaagcaccttcacaggaaaagaaactgaaacttctaaaagaaattgctgttgagcataagttagactgggatccaactgcctcagaaaccaagtcctttaaaaaacatgaggacttactgaatgaccccattcaattttgtagtcaatgtgtgtcaaaattgcctcttcctgaagaaaaacacactgaagttgatcttcaatcatcaagccaatctggatcacttggatcagacaaacataaacctaatacttcatttgataaaaagacagtgaacagtctatggtattcatctcaact

SEQ ID NO: 21613 - DNA, 181 bp, Glycine max
  Clone ID: PAT_MRT3847_119520C.1
catggtgacgattgtaaattgtcatctgatgataaagaggatgaatccatacatcgaaatttatttatatgttaaaaaattgctgccgatgcataggagccaagcttactttcgcgagagtgcctttcttattcattgtaaaatgccaagatatttactggcagtccctacaacgacctgc

SEQ ID NO: 21614 - DNA, 591 bp, Glycine max
  Clone ID: PAT_MRT3847_119521C.1
gcataacgtgacctattgggcattattcaatgcccaccacagcaactctatccggaaccgtggcgagcacctccttcatgaggaatgcaacctatgaacgaccagagagacctaatagacgattcgcccagacgcctctttgtttggtactagaagaggatggactgatgggtggtgacgtgataacctatgcaatgtgccctcactagcactgttgatagcttcatagactcccagcaaaggacgatagtgaacgttttgaagtgcgccagcatgatgattttcattcgttgacaaggctcgaggaagaaggcgttgagacttccctactcgcgcagggctggttcttgcgttacatgtgttgtgacaaattgcgaaaggtgacgtggaccagacagatggtagctgccttgatgatgaacagacacaaagcggatgcggtctcacctgtgttgctgtacctaggtcagacgtgtgtcattgctacacacaacgatggagagatcgaatgatcgatctatatcataatgtagtcttgtgcattgctcttctaatgccatctatctatgacgtgcctggatattggtagag

SEQ ID NO: 21615 - DNA, 361 bp, Glycine max
  Clone ID: PAT_MRT3847_119522C.1
gcatgacttaccatgtgagtagccgtgagccgccctttggttcgagcacacaccaccttcactcccttgacagacttacaggaaagaaaaaaggagactaaacggcgccaaaagctctctttctcttatttttcctcgccatgctactccttatgctccgctcaaccgacgccggccacaactaccgcgacgccctacgcaaaagcattctgttcttcaacgccagcacttcggcaaactgcccgtcgaccagcgcctccgttggcgccacgactctgcattgcacgacggccccaccgccggaatggacttgactgaaaggtactacgactccggggatcacataaagttctggtttccg

SEQ ID NO: 21616 - DNA, 423 bp, Glycine max
  Clone ID: PAT_MRT3847_119523C.1
gggtgaatagtggagggaaaaagatttcccccaggcctgccctagtgttaagagatgcctgttcttaggggaggagctgggcaaagatgctattctcatgaatatgccaatgctgtgcttttttgttcagatatgtttggagatctcgtcctgaagttttaatatgacactccctacttaaatggacagtctctttcttcatatcattggaaaatgaggctgatgataccatcgactctgaggctattcccgacaagctggcgcagtgtggacagattcaggaaaaagcagtcgtgaaatggccacaccatgaattgctgacggctaggtcaactcaggtgcgtcctgctacaactctgttggctgctcggaggccatatttatatgcagtggtgcatgatagttcagtgtctacaataccaa

SEQ ID NO: 21617 - DNA, 421 bp, Glycine max
  Clone ID: PAT_MRT3847_119524C.1
tctcgagccgaatcggctcgagacgggacgacagaagggtagtataatatataagagtgtcagtgtaatgttttcaaacattaagagagtgttagtgcagcatataactataaggggttgtcattgtaatgttttcaaacataaaggggagttagtgtaggaatagaaaaaaagagtggagttatgtctaatttgaaaaaagcttatggagtgcaagtgtaacttgttctaatatttaataataagtggaccaacctgccaaagtttgtcatggaaagaagcaaggtcaattagccgatcacctctctcggaataatagtacacaccaccctttccggaatttcccggatttccaagtatgtcttctgcctaaaataatgtccacccaaaaacacataggaacaagaagaaattagtcaag

SEQ ID NO: 21618 - DNA, 258 bp, Glycine max
  Clone ID: PAT_MRT3847_119525C.1
gtctgttttagtgactctgacacgatgctgtcctcaccttccaaatacccagttatttattcaagaggggggaagtgggtagaggatgggatgttttggaagcactttgcaacttaccactatctgaaaatcccctggcgttgcggggagaagctttgaatgcactgaagagaattccttctaaatgaaggcaggtgatagtgttctttctgtaagtaaagggaaagaaaaaaaacatagtttgcttaccaggtggag

SEQ ID NO: 21619 - DNA, 1559 bp, Glycine max
  Clone ID: PAT_MRT3847_119526C.1
gttcagacacatttaaacaaaaaaattcataaaatgctcgcgggagtggccactgcacactacactgcccagtggccacccgccactgcattcatcccacactccaaacattaattctcaggaaaaaaaaacaaaacaagcggcgtgatggcggcgaaacggcttattgtcgtcgtggagagcaccgccgccatggggccctattgggagaccattctgagggatcatctcgacaagattatcagatgttttggtgaaaatgactcaactgtgcagaactcttgttccaatgtggagtttgctctagtctcctataatacacatggatgttattctggttgtcttgtgcaacggactggctggacaagagatccagatgttttcttcatgtggctatcatctataccctttagtggtggcggttttaatgatgcagtgattgctgaagggcttgctgaagctctggtgatgttcccaaattctcaaagtggagaccctaatcagcagaatgtagacatgcaccagcattgcatccttgttgcagcaagtaatccttatccgttgcagacaccaatttatgttccgcaactgcagaacctagagcagagtgaaaccattgactcattcccagggaaccgtttatatgatgctgaagctgtagctaaagcatttcctcagttttctatttctctatcagtcatctgcccgaaagaacttcctaaaattaaaggcatctacaatgcaggaaatcgaaatagtaaagcagctgatccaccagttttggctaaaacccctcattttcttattttaatatcagaaggtttcagggaagcacagggtgcattaaaggttggtgagggttacagcaattcttctgagtctgagaaagttgcagcaaaatggccccctgtaatgcaaatagttcagcttatatctcaagccacatgaataacaaagaatatgtagtttttcaggcaatgaacccatatggatttcgtggtcacctggaggataagaaaaagctgctgcttcaaaggttgctattctggataaatagagaacttgagattgtggccttgctgcaattcttatttggcaaatagtctttccaagcacttttccttttctctttgtggctatgctttctcgtggtaagtatatataacaatggtggacaacttttgaaacttatatttcttattccgacattaactaatgatcccctataaatagaaaagtttgaaaatagtgtctagctgttttgcaacaatggaatccatctggtattataaataaattttacatattttcgttcccccgaaggaagtgtaggaacagtgtggtatgaagattatataacaacatatgtgttgccaagaatatatatccatggttgttgattatgactgattgagattcgatatttgtgtcgttgtgagactgtgtagttttcagaaggtatccagaatattgaccatagccattattgtgttatcctcagaacatgagtttataattacattgcgtgacttatttaaggaagacaattttttttgcag

SEQ ID NO: 21620 - DNA, 555 bp, Glycine max
  unsure (1)..(555): unsure at all n locations
  Clone ID: PAT_MRT3847_119527C.1
tttcctttaaaatnnntnnnnnnnncttataaaatggtaccagtggtaccttaaaaaaattacagaaacatgtccgcaatggttaataagtattagaatccaataattagataataataccttttaaccattgtcaagatagtgaagcattgccacataaactcctacccagtagccaataaaagtggtaagcccgcccaagtgcgtatgtaaatagtcaactatgagtattacaaaaattagactaacttaagaaattacaaaacagctgcacacacttctatttttacagaacgcaagtccagcctttgcgcacatcatcacccgccgttgttgtctttgttttaatttctgatacaatttctaggacacacataccattgatcatatgaataatcaaatgatatatgtccagattttttaaccaagtctaaatgtgaaagagagcttcatggatgttactttgtttatcaaacagagatcccctaaagactcttctaattgacataggaatgaaagaattttgaattatggtcaccctccaaaaaccacttc

SEQ ID NO: 21621 - DNA, 413 bp, Glycine max
  Clone ID: PAT_MRT3847_119528C.1
tttgttttttttgaggattggaaggtaaggttaattggaattcaatattcaatataacagtacatttgtgaagtccccagcatgtgccataatacatatgctataaatcacctcagctactttacagaatcacacagctgcaagaatcaatgcctctcttaagattcttcggctaggcttccatcaacaatacctacaagctttttaattaacctaccccacattgcaaagtctaaatttggagacattattatatagtctggaactatatatttgcgactaatctccacattaatatatataaacacattttataatttatgaattacattttcaatttactaaaacaagttaataatcaacaattatttttaaaaatggtaataataatactctctgacactttctttttt

SEQ ID NO: 21622 - DNA, 362 bp, Glycine max
  Clone ID: PAT_MRT3847_119529C.1
gaataagccattttttattttttctttttttgtggttttttttgttggggcttttgcgaacaccccgaaggaaaaaccctcggatggggggaacttaaggggggggagaacccccggccggggcaaatatgtatgcaacgaggggggcgcggccaaacccaaaatccaccaaaaaaagaggggaacgggggtctaagacgggggtccctccggttttaaggggctaaggggggggggggagaagtaaacccaatgcaccccgcgggttgtgttccgagggaaaaaaaaatcggggaacacctcttcccttttacttttgggaggaaatacccccccggggggggaaaaaaccaaaagaactt

SEQ ID NO: 21623 - DNA, 307 bp, Glycine max
  Clone ID: PAT_MRT3847_11952C.1
ggaatcattgtcccggatacgaccatgctcactagtacggcggaccgccctttattttctttttttttctgagtgtctttttaaacacattcagtctcccaatgtttggaatatgtgtaagcatgactaacacatagtacttgaagcactagcaatgtcaaggaaccataatctcaaagaaactatttgacctggaaaaacataacaccaatatcactgccaatgcacttacacactaatgtttaatgcatatctgtacaatacgttactgtcatataccgatatcatgacactatctatagtatca

SEQ ID NO: 21624 - DNA, 271 bp, Glycine max
  unsure (1)..(271): unsure at all n locations
  Clone ID: PAT_MRT3847_119530C.1
taaannnaataaaatcagcatagaactacagttttatacttttatttgccaaaatctgaatacataatatataaggaaaaaaacataataactaattgcggtggtgcatttttttttatcatggccaccgccaaaagggaccaaccattggcatcacagcgaacttcatggtgccgttgttgcaagggaagccggttcgctcaccacaggctaagtatcagaggctgccacctcttcaacacagannttgaagctctctcctgtaccttgc

SEQ ID NO: 21625 - DNA, 399 bp, Glycine max
  Clone ID: PAT_MRT3847_119531C.1
acacttccggttgttggggatgatggctgggacgaagaatgtataacgtgagggttacacgggttgcaagggcccttacatatgcgcgaagatatactcattctcatgggcggggggctcagaaggactcacacgcagagatggctgaaaaagcttatggagatgtgttgttattaccaagggaatatgatgacagttgtacaggaaatcaccccagaacacgttcacaacatgcttgatgaagaactaagcaaaggtgatgatacttatgaccatctaagatctgctcatggtgatagacatgatcactatggagatgctgacatacatagagctcactgtatggacacatatggtattgagtatagacatgatggccggcgaaagtgatcaaaggtt

SEQ ID NO: 21626 - DNA, 683 bp, Glycine max
  Clone ID: PAT_MRT3847_119532C.1
gtgggagatgccgttgctttaatcaaaggggtgggaaagaatttgcggaggaaagaaaggagggtacggatagagcagattagagctagtcttggcttgtcagattcacagagaacaccctcgccaggagaatccttgaaggatttctacaggcgtacaaatatgtattggcaaatggcagcccatgaacatactcaacacactggaaaagaactccgcaaggatggttttgatcttgctgaagctcggtacagggagctaaaacctattcttgatgagctggctctattagaagctgagcagaaagcagaggaggccgaaggaccagaaactagtgcaaagaaaagaggaaagaagaaaactagaaattgatatatttagcacatgacgtttgggtgccgtcgagaatgtaatatgcaattttggtttagtttgatgtcattatctgcgaagattgtgccaagaattttgtgcacataatttatgtcgcatggtcacgttacatgtaatcagtaacaagcacacacccaaaattcagttacatatactacacgaattccctccctgaaatagagtgcagaatgtgcaatagaaaagagaagagttaaacgacgaagtaagccgcccaagagatctaaaaaaaaaaaaaaaaaaaaaaaaaaaaaaaaaaaaaaaaaaaaaaa

SEQ ID NO: 21627 - DNA, 488 bp, Glycine max
  Clone ID: PAT_MRT3847_119533C.1
acgtacggctgcgagaagacgacagaagggggtaatggaatattggagcgtcaccctctcacatggcggcagcaaccacaatttgctacggtccctcctcttatattcttcttggctcaaatttacttagacagggacacttgaaaaacacttcatttgctcatcgtttttctccttcaagatcattcctttgtaacggatttgttcccaggaaacctgttttgggaagaaactcgttctgggtatcaaaaaccatggatgaatccgcgagaacttctgctttcagagatggaaaaggcgatgaaaccatccaagtgtttgaacaagaagctttcatcgatgggtcaaccccgtttcagtccaagtttctgtccccggaggtggaatacaacctcaatcgaatgagcaagtggatagtaactgccctctttggcggtttcattctttggaggcatgacgcagaagccttatggtttacagcagggtct

SEQ ID NO: 21628 - DNA, 712 bp, Glycine max
  Clone ID: PAT_MRT3847_119534C.1
tcctctagagcggccgcttttttttttttttttttttttttttttttggggggaagaattttttttattaacctatacattgatggttgcatgtcaccatgtgcaaaattccatgcttaaactgaggaaagttatacaatgtcaatttttaattaaaacgtacggggcaggatttcttttagagggggctaattatacatatactatcttatcttaggattgggcaatggtagtcattaaactaagttagagattcccacacatgtaaaaatttcattggctcagaacattccaacccccactcttttcttctcgaatcagcagtgtgtaggactgcatccgtcgcaagataagtttgcaacgatgagactttctccacatttgaaactattgccctgtcataatcattagatcaatattaacataaatgagacacattgatggactgacccgaacaacactcatcatttgaactcaaatgagaaaacagcagaatatacagaggaaaacgagttatagattcaggcacgccaaatatgtacgattattgggcagaaaatgaaaaacacgacttgtaggcaacttaacgtgcttttttagtacacgtggatatcaacactaatttcttccaagtgattagccctgattgagcaactgctttccctgctgcttagtttctccgtagaaatcttctggtcggtagtaccatatc

SEQ ID NO: 21629 - DNA, 412 bp, Glycine max
  Clone ID: PAT_MRT3847_119535C.1
gaaattgaactttaaacctagtatgacacttcgttttattgtacgcaatctgtatgtggcattcacaatgttcgttgctattaccttcccattcttcggtggtctcctaggattttttggaggatttgcttttgcaccaacaacatactttctcccctgcgtcatgtggcttgcgatctacaaaccaaggagattcagcatgtcttggtgtgccaactggatctgcattgtgtttggcctattgttgatgattttatcaccaattggaggattgaggtcaatcataattagtgccaaggactacaagttctactcataaattcattcctaactgagtcaatgatgggaatctgaagcatgcaattgcaaatacaagaagggaatgaaagctcaataaaagtcatgtgttata

SEQ ID NO: 21630 - DNA, 2246 bp, Glycine max
  Clone ID: PAT_MRT3847_119536C.1
ctgtcatggatcatcaccctgtacactctatggcaaatggttgagatgcatgaaatggtacctggaaaacgttttgataggtatcatgaactggggcagtatgcctttggggagaagctaggactttatatagtggtgcctcaacaacttgtggtggaaattggggtgaacattgtctatatggttactgggggaaaatccttgcaaaagttccatgacactgtgtgtgacagctgcaaaaagatcaagttgaccttcttcattatgatctttgcctctgttcactttgtactgtctcacctgcccaacttcaactccatttctggtgtatctctggcagcagcagttatgtccttgaggtacaagtcataaccttttagttatataggtttaattaaacttttggtcctcgttttattttcattccgcacatttagttcccttatttttttttcctacaaatttgatctcttactgttaattttgatcaatctattgtgacactctatggcactattatgtcagcacattcatactggcatgacactttgttacgttatcatgttagcatttctgttaaatattaaatatcaagttaacagataaatcaaaattacacaattaaagtactgggagataaaaaaaaaataggagatcaaattacaaattgacaatagtaatggaattaaaagagaatgcaagaatgcattggttgaggaggatcatctgcaacttgcttgttagtggaaaagaaaattatgaaaagggaattttatatatattttctttgtcaatttttacttcacgactctttgctctatttaaagtgtttgctattatatttatttggttccactgaattcacatcagaacccctctactaatgaccttgttgtatagttattgtagctaagagtacatcaggaacagtctttaacttctttagtgcccttggggatgttgcttttgcctatgctggacacaatgtggtgttggaaatccaagcaacaattccatctacaccagagaaaccatccaagggtcctatgtggagaggagtggttgttgcttacatagttgtggctttatgctacttcccagttgcccttattggttactggatgttcggcaatacagttgaagataacattctcatcagtttagagaaaccaaaatggcttattgcaatggctaatatgtttgttgtgatccatgttattggaagttatcaggtgaaattcagtttctcttactcttgtccattatccaaaacccttttgattttagcatcaccctttctttttggttcaaaaaacagaagtcatcaagagtaactcttttttttttttttttttgtagatttatgcaatgccagtgtttgacatgattgaaactgtgatggtgaagaaattgaactttaaacctagtatgacacttcgttttattgtacgcaatctgtatgtggcattcacaatgttcgttgctattaccttcccattcttcggtggtctcctaggattttttggaggatttgcttttgcaccaacaacatactttgtaagccaaatacattggtgaatttaatcacacaataatctttaggggggaaaataaattcttaactgttaattttcttgcttaatttttcagctcccctgcgtcatgtggcttgcgatctacaaaccaaggagattcagcatgtcttggtgggccaactgggtatgttgaattttgatttttgtttcaattattctcctttagttgagattccattttttaagctaggattaatcttgccccattaattacagatctgcattgtgtttggcctattgttgatgattttatcaccaattggaggattgaggtcaatcataattagtgccaaggactacaagttctactcataaattcattcctaactgagtcaatgatgggaatctgaagcatgcaattgcaaatacaagaagggaatgaaagctcaataaaagtcatgtgttatagaatctggtttatcttaggtcgctgggtgctttaactatagaatgcaagaatgcattggttgaggaggatcatctgcaacttgcttgttagtggaaaagaaaattatgaaaagggaattttatatatattttctttgtcaatttttacttcacgactctttgctctatttaaagtgtttgctattatatttatttggttccactgaattcacatcagaaaccctctactaaagaccaagttgt

SEQ ID NO: 21631 - DNA, 476 bp, Glycine max
  unsure (1)..(476): unsure at all n locations
  Clone ID: PAT_MRT3847_119537C.1
catacgtaagctgggatcctgtaggcggccgaccttttgtttcttttttttttttatcacttgtcggctcaatgcatgacattacatgaaaaataggtgcgaagacacacgccagagcatctacaacaggattgcgatcancgacgatcatgtgnacacatctncaagcactctgctagattcctatagacggactgatgtaacatgttcattgcggtgagataataagatatctgctactactactacatttaacacgtaatggaggggtagaattcaaatccttacttgagagaagcaatttcactggtaggttgggacagttgacgagagagtgctctttgatctatcacaggcagagttcaacttcctaagtgttgctggggttgacactgatataatatttgtactttctcttaaattcctgaacaaagtggctgagcatgctgttatcaaaatcctcacctccaagatgg

SEQ ID NO: 21632 - DNA, 346 bp, Glycine max
  Clone ID: PAT_MRT3847_119538C.1
ggtgagcttagcggcgtcatttttcttgctcagggtgcatcatatattgcacacactgttgttccgaccataatatcccgttagtctgggacagctctcggaaatctttctgatggctgctgccactctgtgcttgaacgtgcacaccaagtattatttaagcctgttctcgtcagagcatgatggcctgcgcatacctgtacactatcctgggcagccaggcttacgtgatcatcaccgtgtgacatgaactcctcactgttcatttacagcctatgctgctagccctctttttgttaatgcaccccacattcccagctggtgccatacagaccgctattctctg

SEQ ID NO: 21633 - DNA, 441 bp, Glycine max
  Clone ID: PAT_MRT3847_119539C.1
gctcgagctgcgagaagacgacagaagggttcttatatattttcctttattacgacttttcaaattttaatttttctatttttttttctcatatatacacaaagggtcctaagggagaggggggccaaagcccctgcttgccctcccttggatccgtccctggttagtggtgctgtggtggtcagtgaggtagttatcatgtgctaaatatactgactaaagaggggtgggtgagtctaaagtgctcttgatatgttctggccatatcattgtatcagaaaggcttcttattatttttgtacaaaactaaaaatagtatttctccctcatctaaattattctgtcaatcactttttgggcttatcaatatattccttaccctaaatggcttggtaggtaggggatttatgggttcagttcatgcactctgaaactagaaaa

SEQ ID NO: 21634 - DNA, 753 bp, Glycine max
  unsure (1)..(753): unsure at all n locations
  Clone ID: PAT_MRT3847_11953C.1
cggacgcgtgggctagtgtatgttttgctgcaccaagatgtgcggatctgccagagttattgcaggttcagtcgctatttgcttccaaatacggaaaggattttgtatctgcagcaactgatctcacccctgactgcagtgttaatggccaggttccttgaattattatcttggaaacaacttataatcaagttccttgtatcctttttatcaagttgtacaatcaaatgatgacatttgcatgtttacttaaaattttgcaacacattttatgcgggttatttgtaattgaaaaagaacatttatgtgtcatcatttgattagaaaacttgatggaaaggtgtaagggacttgatttttgtccttttgtcatatacagactctttatttttacaattatacatgctcatatttatcagcaaggttgaaagctattttcttctatgacactccccatgtgaattgcaattgcagttaatagagctgttgtcagttcaagcaccttcacaggaaaagaaactgaaacttctaaagaaattgctgttgagcataagttagactgggatccaactgcctcagaaaccaagtcctttaaaanacatgaggacttactgaatgaccccattcaattttgtagtcaatgtgtgtcaaaattgcctcttcctgaagaaaaaacactgaagttgatcttcaatcatcaagccattctggatcacttggatcagacaacataaaccctatacttcatttgat

SEQ ID NO: 21635 - DNA, 448 bp, Glycine max
  Clone ID: PAT_MRT3847_119540C.1
aatattctatatttatattgatataactacacatatataaaaacataaaacggtccacaaaaatgcttccgttacctattcatatgtgacccatgagtgttattatatgtagattaccttttttatttgggcgccttatattgggggggattaactaaatatccccttttggtcccttaacagaacatatagctttaaaaatgttatacccccatatccacttttcctctcccacttgaaaaatacagagaaacccgcaatccaagggtgtaaaaatcaccaaactctctgggattgaaaatttgtggtcatcaggagcatacaccctctgtctaaacctgctgccggataacacacacccccacccatgaatacccatcttgggtccaggggtttcattgcttacaacctcgctacccaaataaacagccctgtaggttctggaata

SEQ ID NO: 21636 - DNA, 399 bp, Glycine max
  Clone ID: PAT_MRT3847_119541C.1
ctgcctcacaagtgatgactgcgaagcctgatgcttgcattgtttatttctttaatgaggatgcttattcttcccccccttttttttttgtgggggtggtgaggcggggggtacattggaggccgatgcgctaacataactaggtttatgatattccctgggcggagagcactcacataccaacaattggacttcttgacaaagaaggccaggttatacactttttcttactgaatgtgaaaggacatatgacacaacaaaagtctcatatcattctggggagtttaaaggggctgaaaagatgtctcttgtacacggttgcctattggtgatgcaagggaaataaactgatatcacaagcacgctctaacttatattcacaaacaacgcatatatata

SEQ ID NO: 21637 - DNA, 187 bp, Glycine max
  Clone ID: PAT_MRT3847_119542C.1
cgtcgtctcctcattctgcggctcgtagtaggttgaacgatatggctgttgcaatgactctaatgtgttgtagcagcagtcatgttacatgtaccttcacggtagcacatggttgtggttagtgaaaggacttctggggactttgcaaacatgcttgctgcagctcatgcattttcatgatcccaca

SEQ ID NO: 21638 - DNA, 270 bp, Glycine max
  Clone ID: PAT_MRT3847_119543C.1
tgtcattctgcttgtaaatctactagaaatgctagggaccacagtatggtcgatttgtatcggcggtttcaaacttacatataaacccagtatgttgattgatgggcggctactgctacaatttcatatcttctatcctgttcatttctatctttcttgcaatgttcatgtttgtggctcttaagttgttcacattcttaagacaaagccaatggtttttttgtccctgtggatgagattcttggtatctaggtgaactgcagatagcaa

SEQ ID NO: 21639 - DNA, 453 bp, Glycine max
  Clone ID: PAT_MRT3847_119544C.1
aaaaaccaccttgaattaaaggattatagagggcgaatattaaaacaaaaggttgtaattttggcggggccggaatcccaatttatgtatagggagcaaataaaatgctttttggggaaataaaaactttcttttctcacaggaattccctgggtttttccccaccacccccaccaaaaaatagatttgggagagggggagctgatacaatgggggccataaaaaaaatagtttttatatgaaaattttttatataacttaacaagaacaaattatggggttcccaattcttcttttgaaaaatttgaaccccaccgattttgggtttttatattaaaaaaagaatcaaggtttagtggaggggggctctaaaaccattcccctttgcttgggcttggggattaacaatgggagcccccccctttcaccactggaaaggttccaaagtttgcc

SEQ ID NO: 21640 - DNA, 318 bp, Glycine max
  Clone ID: PAT_MRT3847_119545C.1
acgcagggactgtgatatacccacatccccggatctaggtgatcgcggtgcatgaacgaggtgtgccttcgcgggatccatgcgttgaggcccatgaacgccccgccgccagcatgccgtgggacgcgcggcggcctgggggtggcgcggacggcgggcccgaggcctcgggcgcggcgcgctcgcgagcgcagaagcagtgccgcaagtcgtcgttcgccttctaccaggcggtgcgcgacctgctacccgtgtggctgctggaggatatgcgcgccagcgaggccttccactgggacgagcgcgggcgcgcccgcg

SEQ ID NO: 21641 - DNA, 440 bp, Glycine max
  Clone ID: PAT_MRT3847_119546C.1
gatatctacaaatgtacttcaatctagattttatttgccatccattttcaaagatgcatatgttcatgctcagtcatgtaataaatgccaaagaactagaagtgtttccaagaggaatgaattgccattgcataccattttggaggtggagatctttgactattggggcattgattttgttggtccctttcctccatcattctccaatgaatacattttagtagtagtagattatgtgagcaagtgggtggaggctgtggcatgccaaaagagtgatgccaaaattgtgatcaaatttctcaagaaacaaatcttttctagattgggcgtcccatgggttttgattgataatggaggatctcatttatgcaatgcttaactagcaaggttctttaacactatcatgtgtatcacaagattacttctccatatcatctata

SEQ ID NO: 21642 - DNA, 417 bp, Glycine max
  Clone ID: PAT_MRT3847_119547C.1
tcggcttgaggtctacggtgctgcctttaatttttgtgatgactgagccaaccaagacgggggccttcttcaggagaagttggtagtatacgtggtggggacatacttctagatattagtagggtgtgcttatgtggcggagaaccttgacaaggtcaaattgttaacacaacctgcgataccaattgagtggggtctcactgttatagttgcgggacactcagtcgatcacatctggggtgctcattcaaaccctgctgataccatagctgatactaccaccataaggttcgcactgaagcaggtaccacattatgtgatagctcaggacggttgagtcacactagctagtggaactataaggcatttgttccatgggaagactgaccatctagcgggaacactccctttcggttc

SEQ ID NO: 21643 - DNA, 274 bp, Glycine max
  Clone ID: PAT_MRT3847_119548C.1
gacccacacagccgcccaagcgaccgctacccagcgccaacaagcctaacgacaacgatgagagccatcacaagagcgaacccacaccacacgccaggactcagcaactacccacaataaccataacaaactaccgagtcaacaccatgacgatgactcactgagtaacactgcaaccgacccaaaccttaactacaaaccagagatcagaatccaaacccaccccggcgaccgagcctacaaccgactcagcaacgccacaaaacttactaac

SEQ ID NO: 21644 - DNA, 328 bp, Glycine max
  unsure (1)..(328): unsure at all n locations
  Clone ID: PAT_MRT3847_119549C.1
gttctagaccgccggtccggccatcatcttggggaactatcagcagcagaatttctacgttgaatatgatttggagaatgagaggttcggatttggtcctcgtaattgcaaaaggaaagcttagatttagtatttgaaaattaacacaccagaggttcctaattcgattcacataacgtccacaacattgtttggtggtcatagnttattattactatattatttatttgtcgcactcattgatttttttctttttcttaaatgcgtaattgcatgaacagagtaaggatgtttagaatgatttcaaataaattaagatatatgatta

SEQ ID NO: 21645 - DNA, 457 bp, Glycine max
  Clone ID: PAT_MRT3847_11954C.1
aatgttataggcggagattcataattcagattaactagccgaactttttacagaggcgaccaattcccaaacttttatttttttatatatggggaaaaaaaagggaaccttgaccttaacacccccatcaaaaggccaaaacacttgaacttgctaaagggcaaaaaaggacccctttattttaaggggggtggtttagacccaaaacaccggagggcaacctaatacatactacataatttggagggttggaaactacatatagtttttatctttttttctaagggccattttgggtggaagctttagctctccaacccctctcttgcaagtgccggggttgccggggcatttaccctcccttttgcggccattgttctcagggggaacacccatttcagcactcttgaattgagccttaacgggggcccctcccatgaccaagggctgggggggg

SEQ ID NO: 21646 - DNA, 527 bp, Glycine max
  Clone ID: PAT_MRT3847_119550C.1
agtgttaagaggataaataggaggatattattggaagataaaagctaatcaaaggacattgaacaaaactgagaatcaagagcatagtgctgctaaatctttagtgctgctaaatccctgaactgcacaagaatttaaactaaaccagaaacaaacacaacaatagctatttatttgtttgctcttaattttctatacactataagtcaatattatcttaatttcactacttctatacattggtgttctattagcttaaactcctctctaacagataacaggttgttgtgctaagtctttatgtatctgcacaaagaggcatacccctcaatcctgccaaagggcatgtggttccgttccaccacgctgcttccaaagccttcatgctttccccgttggcttttcctctcttagtcttccaagagccaattaacaaaatggaaagcatatgaagtcaatcttctgttcagatgctcagtggtctcagttctctttcgtgctcttgaaaccagtcactatttttttac

SEQ ID NO: 21647 - DNA, 261 bp, Glycine max
  unsure (1)..(261): unsure at all n locations
  Clone ID: PAT_MRT3847_119551C.1
gccgtcttaattaagatgtaaaacgaaaaaatgtgtcgcctagccatatccgagagtggaacaagaagggagttgctcgaaaaattggaggtgnttcaagatcgaaaggcgagggacagatgcatggccagcaagatccttcggcattatcagccaaanttcttcccagcacggttaggtgagtgttgaggtgtctggaaaaagtacctgggaggagaagggttttcgccgaagcctgatgggggaagaaggaaattcgca

SEQ ID NO: 21648 - DNA, 342 bp, Glycine max
  Clone ID: PAT_MRT3847_119552C.1
aaaaaaaaaaaaaaaaaaaaaaaaaaaaaaaaaaaaaaaaaaaggaaaaaaaaaaaaaaaaaaaaaaaaaaaaaaaaaaaaaaaaaaaaaaaaaaaaaaaaaaaaaaaaaaaaaaaataaaaaaatataaagaaagaaaaaaaaattggagaaaaaaaataaaaaaaatgcttcctgtgagaaattgtgatgcggtcacaattccaaacaatataatagccggacgcataaaaggaaaaacttggagagcataataagagagctaacaccaattgatctcgataaggtaactgccggcttttcaatagtaaaacctgatgggccacctttattgaaaaatct

SEQ ID NO: 21649 - DNA, 384 bp, Glycine max
  Clone ID: PAT_MRT3847_119553C.1
gaaaggaggagaaaactcttttaagttagggggatccattccaaagacccgtacttctttactaacatccgcacacgtggaaaattctttaacatggattaaacaccaaacatagcgcacatatttggccggttcatgctttcaccatgcgtggtttatatgatcccaactaggggggtcttgattaccaactcgggctaaaggggggcaaattaatgaaagctatgggccaaaccaattcatagaaccccctcgctagagaaacccatgcgccccaattgcaaaagctacctttctaatatacacgcacctgctaaccccctacatcaaagtggcctatttgatgctatcattcaccattcgcagattcattttagaaatgcg

SEQ ID NO: 21650 - DNA, 421 bp, Glycine max
  unsure (1)..(421): unsure at all n locations
  Clone ID: PAT_MRT3847_119554C.1
agggtttctgctactgttgcgcgtgtgcattcctcttcccttcatttcgagttctagtggtcgtagactcggtggggttnnactcagccagcaccagaacaaccccttttgctcccacgtgcacatagtcaaacccaaacctctctttttctctccaaacccaacaaacaaacaacaacaaaaacagagcttcctctctattttctccaccccacaacaccaaaagagaaaaaagaaaagaaaagaaaaaagcaaactttttcgcacacaatttggaacagaaaatgggtgcaggagattactacaagatcctcaagatgaaccgcaatgccacggatgaagaactcaagagggcatataagaggttggccatgaagtggcacccatataaaaaccatccacaccaccatcaacatgttac

SEQ ID NO: 21651 - DNA, 196 bp, Glycine max
  Clone ID: PAT_MRT3847_119555C.1
attttctcctctctctctctatattcaattcaattatggcgtttaagaaaaccctagcccagcggcttctcaacatcaccaaaatctccaattaccgcatttcctcctccgaagttcgttctccgaacccgacaaaagccgacattgctccggaccccggagacaaccggagttcctccacaagaggaccgccgtg

SEQ ID NO: 21652 - DNA, 226 bp, Glycine max
  Clone ID: PAT_MRT3847_119556C.1
acggtttcctctttcatctcattcaccactccttttctttatgggacatcggcgcaaaacccatttgacaatacaacctttcccggcaattccacaattggcacccacgccaggaataaaccatcgccaacccacgtggttcccaaagggcatcctattcccacattgtgtatgagatcgagctctggagctcttgtgcacccccgagagagagataacgcggggc

SEQ ID NO: 21653 - DNA, 304 bp, Glycine max
  unsure (1)..(304): unsure at all n locations
  Clone ID: PAT_MRT3847_119557C.1
tcgntgcacgcgtacgtaagctcggaattcggctcgaggnangtttgcttgaagcaaacgcatcaagcgatttcccggggtagttattatacctnncctngggagtgagagntgctggggcacctggctggtcactgtctnncaggaggcgcagtgtgctggctaanagcnaccagaggaagcagatcatcttacaactcggtgccatgatgctggccggccgtctttccagacccctgtcacagctcccaggaaaagctctaagtgtctgtgatagagaacatgggacaagacacacatgttg

SEQ ID NO: 21654 - DNA, 451 bp, Glycine max
  Clone ID: PAT_MRT3847_119558C.1
caaattcatagtaaagcaagtcttagttgcttctaatttttcaattatccaccgcaatctttgaagctggaatcaattcaactatgtatccaaacatgcactacgttaacttagaatcaataatgaatccagaactaattctttaaaatgaaactaaaattgtgaaaatttattcaaaatcatgttgagtaatctttcaaaataattttaaagaattttagatgaaactaaacactctcaatatgcacacccaacggatggaacagattatggctacttggcttagtatgaccattgtctgactttctgttggtctttgttttctccacaaaattgtatgtgtgaggatttgttttgttttatttttgaagttccttccccaccttcgtaatgtatttagttgttaagagtcattctctggattagggccattttaacaatttactaaaag

SEQ ID NO: 21655 - DNA, 946 bp, Glycine max
  Clone ID: PAT_MRT3847_119559C.1
tataatcatggtcatattaaagtctagaaatgccagaagtgtcttcccttgatcattttctagattttgcaaagtatttatatgaatcatcttcaccacttcatccatttcaaaaagttttggagccattaacacattgaaacagtagatgtccaagttaagcttggagaacagaatgaaattacatgtatagagtgaaccgataatgatgatacctgttgcgcccaccaatatgtccaacatgatccaagcctagataatgaagtatcagaaaattccaatcatctctgctaagttcataaccaatatctcgagacgcattttgatctacttgtacagtatctttaacaaaaaaactgctcactccatcatgtccttcaaataaaccaggaaataaaccattgaaacatatcaccatgcataaccattttccacccaatctgtgctgaggcgatctggagaaagagacgcgtcgctgtgattcgcagcgccatcgttatcgcaggttggtcgtcggaaattctcagagccactaacggtaaaataaataaataagtgaatgaatggaaaaaagttggttaaggagtgttagctgtgaccggagagaagtggtttgacggggaagaaaccgaaaacggagagaagtggtttgacggggaagaaaccgaaaacgaagacggaaagaccgatgaacttgatcttaatcaagggaagcaagctaacagaaaactacctttccagccaaatacattttgaactctaacagatttgtaacaaactttgtaactgcttttgtgttagtttatacatctattctcaatctgtatataagttccttttgctcaatgaataagacagaagcttgttttgatcatcttgctcaatttctttgctttcttgttcataagcttttccttatcttactgaatttctttgctcaatgaat

SEQ ID NO: 21656 - DNA, 502 bp, Glycine max
  Clone ID: PAT_MRT3847_11955C.1
aatattaatttcacttgttgttttttttttggcaaaggcaaaaagacaatcccatttcaaattatccaagggacacaatccgtgggagcccttgaagcccactaaaaaaagggaaagggggggggaactagtttaaatgggggcaaaaaggccattggacatccgggggaaaaagggtttaaaaaaccccaattccttaaaaaaaatggggtggccagggccccaatgcatggccaaaaaagggcatttgggggaaggctccctgggctggaacataaaaaaatcccaaaaaggggccaaaaacaaaggccttggggaaaagggcaatattcttttagggccaaagccgaaaaggttcaacgccatggggggaaaaaaaaaaaaggccccccacccactttttaggaaagtgggaggggggggccccaacatcaaaaggggaaaaagctcccggaaggttgggaaaaacgtcatctttgaaaaaaggaggaacgggaatttt

SEQ ID NO: 21657 - DNA, 873 bp, Glycine max
  Clone ID: PAT_MRT3847_119560C.1
ggctcgagggggtttgcaaaatgggaactcgaacaaatttctacaagaacccatcaatctcctacaaaaaacgtttaagcatctcctccgttcttcagaacctccatgcttacaacatcgccgccggcaatgttcctcccgccgatccaccgcaagcgacttccaccgccaatgttcctcccggcaatccaccgcatctcactccctccgccagactcaaacgcagccggaatcccgagccaccggaatttctacgcgaataccgtgacgatgccccttcctctatgtcacaccacgattacatccaaaacagaaggaaagaagtcgtttcgtctcggaatcacgatcgcgttgaattgactgaagaagttttgggaaactctaattctactcttcccttggtggattatgatgcaagtgatgaagatactccttcagaatgtgaagaaacacatactcttctaaattctggtcaacaagaagaatttgatggagtaaaaaaaagcagaaatgagcagcgattccctgtctctggggaacctgtttgtcttatatgtggaagatatggcgaatatatatgcaacgagacagatgatgatgtctgtagcatggaatgcaaaagtgaacttctggaaattcttaaactcaatgagggatcctcccacaaccaagttagagatatctcctcatctggaattagtgctgctgtaccagttccagtttttggtgatgatacctgggattataatcaacatcactggtccaaaaagacatgtagtctttctacttatgaatgttggaaatgtcaaagacctggccacctagctgaagattgtatggtcactgatggaagtaatagatctagttccattc

SEQ ID NO: 21658 - DNA, 734 bp, Glycine max
  Clone ID: PAT_MRT3847_119561C.1
ctcgagccgctcgagccgtgtctgtggggtttgcaaaatgggaactcgaacaaatttctacaagaacccatcaatctcctacaaaaaacgtttaagcatctcctccgttcttcagaacctccatggtccattccctttcctctttcaaactctctctatctcattcgatgctctaacttaatcaattttcaaattccagcttacaacatcgccgccggcaatgttcctcccgccgatccaccgcaagcgacttccaccgccaatgttcctcccggcaatccaccgcatctcactccctccgccagactcaaacgcagccggaatcccgagccaccggaatttctacgcgaataccgtgacgatgccccttcctctatgtcacaccacgattacatccaaaacagaagaagtcgtttcgtctcggaatcacgatcgcgttgaattgactgaagaagttttgggaaactctaattctactcttcccttggtggattatgatgcaagtgatgaagatactccttcagaatgtgaagaaacacatactcttctaaattctggtcaacaagaagaatttgatggagtaaaaaaaagcagaaatgagcagcgattccctgtctctggggaacctgtttgtcttatatgtggaagatatggcgaatatatatgcaacgagacagatgatgatgtctgtagcatggaatgcaaaagtgaacttctggaaaatcttaactcat

SEQ ID NO: 21659 - DNA, 579 bp, Glycine max
  Clone ID: PAT_MRT3847_119562C.1
atagattctcaactaatgagaacactctcacccttggtacccagcatcagatggatccgcgcggggacatcccgataaggattcggctcgaggggtttttattctgttgcagagacagtggttgagaatcactgctcaaaagaataataataccaaattccaaccagataaggagtgtggaatttggaagcttcacttctttcttgtattacttgatgcccttttcccttctctccctccctcttctcttattctcattgtttagttacctaccgtggatcaaagtcaattccctatctcgcttctttttgtagttgatttcttttgggtttcgcagtctccccaaaagggttgtttttattttgttctaaaattttgtaatttttgcttggacttgtgataaaaaaaatttgattttttagatcgattcgttgatgggtcatgctggggtgttgttaattgttgtaatggctaattgaagttctgttggtgatttgttgggaaaaaatgggggatcagggtgttttaggtgttaatgtcgggagtgaggagaggaaccttcttctcgccgttgttgtg

SEQ ID NO: 21660 - DNA, 798 bp, Glycine max
  Clone ID: PAT_MRT3847_119563C.1
ttctacctttccaatccaaacaaaacttcaaaccaaactttctctctctctctctctctctctatttctctcaatgcatcgatcactgaaagtcgcggtgatcggcgccggcgtctcgggcctcgccgccgcgcgcgaactccgccacgagggccacaacgtcgtcgttttggaaaagtccaatcacgtgggcggcatgtgggcctacgacccaaaaacagattccgacccattgggtctcgacccgacccgcgaaaccgtccacagtagcctctacctctcgctgcgcaccaacctcccgcgccagctcatgggcttctcggactttccgtttgtaaaaaacgaatcgggtgacccgagaacgttcccgggtcacgaggaggtgctgcggtttctggaagggttcgcgggcgagttcgggattaacgagttgacccagtttgaaacggaggttgtgagagtagagagaaagggaaacgagtgggtggttgagtcaagaacgagtcgagacggtgactcagtgagtcgggaggggttcgacgcggttgtggtttgttcggggcactttgtggaacccaaacttgcggaggtacccgggattgacacgtggcgggggttccagatgcattcgcataactacagagttcctcaacctttccataatcaggttgtgattttaattggtcttggaccaagtgcatttgacatctcaagagaaatagcacaagtagcaagggaagttcatgtagcaacaagactaaatccagatttagcgggaatgaagctcggagattatgg

SEQ ID NO: 21661 - DNA, 124 bp, Glycine max
  Clone ID: PAT_MRT3847_119564C.1
aaataacattggggaggtaaacattattgtcaggaattggatctgagaaactcaatccgacatcatcatggtcctaaaacacatgtattgcaataactctgtaaattcggtgattggatctatt

SEQ ID NO: 21662 - DNA, 407 bp, Glycine max
  Clone ID: PAT_MRT3847_119565C.1
tttttccgttataaacaggactgtagttttacccataatattagaagcattggtgaaaaatatcaagagtcattggacccaggctgttcatggcctgtctgtgaacgtttggaaactgttcacagaaaaggatgcggtcttgtttgaagagtgtcacaggcagtacgacgagagggaggcttaagcaataaaggtagaatagcagtgggaattgaattgtaaaagactggcagatgcagcttgcacagaatggggtggatctggttacagattattgaaattactttactgtcgtaaccggcggtgtgaaatggataggtgaaggattacatgtgcttatttggcattttggagccatttttaattggctgtttctttcccacttaattcctattccccctctattt

SEQ ID NO: 21663 - DNA, 449 bp, Glycine max
  unsure (1)..(449): unsure at all n locations
  Clone ID: PAT_MRT3847_119566C.1
aaagtggtcaaaacagagagtaaagcaagatgagcatttactaagaaacttctacatgccgagcacattcaccttttctttaagccttacgattcttgggagatgtgtatttttattcctattatcttagagaggttgaataaccttcccaaagtcacacagctaattagttgagatcagtgcttcttcctctctgccatactagggtgcaaagacagtaatgtcagtccctgccctgaagaatttgtaatccaattagattccatgcaaaacacacatggatagaaccatcagagagtgctacagagcagagaccacaaattcttatattggctgatataatagtcttctgtcaaatgttcatctccctgcccccatgagtaggaacataactagaaaaactaagtgtggattanggaaagtaaatcctgactagatagtggatgctg

SEQ ID NO: 21664 - DNA, 128 bp, Glycine max
  unsure (1)..(128): unsure at all n locations
  Clone ID: PAT_MRT3847_119567C.1
caattanaacgtgatcnatgatagcgagcaatgatcnngtatgatcatagacgcatgccagnntatgatagtatatcattgtncatgttgtntgtgtntagcattgtggnttgcttgtgctacatncc

SEQ ID NO: 21665 - DNA, 322 bp, Glycine max
  unsure (1)..(322): unsure at all n locations
  Clone ID: PAT_MRT3847_119568C.1
antctacanacacacnnacataaagctcggaatncngctcgannacaaaaancatctgnnancnataccatannanaacaanatnaanccctnatcanatnatnngtntnnnatcncaganccacacaacatacnanncannctaannnngnanaaaaatcnnacaanatactnaaaannaanccaacaaaattccaanncanatccctnaaccannncanngtacataatnncanncnnncanntctaatantangaanccatccannntnatnnntnaaancnancnnnnctnnatntnatnaanccannnnnttnangt

SEQ ID NO: 21666 - DNA, 540 bp, Glycine max
  Clone ID: PAT_MRT3847_119569C.1
gaggaaaatttgtcttgttcttctaaataattggtccaaatccgagctagagtacaactaaaatgtctacactacgaggatgattgaccacaatatacagcaggccacaccatcctccctagcagcaaattactccaactccctgcaaaagatgtgctggaagttcaggaataactgcattgtagatttcagctgatttcatccaattatcctaggtatataatataactgcagtgtcaaaaaaatttaacaaagcaaacagtgtctctggactctagctctatgaagttaacatacactatgcgctgaaaaaaagatgcatgatataaagtcataaacaaagataattcaagatgcaaaaccacctacttttcctcaatggctttggtgcagttgttagagctgtgggaaaagatacagggttccagatcatatctataagtctcagaacatttgaactttgggatagataaaacaaaattcttctgttgtgatgcatatgaagaagaaacctttttatgaaaccagcgggttcgggga

SEQ ID NO: 21667 - DNA, 391 bp, Glycine max
  Clone ID: PAT_MRT3847_11956C.1
gtagatcgtccagccgactgtttattctgagctcctaccctgtgaggcagctggtgaggcacctgactcacaatttgacgaattatatggcccatacaaagaaccacttataaaaacacttacagtcagtgtatcaagatcattacttggagatggcctgacagatgatctaactgtggccaatgattgccataatgaccaatctgatgtctaggccgatgcagtgaatgcttcagaacttgatactgagaatctcactgaaaaagttactgttactaccatcactgacaaatcttctaacgtgtctgatgatggcgaagatgcccaggagaatgaagagaagtctgatgtcattgctaatcagactgactctctaaatcatgtaactaaa

SEQ ID NO: 21668 - DNA, 1406 bp, Glycine max
  Clone ID: PAT_MRT3847_119570C.1
ctcggctgcagagtatgcactatacttgcagaaacatggttcttatttaggacaacaaatttcaacaagacaaaactggaaaaattaggatatcagcctgacacagatatgcttcagaagttctgggaactttgtcaacaacagcttaatatttcagatgaggcagaagatgaagatgttaataaagagtatgctgtggagacaaatagagatgctgtgatgattgctgctgcaaagctgatcgcaaatgatgttgttccaaaggaggatcttgcttctgagattatttcacattttgtgatgcacggtacaagtgtggctgagattataaaacatctgatcacagttttgaagaaaaaagatgttgatttggctagcatttttctggaagcacttaaaaaggcataccataggcatcttgtcaatatgtctggaagtgagaatgtttcttcagaaaacaactcttcctcaggatgtaaagatctggctgctaagctttctggaacatttatcggtgttgcccggatcaaacacagacctgacattttaaaagttgtcagggatggtattgaatatgcttttgtagatgctccaaaacaattgtcatttcttgaagaggcagtgctccattttgtgtcaaaactgactgcacctgatctatcggacatcacgaaggatgttcaacagcgaacaacaaatgtcaatacagacgagaaccccagtggctggcgtccctataaagtatttattgccaacttactagaaaaatgtgcaaagaatgagggatttcaagatgagaaagaaggggtttctgttaggcgtaggggccgtcctcggaagaggcaaaacataccaggaaagaagctttttgatgagcagagttcaagtgaagatgaggattccattagtgcatatgaacaagatgcacaagatgaagggaaaagacaagaggatgaggatgacgatgaccgattgataaattcaatcccatcatcatccaagcttaggtcactgggagtttctaggggggaaagcaaagtatctgcttctagaacatcaggggcatcaagctagtcttccacagttgttgtttactattatacgttgacaattgctttggtactcattaattactacacttattaagattaggagtagtagtacttgtttattattcaacttgcagaatgtatatatggagcttgttctgatcaagtttcccggtctttctgctgaaaatacattagtacagtaccatgcctcttgactgctgattttgagctgaaaatacattaattatctcctcgcttacaaatttcaccatggtggtcaacgttgtctgattctatgctgagtgaaaattataatttatacatgaaattctaagttcaatttttggttaaaaa

SEQ ID NO: 21669 - DNA, 664 bp, Glycine max
  Clone ID: PAT_MRT3847_119571C.1
ttccatgcgataattctcttaaaaatacccctcctgaaaagaagaaaatagagatggaattttctgggctgcttaatgttgctgagaaaacctctggtctgttcttctcatatgaaactaatttaactctgagtgcacaacggttgaatgacctgggtgatgagtctagattgcttcctctttggagacaggcagagcctcgattcctatggaacaattatatgttagaagtgctcatagataacaagcttgaaccatacttgctccctgtagtccaaggcagctttcatcactttcaagcagccattgggaaagatattattgatgtcactttgattgctaggagatgcacaagaagaaatggaacccggatgtggagaagaggagctgatcctgatggttatgttgccaattttgtggaaacagaacaaattatgcagtttaatgggtatactgcttcatttgttcaggtccgtggttcaatcccactcctctggcagcaaattgttgacttaacttataaaccaaagtttgagttattgaaacttgaggaagctccacgagtcctagagaggcatttcttagatttaaggaaaaaatatggggcagtattggctgttgatcttgttaacaagcatggaagagaagggcgactgtgtgaaaa

SEQ ID NO: 21670 - DNA, 265 bp, Glycine max
  Clone ID: PAT_MRT3847_119572C.1
ggctgctgctgctattgcttcactccatatacacaagctctatgactttcacactcgatataccattatttctgatggcgcgcttttgtctcagcatcaatgcactgcaggtgcccactgtttctatcaatatgcattccactacaattagcgcgataacgtcatgtcctatcactcgtacgacagctacctaaggaatgcctaacccttatatgagcatcgacctgctacctttgacaaccactacacctatgccaggccgctt

SEQ ID NO: 21671 - DNA, 508 bp, Glycine max
  Clone ID: PAT_MRT3847_119573C.1
cccactcgtccgcccacgcgtccgcggacgcgtgggggggatttttactttgatatcaaggctcgctctacattgaaaaaagtttcctgtacaaaagcacaatttgttagtggaaaaaccttcaagtatgatataattggtgctggatcacattcttcacaagattctcctgacaaggaagatcaagaaacacccacaacgactgatgccagatcgagacacagaatagatcctcaattcaatgaaggtcaggctcagacggaaacaactctgtttaaatagtctcttgatgatgttgaaactcccaaaggtgccatgttggatcttaaaatttctcaatctaaaattgcactacccaaaaacacagtcggaggaaccattctgcgatatgatacattggcgaattcattgacacagggcaacttcagagcaagtgttgatttgaagagcactcatcgcattaaaggaatgatgaaaatggttgccacaattggaatccctgagaata

SEQ ID NO: 21672 - DNA, 263 bp, Glycine max
  Clone ID: PAT_MRT3847_119574C.1
ctggagccgatagcataaccgaatagggggcatggcgggcagatcagattcaactcgatgcatgtgggcgtggaccatatatggttgcccataaacacaaacatggagccgagagcattattgataaatgctacactgtgaaaagctactgtttggccgactgcattgaatgaaatgagcgagcttaaaagtgaagccatagctatattagagcagggcttgatcgatgcgagcagggcatgagaggtgggcatcttgaccgg

SEQ ID NO: 21673 - DNA, 125 bp, Glycine max
  unsure (1)..(125): unsure at all n locations
  Clone ID: PAT_MRT3847_119575C.1
catctctagattngtactcagaccttanaaaaaagatantatangananaganagcggngatggtatgatggagcccnggtnctgctgnatgataatggtaacnaggncaaattctcaaagntat

SEQ ID NO: 21674 - DNA, 233 bp, Glycine max
  unsure (1)..(233): unsure at all n locations
  Clone ID: PAT_MRT3847_119576C.1
gntctttcactcttcttcgtctcaaatctcttcgttccttcgattcgttccatttcttccaaaatgggcaaagacccagttcgcgttctcgtcactggagctgcagggaaattgggtatgtcttgtcctatgattgtaggggaggtgttggctgacagccgnatctcnatgntgacaanctcgganaagcatgatggtaatgatgtgagtnatccntctaaggtgtcaactgt

SEQ ID NO: 21675 - DNA, 549 bp, Glycine max
  Clone ID: PAT_MRT3847_119577C.1
ggaaaagcgcccaaagccggcccgttgggggaaggggctgtacaaagtttgttttcccataaacagaaagcaagaaaggggaaatcccctcgcaacatccataatcccacaccaaaaaattttaaaaccgtttgcaaaaaaggggggtagggaaatagtccacaattttaacaccatgatcgccctaaaaccttattcaccacggatcctcgagggcaatttgacgttccgattttaatcccgcaggggctaaccggggggagccattttatgaagggaccaaaaaacccgcccgcatccaagggattgcctgcccgccatttaccatgcaaaaggacccactgaaacgggggggacatttttgcataggacggtatgccctggttcgccgagggcatccggttccgaaaatagctccgtcatacccgacataaaaccgtttagcagaatccaccgcccgagcccgactggaccccctggccctgtccaatcgagaccgggggcttggttatacctggggggggcccatgccctccttgatttgcctgg

SEQ ID NO: 21676 - DNA, 403 bp, Glycine max
  Clone ID: PAT_MRT3847_119578C.1
gcgtggcacacagtgagcatctctgaagggatagctgaagggtatgctcttcttcaggcggaccttgcggggcgcgatgcaacacaggacttagcaaaaatcctgacggagagaggaaccgacagaggatactctgttaaaacggatgttgaacaggaagtggaggagaaagtgaaagataaagccctagatgtggaacaagatatggaacctactaagaggactactgagaggagaaatagctaggaatagagctacggacaggctgtcacacaaggtattgcaagatgccgtgagagataacgacggccacaagctctgctacagggtatggtaactgctgtggaagatgctgcgacgtacgactccatgatcaaatgcgtcatgagatgtgaagaggatc

SEQ ID NO: 21677 - DNA, 831 bp, Glycine max
  Clone ID: PAT_MRT3847_119579C.1
caaacccaagagttgaagaagaatcagagttcagaatccatggcaggtgctatagtaaagtacggaatcataggagtaggaatgatgggtagagagcatcttgtgaatttgtaccatcttcgcacccaaggcgtggcagttgttgctattgctgaccctcatcttccctctcaacaactcgctcttgacttagcacactcctttacttggcctctcaaggttttctcaggtcaccaggagctgttggacagtggactatgtgatgttttggtggtatccactcctaacatgaccatcataggattcttatggacattatcaatcattccaaaccccatcatgtactggtagagaagcccttgtgcaccacaatctcacactgcaaagaggttgtcaatgctgctagaaagagacctgatatattggtacaagttggactggaatatagatacatgccacctgttgcaaagctgatagaaatagttaagggaggaaaccttggacatgtcaaaatggtagcaattcgggagcatcggtttccttttctgtgaaattagaacaattggaacctattcaatattaactcactgggcactctggttttttcctgtggcaaatgcttagatctgaagttggttgctgtagaattagctcgtgaacgtaatgaggcttcttctgttaggaacgataatttgaaataagaaaagaaaggattttattgaccagtaagaaaagaacccaaaataagagagaaaactctacttcaacccttcacaaaggatcacaaagtgctaatgctcaatctacaaatgatcagatctccctctctcc

SEQ ID NO: 21678 - DNA, 1292 bp, Glycine max
  Clone ID: PAT_MRT3847_11957C.1
gctatgacaaattttactttggagaagtgggacgagaaacatatgatttcttttgggctgattttgctgattggtacattgaggctagtaaagagcgtctttaccagtctggagctggaggcaagtctgttgcttcagtggcacaggctgttctattatatacttttgagaacatactcaaagtgctgcatcctttcatgccatttgtaactgaggagctgtggcaggcactcccttatcgaaagcatgctcttattgtatcgccttggccagagactcaactttcaaggaacacctgctctgttaaaaagtttgaaaatttccaggctttggttagagccatcaggaatgctcgggcagaatattctgttgagcctgcaaagcggatatcagcatctgtggttgcaaacaatgaagttatagaatatattgctgaagaaagagaggttctagcacttctctctcggctggatttacaaaatctgcattttacaaattcttttccaggaaatgctgatcagtcagttcatcttgtggctggagagggactagaggcttatctccctctggccgatatggttgatatttccgcagaagttgaccgtctttcaaagcgcctttccaagatgcagaaggagtatgatggattgatagctaaactcaattctcctcaatttgtagagaaagcaccagaagctgtggtccgtggggtacgagaaaaagccacagaagcagaagagaaaatcaatttaacaaagaaacgacttgaatttctgaactctaatgttctagtttcacaataggcttgatcagggttgcctgcacgttccagctatcgattagtgcctatggtatccaatttcatgccctgctatgaacaaccaacatcttggcttctgtttcatgttgcattaagtgccctattcggatcaccaacaaaaatcccagctcctctactatgcatcatcgcaagctgatatggatctgatgccattcccttctcttttttgtctataataccagggatttttaatcttgctagagggatgaacaaggaaacacaaagggatgctgtgaccatcagatgagcaacaatgttgtaaatgtagagtatagctaactttattctgcaactgtatcccaagactcattatcctcaattgtattattacaaattacatactaggtgtcattgcaaagcaccaggcacagtactgacgcctgtgttgttgatattgatactttatttataaaaaaaaggtttcttggatttttttttcaaaaaaaatgag

SEQ ID NO: 21679 - DNA, 362 bp, Glycine max
  Clone ID: PAT_MRT3847_119580C.1
ctgagcatcgtctagctatctcgatcgaactgtccaaggtcctgtcaccctcgctacatagggggcggttgggcatgtgtggtaggcggtaggtcgacatcttaacaatttgaatacagtaaaatttacaactgcaaagtgggccccgagcaccggggctggcacgctagggagcccagggcgcgaagacagttttggggtgcctggcatgggagggcactgcaaataaaccacaagctaagccacgcccagtaggactcgactagagggaatagacgcagctaggtatgataggcagcggttgcgaaggaggggtagtacgacctccggcgcgaccgagccacgagaagcccgtggaatag

SEQ ID NO: 21680 - DNA, 628 bp, Glycine max
  Clone ID: PAT_MRT3847_119581C.1
tttccttttttttttttttttttttttttttttttttttttttttttttttttttttttttttttttttttttttttttttttttttttccaatttccccccaaacccttttaattaaaaaaaaaaaattaaacccaaaggaaaaaaaaagatttaaagggggcccaaaattgggctcggggaggggaaaaaaaaagggaaaaaaaggaaaaaccggggggttccccccggccccgggaaaaaaaagagcccccccgggccgggaaaagccccctcaaaagggccctcggcccccccagggaagggcggggaaaaaaaaaagattccttggaagggggggtaatccggggtaaagaacccccgcaccccaccaaaaaattccccccccggcccaatttcaaaggaaaaaaaaaacccccccgccccagaaaaaaagggaaaaaccgggccccccccggaaaaagggcccgaggggaatggttaaaacaccccggccaacgggggccccctgggaaagggatttgggggggctttaccgaaaccaaaaccaaatgggccaaaaccctcaaatccggggaagggggccaaccccaatttaaattccccccccccgggggccgggggttaa

SEQ ID NO: 21681 - DNA, 512 bp, Glycine max
  Clone ID: PAT_MRT3847_119582C.1
cgggatgttccttattatacatcgcacctgaggtaaaaggcaataaaaataaatataagcaacaaaaccatataaaagccccacttcaccagaattctcttactaagagaaaattgaaaaaatacagagcataatgcgaggttaagttaaacagcagtaattctctctcttgatagaagacaaatttatgaattattgcagcaagctactctcctactctgatgcaaccaaaccatagtgtgaggtagaagtttattttctttcatctgccctatttctttaactttgctaactgcccattaaaaaacccaaacctttccattatcctaccttggaacaattaacaactgaaaagaatgatgctgaaaacataaatataccttatctacatcaactaaaggaacattcaattttaaagatggatccaaccattgttgttgtgatgacgtgaccggtacctgaataaaagatgttaaaaaggtctatagataagtatagatgcatcttagagt

SEQ ID NO: 21682 - DNA, 444 bp, Glycine max
  Clone ID: PAT_MRT3847_119583C.1
tacggttgcaagaagacaacagaggggttcggctgctataagacgacaaaagggtgcgggtgagagacgtacgacagatggatactgttgctagaaataccacagaaggttactgttgcgagaagacgacataaggtttcggatgttaaaagactacataagggtactgctgccagaagacaacagaagggtacatctgcgacaagacaacagaagggtacggatgccagaagactactagaagggtacggctagtagaagacaacagatagatacggatgttagatgacgacagatgggggctttcacattcatgaatcgttttgttgagaaaatgtgtcattactgatggaagcgcgagagccttagttgttcaagattagtgctaagtataagaagaagctcatgatgaggatgaagaggaagcgccaaaagatgagacat

SEQ ID NO: 21683 - DNA, 435 bp, Glycine max
  Clone ID: PAT_MRT3847_119584C.1
agactgtaaataagtgcttttgctgtctcgccacattggaactggaatatgtttggttggtagatggccatgttctcagcattggacccaaatggatccattgtttggaagaaaacaacttatggtccattatttattggtccatgcataccttctgggttttccttatgaggttcattaatctcttcatggattttacattagtcattattttaatcattttttccactttggcccctaacattcttttgtcaagattattaaaaagattgtgaaagattatgttggttcctggtcaggatacaatataagaacatctactaactcatggaaatgtgttcactgaaattaggttactccttatagcatttaaataaaggatatttgtatacaatagagttatcaggtgaaatatattttcatcattataaataa

SEQ ID NO: 21684 - DNA, 668 bp, Glycine max
  Clone ID: PAT_MRT3847_119585C.1
tgatcctatcctttcatctactttagctattattattgatcgataactcaggaaattggtaactgcatcattcagcatcaaacatctcattttccaaattaaatgcaagcctcaggttaaagccgataatagaagctgagctagcttaatttaaaaaatcaaactgcatgagcaatagaaattataagcaactctttggttataaaaagtaatgcacgatggcagactgccagtttcatcgtgtagatttcaaagcaccacaacctgcacttgtatcctccattgaccgatgcaagagcacatccatagtttgatctcaagatacaagttggagttggcaatccacctaaaacaatccatagtttgatctcaagatacaagttggagtccacccctagatacacctagtggaatttaatttccccggcagcaacattttttaatccaatattacatactgctggcatgaagacagtctagttcctcccattagtgattgacaagatctttctcagcctgctgtcatcttcaaacctgccaatgcccatcactctgaacatctaaccgatatttgcaacaagtctgtttatagaggtagtgaggcctgtttactggcaatctaccatcagtattcagtatgctgttcaaggttgctaggacaagctgac

SEQ ID NO: 21685 - DNA, 1042 bp, Glycine max
  Clone ID: PAT_MRT3847_119586C.1
aagggcagcactaatttatatagtaagctagctaggttgaaaatagtttggttttgtagtaagtgaggtgaggtgccaaaatggtgaagataactcttggtactttcgatgactcttttggtgttgcctctcttaaggcttatttggcagagttccatgcaactctgattacattgatcgctgatgttggttcagccatcgcttacaacgagcttacaaaagatgcacacttggatccaacgtggctggtggccatttgaacccagctgttacttttggattggccattggaggcaacatcaccctcattactggtttcttgtactggattgcccagttgttgggttccattgtggcatgcctcctcctcaatttcatcaccgccaagagcattccaagccacgcaccggcaactggtgtgaacgattttcaagctgtagtgtttgagattgtaatcacatttgggttggtttacactgtgtatgcaactgcagcagacccaaagaaggggtcattgggtatcattgcacccattgctattgggttcgttgtgggtgccaacatcttagcagcaggcccattcagtggcggttcaatgaacccagctcgctcattcggcccagctgtggtcagtggagacttcgctgctaactggatctattgggttggcccattgattggaggaggtttggctggcttgatttatggagacgtcttcattggttcatatgcggctgtcccagcctctgaaacctacccttgagcttcaacttgaaaaatatgacttcttgttctattcacttgtgtgtcctgtcccttcaagtttcatctttgttccccgtttgatgtctcgagcttcatggctttttgcatttttaactgtacctttatctattattcaccgcttgtaataattatgtaaattataattcgaacttgatgcatggattgttggaaggtccccttgtttttcggttttcgtcctaccaataatgacatcgagctagtggtttttacggatcagttaagcagttcatttttt

SEQ ID NO: 21686 - DNA, 1384 bp, Glycine max
  Clone ID: PAT_MRT3847_119587C.1
tacggctgcgagaagacgacagaaggggagcactaatttatatagcaagctagctaggttgaaaatagtttggttttgtagtaagtgaggtgaggtgccaaaatggtgaagataactcttggtactttcgatgactcttttggtgttgcctctcttaaggcttatttggcagagttccatgcaactctgattttcgtgttcgctggtgttggttcagccatcgcttacaacgagcttacaaaagatgcagccttggatccaacggggctggtggcagtagctgtggcccatgcatttgcactgtttgtaggtgtctccgtcgcagccaacatctcgggtggccatttgaacccagctgttacttttggattggccattggaggcaacatcaccctcattactggtttcttatactggattgcccagttgttgggttccattgtggcatgcctcctcctcaatttcatcaccgccaagagcattccaagccacgcaccggcaactggtgtgaacgattttcaagccgtagtgtttgagattgtaatcacatttgggttgttttacactgtgtatgcaactgcagcagacccaaagaaggggtcattgggtatcattgcacccattgctattgggttcgttgtgggtgccaacatcttagcagcaggcccattcaggcggcggttcaatgaacccagctcgctcattcggcccagctgtggtcagtggagacttggctgctaactggatctattgggttggcccaattgattggaggaggtttggctggcttgatttatggagacgtcttcattggttcctatgcccctgtcccagcctctgaaacctacccttgagcttcaacttgaaaaatatgacttcttgttctattcacttgtgtgtcctgtcccttcaagtttcatctctgttcaccgtttcatgtcatgagcctcttggcttcttgcattttaaactctactttatctattatccaccgcttgcaataattatgtaaattataattcgaacttgatacatgaattgttggaaggtccccttgtttttcggttttcgtcctaccaatgacagcgagctagctagtggtttttacggatcagatctgcagttcatttttcaactgtaatcaatctcggccaatatttaatagactaacataattaaaagaatgtattgtaattggtaaaagatgaaactgcatctcgtgcagttattttcctaactgtagggggtccgaatccgagttttacaactacaatctcaaacgtcacttctgtaaacttttcctcggatctgcaattatcaatgtacaaagaactattcagctttttagaccttgaggcacaccctcagcaaaatcaagttcaaa

SEQ ID NO: 21687 - DNA, 257 bp, Glycine max
  Clone ID: PAT_MRT3847_119588C.1
gtgggttatggtgcataagagcatttcaggaatgttatccaagtccatccagcacgcaggactgacctcttctactgcatgtaacgactgagactccgtagaggactaccacgacgttcaacactatggactcacagcttcccaccatctcatgcacccacttccgcagagtcctcgactggaggacaaatgatgacgggaaggcactctgcattgaagatacagtaatcccaatactcccaacttcagttcgaccg

SEQ ID NO: 21688 - DNA, 1172 bp, Glycine max
  Clone ID: PAT_MRT3847_119589C.1
ctttgcttaggttctgttttgcagacagagagagagagagagagtgtgtttcagaatttagagagagaattttattttgtttttttggttatcttttttggtttctcttacagcgtttttgtaggtactgaggaagaaagttttggcagaataactttgttggagagaataaaattcaggcaaggcgttgaagttggagagtattagattggaagcttagaagtttctctttggaccaaagaaatggaggtatatggcaattctatggttgcagctccttcaaatgttatttatctgtcaagtattttgggccaagacagcccaattactggtcacagatgcaactggaaatgtgaaaatgaacatgtttgtggaaacatgtatcgctgcaagataacagggctgactcacatctgtgataaaaactgtaaccagagaattctgtatgataaccatagttcactttgcctagcaagtggtcaaattttcccccttacaccagaagaggaacaagcagtgagaggtgttcgcaggaagcttgacacagagaattcgccctccgatagctgtggttttaagcgtagacgagatgctcaatttcatccttctcccttcgagagatctttctctgctgtcagtcctatctgcagccaagttggagatggcatggatatgaaatagatatctattatataactgcaaagacacttctttatcatttctcttgtccctttaaaggtttttacgttttctatcggatgagtatcgataacagaacttgaacaattatggattatttattggtggacatgatgtgtccccatcttctgtaggaagtccttatatttctagtattaatgtaatgtagcctttaaagtagcttgactgttgaatggggatctgagcagggtctttgtacacgacacatttatgacgcttgaatttacttcagttttctgctaaacctagtgagaaactgactgtcatagctgactacggaatgcattctggccttttacattgcttgaatttaatttggatctcaatgatgcatatatgagcaatgtacttaactgtaatccttttttagctgaccatcaagtttttagtgtatctgtaatcacaaagcagcctattaatatattcattactaatttactattactactgtc

SEQ ID NO: 21689 - DNA, 268 bp, Glycine max
  Clone ID: PAT_MRT3847_11958C.1
atgaaaacaaatagctacatacaaaaccttcatggtctctgaccctattatcttatttgcagccaaagctatctactattttccccgaactctaaccataattcgaaattcgatatttcaccgacattatcttactcattagccaagatactaagccatagcctgaacatttactacatgctctgattaccatctttaatatctactccacctatttgaatttcttgcaactctacaagagctatataacctagacggcccctacgta

SEQ ID NO: 21690 - DNA, 215 bp, Glycine max
  Clone ID: PAT_MRT3847_119590C.1
gggccaaagtcaattttcgttttccataaggggaaaattcaccgggttttttaatttttgacaattggcctcggggttttgtttatgccaacctttggcaacaaaagaaaaccataacctttggaaaatggcgaatttattccaaaaaaaggggggcccaatatattctgcccttggacaagctcgattaaaagctgccccccaacaaaattgcc

SEQ ID NO: 21691 - DNA, 1218 bp, Glycine max
  Clone ID: PAT_MRT3847_119591C.1
tacggctgcgagaagacgacagaagggggcttattttaatttttctagcttttgctttgcttagattctgttctgcagagagagagagagagagagagtttcagaatttagagagagaattttattttgttttttcggttatctttattggtttctcttacatcgtttttgtaggcgctgaggaagaagctttggcagcataactttgttggggagaataaaattcaggcaaggccttgaagttggagagtattagattggaatcttagaattttctctttagaccaaagaaatggaggtatatggcaattctatggttgcagctccttcaaatgttatttatctgtccagtattttgggccaaggcggtccaattcccggtcacagatgcaactggaaatgtgaaaatgaacatgtttgtggaaacatgtatcgctgcaagctaacagggctgactcacatttgtgataaaaactgtaaccagagaattctgtatgataaccatagctcactgtgcctagcaagtggtcaaattttcccccttacgccggaagaggaacaagcagtgagaggtgttcgcaggaagcttgacatgggagaatcgccctctgatagctgtggttttaagcgtagacgagatgctcaattccatccttctcctttcgagagatctttctctgctgtcagtcctatctgcagccaagttggagatggcatggatatgaaatagttatctattatataactgcaaggactcttctttatcatttctcttgtccctttgaagtttttcacttttttctatcggatgagtattgataacagaacttgaacaattatggattatttattggtggacatgatgtgtccccttctgctgtaggaagtccttatatttctagtattaatgtaattgtatcctttaaagtagcttgactgttgaatggggatttgaggcagggtctttgtacgcgacacgtttatgacacttgaattgacttcagttttctgctaaacctagtgagaagctgattgtcgtagctgactatggaatacattctggccttttacattgcttgaatttgatttggacctcagtgatgcatatatgagcaatgtacttaactgtaatccttttttttagctgaccatcaagtttctagtgtatctgtaatcacaaagcagcctattaatatattcattactattactactgtc

SEQ ID NO: 21692 - DNA, 403 bp, Glycine max
  Clone ID: PAT_MRT3847_119592C.1
ttatacaagcataaacaatctacctactggaaaagcttatgccacaaggacaatcctgtcctccaaatatcatggttctctgaatccactcgctctggaattaatcacaccacatccctatggaaattaaaagatgcctaagattatatgggtgcaccattcggctgcatgtgactatatctcaacttcgctattagccaaggcacatgtcatcgcgaataactctggctattattaactactgagccattgctgctatactgatccagtgattgaaccattgaccctagccaccaataagtatgtcaccgtgtacaatactattaatatgattcggtatactacctaccgcgaccacataagtatcattcgacttgctagacagtcccagattaatgcagat

SEQ ID NO: 21693 - DNA, 487 bp, Glycine max
  Clone ID: PAT_MRT3847_119593C.1
cggctgcgagaagacgacagaaggggagaaacagcagcagcaatttgagtagtgagaaacaaagagacagacaggtccatgtaattgaatagacagggcactttcggtttcttattattttgattttcattacatcacgtaacaataataatacagccaagcacgcacgcacgcacccacaggcacaagtctctccaactcaacttcttccactctcactaatggctctcaccaatgctttcctcgctccttccttcgccgtccacggtgttggtagggtttccgatccgcgctccattcctctcttctctcttccctccgacgccttcttccgctccccaacctccctctccagggacaagaactttctaaaagcttctgcttatgatttgaatgcagttggttctgcttcactgcaatctggtgacaatcctgatagtgttcctatgccaatagttctaatagatcaagaatcagattctgaagc

SEQ ID NO: 21694 - DNA, 266 bp, Glycine max
  Clone ID: PAT_MRT3847_119594C.1
ctcgagccgttatgactctggtttcaacaagccatcgtgtgagtctgctggcggtggctatgaaggtggttacaacagaacatctgattctaaggatgagccagttaccggtgaaggctttaaaaggggcatttttaaatcaggggagaaatttgaaggaaaatattaccaattgttaatttttaactttccttactttggcctttaattacaacaagaacttttggtttaacaagggtgaaaatttttagggccttggtccaaaa

SEQ ID NO: 21695 - DNA, 398 bp, Glycine max
  Clone ID: PAT_MRT3847_119595C.1
taggtcgcccgggccctttttctttttatcaaccaacgttttcattacacggacatggatcgagactatagggcgtgcatcacatttagcacccccaaacagaccccaacacacccttaagtagatcactcgagcctgcatactccaaagactagttttcccatctcaaaggataagatctacatgaagaaagcattcttctcctgaaacttcacaccgctttcatcatacatataaacacttatcccaaggtcacgcccattgtcttccagtgcctaactctcagagctagccatgccttgagacgatgaccatccatatctctaaagcacctgggcagggactcaaggtggccatatggaggatcaacctcctcacgaagcctatcgttgtcaacg

SEQ ID NO: 21696 - DNA, 376 bp, Glycine max
  Clone ID: PAT_MRT3847_119596C.1
gttaggttcagtaaaactaactgtcaaattcaaaaatgggcagaccttagcggaacagctctggggatacaccaaaatagctgagcttgataaaactagaaacccctttttagataactattctcctatactaaaaacttaatacaacctgctataaaatcaatgggaccaggttaaacatgtatgtaccccctcactggaatacataagcaccctgccggggcctttcctttttcactttgtagcaacggacccctttatctaattgggatgcaactgtcttggtatccttgggggttccaactttgacgatggtgaaaacgcaaaggttcgggtcacatggaaacaactctggaagggggctttttcccagggc

SEQ ID NO: 21697 - DNA, 274 bp, Glycine max
  Clone ID: PAT_MRT3847_119597C.1
cgtgctcgagcgaatcggctcgagcagcgagaagacgacagaagggactgaaattgatattggcttttgtgatgtggaggaagccttgcagaatgatgtcattgaggaacaagctgataatgaactttgtaatgtggaagagaacatgcagaatgatgtcaatgaggagcaagttgatagttccgatcgtgatgcggaggagaacttgcagaatgatgtcaatgaggagcaagttgatgccagtcagcaagtatgcatgcgcatctatgtaatg

SEQ ID NO: 21698 - DNA, 1012 bp, Glycine max
  Clone ID: PAT_MRT3847_119598C.1
tatgtccaagacttattctaagagtgtgttatttaggtttttatcttgtgtaatatggatatcgttttactttacaagttcatgttagcctgtatggtttctttttttgaactattgaagtaacaacgcgttggacttcgatggagtcatatgtgatagctgcggagaaagctctctctctgctctcaaggctgccaaagtgagatggcctggtttgtttgatggggtggattcaaccacagaagattggattattgaccagatgcacacagtgcgaccagtagtagaaactggatatgaaaacgtttttacttgtgagattgttgcttgagagcagaacaccgtccatccggaagtcttcgaggggctaacagttgagggtatattggagaactggtcaaagttgaagcctattatcatggaagaatgggatgagaagaggaatgatctgatagatctttttggaaaggtcagagatgaatggttggagcaggattttgctacttggattggtgcaaacagattatatcccggtgtttctgatgctttaaaatttgcaagctcaagagtgtacattgtaaccacaaaacagtacccaaaccccttgtttctcttatttcaaagccactttgctgatgctttactacaagagcttgctggagtgactatagcaccagaaagattatatggcctaggaacaggtcccaaggtggaagtgctaaagaagcttcagaaaatgccagaacaccaggggctgacactacactttgtggaagacaggcttgcaacccttaagaatgtcatcaaagagccagagctagataactggaatttatatctagtgaattgggggttcaacactcagaaagagagagaagaagcccaagccaaccctaggattcaagttattgagctctctgacttcagtagcaagctgaagtagtagtatgtcctcattaaattgtcaatcaatgaatacaccttgtcttctaaatcattcatttatgaacac

SEQ ID NO: 21699 - DNA, 274 bp, Glycine max
  Clone ID: PAT_MRT3847_119599C.1
aaattaacaattcgcaatgcaaacacaattgtgtataccattaaccgtaagaatgaaaccccccattgttggccttggaacctaccccccaagggaacaacccggacccctttgtaccttttaatattgtcaaggggtacaaaaaacaaaggtgtttttgcccccaaaaacccttggattatttgggaaaaaccaaattttgaactttgtcgccgggtttttaatacaactcctccctatagttcgggggcggggaattttttcattccttggg

SEQ ID NO: 21700 - DNA, 363 bp, Glycine max
  Clone ID: PAT_MRT3847_11959C.1
tatttccgcggttatcgactcgggtgagagccgcgggttctttatctgttctgctctcactcctagcaaatctcgcgcatcgcatgcgtggcttcactcaatcggcgccccgcactgatctatgaggtactctacaaggtctgtggtactactgtactcaatgagataactgaaggcgaagacgatgaccaatatgaagaataccctggcgtttatggatctatccatccatggggatcctgcagaaaggatggtgttcgagctgttctatgctggtgctcccaagactgcatagaacttttgtgcgttatctacaggaaaaaaagggctcaactcaactactgctgaaacactgcactacac

SEQ ID NO: 21701 - DNA, 493 bp, Glycine max
  Clone ID: PAT_MRT3847_1195C.1
tccatgcaccggcgtaagctcggaattcggctcgctctcattttcgtctctgacatttctatttaaaatttgccgaagaatccaattcagcgatctccgaagagctccatttgttgcactccaattggaaaaaagaagtgaacttgcgatctgggtatccaattttcgaactctttcgatggggaatgatgcagggtcaccgcagggtccggttacgtgtgggtcgtggattcggaggcccgagaatttgaatttggtggtgttgggaaggtccagacgtggcagttcttgtccttctctcttagagattttctccttcgatcccaaaaccacttctttgtctacctctcctctgaccacttatgtgttggaagcagatgaaggtgatcctgttgccattacagttcacccaagtggggatgattttgtgtgcgctctcagcaatggtagctgcaaattgtttgagctgtatggtcgtgaaacaaacatgaag

SEQ ID NO: 21702 - DNA, 353 bp, Glycine max
  Clone ID: PAT_MRT3847_119600C.1
cataactaaactatcaagtatccctgtatatacaagttgtctaaattgtgaaaaaaaaagaaaaaaaaaaaaaaaaaaaaaaaaaaaaaaaaaaaaaaaaaaaaaaaaaaaaaaaaaaaaaaaaaaaaagaaaaaaaaaaaaaaaaaaaaaaaaaaaaaaaaaaaaaaaaagaaaagaaaaaaaaaaaaaaaaagagaaaaaaaaaaaaaataaaaaaaaaggaaaataaaaaggggcgcgtcaagggaaaaccctgttttgacccatcaaaattggcctagcagcttattttccttattgcgacttgaaaaaatgccggaccggggtttttaaaaattcgggattgggaaaa

SEQ ID NO: 21703 - DNA, 240 bp, Glycine max
  Clone ID: PAT_MRT3847_119601C.1
ctcttttccaagagtatctatcttaaagtacgcctaataagaccctaaaactcttggttccctccatactaagtagcgcctacacaaaccgtatccaaaccaatactcatcatgaccgtattcaacctcttcaaaaactcttccatcaactaaaacgactccctatacatgccaacttacactatactgttcattctgtcttctaccgacattacaatccttctgtgtaccctaccttca

SEQ ID NO: 21704 - DNA, 628 bp, Glycine max
  Clone ID: PAT_MRT3847_119602C.1
aataatatcaatatttacaatacttatataattatttgtcaccaaattagaagcctccagccctcaacagtattacaaattaaagttaaaataaaccaataaaaaatatttttatactggctttatactttcatcataatttctactttctagcaaaaattctgcaatgcttgcttgtatgcaaattgcacgatgagagaatacttatgcacagagtcacgcttattatttatatatcttcctcctctacaagttctcggcacagtcaagtacttttaattggaggactttctaagcggacatagtcatacataactcccatgaaaggacttatgccttttgactgtgtcaaatagatggtgttctttccattcaccaaatgattgctacctacagctatagtatgcaacctatacaatccatgaattccatgtcttgctatggcattgtcatcgccttttagccctgttgagaagtggggaagctttgcattcaggtcattgaacctaacctccaatctagcattagtggtagatgcacagggcacttggaatggggtaatttcctggcaatatgatatttttaaggtggaattgaatttgccatggtggttggcatgtatgatttt

SEQ ID NO: 21705 - DNA, 411 bp, Glycine max
  Clone ID: PAT_MRT3847_119603C.1
tttttgtcagtaattgcgttttgacaccaacaaattaacaaaggcaaagaatcacacatgtacaatgtatacgtttgagcattattgatgagaaagcaccatatttcctagagttcatcagtaagtgtataatgcataccttaccacctttacctcgatcacatcctcaaaaactacgccagggtttgacaacacaaaacgaacaaactaaaattttatattgggtgggaaggcgtggcttatcagagtggttatttgtcaattgttagaacttcttaggtaagttgtaattcttcttaaggaacttggcagctgcctaatcattcctattacacaagactggcaaaagtgtgttcggctctgttgggctccatagatctgctgttggaggcaatggatgccggatttggg

SEQ ID NO: 21706 - DNA, 252 bp, Glycine max
  Clone ID: PAT_MRT3847_119604C.1
gacgagttggcggaatgcaaactgccaagaccaaggaatagtgatcagattggaatatcgggaagcaaaccctttcgactcgttttgaagaatgaattgcctgatacaatttatactaactccaagatcaaagcaagaggcaacactcctcttgaggttgttctttttgatattgaatctaagtctatagtcgccgagggttcactgtcttcaatcaagatagagattggtgtccttgatggtgagttctgt

SEQ ID NO: 21707 - DNA, 327 bp, Glycine max
  Clone ID: PAT_MRT3847_119605C.1
caataagggaatggctgatgcgagtgatgatactgtgagcgagaaagctgcatcgacgagagcgtctctggagagaagccaggccatcaccgaccacgtaccttcgattctcggctcctgacgatcatcgtctgtccgacctagaaaccgacatgctctgcacccagatcagaacgcattctattcctaaagcccatgagaatattgataggactaggaagtatgcagatgccatattggctcactccgatcaatatcatcaggcagaagcaaagatagttaacggaccacatgaagatgtgaagaactatcctgaagcaattgatc

SEQ ID NO: 21708 - DNA, 282 bp, Glycine max
  Clone ID: PAT_MRT3847_119606C.1
gatccactctttctgtttcatgaacaagagcactcctaatatctgtatgaggcctatcacatgactcacaatgatggttgactatgcactaatgaaaatcgatcagacataatccagggacctcataccagttccaactgtcgacgcccactaaataccgggaaaagattggatcgctagatttacttgaagacaccatagcctagcacatcccaaccacaaagtgcaggactaaccatcaacctacacaggaattaggtgggccatctgctaagatgcata

SEQ ID NO: 21709 - DNA, 722 bp, Glycine max
  Clone ID: PAT_MRT3847_119607C.1
atcttaaaaattatgtcttccaatgacagacttgttttctttttgttaaagccaaacgcaagattggtacaactttctatatatacttctgtaaatatttcatgaagctcaactctaaacaacaaaaaaatcattaataacgaaatttacatctaccatatcaggttcatgttaagacatgctagaaatattatacaagtgtccctctatgtccggaataaaacctttctccaacatttccagtcttactacatcgtaggtagtacgattagggttcaaacccttttccaacatctcattgagaagcctgtttgcatcctctagcttgcctgttttacaaaatcctttaatcaacacattatatgtgacaacatttgcacgcttcccttctttctccatctgggtcctcaccttcaatgctgccttgagatttccctccatacaatatccatccatcaatgtattatatgttacatgattaggtttgacaccaacgttgagcatttcaccaagtaatttttctgccttacttggttcaccatctttgcaccacccacctattaagatgttatatgttacaacatcggctttcaattcatagttctccatttcattaagaagcttctttgcagctcttacattctgatttctgcataaccctgcaattaagcaattataggttgaaacatttggaaaaatgccttcatctagcatggattatg

SEQ ID NO: 21710 - DNA, 419 bp, Glycine max
  Clone ID: PAT_MRT3847_119608C.1
tttgcggggggattgctttggggttctcttgttattgctcattgctcgccgcctgtcctgcgttctgcacctcttgtgcgtgccttgcttaagttcctcctgttttgcgtgcttgcctccttttttttttttggggcccttgtctgttctcggcgtgggttctcctttccctttttccttccttgttgtttcctgttgcctccctctgtgttgtctcgggcctctccttctagctgtttgctctcgtgagcttcccacccctccggctctgtcgtctggttcctgggcttcctccaatgctcgtccctctttctccctctttggtctgactcttggtccctccgctcggccttgcgtggttggggtggcttctttcattgctccgcgctgcgtgggtgggccttgtttgcgggcctcct

SEQ ID NO: 21711 - DNA, 438 bp, Glycine max
  Clone ID: PAT_MRT3847_119609C.1
tttattttttttttttacaaagcacatgattggatatttgaagtaataaaattcagaggcggacaactcacgtagccaaaccccgcattagtttcacaaagttggaggcggccggaccaatattatgccataaccatggaccttttaaaaaaatggaccgttagccgcccggactacaggcccttgtaggcctattccttggacctgaatccgattaccttccctattttccacgctctaatttactcagctctaacatttgcgatcgattatgaaactcgattgcaaaatttggaacgaatcacaacctactaaaatacataatttcccaattcatgaaggcactcaaaaacccagtatgacttctctttttcccacttttgagtacatgacccttttccttttgaattaataacacctcttggttgttcccattct

SEQ ID NO: 21712 - DNA, 410 bp, Glycine max
  Clone ID: PAT_MRT3847_11960C.1
acggaaagcttcgaaccagaatgtgggttaagtcgatggtgcttgccatggcggttgccacctgcggcgatgggtgtgaactttgacgaccacatttagatccgctccacggcgatggcgctgatcgactgaggcatatagagtcaacgagatagtcgaacattgttcgagggctaaatcgactacgccggtggtacgagcctccgaggtctacagctcctgagtttggacaacagagggctaactcgatgatgtgtactccaatatctatgatatatagtcctgagaaatggagggttcttacttatcaaaaatcccaatattgtaagttttatttcgagaatatcatggttcacagaagattcttatattcaagagcaaaacaggcacttatcttcaaataattgtag

SEQ ID NO: 21713 - DNA, 680 bp, Glycine max
  unsure (1)..(680): unsure at all n locations
  Clone ID: PAT_MRT3847_119610C.1
accggtccggattcccgggtcgacccagcgtctttaatgagcatatcctttccaatccaacaagtacacgcttgctgttttgtactaaaaaagtttcaagtttctctatctgttctgtaactgcaatccttacatagcagccagcaatggagagaggagccaataataagaaattatcacctctctcttcggagcaattcatttctcttaccaccccgcttgtttttttggaaaaggaagctgaggcatcaagcacaggagtgtctcaagagagggtcatagaggatgctgagaaagatgaatttcaagttgatgactgtcccatagagcaagtgaggctaacagttccaatcactgatgatcctactcagccagcactgacattccggacatgggttctggggttggcatcatgtgtatttcttgcctttgtaaaccaattctttggctacagaaccaaccctttaaaaatctcttcggtctcagcgcagattattaccctcccacttgggaaactcatggctgcaactctttccactaaaccaatccgagtgccattcacaaaatggtctttntcattgaatcncggcccattctctttgaaggaacatgtgctgatcaccatctttgctacatctggatctagtggtgtttatgcaattagcatcatcacaattgtt

SEQ ID NO: 21714 - DNA, 580 bp, Glycine max
  Clone ID: PAT_MRT3847_119611C.1
ttttacatgtaacaagttattaacatatatattgcatatgtatcagattgggatgacattaccactttaataagacactacaccacttgcattgttcagtaaaactaagctctcagcataataaccagaataaacaaactctgtgtctacttcaatttgaagttccgtaaagcttgtcctctccatgtccagtgaatacaggcatctccttcctgccacatccacgagcaacaacacctctccgctgtgtgtaacacacagagctgccggtggaactgcaacttcaatgattgtcatctccaaagatggtattaccaaacaaaatgcgttcatactaaaagaaaagaccttattccaagactccaccacaccatactctttcatcacccagatttcacaagagcatggataacaggcgctcacatggtacacagtgagagtcttcccgttcccacctccgacaaccttaaccacaactgcaaccgaggatacatgagccaagctcccaggcagcataacctcaccaaacatctcatcctcgagacgaaaggtcaaaagaaaatagtaccaagcatgagtc

SEQ ID NO: 21715 - DNA, 581 bp, Glycine max
  Clone ID: PAT_MRT3847_119612C.1
ccacgagtggtagccgctgcatctgaacgaaacacagagggagagagagtgagagaagcagtaattcatcacaatgggtaaggttcacggatctctcgcacgtgcggggaaagtgagaggacaaactcccaaagtggcgaagcaagacaagaagaagaagccacgcggacgtgctcacaagagaatgcaatacaaccgccgattcgtcaccgccgtggtgggattcggaaagaagcgtggaccaaactcgtcggagaagtgagggaggcgtttggaagatgatggtttttcttagtttgagttcatcaatcaaataaaaagaggtgatacatttcgcaaactaagaaaaaccatcatctctttttatttgattgatgaactcaaactttgatagttctgattaagcttcaatgaaggagttttttgctagttaatatcaaacccctttttctttctcactggcaattgtgtgaagagtttttctaacacaaaatggacttgttttatttctgtttgaaattggaaatagtggtgcaagtagccaagtgggtaaacagggaataccaagttttagatttcgc

SEQ ID NO: 21716 - DNA, 691 bp, Glycine max
  Clone ID: PAT_MRT3847_119613C.1
cccacgcgtccgcccacgcgtccgtacggctgcgagaagacgacagcaggggagagcgagctagagagagagagagagagaaagagaagagagagaagcagcgattcatcacaatgggtaaggttcacggatctctcgcacgtgcgggtaaagtgagaggacaaactcccaaagtggcgaagcaagacaagaagaaaaagccacgcggacgcgctcacaagagaatgcaatacaaccgccgattcgtcaccgccgtggtgggattcggaaagaagcgtggaccaaactcctcggagaagtgagggaggcgtgttgaagatcatggtttttcttagtttgtgaaatgtatcacttgttttgatttgattgatgaactcaaacttttatgatagttcttattatggttcaatgaaggagttttttgctagttaatatgtttctttctcactgacaattgtgtaaagagtttcttctacacacgattgtgttgttttgtttctattagaaattagaaataggggtgcaattaggtaaacagggaatgccaagctcatcaattaaattattgtagcgggttttagattttgtagttgttgtcttattcttatgtcgtctttcattgcttaattttttttgtttcaatttccggtaattgcaaattaagaaataagaaaaccaaatatgttctctt

SEQ ID NO: 21717 - DNA, 402 bp, Glycine max
  Clone ID: PAT_MRT3847_119614C.1
atatataatttcctccgtttctcccccgaaggcgaccagcaccgataaaaatgtctgaatgaaaaggtgtttcctccaaatggcattatctatacagcaaatcccatatggataccaatgcccgggtatatatgggcacatatttgcatatgaacaacaaggatgtgcattagaacataagtgaatatatgaacacctgatacccacacctatgcacattactacaaggaaactgcatatagtcacattgtccagggacaggtgggcaaaattacaaacttgaggttggccattctcttaaggtgtaggagaggacacatttctccattcaaaaatcaggaaaatggcggaagacaacagaatcagcggcttgattcgggttatgtacctcaacttccaaaa

SEQ ID NO: 21718 - DNA, 270 bp, Glycine max
  Clone ID: PAT_MRT3847_119615C.1
aaagaaacttggggtttttaaaatcctcggccccaaaaaagcaagcccaaaacgctcacaccttatgagttctaaaataaggaaaccccatctcctgcatgaactacaataataaaatataaccggctgaggtttctcatactcaactctaactcatcttttagatggcattagcccccactgtctaatttttacttatttttcactcccaccaaaccatccccaaccaaacctcttgctctgagctgttgcaccaagctccatcttctc

SEQ ID NO: 21719 - DNA, 275 bp, Glycine max
  Clone ID: PAT_MRT3847_119616C.1
ggggggcaacccatttgggcaggttttttttttaatcccaaaaaatttcttccaaacaaaattttattcagttttggggaaaaaaaacccatttctttttttttttctttttcccagtaaatccaacctggggaaagggattttcaggttttgaacaacagccccctgcccttaaaaactcagtccaactttaaggggcggtaagctggtacctttgggaccaaaaaaatgtttttttgcaaaagtttggtcaaaagaaaagaaccacttttttt

SEQ ID NO: 21720 - DNA, 363 bp, Glycine max
  Clone ID: PAT_MRT3847_119617C.1
aacacattttcaatagaaagagaagaaggagggaaaaggcgcaacaagacaaaaaaatctcgcgcctagcaacggaaaaagaattccgccacaaaagcacaagtcggtagggggaagaccgccaaaaaggacataataggggcggggacacaagctacagaagaacatcccgaaaaggaagaccaagaaaaacccaaaaagaccgaagccagactgggacaaagaaaagatccgcaaaacaacgaggaacaggcccagatggaaacaaaccggcgaaaaaggctcccgaagacggagaaaactccaaaggatccacggaggaacaaaaaaacacccaaacaaaaaaggcaccaaccaacaaac

SEQ ID NO: 21721 - DNA, 285 bp, Glycine max
  unsure (1)..(285): unsure at all n locations
  Clone ID: PAT_MRT3847_119618C.1
cctcgggattcggagccccaaaaanagcaagccncaggccacggcaatgcaagagggagcnacccgaaaccaccaccganaggnncgcaaggcccgaccgcaacacagacggngcaacgcccccgcgggacacccaccacaccaancccgaaaacgcaagacgaagaaacacagacgcgccacccagaggcggaaggcccacccgggaggaaacacaccccaacaccagngngcagaccgaaccagacacgaagccaaggcaccagccacaagaggaccaccacc

SEQ ID NO: 21722 - DNA, 251 bp, Glycine max
  Clone ID: PAT_MRT3847_119619C.1
tgctcgtgtcctttaaattttctgtaagatatacatcgcttttattaaacatttcatttttgttgtttatccaaagttttcttcaagatgccttttcgattttcgtttttccatttcccccctttataaaaccatatagtcattgtagttcaaatactctgcttttttagttaatacactgtatttacataaattatttgtgtttagttggtcttgtcttgactactgatacttattagaaggaaatatag

SEQ ID NO: 21723 - DNA, 259 bp, Glycine max
  Clone ID: PAT_MRT3847_11961C.1
attagatcctcctcagagaaaaaggggcttggacattgttgactttgaacaactctgataggaggggtcccgcaactattctaaccaaagaacccttgagaaaatataatactacccttctaggaatctatacactacaataatggtgctttgcagtcaaaagtccatacatggctagtttaagaacctaggaggatggggagggagatgaggcgctatttcccgacctacttatttgcagaaactgaagagaaagccc

SEQ ID NO: 21724 - DNA, 380 bp, Glycine max
  Clone ID: PAT_MRT3847_119620C.1
tagtgcaccatgaatgggcctttcctgtgttaggtgacctgcttgcatgcattaagaattgcgcagttaaagaactgaatgagatggttgaccatgacaagaatcattgggcatacgatgatgacagtgaagggaatctagaaggactaatcacactatgagatatcatttaacggcttgtacatgaaccccgtggctcttccgtccatggctttgatggggttctcccgatgcctccacacagcacggtccgacatgcatacatgaagaataacttctattccatcagaaacaaactgctgtgtgtatctcatcagagctgacctcacgatcttatggcctctgtctcaagcacttagcgctttgccaattactagctg

SEQ ID NO: 21725 - DNA, 771 bp, Glycine max
  unsure (1)..(771): unsure at all n locations
  Clone ID: PAT_MRT3847_119621C.1
cggacgggagggcggacgcaagggcaggcacctttccttttttctcatttgttctcttacttttgtctctccaaaaaccattctctttctccgatctctccgccatttcctacgaacctcagatggaggactctgaaaaatttgatgcaggtagtgaccaagggaatgcattggtgactccatattataccccatatccgaagcacttgttaccgaaatctggccttcaacctgtcaatatagagttttctcctagctcaggcggtgataactctgtggcctctatgaaagagggccctggatcatcttcttcatcatcctcatcatccacagactcagagcaagaaaggaaaatagttggggaggaaaaaacagataatgtatcattggagaagtgagaatagaagttacaatgagttgcttaaagaattccttaaaaataaggaagagctgaaactttccaacatcaaacttaagctctcagaagaaaagatagtcaagttgaatgttcaaattgaagaaaagtgagggtgagcttaaaatgtgttggtagaattaaaagtgaaagaagaaaatctcgagtatgaaaaggnacaggtacctggagttgcaaaaaaagacagctgatttggagacacatgttccagattgcagcctcaaatagcanagntagtggcacagctggagtggctgaagacagcttaagtatcagatgatgaaantgcagattgaaagagaactaatagcggccatctggactcatgattgcag

SEQ ID NO: 21726 - DNA, 452 bp, Glycine max
  Clone ID: PAT_MRT3847_119622C.1
atcttcagagaaagctcccccccctctttaaaaaaaaagggggggaatggttgttattttataaagggcccccgcttgcaccataaaaatttcttaaaccctggcccccaaatggtttgggggttccctaaaacttttacagagccttaatggaccaccatcccaacaaaagcccctgcactacgttaatcctttccctgaaaccctatttttaaaagaccggaccttttgaaagaaccttttttttgtcaaagcccaaacccctcggaaacaaaaaattttaaaatcccccccctttaatttatgaaggtgttttttcacaataccaagcctccccgtagggaaataacctcaaattgggaccctccataaaaaaattaaagagggccggcaaacaaataaaaatcgtttcataatcaccctttatattttttccccaaattaacaccccc

SEQ ID NO: 21727 - DNA, 1292 bp, Glycine max
  Clone ID: PAT_MRT3847_119623C.1
ggacactgcgagtgggtagtttatctggggcggatgcctcctaaagagtaacggctgcgagaagacgacagaaggggaatctttttgtaagaacgtgaaacatgacaccctaactcgcgttgcttgcttgagtgatttgactcgtgtcgagtgtattgtatttagtttaagcgtggctgatcgagtgagtatcagaatcaattcaattttgagctagtcatgaagatccactgcgacgtgtgtaacaagcaccaggcctctttcttctgcaccgccgacgaagctgccctatgcgacggctgcgaccaccgcgtccaccacgccaacaagctcgcctccaaacaccaacgcttctccctcacccacccctctgcgaaacattttcccctctgcgatgtttgccaggagagaagagccttcgtgttttgtcagcaagatagagcgattctgtgcaaagagtgtgacgtgcccattcattctgccaacgacctcaccaagaaccatagcaggtttcttctcactgggattaagttctctgcttctgccacgccttatgattattcatcaccaccaccaccaccaccaccaccacccaagagaaaccctgttctcgattctccttcaacaccgtcaccgcctaagcctgggggaaactcgctaacaaacgaagaagaacctggtttcacaggtagcagcatttcagagtacttgataaactctatcccaggcatgaagttcgaagatttcctcgattcacattctcttccctttgcttgctccaagaatagtgatgacatgttgtcgctgtttggtgagggaaacatggtttctttctcacccggtgggttctgggttcctcaagcaccaccatcttcagtacaaatggatcggcagagtgggtacagagagacaagggaaggtagcattagatcaagttttggagatgataatttcatagttccacagatgagtcctcccagcaatgtgtctaataagagatccaggcttctctggtaaaacagatatagctagttacaactagctaaccaccttatgtggctttgtgtgacttaaatttcactctcccctcttattttgtattttttatgtggtattgttttaatttttgtttgttcgtttgtttttggtccctctcccttcctgaactacactactcttctagctactttctctcttgataagttggtgtatctcttccaaattgtaaatatgaacgttttaagagctctctgggttgagataaaaaaaaaaaaaaaaaaaaaagcggccaa

SEQ ID NO: 21728 - DNA, 286 bp, Glycine max
  unsure (1)..(286): unsure at all n locations
  Clone ID: PAT_MRT3847_119624C.1
gatctcttggccatcaatttgtcctccatccatgtgtttcagtgccttctctgcttcatccggattctcgaattccacgtacgcatagcctttggatagatgaggatgcatcctttccacaggcatgtcaatcattttaattttcccgtaagtagaaaatatttccatgatatgatccttggtcacattcctggtgagcctcccaatgtgcactttggtgggtttaggtgaagggctccgccttttcctctcttnttcatctcttttaggtggttnggatttggag

SEQ ID NO: 21729 - DNA, 1083 bp, Glycine max
  Clone ID: PAT_MRT3847_119625C.1
ttcaaatcctcctttctattaatctgaaacaagttattagtcatgaagatccagtgcgacgtgtgtaacaaacagcaggcatcgttgttctgcaccgccgacgaagccgccctatgcgacggctgcgaccaccgcgtccaccacgccaacaagctcgcctccaaacaccaacgcttctccctcagccacccctctgcaaaacattttcctctctgcgatgtttgccaggagagaagagcctttgtgttttgtcagcaagatagagcgattctgtgcaaagagtgtgacgtgcccgttcattctgccaacgacctcaccaagaaccataacaggtttcttctcactgggattaagttttctgccctcgattctccttcaacacctcctaagcctgcaggtggaaactccctaacaaatcaacaaccacaacaacaaactggtttcacaggtagcagcatatcagaatacttgataaacactatcccaggcatggagttcgaagatttcctcgattcacattctcttccctttgcttgctccaagaatagtgatgacatgatgttgtcgatgtttggtgagggaaacatggtttcgttctcagccggagggatctgggttcctcaagcaccatcttcagtacaaatggatcagcagagtgggtacaaagacacatgggaaactagcattagatcaagttttggggatgatagtttattagttccacagatgactcctcccagcaatgtgtttaataataagagatccaggcttctatggtaaaacagttacagctagctatcaagctaaccaccttatgtggcttttaatttcactctattcttaatttggttttctttgtttttttgtccctctcctccttcctgagtactacactactcttctagctacttaattccctcttgcgttctcgataagttgatgtatctcttccaaattgtaaatgtctatgttttaagagctctctgggttcagattaattgtttctgctacatgttaaaagatgactcaagtcttaattaacattgcataaatgaaccggaagaagacttaggcgatatcttc

SEQ ID NO: 21730 - DNA, 293 bp, Glycine max
  unsure (1)..(293): unsure at all n locations
  Clone ID: PAT_MRT3847_119626C.1
gaaaaccaggnaattagtgacgaaggttacnnatcccgaagcttggacgggaacganggcaacaagtgtaagaccntgctggccattgnccgttnggacanccttctccgaaggaagggtcggggaagcttacaattcgtggatgccatttcnagacnttggggngactaatgtangtcctcaanggcaattgcctcatgggtgtcttntcctaaagtttgctctctatggnatgtcgctatgttggtgatgtaggcctgntgagattgctagtgggtgcnatcattagagaa

SEQ ID NO: 21731 - DNA, 320 bp, Glycine max
  Clone ID: PAT_MRT3847_119627C.1
atctcttccccaactattacgcgctgccgcccattctcaagccggcatgcgcactccattcactgtcctcaaatacatggctagcttccccaccataaaaaccaacaatgacattacctccattactaccaacggtggaagagtccaacccatgcacgtgatgacaccacttctcatgaataaatttaaaactacttttctacctgccaaaccttgatgatgcacaattggcaaaagaagtataataccttcttaagaaggtatgcattccttgcttggaattcgaattggatcaccgttttctgttccttgaacccaac

SEQ ID NO: 21732 - DNA, 535 bp, Glycine max
  unsure (1)..(535): unsure at all n locations
  Clone ID: PAT_MRT3847_119628C.1
ttttttttttttttttttttttttttttactttgtttttttttctcttgggtttttttattttttttttttttttgtttatttttggggccccccaccccaaaaaaaaaaaagggggccacaaaaaaacatggcccaaaaaaaaatttttttacaaaaaattaagggtttttcccccccaaaaaattttttttaatttttaaagggcattaactggaaaaacctggaatgaattgggggccctaattaaataaacaaaccttttccctgaaaaaagaacccccgcctgaaattgaaaaaaaaatttccccacagctttaacctggggttttttaaaaggccctgaaccccccggaacatgagggggcagggaacccctctaaaattaaaatgggattgacgcatggtttatggggaacttgnaaaaggataccagtgcaaacccttttaaaaacacctatagggggggggtttttcccccctccaaaaaaaaaaaacccactttaaaacctttccccaaaaggcccccctttttt

SEQ ID NO: 21733 - DNA, 695 bp, Glycine max
  Clone ID: PAT_MRT3847_119629C.1
aaaataaaaagtcatcgaaattattcattgatttcatacctgggaaacctgtgttttaattacaaaacgacattgcagttgtagagtacaataggcacttttttttgttaactaaacatttatttctacattgtagaatagaagtgtcctttctcatacttgagtatgttttgacaagctatgaaagggggagcaactaaaccgaatcagaggtattgccatacccttccataggttctaaccgccactcacttccatcataataggaattaggcaaacccagccaaaacttaaacgcctcagcagcccttttcctctctactcttctgtcttgtctagcccttgaagcatgcttactagtaaacattcttgaatgcatttccacatagattctagtaaacttggtcttgttgggaggtatcccattctcctccatgcaagccactatttccaatgcctttctaaagaaagcagccctcacacagatatcagcaatagtatctaaaagcgctccatccggtttcaacggaggaacagaagaatcagatttccccccttcctttcccacctcacaccttttcttcacttcgttccaaagcagaagtgcctctccaggtttccttgccaatgcaatttccggtggcttaactgccataagggcccacatcagggggaaaatccactctcctttatct

SEQ ID NO: 21734 - DNA, 340 bp, Glycine max
  Clone ID: PAT_MRT3847_11962C.1
cccacgcgtccgctctcctacatccataatgctctttcactcataacaccttgaatcttatcttcagtccttaccaacaggctcatatctagagccacatactgtgtctattctctccattggatgccattcaaagggcttcgcataaagacgatattccgaacttggcatgacctcgataccgctcagcatgcataggaccaagcgctccaagctttgtacgcacacgcacagaggacgacaggatctgatggctacaccgataccatcaccggttcgcatctcccagcctacaatgggcctggtcgtattgcctctcaagagggacatgacgagacct

SEQ ID NO: 21735 - DNA, 525 bp, Glycine max
  Clone ID: PAT_MRT3847_119630C.1
tacaccgatcactgtatcaacaccagaacttccgtcaaaatgaagaccttcaccatcgctaccatcgtcgctctggcctccgttggcgccgctcagcttgacaacatcccgtcttgcgctctcaactgcttcgtcggtcccctcaccagcgacggctgctcctctctcaccgacttcgcctgccactgcaagaagggtgctcagctcctctcccaggtccagccctgtgttcagggtgcctgcggtccttccgaccaggccgccgccatcgccgctgttgagtccacctgctctgccgctggtgctcccatcagcatccctgatgccagcgctcccgctgccagctctgctgtagcctccgctacatctgctgctgcctcagccgcctcttccatggcttcctccatggcctccgaggcatcctccgtcctctccgaggcctcttccgctgtcgcatcggctgcctcctccatgtcatccgagaagtccatgtacgagaccatgtgcatgaccgtcacccctacc

SEQ ID NO: 21736 - DNA, 322 bp, Glycine max
  Clone ID: PAT_MRT3847_119631C.1
cataaatgatattcagtctttgtgggggtgatgaaaaattgatgcctggaagggcccaccttctggtgggttggtggttaaaggtgggcattttgaaaaaagaattttggagaagtgaaagggggattccttctggatttccggttaccggtatttggcatagcctttttaatgagaagcttattaaatatagctttgaaaaattactgtgccaggcaaaagctccaagtatgtgttttcagtcctttaaaaaatttgtttctttgtgtgtgggtgtggggggtaactttattagtgtgcatgaatatgtggagcctttctt

SEQ ID NO: 21737 - DNA, 360 bp, Glycine max
  Clone ID: PAT_MRT3847_119632C.1
ggtaacaccgagtgcgacggcgttggcattttgggcatcgcttgggccttcggtggcatgatcttcatccttgtttactgcaccgccggcatctctgggggacatttggggggggcggagacatttttttttttcctgggacgcatggtgtctttggcgagggcgtcgctgtacatgatagcacagtgcccccgtgcaatctgcggtgctgggtctgccaaagggttcccgaattcgtcctacaacacgtccggaggcggcgttaaccttgtacccgatggctacaccaaaggtacctgtttgcgacccgacatccttggttccttcgcttccttctaaaccttttcctcccccactcct

SEQ ID NO: 21738 - DNA, 446 bp, Glycine max
  Clone ID: PAT_MRT3847_119633C.1
ggcaagaaccaagattctgaaaatttgtgaggcatttggtgcagattgttatcctgttcctgaagatattaataagcagagggaaataactagagaggtttcatcccgtcttgcggacttagaggcaactttggaagctgggattaggcaccggaacaaggctctagcttctgttgcagaccatctaacaaaatggatagacatggtaagaagagagaaggctgtgtatgatacactgaacatgttaaactttgatgtcacaaaaaatgccttgttggagagggctggtgccctatatttgcaaaaacacagattcaggaggcactggaacgtgcaacttttgacagcagttctcaagttggcataatctttcattcaatggatgcactggaatcaccacctacatattttaggaccaatagtttcacaaatccatatcaagaaat

SEQ ID NO: 21739 - DNA, 319 bp, Glycine max
  Clone ID: PAT_MRT3847_119634C.1
aaaaaaaaaaaaaaaaaatggttgcttatttaaaaaccgggcgtcccaaaaacccttcaaaccatacttttattttataacctataaacactaatccataatcacatttaaaaagatttcaaatcatcaatcaacactctatcttcaatatcccacccttatcaaaacctttaaatcaacatctcagcacacacaaaaatctctataaccaccttctacatctctagatctcttaaaacctacaaccaattttacaccacttcctacacacattccatctatcactataacataccatatcccttcttcaaattatctt

SEQ ID NO: 21740 - DNA, 424 bp, Glycine max
  Clone ID: PAT_MRT3847_119635C.1
gagagaactagtctcgagtttttttttttttttttttaaacaattaaagaatgatttttcaattacaaaatttaatataatttaaactatacactcattttaataacttcaacattaaaataaatttatataatatttttaaatctatgtgatattataaaacttataaatttaagtaaataactcatttaaggaataatgtattattataaatcctcttataagaaacaaaaatttgatcaatctcatgtttactaagacagaaaattctcatatgggtatagttccatttccaagctaatttcctctgccacttttgctaaccgagaatcttcttccactggaaaacgatgatctcttcattgaaattgggctcagcacacaatgcaacacccttgttttgtatctgcacttgctactctct

SEQ ID NO: 21741 - DNA, 450 bp, Glycine max
  Clone ID: PAT_MRT3847_119636C.1
ctcacgcgttcgaactcgcatcagttcctaatcatgggtagctcttcaggtttcacatgggacatggttttaagactagtgagggcactagcaattagcggtttcaactgcaaaggcgcagatgcagcacatgccttctttgtgattggcgatactggtatcgacaatggcaacaacaactacttatccaccacagctagagcatacgcttcaccatatggcattgattatccaactcgcatacccactgtgcgcttctctgatggactcaatattcctgactgtatcagtcatgaacttgcgtcagagtccacgtcgtcatacttaagtcctgagctcaacggggaaagattgctcgtgggtaccaactttgcttctgctgtcattggaatcctcaatgacactggagatcaacttgtaaacatcattagaatcacgcgacagctggaa

SEQ ID NO: 21742 - DNA, 1366 bp, Glycine max
  Clone ID: PAT_MRT3847_119637C.1
tcagcctttccctactgttctgcctcacgcactgtttctttttctttgcttcgctagttcaaacattcactccagttctctctctctctcttgtttgtttcttctggaacagaatggcggtggtacttaaagacatgtgtttcttcaacaacaaggacattctggttataaagcctcagaagaaatcaccactgttgttaaggatgtcggtgttgatcttctcaatggtgtgtggtgttttcatttgttccgtgtgtctaaagcagataagcactcatgcaaggactatgcttatggagttgcaaattgagaagccttctcggagtagtagtagtagattgaacctaaaaaatgatgttcctttgttacattaccccaagcctgtgtctttcaacaggagtgagtgtgctggtaaccctgtgcggttctttgccattttgtcgaatcagagatctggcagtgggtggtttgagacccttttgaatagccatattaatgtgagctccaatggggagattttttcagttagagaaagaagagtaaatgtttctaccattgtacagactttggacaaagtttacaacctggactggctcagcagtgcttccaagaatgaatgctcagctgcaattggatccaagtggatgcttaatcagattacttcaacagtagaagtgtttctgtaatatttcttttccgaagaaacttattacggagaatggtatcaatgcttgccaactcctatgatcgttatgctaaactatttagtggaactcataaatctcatgttcattctaaagaagaggctgatactctttcaaagtacaagcctaccattaattctacatcattgctggctgatttgaaggatatggaaatgagaactgcaaaagcgttggaatacttcaacaccactcggcatatgatcccgtactatgaggatcttatacaaaatcgtactaagctaaaagatgttcaagagtttttaggattgccacagatggaattaacaagccgtcaggttaagatacacagaggaccattgtcagatcacattaaaaattgggatgatgtgaacaggacactagcaggaactatttatgagagtttcctccatgccgattattcatcttagcctctaactcctggaaaggtgtaaatatcaacactgattttgtcccgggaaatagtttgaagttttggttctggttgcggtaagaacactgtctctgcattccgatatttcttttcactccattgatgagatgtatgtttctttgtaatctttttatttttgtgcattcttgaatgactttgtatattcccagctaatttattagtaaagatgagcattggttttaaccgg

SEQ ID NO: 21743 - DNA, 622 bp, Glycine max
  unsure (1)..(622): unsure at all n locations
  Clone ID: PAT_MRT3847_119638C.1
gccgcgtcgtatctcgaattcgtcgagcaggacttggaccagaagaaaacctaacagagagtggcagttcttataagcctcagatatttaccttccgggagcttgcaacagcaacaaaaaattttagggatgaaacctttattgggcaaggtggatttggcattgtttataaaggcacgatcgggaaaataaatcaggttgtagctgttaaaagacttgatactactggtgtccaaggggagaaagaatttctggtggaagttctcatgccttttcccttctacgcccatttccaaccttgttaatatgattggttactgtgctgaaggggatcaacgtcttcttgtgtatgagtacatggctttgggatctttagaatctcatcttcatgatgtttcacctgatgaagaaccacttgattggaataccanaatgatgatagcatgtggggcagcaaaaggactaaattatctgcaccatgaagcaaagccttctgttatatcagggatctgaaatcatccaacatactattggatgaaggtttccatccaaaactttctgattttgggcttgcaaaatttggtccaaccggagaacaatcatatgttgccactagggtcat

SEQ ID NO: 21744 - DNA, 320 bp, Glycine max
  Clone ID: PAT_MRT3847_119639C.1
tacaacgagggggaataagaggtgcaaaagaggaatgtgaaggggacagtagagaagattaaggggtaggagccatagatggtggagacaggttaggattaagactaaagtaggaatcaagattctatattgagttagaggaggaggcaaataagtcagagtaaggaaatcttatttcattaaacaggacatctttggaaatgtaaatcctaccaattgaagacaaacatttatagcctttgtgagaggaggaataccccaaaaatagacactcttgagaacgaaagttaagtttctgtgtatgaaaaggcctcgttgta

SEQ ID NO: 21745 - DNA, 539 bp, Glycine max
  Clone ID: PAT_MRT3847_11963C.1
gcagactgaggagcatgtgggtagaacagaggcatctgccttgtgaaattccaaaatgatgaaatgccagtgggaaaagcctgaggaagaaagaatagagtggcgtttgcaagtcatgaataacacttgggtagccaactgatgtaccagagagcaaggtaggtattaggggtcagggcctctgggaagggatgggagccaggattggacagagggagagtttgaaccatgattcaagtccaacaaagccgctgtcctaaccacaagaagtcctggagcacatacagagtggtgtgctgagcctgctcctaccagctcctgagcatcacttgttaaatttttgtgaattggttgttaaaacagcattattaaagattaaattatataaacctacaattacatttatttattgaaaacaaagtgaatactcaaaactcatccttccctaattactacatgagcagtaaagtacactgttgaggtttttttgtttttctttttttaattgaggccgggtcttgctatattgctcagtctgc

SEQ ID NO: 21746 - DNA, 1247 bp, Glycine max
  Clone ID: PAT_MRT3847_119640C.1
gaacaaacaggcatagccgttcaattaattcaaaattttaaatttttgtaatatcaataagtatttacattattttggatctgggacagggtttaatttttctattgaaaacaaattccaatgaacaatgagaaaatacaattagagcgactatattaacaaccagcctgtcacctagtttaatcccacaatataatttatgctatggaacaactgtttgcccaagcacaagactaacagggataacgcaattcacgcaactacgctggatagcattggctaaagtaacaactactatgaaataataaattagttggggaaaattaactatatacaaaaataacatctttgggtctattgaagtgtccctactgaattttggtaccaggctggaggcctgcttgcactttgctttgaaagtgggcttctaaccttgtagaacatttgtaataaatggtttctggagaattataggtgcgtgcattcgcaaacattcttctggcatccgcaacaaacatctcaaatgttacataatattgctctgaatccaccctcttagacattgtcttcaaatccattggatctttgatgatgtcataataatcagggacatcccgtgcatcaactggttccttgaatggccaagcatcagcgtgatcgaacattgactttagaagtgaacgcataaacccattcaaatgtttttgattagtagcattgtcagaagaaacatttaaagttctgaatcgtgaatgaccccactgatcaggagtccacccagcctctctcaaaccagggatgtcatcaataatttttttaggaataccagcttctttcttctgaaaatcaattccagcataaacgatgtgacagtttgacagctctctgattttttcatcaattgcctgcctttgacgacggatcatagttgacaaatcagtgtaagggagctttggatcaatcttgcattccatgagaattcctccatcgtaatcctttatataaccttgccatcgatctttctccaagtgaatctcttttgtaaatccctgtttgataaaatagccaacagcattattgtcagcatatgtgaggaaatgtgtcagcccatccatatcacgtgcaaactgttttaagtgattcatcaatcgggtaccataaccctttacttgctcatcagctgtaattgcacaaaaggctatctcaccgaacctctggctagcatatgggcgatatgtaatgcctcc

SEQ ID NO: 21747 - DNA, 659 bp, Glycine max
  Clone ID: PAT_MRT3847_119641C.1
ggctcgaggctccactctgggtttcaatggcggtcttgccttgggcactttaaaaccccactttgtcgtctaaatcttatccaatctaataatttgtatacatggctagggcatgaaccaaccttcaattctgaaaaatcccattgccaatgttgaagctcattgcatcctcctcgcgcatccaccgggtgcaccccacggtgctccgtcccgcacacgattccgcctcgccgctgctcagagtgctgagttctctcggcgggttaagctggagaaacactaatgttggaggcaggtattttttctgttccggttccagcgacagctccgatcgcgtggttgacgccggagtccaagccgccgatgagtccgagtcaaaggcctccgctatcgttcccacatatcccagacccgaagattatctcactgttttggcactaccattgatacatagaccacttttcccaggattttacatgccagtctttgttaaggatcccagatgattggcagctatacaggaaagtcgagaacgacaagccccgtgtgctggtgctatgctacttaaagacgaagacaaagctgatccgagtggagtatagaggtcggacgcggaatagaatgtgtaggatatgagaggaagtggagagttgacacgg

SEQ ID NO: 21748 - DNA, 310 bp, Glycine max
  unsure (1)..(310): unsure at all n locations
  Clone ID: PAT_MRT3847_119642C.1
agacaaatcgnggtgnnggnntntagangngngtgnngngngannggngncnngannnnngancgnngatnngnntnngnnnnnnntnnccaangnnanananannnggnngangngcgnngtgntngngcnnggannnngnncangctatngncaggtnangggccntgnnnnctcagagnnanctnnnaactgnncagcngaantgacgggaagaganttgtatctgntnnttggggttngganacnggtcaaaaaccttntgtgtggnatnagctgagcccaganggtgacagacctnctggganaa

SEQ ID NO: 21749 - DNA, 227 bp, Glycine max
  unsure (1)..(227): unsure at all n locations
  Clone ID: PAT_MRT3847_119643C.1
gctcaggaattcggcctcgcttatttaaacatgggttcatcccnattgatgaagtgaaactagaagcggggaccacgggaaatctctctctctgtttgggaaatctctctcttgctttgattaccacccgcggcgcggatgagttatttttgtaagaataaaatttaggtataacattttaagcattttctgagggggtggaattaaaactagaactttattttgat

SEQ ID NO: 21750 - DNA, 168 bp, Glycine max
  Clone ID: PAT_MRT3847_119644C.1
cctaaaccttcccaatatcctgtaatacattctgatgttacttaaccccttcacaacctggcgggctactatctctctctaggccgtaacaggcgcccagatcgtggctcccgcttcacttacacgtccattggccgcccccccacaacgaatgcaggacacgtctct

SEQ ID NO: 21751 - DNA, 337 bp, Glycine max
  unsure (1)..(337): unsure at all n locations
  Clone ID: PAT_MRT3847_119645C.1
gaggatataacttttcagtgatagggggagagaaattaggtgaggtatattgaatataggaggggacgaatttgttaggattcgttgttatattgttatggaatggaaaaaaacaggtttgatggaaaagcatgtggcatgtggcatgtggcatgtggtatgtggtttagtgcgtctggcgagcatgtgaaagctgatccactctcgcaaaattggctgactgccacctctttcttatattattatgacccaccaagcatcatgctgttttgtgcatcatgcatggcctnccatgtgaatgtctgcttcactttcacatatgtaatatcctcactat

SEQ ID NO: 21752 - DNA, 440 bp, Glycine max
  Clone ID: PAT_MRT3847_119646C.1
gctcggaatccggttcgaggggagattgaagagacggatatcacatcctcatttgtatctggggatgcccttctgagcaggggcattttatatcagtaagaggggtatcacccccaatccttgagtagcaagaccataaacttttattcatatacacaatttacatatcggaacaagatcacaatagatttgatttgtgttgcatgaggcgttgaagagttagtgatctcataataacatcatggagggctgataacaagaagtacattacatctgacgagctgaaggaacacaatatgcaactgggatttgtggaatttaactcaagggaaggtctacaatgattcagataggtcaaaggactcccttgcaggagatgctatcttagtcgaacctatcacgccagtattggactgatgcattcataaccataccatgca

SEQ ID NO: 21753 - DNA, 836 bp, Glycine max
  Clone ID: PAT_MRT3847_119647C.1
aggaaaaaaaacaggacccaaaaaaacagaccaaccaaaactcaaaaacacaaaacaacaccacgaaagaaggaaaagggcacaacaagaacaaacacaaccaaaaaaaactaaagggaacccccttgccgattaaaattacaccaaagcgaaaaaaaaacacggatacaaccatgaactcaagtatcctataaacggcccacggactaacaaacagaaacatcccaaggcccaaaaaaaaagcacggctcacctaaagacatcaaaattccaagacacctgaaaacacaaaaacactgaaggaactcaccaagaaccggcgaaaaaacaaaaccaaaagcccacgaaaaaaacacgggaaaggcaaaagggaaaaaaaaaccggagaagggggacaaaaaacaaaaaaccaccaccccagaaaaaaaaaaaaagaccaaagcaacccctgcaccaacaacaaaaaaaaaaaaagagggggggcaaaaaaaaaagcacaccagccaaaaacaaaaaaaaaaaaggccaaaaaaaaccaaaaaaaaaaaagggaaacaaaacaaatgctgaagaaaaaacaaactcaataccaccacaaaaaaaaagaaaaaccctacttaaaaagcgggaaacccccaactcaaagaatgaaaaaaacacaaaaaaaagaaaacaagaacacaaacaaaaacaaagaatcaggacccaaaacggaaacaaaaaaaaaaaccactccattcaaaacaaagagcaaaaaagaggaacagagcagcgcaagaaaaaaaaacacgagcacacacgtaaaaaaaaaaaaaaaccacaatatgtgccagaac

SEQ ID NO: 21754 - DNA, 322 bp, Glycine max
  unsure (1)..(322): unsure at all n locations
  Clone ID: PAT_MRT3847_119648C.1
agagaancatcaaatatcaagtttgangttggcaagatactagtttgctgtttgtttgcatgaaaatggatgcccatattgggttcccctaatgatnttagtggatcgactgcaggcagtanaagtcccaattgcaaaagctgcggttngtattnctanttgcatgtgccaaatgcctggagggcaatgagntatcggtaccagccgtggtgnttnttcctcagcttgnagnnaaagggatcctcnacncattngnctgcctgggtnnggnnnacagggcttccattttccattgagtggnctcttggtcccaggggntggc

SEQ ID NO: 21755 - DNA, 166 bp, Glycine max
  Clone ID: PAT_MRT3847_119649C.1
gtctgattgatgatgccgaagaacaagggtatagggaggtcagaacagtaagagtggtaagaacgaggctgacgactagaagcgatagctgttgttcaaggagcgacgggcaggactacgcgcatgtgctccggatgcttatgaacggtctgtacgaggcgatgtg

SEQ ID NO: 21756 - DNA, 278 bp, Glycine max
  unsure (1)..(278): unsure at all n locations
  Clone ID: PAT_MRT3847_11964C.1
acgctcccaaactcattcttcaccttctaaacaaacgcaagaagcaacaatgcatttttttgttggctgtccaaaaaacggggctagctaatcttccatataatgcaaactgaaaagtccattaaaatcttttaaagctgggagtaaatggccgtctcttaaagaaagctgcaaactttttgctcgncatccccgtcacatgngcaacaagaagaatctgngtatatttttaaaatggccatagngtttcatggcagtggaaaaggatgcaataccca

SEQ ID NO: 21757 - DNA, 557 bp, Glycine max
  Clone ID: PAT_MRT3847_119650C.1
ggggaaaaagggaaaaaaccttaacataacaacccttttttgggggaaaatcccaaaaaaaaccaaaaaggggcaggcccccccccccccaaaaaaaggaccggccccaaaaggacattttaagggggggttcaaaaccccccaaaaaaaaatgggggaaaaaaaaagggcaagggcccccacattacgggtaaaccccccaaaccctggggcctcccccaaccccttttttggggggtccctttaaaaaaaaaattcttcattaagggtttgggggcccaaaggggaagaaaactgggcccaaaaaaccctaaaaaaccccccggagtttattgggcccccgccaaaaaaaagggccccggaaaaaaattaaaaaaccccttaataggggaacccccccccgagggggggcctcaaaggggggggcccccccgcaaaaaagaacccctttggggccctgggaaaaacccggaaaggccctttaaaccccccccaaaaaaaaggggccttaattttccgggcccgggaatttaagaaccccggggaagccaaggggg

SEQ ID NO: 21758 - DNA, 502 bp, Glycine max
  Clone ID: PAT_MRT3847_119651C.1
gcctgttttttttttttttcttaatgaaaattaattatattaacaaaagttatacatactttgtaccaaacaacatggttactcacagataaaaaaattacaatgaaaatgaaactaacatctcattacaatatgtgccattgtctgttggattgaaaataataataataataataataataataataaaattatatctaaatggttataaagttgtcaacgtaaaacttttagaatatgttagaaatacttcaatagttgattgagtatttaacaatttgggaaaatattctatttaaatctttatagttatggctttgccacacttattttttagtacacttttttaaataatctagcttattaatacaatcatactaaaatataagtatgtatatattaataaatatttgttaggtttactaacgtacacacatttatttttagtatgcatcgataacaaattataactataaattctctattaatgtatcaatgatat

SEQ ID NO: 21759 - DNA, 561 bp, Glycine max
  Clone ID: PAT_MRT3847_119652C.1
attttgtatttttttttggtgaataaataaagttcattctaattaaacctgccttgcaaattaactcagttagagtttggtgttctatcttattacgatttcattcttctaattatttttgttctctgttagttttcaggtttggtacgtcagtcgttgaagcgttaaaaatgacattttgtgttctcctctcattcaacaatcccaaaccaagttctttcctaagttccacctttgttcttggccaaacaacacctttatccttctctatcaatgaaaaactaaaaccctgcaactatctcaacagtgtcttagtttcaatttcttgttcatctatcaaactcgtacgtgaccgttcactcgacagacatgttgtcacgaagaacaaaactaggtttgttcaaaagttaaaaactttacttctctccaaaccgaaacactatatcccacttcacattctgtcaaaatgccgcacttatctttgtctttctaagcctcgttccatactttccatgattcatcgttatccatcaatttttgaacttttcaatgtgccatggc

SEQ ID NO: 21760 - DNA, 132 bp, Glycine max
  Clone ID: PAT_MRT3847_119653C.1
atgatattaagacatgaaaactttaaagatacccggccaaatttttacatttgaacaatagtctgaactatagacatgatcattgaattagagctcaagggaaggtctaggagattgggaattctgatattc

SEQ ID NO: 21761 - DNA, 275 bp, Glycine max
  Clone ID: PAT_MRT3847_119654C.1
aaaagacattggatggcaaccctcgtttttcttatgcatcccaaacgacccaagggtcgggaaagcaacgactggggcggtgtaaacccacaatggcgcactccctatgccgaatctccctacagctacagccacaggacccgcttctctccaataatggactttgttattcttcttctcccacattcaaccatgacttcttcccttctagcttctacaaatttaacttccgccttaccgatggccttttaaacccattggcccctccttccgac

SEQ ID NO: 21762 - DNA, 159 bp, Glycine max
  unsure (1)..(159): unsure at all n locations
  Clone ID: PAT_MRT3847_119655C.1
cttctcggttgtgggctcctgtgggcaacgccacacaaaangcaagaagagtggtnaacnccaggaaaggatagcncggaaanacancgttgttaagnccaccggtacntntncctgcncattaatgttgntgncgttgttcttccaccnnnagtgnng

SEQ ID NO: 21763 - DNA, 404 bp, Glycine max
  Clone ID: PAT_MRT3847_119656C.1
gatgaaaacaaaaggtgcctgtgggcatagctgagagatcggtgtttattttaagaaaggacaacgacttggcctgaaatttgacgctcaaattctccacaggcgactatcattactttcttcttaacaaagcaaacaaactaaatctcatggttccacggttcacacccaccacaaaagtctctggatacatcaaatgctactatttctatcacacccactgccaaaccgacatcctcatcttcacccaaatgtcagatctaattccccacagaccttgaatacatcggagaatgcattatggatattgcaacacctgtttgagcttttaccatgtttcatgaacaatggatgcatcgaacacagcgggtaccactatcaaatgctactgtatctagcttttc

SEQ ID NO: 21764 - DNA, 199 bp, Glycine max
  Clone ID: PAT_MRT3847_119657C.1
ctcaagcgtattttgttcaaactcacagccggatcagggtggaggccaaaagaatatgatttcaaaagcacctggttcacattctacaaccgattaatctgatatggaagatgctgagacacctacttcgaaagatgccccattgaggcaaagactagatcctccctacaatgaggttgccgcttagatagaaacaaat

SEQ ID NO: 21765 - DNA, 289 bp, Glycine max
  unsure (1)..(289): unsure at all n locations
  Clone ID: PAT_MRT3847_119658C.1
cgctngagcggattcggctcgtgcttagttctttgcgatttctatagttcaattatgggacagccttcagtctctctctctgttctctttgcctgctactcttgtcgagtgcatgcttcgcgagtagctccagctagctcatcgagtgccgacccatcaacctcaacgcgttggaacccgaccaccgcgttgagtccgacgttgtgtgattcagagatggtgctctcagcaccctgagctgaaatgcgccggtgtcactgcctacagactcgacctcaaccgcaatggc

SEQ ID NO: 21766 - DNA, 196 bp, Glycine max
  Clone ID: PAT_MRT3847_119659C.1
ggcacacccacatcatacagagcctccagtatcgctcatgatcatatattcatagctaacagtagatgggttatatcgcctgttctgttacctagggcattgtcatcgggatctctacttggttcttagctcggatacattatcattagtcgtatgaaattaatcactatgtgaaagctgagtcctgtgaggaatg

SEQ ID NO: 21767 - DNA, 437 bp, Glycine max
  Clone ID: PAT_MRT3847_11965C.1
agaagataaaaatcagaggtgccaaaaatcttgcttagttacatgttctgaaaatcggatactataatgtatcgtttagttatcacaatgatttttttatatccataaaagaatcaaagttttaaaaaaaaatcaaagttgaatatcaaaaaatttataataattcacttatactatacaattgattgattgaagtactagaccccttaatcattgtgacaattcttaaggggtctagtacttcaatcaatcaattgtatagtataagtgaattattataaattttttgatattcaactttgatttttttttaaaactttgattcttttatggatataaaaaaatcattgtgataactaaacgatacattatagtatccgattttcagaacatgtaactaagcaagatttttggcacctctgatttttatcttctca

SEQ ID NO: 21768 - DNA, 912 bp, Glycine max
  unsure (1)..(912): unsure at all n locations
  Clone ID: PAT_MRT3847_119660C.1
atgaaagaaagacttcagaggctaacattaacctccncatacttccatgggaaggacaatgtggaggcttacttagattgggaaataagggtagagcaaaaacttaaaagaaagtttaccttaaaatcttatgactctcattcttatccaaagaaagaccaaggtctaggcatcttaggggcagcaccttctatgcctaatgatgataaggggaagaaaatagaaaagcaaccccctaaggctagtgtcgcaacatgcccttttgcgggcgagcgaggcgaggctcacgggtgcgtcttccaaaggagaaaattcgcggagtcgccaccaacgtttatttgtggaaaacgtcagaaaaaaaccaaaggaaaccggtcaaaaagaatattccaacttcgggagttgtatttatgtttgaggaaggttgacaaaagcggggctcttgctcctacgtaccctccatcgaagagaaaatcagacctacgtagttcttttttaagggtgaatcaagcgattctttttacttggaagaccgaagaacaacaaagaatgaacgatgaatgtcgaagaacggttgaaaatcttcgcgtaattacccacggaaacgttacagaaacgttatggaagcacctcggcttggattttcttcacggaaacaattttcctcagcaatttcaacaaaataggggaggagcttgccacccagctcgcccaggcgagccaggttgcttcctccagaagcaaccgccttctggaggaagaatctggaaggcccaaggtaattacgcgaacagcgctaggcaatcaattcatgggtctccgaacaagatttcgagggtggaggataggcgaacagcgctaggcaatcaattcgcggggctccagactcgttggtggaggatgcatgaatga

SEQ ID NO: 21769 - DNA, 246 bp, Glycine max
  unsure (1)..(246): unsure at all n locations
  Clone ID: PAT_MRT3847_119661C.1
gtttaccacgaaaggnnaaggttacagttctgtctcgtgcctctctcaactccctctttcaggtgcntctctctttncctagcactgattcttcantttaagccctatcaacgatacccgccatgttttattttccaatttcgnttcttttgtccataatttcatcgattcacgcttccgttctgcttcngggcctantcaatttccctcccatcagcnaaaggacgcttcactcgagcaaaattg

SEQ ID NO: 21770 - DNA, 374 bp, Glycine max
  Clone ID: PAT_MRT3847_119662C.1
taccggctccggattcccgggtcgacccacgcgtccgctaacagctgtaaatgctgagtaaagaatgatgtacagggccagtttccaatgccatgtatatggatgatgtcccattacgggttaaatccttgtagaaggtgggtcatttgccttttgcttacatcaccgcatcagtccatgggctacctgatgctgcccaacggcttgcagcagaccttgccaacaacgattccatctttacgctgtggaaatgcaccgctttcttttaatgccaccgtcaccgctcacttagggagggagaacggccccttcttaggggcattgccaggcagattccatgcccgagtctgaccgcagtagattcgtctcgcctg

SEQ ID NO: 21771 - DNA, 343 bp, Glycine max
  Clone ID: PAT_MRT3847_119663C.1
aaaaaaaaaaaaaaaaaaataaaaaaaaaaaaaaaaaaaaaaaaagaaaaaacggaatctttttaaatttaaaaatactacttttaggggacaaaaagtaaatcggggtccccattttatgaaaaactttccttccatttttggccctctagaaggcctagtttttccggaaatcgcaagggcttctttatttttttacggtaaaaaaaacaaaattttttgcatccgaaaaccaaatgcaaattctggggctttttattccccaattatatatcctaaattcaaaaaaaggagagtgaggtgtttattttttcgctcaaacaaggtcctgattttttttatg

SEQ ID NO: 21772 - DNA, 704 bp, Glycine max
  unsure (1)..(704): unsure at all n locations
  Clone ID: PAT_MRT3847_119664C.1
cctaccaaatacttagtccaattaccgagtgccagaaccttttcagggtcagatcgtggttgtcattggatttgcatctagtgcctttgacatctcaagagaaattgcaaaggttgctaaggaggttcatatagcaactagaagtccagatgtaaaggttatgaagctagcaaatcatgataacatgtggcagcataaaatggtaaaatgtgtgtctgaagataggttggttgcttttgacgatggatcctctgtgtatgcagatgtcttattccactgcactggatacaagtatcactttccatttcttgaaacaaatggaatagtaacaattgaggataatcgtgttggcccattatacaagcatgtctttcctcctgcattggctccttggctctctttcattggtatacctgaaaaggaagtcatcttccaaatgacggagttacaatgcaagtgggtagcacgtgttttatctggtaaagttctcttgccaactgaaaaggagatgatggcttatgttgaagaatactatcaacaaatggaaaaagatggatttcccaagcatatgactcattacttgcattntaaagagattggctattgcaattggttagctgctaaagcccgtttgcctcctatagaacactgggaggatgaaatgtatctagagagcatcaaaccagtattactcggattgcaag

SEQ ID NO: 21773 - DNA, 324 bp, Glycine max
  Clone ID: PAT_MRT3847_119665C.1
gggggggggttttttttttgggggaaaagaaatcactttttaataaccaaaagtttttttcatttttttcataacaataacaattttttgaagctttaatcaaccgatacacatttttgtttcacctttaagaccaaggggacctttttaaaaaaaaaaaaaaatcaatcccctttaaggcaaattaggacctttttaaaataaaagaattttaaagaaaaacccaatttttttttccaaaacccatggataaacgaatttctttttatttactagagctttaaaggtttttttcttttttgagaaaaattttgaacccttggc

SEQ ID NO: 21774 - DNA, 136 bp, Glycine max
  unsure (1)..(136): unsure at all n locations
  Clone ID: PAT_MRT3847_119666C.1
gatgtgaccagaaacaagngaacgctctagcatactacaaggtcgctttcagctaaagagccatgcctctcaaatctgactttaaaatccaacatgcgtaagcaaatagcctcactcataaatacatcaatctaga

SEQ ID NO: 21775 - DNA, 1844 bp, Glycine max
  unsure (1)..(1844): unsure at all n locations
  Clone ID: PAT_MRT3847_119667C.1
ggacccacgcggcgaccacgcgtccgggcaagaaaaagacaacaaattgccttctcttcctgttcctctccctcaccctctctctctctctctccgccgcattacaactccaaacccaaaccttgcccctccactccctcccccacccacccgcaatctcatggcccgaatccgaatccgaacccgacccagaagaagaagctctctcacttcacctccaccacatagacgctctctcctccaacaaaaccccggagcagctcttccagctcaggctccaacgcgacgccaagagagttgaaggtgtagtcgcactcgcagctctgaaccaaagccacgctcgcagatccggctccagtttcagtagctccatcatttcgggcttagcacaaggtagcggtgagtacttcacgcgcataggcgtaggcacacccgcaaggtacgtctacatggttttagacaccggaagcgacgtcgtttggctccaatgcgccccttgccgcaaatgctacacccaagccgaccccgtttttgaccccaccaaatcccgaacctacgccggaatcccctgcggggcccctctctgccgccgcttggactcccccggctgcaacaacaagaacaaggtttgccagtaccaggtttcctacggcgacggctccttcacattcggcgatttctccaccgaaacgctcacgtttcgaagaaccagagtcacgcgcgtcgcgctcggctgcggccacgacaatgaaggactctttatcggcgctgctgggcttttgggcctgggccgtgggaggttatcgtttccggtccagaccggtcgccggttcaaccagaaattctcttactgcctcgtcgaccgttccgcttcggccaaaccctcctctgtcgttttcggagattccgctgtttcccgaaccgcgcgcttcactcctcttataaaaaaccccaagctcgacaccttctactacctcgagctcctcgggatcagcgtcggcggctcgccggtgcgcggcctctccgcctcgctcttccgcctcgacgcagcgggaaacggcggcgtcatcatcgactcgggcacctccgtgacccggctcacccgacccgcctacattgccctccgagacgccttccgcgtcggggcctcgcatctgaagcgtgcagcggagttctcgctcttcgacacgtgtttcgacctgtccgggctcacggaggtgaaggtgcccacggtggtgctgcatttccgaggtgccgacgtgtcattgccggcgacgaattacttgattccggtggataacagtgggagcttctgcttcgcgtttgcgggaactatgagcggtttgtccataattggtaacatccaacaacaagggttccgggtctccttcgaccttgcgggttctcgggtcgggtttgcccctagaggttgcgtttgagacttgggaaatgggaacaactctttccctgttgttttctaattatgattatcaattattgttgccatctttttttttttttttaatgtttagaaacaaggctagattagagaaggaaggggagatctcaatctagatctgaaggagaaaactaggattcaacaaaacgagaatgtttctagtttccacccttgggttgtggcttgttgtgtttttatttttatttcccaattaaatactccaactactccaatccaatccaatacaagggttattcgacgaatttaatctttcaattgctaggtagtactattactgtactagatctgtacatactcgtgnnnttcttgttttttattttcacgttttcaagaaagaaaaaaaaaactgaaaannnnnntagca

SEQ ID NO: 21776 - DNA, 648 bp, Glycine max
  Clone ID: PAT_MRT3847_119668C.1
gggactcaccaatcgagccggggaattgggttctcttcctaaccctggccatcagcctctgtgtctccggcgcattccaaatccaaaccgaaaccttgcccctccacaccctccctgagccacacatcctctcagaaaccctctcagaaccccaagaaactctctcgctctcacttcacctccacctccaccacatagacgccctctcctccaacaaaaccccagagcagctcttccacctcaggctccaacgcgacgccaagagagtcgaagccctcctcaaccaaatccatgcgcgcagatccgccggctccagtttcagcagctccatcatttcgggcctagcacaaggcagcggcgagtacttcacgcgcataggagttggcacacccgccagatacgtctacatggttttagacaccggaagcgacgtcgtttggctccaatgcgccccttgccgcaaatgttacacccaaaccgaccacgtctttgaccccaccaagtcccgaacctacgccggaatcccctgtggggcccctctctgccgccgcttagactcccccggggtgcagcaacaaaaacaagggttgccaataccaggggttcctacggggacggggtccttgacattggggggtgtggtgcacc

SEQ ID NO: 21777 - DNA, 396 bp, Glycine max
  Clone ID: PAT_MRT3847_119669C.1
ccacgcgtccgaatttttgaagattttgatttagaggagccattcactatgatccaactaagacaagcatcatgccaataacatgtattctacatcagcatgcaacagcaaaaaggaagagaccaaaaccaagccacatgcatatgtaatttcacttttgaacaacaaccaaataccccatagaaacacattttatgcaaatcatttgtatcttcaaggaacagattaaaaaagatatcagaagagtatgaaagaaatgagtacctctctcacaatggaacaagaaactctaccaaaaagtgatcaaccacattggattttttgcaaagaccaccaacaaactgagaaaagaaacaacaacatttcagcattcaaattgcaatatcatcattatat

SEQ ID NO: 21778 - DNA, 3644 bp, Glycine max
  unsure (1)..(3644): unsure at all n locations
  Clone ID: PAT_MRT3847_11966C.1
gtcggtatttgttcgcatgaatgccagggatgatctggatgagtgtgctcctaaagagctactagaagagatctatgattccattgtcaaagaggagattaaaatgaaagatgacacatctttaattggaaaaagcagcagacagaagccagagggtgaagaaggacgccttgtcagtattcttaacctggcactcccaaaaaggaagtcatccggagatgccaagtctgaaagtgaggccatcattaagaaaacacttgctataatcatgaataaaggggtgaaaagaggagttttctacactgcccagcagattgaacttgtaaggcccatggttgaagccgttggatggcctttgcttgctactttttctgtaactatggaggaaggggataataagcctcgtgttgttttgttgatggagggattaaaagctggcatacatattacgtatgtgcttggaatggataccatgcgatatgcatttctaacatcgcaagttgggattactttcttgcatgcccccgatgacatgcgcagtaaaaatgtggaagcattgcgtacactgccggtcaaatgtgaggagaaaccaaacgcacggatagttccatggaatgcagttctggaagctccctccattgtcaaggtgcttcaaagcattccttttatgaacaataagattttcagaagacacctaagagacttctacccattgctaacaaaacttgtttgctgtgaccagatggatgttcggggagctcttggtgatttattccaagcacaactgaaacctcttttaccataaccgtcttataagccactgttaggattctcagatataaacttcagggcattgcggatatcagttttagctggcttggaaagaagaaatatggtagcatttttttgtattaatctaatgatgtggattttgttctggtcttaactattaaatagctttatatcagcagggagtcatcattttcatctaacctcccaatatgccatagattctcaaacaaaacttttgagcaattattggacaataggtgaaagctctgattcaggttttgaaacagtcttctgttgcctgataatagatgtataccatgtgaacaaattgtctttcatgagaaggaatatcatgactgcattgttcatatgataaaatctaataaaggaagcataaagtctggaagcgccagtgtatttatgatttttacagcttctgcagatgatgaaatggaatcaattgttgatagtgcatttgaaaatgttgagcaggtcatcttagaacactttgatcaagtagtgggagactgtttcatggattgcgtgaattgtctgatcaggtttgccaacaataaaacttcacatcgtattagcttgaaggctattgcactcctgcggatctgtgaggaccgtcttgcagagggtcttattcctggaggtgctttaatgcctattgatgctactttggatgcaactttcgatgtaactgagcattattggttcccaatgctggctggtttatctgatctaacatcagatcaaaggccagaggtcagaagttgtgcacttgaagtcttgtttgatttactgaatgaaagaggtagcaagttctccacagcattttgggagagtatattccatcgcgttctgtttccaatttttgatcatgtgagacatgctgggaaagagggctttatttctcctgatgatgattggtttcgtgaaacaagcatacattcacttcagcttctatgcaacaacttcaacacattctatttgtaagtttgttttatgctccctccactactgggtctgttgttagattgtgccaaaaagacagatcaaacagtggtctcaatatctcttggtgctttggtgcatctcattgaagttggtggacaccaattcagtgaaagtgactgggacacactacttaaaagcataagagatgcttcgtatactacacaacctctagaactgcttaatgtgttaagttttgaaaacctgaggaaccatggaagcattattagtgattctgaaggcaacgcaggtgacagtgggaccacaaggtctattgacaatgaggtaattggtgaccgtcaacttgatgtcaatagtaatgggaaattgtctccactggcatcctcaaatacaaatgctgatggagtggaagattctatatcacagacaaatgtagatcagtctgaaggccttccatctccatcaggaagaactcccaaagctgcagatggagaaggtttccagcggagccaaaccttaggtcaacggattatgggaaatatggaaaatctcttccttcgaaatctcacaaaatctaaaagccatatatctgatgcttctcaatcatcttctccaattaaggttgctgatgctgtagagcctgataccaagaatgaggagagtcctttgctggtaactgtcaggggaaagtgcattacacagttattgcttcttggtgcaattgatggtattcagaagaaatactggacaaaattaaaatcccaacagaaggtttctataatggacattttgctgtctttgttggagtttgctgcttcatataactcatccaccaatcttagaactcgtatgcaccaaattcctgatgaaaggccaccaataaatcttcttcgccaggaattagctggtactggcatatatctggacatcttacaaaaagcaacttatggttttgaaacaaaaaaagaaaaaagtccagagtctgttggatttcaagatgtggactctacagaagttaatggcttgagtattactcaagattctgatgcagaagtgaaatttgaaaggttagctgaggagaaactggtgtctttctgtgaacaggtgctcagggaggcatccgacctccagtcaattactggagaaaccactaacatggatattcatcgtgtcttggaactgcgcgctcccatcattgttaaggtgcttcaaagcatgtgttttatgaacaataagattttcagaagacatctaagagaattctaccccttgctaacaaaacttgtttgctgtgaccagatggatgttcggggagctcttggtgatttattccaggcacaactaaaacctcttttaccataaccgtcgtataatgccgctgataatcctgtgtgatcagatggacgttcggggagctcttggtgatttatgccaagcacaactgaaagctcttttaccataactgtcttataatgccgttgttaggattctcagatataaactccagggtattgccgttgtcagttttagctggcttggaaagaagaaatatggtggcatttttttgtattaatctttttatggaaattttgtgattgtactaacagttttgtagaaaagaaatagaaatgtaatttggtttcatctgacctcccaatatttgtttgcacttgactcaatttgtttgtgcagtatttggacaataggtgaaagctctgattgaggtttcgaatcagtcttttgttgtatgataacagatgtataccatgtgaaacccttgtctttcatgagaaggaatatcaactatttgctattcataatgtatactagaaaaaaaaaaagtagcagttatcccccttttaaaananaaa

SEQ ID NO: 21779 - DNA, 508 bp, Glycine max
  Clone ID: PAT_MRT3847_119670C.1
ttgggtttgtgctttttttgtcgtgtttgtttttttttcttttttttttttgtttttttttgtttttttttttgctttttaacaaaaaaggagatctttttttttgggtttttagcttaaaccaaaccccgggtttccaaaaaaaagggggtttcccagcccgccccgggaaattggccctccccttttactggataagggggggggcccgaattccgggttttcggccccggggggggaaagtaatattttttttttgggggcccccaaattcaattccggggccggggtttaacaccggggggggggggaaaccccgggggttccccaaattaatcgcctgggagcacacccccttttcccccgggggggaaaaaaggaaagggccccccccgagcccccttcccaaagggggccccccctgatgggggaaggggcccccccctttaccggcccattaaggggggggggggggggggttccccccagggggcccctttccttgggc

SEQ ID NO: 21780 - DNA, 546 bp, Glycine max
  Clone ID: PAT_MRT3847_119671C.1
gtctcgagtttttttttttttttttgggaaatgttggttattatatcaatctattcttttcaactaccttgatgacatagaatagaacaatgactattcaagaagaattgaaaaaaagactaccaaacacataaaaactaaaatatccagaaaacagttcttcactaatgactgataatcttagcaattctgcaacagtagcttcaacttcattttctcatctggatcccttcacactgggggagggcagaaagtgataacatatctaggagccctgcatctgttaaggctgctagagtcatcataagcataactataagccttaggacatatagccttaaacagatgaacaaaaagggtaggcttgcaagttttggggtcagaataactccctgtgcagcaatattttgctgattgcatagccaagcaagcactcttgcaccccacaaccttgccattcctcttcacctcaagtgctgatggacagcaaacattcaagttcacctcacaggaagccactccgcacccgacttctcccccgaccgg

SEQ ID NO: 21781 - DNA, 404 bp, Glycine max
  Clone ID: PAT_MRT3847_119672C.1
ttgttttttttttttttttttttttttttttttttttttttttttggggccatgacgcaacacatgccccacctaagaatcataattttacatcttgtacatacaaaatgcaaagacttttaattaaaatttaaaaaaaaaggataaaccgatcatcttggtgaaatgaaaccgaaacccagaaacattgtgttgaatttttgtggcgcccccaacttgattaatcatgaacggtttgattgaatcacttggactttaagggaatggccctgattacaaactgggggaaaagtgctgaaagtgcaccacccatgaagggggccacccagaaaaaccaggggtcttcccaaccaagggccttgttgaatattattgcaggaccaaaactacgagctggggtgata

SEQ ID NO: 21782 - DNA, 1215 bp, Glycine max
  Clone ID: PAT_MRT3847_119673C.1
gacaagttttatatacataaactgaaactcttttattagcacttgtgttaggcttattagtccactcatattttcaggcacttctctcattcaagagtaatggcagaagcaacaaaagggtatgctgtggtcactggagcaaataagggaattggatttgcaatatgcaagcaattggcttctaatgggatcactgtggtgttgacagccagagatgagaagaggggtcttcaagctgtcgagaaactccaagagcttggtctttctggccatgtgggttttcatcaacttgatgttacagaccctgcaggaataagatcacttgcagatttcatcaggaacaaatttggaaaactagatatcttggtaaacaatgctggaattcctggagcacaattggacggggaggctttggctgctgctggcattatggaaaatgctggccgcattgattggagtaaaatagtaactgatacctatgaattagctgaagcaggtgttaaaacaaactactatggagccaaggaattgaccaaagcacttattccccttctccagttttcagactccccaaaaatcgtcaatgtttcctcatccatgggaaggctagagcatataccaaatggatggcctaaagaagtactgagtgatgttgagaaccttacagaagaaaagattgatgacattttgaatgaatttctaaaggattttaaagagggttcactagaaaccaaaggctggcctcttgctatgccggcatatagtgtctcaaaagctgctttgaatgccttcacaaggattctggccaagaattacccctcattctacatcaatgctctttgtcctggctatgtcaaaacagatataaacagcaatactggttttcttacacctgatgaaggtgctgaagctgcagtgcgattggcactgctacctgatggtagtccttcgggtcagtttttctttagaggtgaagagaaaccattttgataatagatatattgttgctaggaaaaaaaaggttaatgaataattcatgaagccatgtttgttgctagagtttcaaaaacttcacattaactcttggtagtcctgttttaaattagtttttcttgtaataaacataacgaattatgtctagacattaatgatgttcatcatgttcaagctagttttactttctatcaaataaatgagcaatgtttaaattaaaaa

SEQ ID NO: 21783 - DNA, 369 bp, Glycine max
  Clone ID: PAT_MRT3847_119674C.1
gcgcgcacgcgtccggtcaaattgacttgatggactcttaaaattttccaatctaaaaactgggcattgtatgagttaccccttcctgaagagcaaaccggtattttttctcttaaaaaaaaaatgactggatatgatagcacatagcagtctatgaacggtagcagtacatgtctattaatgcatgagttgcaccgaccaatcaaatatctatgcatagtgacaataattcacctaacattagcccaattatcataatacatgaacttctgcacgttagcatcactgcttacaaaataatgcaagtctatctctgcaataatcatatgaatgtcgagacccactaattaggaaaaccgtatgatacat

SEQ ID NO: 21784 - DNA, 470 bp, Glycine max
  Clone ID: PAT_MRT3847_119675C.1
ggctcgagcagacagataatgaatgaatcggactgatagaaaagaaattgttggtgatgggtcttggtttgaagatgaagagcctgaggcaccatcccatggccttgaagatacatgagcaagcggggagcaaaagaaagtacactttcattcaggcacatagggcctggctttccaagtttttgatgctgtggatccttctcatggctctaattggctgtttcatctttagtaaaatggatgctgacactaaagtcagaaggaaagaggtgctgggtagcctctgcgatcaaagggctaaaatgctgcaagatcaatttagtgttagtgtcaaccatgttcatgcccttgccatccttgttttaaccttccattactacagaaccccttctgccattgaccacgaaacctttgcagagtatacagcccggacagcatttgaacggccattactcactggggtagcctat

SEQ ID NO: 21785 - DNA, 1953 bp, Glycine max
  Clone ID: PAT_MRT3847_119676C.1
taggattcctggtaaataacaatgtaagacagtgcaaaaatccttttcctctgagaatggcaatgcaggcaggtgaactctgtcagcagcaaaatcaacattcccctcccattttcttcaatccgattcccgattttggtttttttcccggagggttgtttctcgaccccaaaatccccgattccttcgttcgttccatttcgttcaagattcacgccactcccttttccgaatccaatcctcgccgccaacggagaagggttccggcagcgtgctttctatcagttagcttgccgagtgcaaatctcgttaccgaacccaaactgcaaaatggcgaacacgtgtccgaccaggagacaacctcaaacggtgtcgttcagcagagagaggttagggtacgaggaggcaatgccgtcaacaccaccaaacatctctgggctggtgctatagccgctatggtctctagaacttgtgtggctccacttgaaaggcttaagttggagtacatagttcgtctcgagacaaaaagagaagcataaacttttagctatttcacagtgttatcacttgaaaaaatttactatgtggtgcactacagatccgaaccaagttgcattcacctcgtggagaatccttgggcggtgtcattggtggtttcatttacatgagtcgaactgaaggccccttaatccccgattccttcgttcgttccatttcgttcaagattcacgccactcccttttccgaatccaatcctcgccgccaacggagaagggttccggcagcgtgctttctatcagtgagcttgccgcgtgcaatctcgttaccgaacccaaacttgaaaggcttaagttggagtacatagttcgtggtgagaagaggaacatattcgagcttattagcaaaatagcttcttctcaagggttgagagggttttggaaggggaacctcgtaaatattctgcggacagctccattcaaagcggttaatttttgtgcttacgatacttatagaaagcagctgcttagattctctgggaatgaggaaactaccaattttgagaggtttattgctggtgctgctgctgggattactgctaccattccaagtgaaggatttttttctctttacaagggtttagtgccatcaattataagtatggcaccttctggggcagttttttatggtgtatatgatatactgaagtcagcttatctgcattcaccggaaggaatgaagagaatccagaatatgcataaacaggatcgggaactgagtgcctttgaccaacttgagttgggaccggtaaggacattgttgaatggggccattgctggtgcatgtgcagaagctgctacatacccatttgaagtggtgagaaggcaacttcaattgcaagtccaggctacaaaattaagttcctttgcaacatttgccaaaatagttgaacagggagggattccagctctctatgcaggacttattcccagcttattacaggtgcttccttcagcttccataagtttctttgtctatgagttcatgaagattgttctgaaagtggagtaggcaatgaacagattcccaggtatatactgctaagaagatgcaccatgatttacgggcaagctgctaaaatagttacagaatagtaacattcaattttaattggcaatcatatttgatgtctgcctttgagggtgaaaggataattcaggtctgctatcccgtacaactgatcacagtatcaacagaatttttggattgactctacactcaatatacccaggcttcaagtctgcaaagtgaaaataaatttattttgttactcccagatcttgaatcctattctccttaggtttacccaatcttcttagttttttttttctttcaatctggcagcaattccttgatcattatcatggggtgtacaagcaaagtccaattacttat

SEQ ID NO: 21786 - DNA, 541 bp, Glycine max
  Clone ID: PAT_MRT3847_119677C.1
gcgcccttttttttttttttttttttttttttttttttttttttttttttttttttttttttttttttttttttttttttttttattattccaaacaaaacaacaaacaccctggggacttaagggggcctaccttattaattaaaacaaacatcattacaaggggggggggggggggggcaaaaaaaaaaaaggaccagcgggggcccatttcacatggggaatcttccaaagggccccaggggggggttattcaccgggggcccccccccacaccataacggttttgaaccccacgaaagaccccaacccagttagctaaacaagaaagccccggggcccttttaataaataaaaaaaaaaaaagggggcccacccggtgggtacaaaccccacggggtaggccaaccttattatggggggggtcaaaaaaaaacccaaggggctgggggtgaaagggggggaaaaccgtcaacaccggggtcacattgggggggggccccccccttggaagacaccccaaggaacccccgcggggggg

SEQ ID NO: 21787 - DNA, 630 bp, Glycine max
  Clone ID: PAT_MRT3847_119678C.1
aatgcataaaaatatttctctcatgatctttccttttttttatcctcaaaaggtatcctacactagtccacatgtcctcatacacctcaacaaaatggcatagctgaaaggaaaaatcgtcaccttcttgaaactgctcattccctaatgttaaattctaatgttcccacacatcattggggagacgcagtgcttactgcgtgcttcttaattaataggatgcctttttcttctcttgaaaaccaaattcctcactcaattatctttcctcatgacccattgtttcatgtctctcctagagagtttggttgcacttgttttgttcatgacctttcccttgatttagacaaacttttagctaaatcagtaaaatgtgtctttttgggttattttcgtcttcaaaagggttacaaaatgctactctccaatcacaagacgatattttatgtctggagatgttaccttctttgaagacacaccctttcttctcatcctctggagaacattttttctttttctccaaggaagtactggccaatttccttgccctcttagggaactccccaccaaaaaggtcaaaggaagtcttcaatctttctcttacccaaatttaaattgaaggtggtcttc

SEQ ID NO: 21788 - DNA, 458 bp, Glycine max
  Clone ID: PAT_MRT3847_119679C.1
tttacgctgggcgcagttgcaatctctgaaaatacaggtttattagtgggcggagcgagatattgacctaatagggggcgatgcatatgtgatgcctaccccatatggtcttaagacggaaagctatgtaactgggcatgaacacaccctatctgttggtcttgataaacctagcccagctctgctgcatagagagtgagcttattgaaacgttcccaagagaaatgttatgccaatggctacagtggagggactggctcccgaagacaagacgagcatgtggcacacagcttgattaattttctcttaagaatgtggaaccacgacctactgagcttgaaaatcacaaaaatgtgttgcgagaaataggtggatgcagaacctaagttgctccccaagcgctaacgaaagcgctatataattcgtatggctatagaaagaggatgtgctcccataat

SEQ ID NO: 21789 - DNA, 245 bp, Glycine max
  unsure (1)..(245): unsure at all n locations
  Clone ID: PAT_MRT3847_11967C.1
tntggcgaacntnaaggataacattaaagagcaccagctttttcccggacatcanggttcgccggcccctgaaagaaaaccttggttgggagattccccggtgagggaacccaaggcggtcaatttcttcatggttaaggatttaaattacccggggagttgtggtttagggtgggtggattaataatggcctttccctaacttaactggcttgttacttgagtatttaagtgggttattccctt

SEQ ID NO: 21790 - DNA, 575 bp, Glycine max
  Clone ID: PAT_MRT3847_119680C.1
gcggcggccagggcgaggcgctggtggcgtgcctccgcgaggtcccggcgctctacttcaaggaggacttccgcctcgaggacggcgccacgttccgcgctgcatgccccttcgccaacgtggcggagaatctcgcgctgcaggagaagctctcgcactacctcgacgtcgtggagctccacctcgtgaaggagatctcgctccggtcatcgtcgttcttcgaggcgcaggggcagctgcaggaccttgatgcgaagatcctccagggctgcgagcagattcgacaccttaaggacaccattcgcctcctcgacgccgatttggtccacgacgcgcgccggattcaggagctcaacggcaccaggaccaacctcctcgctctcctgcagaaactcaggcttatattttacgtcaaccaggccctctccgctctcaaattgcttgttgcgtctgcagattgtgctggagcactagatgtgactgatgatttgcaacatttgctggatggagatgagctctctggtctgcattgctttcgtcatcttagagatcatgtaataggctttatagaatcc

SEQ ID NO: 21791 - DNA, 453 bp, Glycine max
  Clone ID: PAT_MRT3847_119681C.1
cctctagccggcatccaaattcttctaagccagagaccaaacgcgcataagctgtttcatgggactatccatgccaccattatggaggttgcttagcccaccactgggggtggccgcggcatagccaaaagcatgcgcaggggacacgtgcaagcaaccgtaacagggggggaaggtgcggcaaccgtaaaggctcgcaaaatgctgcaagctgctcggagacagtaggctctgcttatgctgattctgatgacccaattgccatccaggacacactgaaataaagcccacgtgacaacaaagccaagaagagagcaagactgtgagagatgatgactaccacaggggcaacatgaactaggaggagcgcttaggctctgctgcatttggaaatgatgcaccatctaattacctgacaggagacagcttgtatgagcccttaaagccaataca

SEQ ID NO: 21792 - DNA, 442 bp, Glycine max
  Clone ID: PAT_MRT3847_119682C.1
cagtgtatattagttcctttttctttaaaaaactgctctttgactggatttgaaagaccaactaaatgccctggcccacttaattaactgaaaaatacaaacgggttgcccctttatgtaaaaccccaaccttaacttttgaaaaatattaaggaggggaataccacttatttatttatagggggggaggaaaccaaccaatcccatctttttttgcctggcacctacgtgttttttggggatttatatcatgacatgatcatcatcttaacaaatgggagcccctttctaatatatatagccttagaactaggtctccaagattaattgtgcctgttatttttgctgcgacggtgcagaaaacacttggttatcaataagaaatatacaagtgctgctagtagtagcactggtactagtcgtataacaaaataaggtatag

SEQ ID NO: 21793 - DNA, 468 bp, Glycine max
  Clone ID: PAT_MRT3847_119683C.1
ctaccacctgcttgggcgggggggggtgggggggcgggtgggggtggggggggggggtggggaggcggtgggggcgcccaggcccgggggagtggttgaggtgcgcgtggggcagggaggggtgttcaagagggtgggacataggagagattaaaacatcccctcttggaagacaaaataccctgaatggagcctgacacaagatatagtgaattaatatcacaataatattaagctctagcatgcccctaataggtgatgctaacaatctccaaacagtacgaatataattccgtaagctacagctactactgccagaccccaacttaaaaaaaacacattggttgcccctattaagtccattcccaagcggttgctgaaaaaccgcacataaaaaaatggacctgtaggtagctctctaaacaagtgggtcctttttaaataatattctatgccaagacttccccc

SEQ ID NO: 21794 - DNA, 692 bp, Glycine max
  Clone ID: PAT_MRT3847_119684C.1
cttcgcttgtgtacatgatgacaatccttgtgtagctttcatcccttactttggtttcattgaagaaatttgggagcttaactatgtcaaattcactgtctgtgttttcaaatgtaagtgggttgacagtaataccggtgtgcggaccgatgatgtgggatttacgttggtggatcttaacaaactcgcataccagaatgatcctttcattatggcagaacaagcgaaacaagtattttatgtcgaagacccttgtgatcaaaggtggtcagtggttttacatggaaaaacaataggtgtcaatgttgaagatgattattcatacattgatacttatgttagtcctttgtccacacaattgtcacctaatgtcatcggagaagaaactgacgatgttcatgctaatcgtaatgatcacgatgaaggagaattaattaacatcgtctaaatgtgttcttcacaggatgcgcttgaggagcaggcctcacagggttcctttgttacccatggacgtcatgatatactgactgctgccattgggcgaccagaacaccctggtcgtgtgcgtgctgtaggagccggtataaccatcaaacaatactttggatcagcttcaaggacctcctccattgctcccgaatacctgcaacagttgacgcaacaaatcaaggaccaactagaggattcaatca

SEQ ID NO: 21795 - DNA, 555 bp, Glycine max
  Clone ID: PAT_MRT3847_119685C.1
caaaaaaaaacccggggaaaaccccccgttttttaaaaaaaaaaaaaggaaaagggggctaaaaaaaaaaacccaaacggttaaggtaatcccccccaaacctttttggaaacaaaaattttgtttgaaaaaaaaaggggggggtttaaccccctcaaaaggaaaaagcccggggaattggccaaaaaaaaccaaggcaactatttaagatcccttcccccccaggggggccccccaaaaaaaaaacccttgggccctcaaaccacaaaggggtttgacccccaaaaaaattggggggggggcccaaaaacatgggggaccccccgggggggttttttttaaggggggcccaaaaaaaaaacctgaaaggggggggaaaacccaccaggggaccccccaaaaaaaaggacccccccaaaggggggggggacagaaacaggaccccccctggggggggaaacaacagcctttggccccccaaccccgggaaaggccctaatttcaaggggcccccatgggggggggcactttccaaagaaaatggtaaaacccccc

SEQ ID NO: 21796 - DNA, 495 bp, Glycine max
  Clone ID: PAT_MRT3847_119686C.1
tagattttttattttttttttttttttttttttttttttaaaaagtggaaccatttcgattcatccctttggctggctgtattttacaagggggcaattttcttattttcttaaaacccttaaaccgggttttatgataattgtgatgcaaagaacaccaagaagatcaaatccgggctagctgaattacaaagggaacaacatttgatcctcaacttataaaaaataatcagaagacccttagtgggacatggcccacattgcaacaccagaggggggatgctacataatacatattatgggcttaaaatatactactacttaccaaccccttaagggttttcgaaccctatttacaattttatttctagcaacaacccctgttaattgaaactcacagttctcatccaaaaaaaattttgacccctcccattcaccctctgaaggtgaaggccggcctacttcagccgaaaaaacacaaattccaactgtttt

SEQ ID NO: 21797 - DNA, 468 bp, Glycine max
  Clone ID: PAT_MRT3847_119687C.1
cccacgcgtccgaaaaaaaaaaaaaaaaaaaaaaaaaattttaaaaaaaaaaaaaaaaaaaggggaaaaaggaaaaaaaaaaaagggaaaaaaaaaaaaaaaaaaaaaaaaaaaaaaaaaaaaaaaaaaaaaaaaaaaaaaaaaaaaaaaaaggggggggccgttttaaagaatcaaattttttttccgcgggtttgaaaaaaataatttttttttttgggccacaaaatttaatttaattgcccgggtttttaaaacgtggggattggaaaaaccgggggtttcccaaattaaatggttttaaaaaaaatccctttttcccaagttgggttaataaaaaaaaggcccgaaccgttggcttttccaaaaatttgcccatcttaattggaaattggaacccccttttttccgccctttaaagccggggggtttgggggtttaccccaaggggacccttttatttttcaa

SEQ ID NO: 21798 - DNA, 399 bp, Glycine max
  Clone ID: PAT_MRT3847_119688C.1
cccacgcgtccgtacggctgcgagaagacgacagaagggggaggatttatggagacaagggctcattatatttaatattctttgcgaactaactagattactagcgagatcattgaactttaatttccggcttgtcttatatggttctgaataagaacaaccttattctgatcaagattctgaattacttgaatcttctgcttccaaatgttctgtgattgcacatgaaatgacaccaatggaagttttggttcgcaataacaccaatgatttgatcaaaatgagtattaatattacatgccagagatgtaattggggaaaattttgtaaatggtaccaaagcaactgttatattgactggtgatttgaatgattttaatttggaaatttccccatttt

SEQ ID NO: 21799 - DNA, 759 bp, Glycine max
  unsure (1)..(759): unsure at all n locations
  Clone ID: PAT_MRT3847_119689C.1
atttacttgtcaatctgggcgatcctgagcgacctgtatgtaaggttggagattttggcctatccagaattaaacgcaacacacttgtttccggtggtgtcagaggaacccttccatggatggcgcctgaattactagatggtaacagttgtagggtatctgagaaggttgatattttctcatttggcattgcaatgtgggaaatgttgaccggggaagaaccatatgctaacatgcactgcggggctatcataggtggtattgtcaataatacgctcaggcctccgattccaaaacgatgtgattccgagtggaaaaagctgatggaagagtgctggagtcctgatcctgcagccaggccaaccttcacagatattaaaaatagacttcgcaacatgtcagattcagtgcccaaaaagagacataacattgctagacgatgaaacttacatttttttttcttgtaaattaatgtatgcaaatacaaaagaaagatgaaaacaattgttcaaaaaaaaaaaaaaaaaaaaaaaaaaaaaaaaaaaaaaaaaaaaaaaaaaaaaaaaaaaaaaaaaaaaaaaaaaaaaggggggcccggccccttacaggnnnnnnnnnnnnnnnnnnnnnnnnnnnnnnnnnnnnnnnnnnnnnnnnnnnnnnnnnnnnnnnnnnnnnnnnnnnnnnnnnnnnnnnnnnnnnnnnnnnnnnnnnnnnnnnnnnnnnnnnnnnnnnnnnnnnnnnnnnnnnnnnnnnnnn

SEQ ID NO: 21800 - DNA, 431 bp, Glycine max
  Clone ID: PAT_MRT3847_11968C.1
tgaatttcttgcaaggcactatcacgaggttaaacttttcttgctcctatctgttttgctgcttcctgattataatgcatgactgctaaatcatacaaatatattccagcgcactatctacatcccacaaaaaaaaaaaaaaaaaaaaaaaaaaaaaaaaaaaaaaaaaaaaaaaaaaaaaaaaaaaaaaaaaaaaaaaaaaaaaaaaaaaaggggcggcccctaaaatagaaacacgggccgccccgcgaaattaattacggcaccgaccccggaaaaaatcccacttcctcctttggggagcaacataaaattccgtaaaaacaacggaataaattgttccctgataaaaattttaatccgctcccagtgccaaacagtttccgatccgaaatctaaaagggaaaagcccggggagccaaaggagtgac

SEQ ID NO: 21801 - DNA, 363 bp, Glycine max
  unsure (1)..(363): unsure at all n locations
  Clone ID: PAT_MRT3847_119690C.1
ttaattccctgtttttttttttttttttttttttttttttttttttttttttttnttttttttgttttttttttttttttttttggcaaactttggataaaaaggccaacccttatcccaaagcataaaaaatttaaaaccaggggaagggatacagggcccgcggaaaaaaagaacttcgtcctttattataggcaaaatttttaaagcataaaacactttggtgggaacacgcaaaccccgggacttttcatactcacaaaattattacccgggaatcaaagcattccagcccagggcgaggcaaaaacttggccagaagccaaggaaatatgcccgaaaacaagacattaagcaaagatt

SEQ ID NO: 21802 - DNA, 342 bp, Glycine max
  Clone ID: PAT_MRT3847_119691C.1
cgaaagtggattctgtgctcacattaacgtatcatttcgggggtgctaatatcaggtcaattgctgctgctacaatacgaccggatcatcgcgctattttgtgtaaaggggaaaaagtaaccatcaaagtcacagaggcctagtctcgaaaagctacatgacatagatgagaaaaactcaaagacgaatgcagaatattttcagagaagagacacttctcgcggaacacttatagattgcattggaatacatgaagaatgagaaactattttctttcaagaactcgattctctcaatgaaggaaaaaatgctgaccgattacgtcgatattgtataaacata

SEQ ID NO: 21803 - DNA, 597 bp, Glycine max
  Clone ID: PAT_MRT3847_119692C.1
gctcggaatccggctattcggctcgatgaagctaacaatagccttgccaggaatgagccactactcaaaaggcagcaaacacttggggaaatgactttggaggatttcctagtaaaagctggggtggtacaagaatcatcatcactattcaagtcttcattactatatcaaaatcagattggtaacattgcaagtaatgggccattgagtgcaagttataggttcaggcatgtaatagggacaggatctagtgtgtcttgtaatgggcttgaaacacaaaacatgttggcacagaataacaacttagttataaaggatgtcactacaaatggtgctgtggagaaatgtccaagcttaggagaatcaagtgggaagggtaataggaagaggatcattgatggccctcctgaagtggtagtagagagaaggcagcgcagaatgttgaagaatcgagaatcggcggcgcgttctcgagcaagaagacaggcatatacagtagagcttgaagcagagctgaatctgctaaaagaagagaacgaaaagctcaaacaaactctggccgatgctgaacgcaagagaaaacacgagatttctcag

SEQ ID NO: 21804 - DNA, 306 bp, Glycine max
  Clone ID: PAT_MRT3847_119693C.1
ttttggattgtcgcttggtctttctcttgggtccacgcgtgcccggacgcgggcgtagaacagcaaagcgcaaaccggggcctggaggcgtaccgggtgaaactgtaatgcggtgacaaatacccagaagataccaggggcaaagctgaagcgtgaagcctggggggcctaatgagcgagctcacacacaataatagcggggagctcacagcgcgaagtccaggggggataccgagtgagccaactgacataaagagccgtgcgcccaccggccagaggccagttgcgaaacgggcgccgccgggg

SEQ ID NO: 21805 - DNA, 686 bp, Glycine max
  unsure (1)..(686): unsure at all n locations
  Clone ID: PAT_MRT3847_119694C.1
tcgtggaccagccccaggccgacctggttggcggtgatcttgcgctcgaggatccagtccagggcttccttctgagcgacgatatcggtcaacaggttgtgcatttccagcacgtcgatatcgcgttcgcgcatcttggtgacgaagtcgaagtgatcgcgcttggcctgggccacccagatcacatcgtcgaacagcagctcatcgcagttgttcggggtcagccgctggtgcgccaggcccggtgagcagaccagcaccttgcgcagcttgccggcttcggaatgaacgccgtatttcactttttccgtggtcattgcagatcctccagggaacgaaacaatcagggtgtcaaagggtcaggaagccgtcgtacaggccataggcagccaccagggcgcctatgaccaccgcggcgaaaatcagcttctcgacagtggtgaaaatcgcttttcccagctcgtgcttggccttggcgaacagaatcacgccgggggcatagagcagggcggagagcagcaggtacttggtgccgccggcgtacagcagccagatcgcgtagatcagggcgatggcgccgatgaccaggtccttgcggcgttcgcccggggcctggtcataactttcgccgcgcaccgccagcagcacggcataggccgncgaccacaggtagggcaccaggatca

SEQ ID NO: 21806 - DNA, 756 bp, Glycine max
  Clone ID: PAT_MRT3847_119695C.1
ctccgacgcaaccatcgtgcgcgtccgaaacgacgccgtgaacctcgagggcgttcggaagatcatctccaacgacgagtcgttcctcctcggactcgcctgcgccgagttctccgagtcgctccgagtcgccgctaactcggtgacgcggctcatcgcgcgctgcgaggattccgccctgcgctccttccacctggccttcctcgagttcgcggactcgggccgcgacccgaacgggtgggccctctccggcccaaaagaaaccgattcgaagctcaagaaaatggagcgttacgtgacgttcacggcaacactctaccgcgaaatggaggagctcacggttcttgaaaactccttaagaaaagccctgaatcacgctgacggcaacagcgttgggagcaaagatcagcagaagctctacgagcttcagcagaagatcttttggcagaagcaagaggtgaaggatctaaaagaaagatctttatggagcagaagcttcgacaatgttgttgtactcctcgtaaggttcagcttcaccgttttagcaaggattaaggttgtcttcggaatcggtcaccacatgccttgtctgtctcgtactttgtcggcttccgccactgtttatccgtctgatcaaaaccctaatgggttcgtttatgagtcattggaagaagaagactcgaagcttgaagaagaggccgtgaatgggttttttgaggcaaactcgaagcttttgagaccacccgagagcacgct

SEQ ID NO: 21807 - DNA, 177 bp, Glycine max
  Clone ID: PAT_MRT3847_119696C.1
tagatatcttgtagaaaccaacaaactgcaagaattcaatctgatataaaaaaaagaaaactaaaaaaattcaaaccattaaaaaaatgtatcgaaagaataaaaatggggcggccgccatttacagagctatctgaaccggcaattaacccaggtccggttcctaaaggcgtccca

SEQ ID NO: 21808 - DNA, 349 bp, Glycine max
  Clone ID: PAT_MRT3847_119697C.1
gcagatcttcgtcgagaccctcaccggaaagaccatcacccttgaggtggaaagctctgacaccatctacaacgtcaagggcaagatccaagacaaggaaagaattcccccggatcagcatcgtctcatcttcgccggaaagcagctcgaggacagccgtaccctctccgactacaacattcagaaggagtcaaccctgcaccttgtccttcatctacgaggggggatgcagatctttgttactactctcactggcgaaaccactaccctatacatcaaagctctgacaccattgcaacgtaaggccaagatcctagacatagaaggattcccccagaccagcacacgt

SEQ ID NO: 21809 - DNA, 970 bp, Glycine max
  Clone ID: PAT_MRT3847_119698C.1
ctggtatagagaaagaaccgtccttgaaaaaccttggcctgcgcgacagcgatatctaagtattaagctataaaaagaccggtaaaatagagggagaaatgagaagtgtgaagatggtaaaatgatctcaaactcggaccccgtagaaccagtcacggcaaccgccactgccggcgccgacgacgccaccgtctcaacaaccgcctcttcttccaatgaagatcagcctgcaccgccggcggcaccaaacattgtgatgtcctccaaggatcacgattctctcttcagcggtggcggcatcagctttctctctggaagccgaaatggaaggttcagctatggatattccagtttcaagggtaaaaggtcatcaatggaggatttcttttagaccaaaatatcagaggttgatggtcagacagttgcgttttttggtgttttcgatggtcacggaggttcccggactgcagaatatctgaaaaacaatctgtttaagaatttgagtagccaccctaactttatcaaagacacaaagactgctatagttgaagcatttaaacagacagatgttgactacctcaatgaggaaaagatgccatcaaagggatgctgggtcaactgcatcaacagctatgttgttgggggactggtgtggtgatgcaccttaggtctctttcatttttaacaactgaaaaatccagagatccattattttttgatttgatgaaaaccttttttgctttattaaacattggttgaattaataacatccgacattcttaatttgggctataatactcgtggtctttgatggaaattctgcctgcctcaaaaacattatacgaagatccaatgtacagttttaggagttttttttatattttttaaacagttttaggagtattggactgtagtgaacttgttaaaatcttaaaaatgttgaattcaagtgtttgattacttctcttat

SEQ ID NO: 21810 - DNA, 243 bp, Glycine max
  Clone ID: PAT_MRT3847_119699C.1
cgaagctcgaaaacgctcggtgcggcaacaccaacaaatgaatatcataaaacaatgatatcgctagctgtttttttttacagaaatataaattttgtacgttataaaatgaacctggtcagggaaaaaataaaacgctttaatcttatgatgcatttccaggtgatattttaatatttgtaattgttcttaatcttctaacactactttttttcaccattaatatactaatattatatattt

SEQ ID NO: 21811 - DNA, 304 bp, Glycine max
  Clone ID: PAT_MRT3847_11969C.1
aagggcgaaaacgaatgcgttttggacgaggaaaaaggaaatgtagccaacccgaataaaacaaaagcccggatagaaccataaaccaaccggtgaggagattgaacgagaataaccctggaagaaggtacccccgtcggtaaaggaaagtttggtggcggcgcgataatacgacgtggttgaggttgttaactggtaaggtacttcgaagcaagccggcagtacactgcgaggggtagaccccgatggcagggcacttcgcgaaatgtgcagaggccaggccgccggagttgagggctagggg

SEQ ID NO: 21812 - DNA, 1716 bp, Glycine max
  Clone ID: PAT_MRT3847_1196C.1
ccacgcgtccgctttgacttttttttagaggctctcattttcttctctgacatttctatttaaatttgccgaagaatccaattcagcgatctccgaagagctccatttggaaaaagaagcgaactgggtatccaattttcgaacactttcgatggggaatgatgcagggtcacctcagggtccggttacgtgtgggtcgtggattcggaggcctgagaatttgaacttggtggtgttaggaaggtccagacgtggcaattcttgtccttctctcttggagattttctccttcgatcccaagaccacttctctgtctacctgtcctctgaccacttatgtgttggaagcagaggaaggtgatcctgttgctattgcagtccacccaagtggggatgattttgtgtgcgctctcagcaatggtagctgcaaattgtttgagctgtatggtcgtgaaacaaacatgaagttgttggctaaggaactggctcctctacagggtattggtcctcagaaatgcattgcttttagtgttgatgggtctaaatttgctgctggtgggttggatggacatctcagaattatggagtggcctagtatgcgcgtgattttggatgaaccaagagcacacaaatcagttcgggatatggattttagtctagactcagaatttctagcttcaacttctactgatggttcagcaagaatctggaagattgaagatggtgttcctttgactactttgtctcgcaactcggatgaaaagattgaattatgtcgattttccaaggatggaaccaaaccatttttattttgctctgttcaaaaagcaggtgatacttctgtcactgcggtttatgagattagcacatggaataaaattgggcacaagaggctgattagaaagtctgcttcagtaatgtccattagccatgatgggaaatacctttctctgggcagtaaagatggagacatatgtgtagttgaagtaaagaaaatgcagatataccattatagcaagagattgcacctgggtacaaatattgcatatctggagttctgtcccggggaaagggttttacttacaacctcagtagaatggggagcgctggtcaccaagctgactgtacctaaagattggaaagagtggcagatctatttggtgctattgggactatttttagcatcagctgttgcattttacatattctttgagaactctgattcattctggaactttcccatgggcaaagaccaaccagcaagaccaaggtttaaacctgtgttaaaagatccccagtcttatgatgaccaaaatatttgggggccagtagatatgtgatcacattaacattcttgatttagtcttcggtgctgttttggaagctgtaactggtatcaacatttatttttattttttttattactggtatcaatatttatttaagcccttatagagttaggcacttgactggtattacaaacatttacttctatttttttggggtgaaaattatgagccaaaggccatgattggtatgtaattttaatagaaactttaggaataatcaaatagcttccttaaatttacaagttacacgcaaggctgctttgtagctatgtgatgggatcccttgaaaaggcacgtctgtggatatctttcctttttttcttattttgtttcttgttttaatgataatgataaaaaccttttatttt

SEQ ID NO: 21813 - DNA, 763 bp, Glycine max
  Clone ID: PAT_MRT3847_119700C.1
ggggcggtccttgatccccaacttcgatccatttcattccgatcctcccccttcaccgtcactgcataacgttctcatcactcatacaattttattgctctcgccgttaggttgttgattggttttgaggacaagaacttttacattgttcacacatctgttatcattgaaggaaaaaagggactggtgtttttcagtgctgtgatgacatttggcttgacgtattgaaattcatgcaatgtcgagcttacttaattcttctctgaacgggtctgcttcaaatcttccggatggtgctgggcgttcttttgctacgtctttctctggttctattcagggattgcacaacattcatgggaactttaatgtacccaatatgcccagtacactcacatcaagaaactcaacaataaatagtgttccaactgggggaggagttcagcaaccttcggcaagcctttctagtggaagatttgcatcaaataatctacctgttgctctgtcacagctatctcatggaagctcccatggacattcaggagtcaacagcagaggaggattgggagtatccccaattttgggaaatgcaggtcctcgaatcactagttcgatgggaaacatggtcggtggagggaacaattgggaggataagctctggaggattgtctgtcccaggtcttgcttctcgtctaaatttaagtggaaacactggatctggtgggtttaggtgtgcaaggacaaaatagattgatgagtggtgtgc

SEQ ID NO: 21814 - DNA, 259 bp, Glycine max
  Clone ID: PAT_MRT3847_119701C.1
gaaatgacatgtttgctcacggtaggaatatggtgtagccacccagatcacaagaaaaggccaaaggcagaacaggttattaatgccctgaagcaagaaacgccattgccattgctttctatgtgacatgccctcgttgtcctcctcagcctaccaatggccaatctgattcctttgaatcaccatccatcaccaacagcatgcctatttcaaggccttgcaatatatcagaacatatatttagccaattttggacgag

SEQ ID NO: 21815 - DNA, 866 bp, Glycine max
  Clone ID: PAT_MRT3847_119702C.1
ccttcgcgtccgtattcctctctgtctcttcctttgtagctttcactttcatttgtctggttccgatttagggctcccgaactcgggcttcgactcaaaactagcgattgatctgctgctcaatttttctctctccctcctcccttcgaatttcattccgatcctcccccttcaccgtcactgcataacgttctcatcactcatacaattttattgctctcgccgttaggttgttgattggttttgaggacaagaacttttacattgttcacacatctgttatcattgaaggaaaaaagggactggtgtttttcagtgctgtgatgacatttggcttgacgtattgaaattcatgcaatgtcgagcttacttaattcttctctgaacgggtctgcttctaatcttccagatggtgctgggcgatcttttgctacgtctttctctggtcagtctggtgtagcctccccagtttttcatcacactggttctattcagggattgcacaacattcatgggagctttaatgtacccaatatgcccagtacactcacatcaagaaactcaacaataaatagtgttccaactgggggaggagttcaacaaccttcggcaagcctttctagtggaagatttgcatctaataatctaccagttgctctgtcacagctatctcatggaagctcccatggacattcaggagtcaacaatagaggaggattgggagtatccccaattttgggaaatgcaggtccccgaatcacaagttcgatgggaaacatggtcggtggagggaacattgggaggataagccctggaggattgtctgttccaggtcttgcttctcgtctaaatttaagtggaaatgc

SEQ ID NO: 21816 - DNA, 402 bp, Glycine max
  Clone ID: PAT_MRT3847_119703C.1
tgagaatcatctaggatcgagtaatactgaacttgagcaaaattcgtgctcaactaccatcaacatatatagtgttcagtgcttcattcaaagaagctaaagggaagcgaagttgtgatttcttgcctcccaatttataaaatttcataccttctaacattatgttttgctttttgcattagttagttagtgcaacaaagtacataaaagactacaccctgagaaaagtaccagtaagtaattctaaaaaacactcacaaatccccatccacttttggtgaactcttggcccctaattgagaattggcagtggtttgaaaggaagagttctacatagggtcgttcatccaccacagctgcaacagttccggtttcaagggcaacagcatattcttctggtga

SEQ ID NO: 21817 - DNA, 703 bp, Glycine max
  Clone ID: PAT_MRT3847_119704C.1
cccacgcgtcctgatacactttaaaaaaaaaaaaaaaaaaaactataaaaatagagaggatggtagaaaaataaatataataatgttaaataatgaagggccggcacatttaggggttccaattttgccacccctgccatgcacatatttactttttttttccgttatcctatttttgcttccctggcttttgttatatgcttttgctgctgggaatacccctcctttctctttttttgttcgcctgcaaatgcatcctcttttgcgccgtttttcatactagagaagggtgcaaccccggcggccctccccatttttccctcttcctgattgtccatttttcctctccgtttagcacctcatagagccccggcggttgcgccttttaccccaggtgcgcaccctttagtggtaagggcccgcccccctgttctttttttttccttccttttttttgtggcgctctcccccgggttccccagcttttttttagggcgccgccccccttatgggatcttatttcgtgctttttgtccccccctccccaatattttcctttagggtgttggccccggtgcccgcttttaggctccgtttacgtgtttttcgccctttgccctcccaaatacctttttttaggggttggttctttgttcggggcttttaccccccatttaacccggtttttccgcccttttttttt

SEQ ID NO: 21818 - DNA, 164 bp, Glycine max
  Clone ID: PAT_MRT3847_119705C.1
gggccagaaagagccaatcgagttcaacgaacaaacctaatcatcaaaccctacagcttttcacatttacctaccacgtgggtatgctggcctacccttttgttttctactcctattttaaccgcaaattggtcctagagttgcattttccacccctacgcgcc

SEQ ID NO: 21819 - DNA, 459 bp, Glycine max
  Clone ID: PAT_MRT3847_119706C.1
cttctctgactgcgttgacaacgactgactgacgggactgacaactatggttgaccggggtcttctcgtgcggctacgggtcaacccgttcaaaagcttatcgaattgagcctattttgcctgtgaacgatgtcaattctgaattatgtatatcaaatcagcattccaagttttgtgttaatctgctatcgtttttcaattgttggtttccattgagttatttgttaactaattttttattcacaatgtaaatatttttatgtatttattttcgcattgatgtaaaaccacagcccatttgttatgttatttattcaacgtacttgtttatgtatgtcgcaattgaaaaccaggctggtaccgaacccgtgaggtgaacccatatctaatactaaagaaaccttcgtggtctgggctaagtttcggcaaatcaccacaatttacgatatgcagaactag

SEQ ID NO: 21820 - DNA, 334 bp, Glycine max
  Clone ID: PAT_MRT3847_119707C.1
aactaaccagccgccatccgacctttttttctcctttacaatatttttcactatatatttcaaatcataacccacgagacgccattcaaaaaccataaccaagaaaatccttatcccacataaggcatttaacgcacattatacatgacaacaccaaacttaaacaactcatataaacagacctaatgatgaaattaaccccgaacacactctatacgagcttaagaccatatataatcacatatatgattcataaaaacatacatatagctagataaaattaacctccattgagcaattgcataaaacaaccaaaaatccaagatgctccaaa

SEQ ID NO: 21821 - DNA, 463 bp, Glycine max
  Clone ID: PAT_MRT3847_119708C.1
aataaaaatattttgtttttttttttattaaaaaaaaatgtgatgggggtggaaaaagttaaaaataaaagttaactatagataaaatatttttaaaaaagaagaaaaggaatgaaaaattggaaggagctgaaaataaaaggagaagggggccggccctttaaaaaaaacggaagacttgggtggaccccgaaataacggaagagatccttggagggaaacaaacttggcgtaaagggggagccataaaagattggcgaaaacaatggaaaaggagttctccgggggaaaaggtgaggtggacaaaaactcacaaaacaaacaaaccctatccataaaaaaaaaaacccgggggccccaataaaccagccaagccacatacatggggggaggcgaaaaggcccctttaaaaaaaggaaaaaaaccttggccgccgggataaaaaaaattttcaccggggggg

SEQ ID NO: 21822 - DNA, 344 bp, Glycine max
  Clone ID: PAT_MRT3847_119709C.1
aaagttaatctctctctctctggagcgtcctcgcttcgtcacggcacacaaccccttttcggatcggcggagcaatgcctcaccggcgagattcccgacgctgttcaatcagccatcgaacacctgcgaaaagccgcaaatatgaacgttttcgttaaaactcgcaatggcacgcacttcgaaattgaagtgaaaccctcagacacactttctgaagtgaagaataatatagaaaccgttcagggtgaacatgtctatcctgctgcacaacacatgcttagtcatcaaggaaaagttcaaaaggatggtactactttggcgcaaaatatactagctgaaaatag

SEQ ID NO: 21823 - DNA, 191 bp, Glycine max
  Clone ID: PAT_MRT3847_11970C.1
ctcgcgctggggttcaatcttataagcagagattgataattcagattagccgagctttgtgcagaagcgacgcaatgcgaaacattaaaaaaaaaaagaagcagccatgagcttaacacacccatgacaagtccaaaacagttgaacttgctgaaagggaagacatgaccactgtattctacggatgtttg

SEQ ID NO: 21824 - DNA, 279 bp, Glycine max
  Clone ID: PAT_MRT3847_119710C.1
ttatatatataccctatatgtggaatttgattattattattattattattacatcgaaccttgttagtccactaacgactcattggggcccctcctaacccaatgacttaattctttgaacaagtcgaggtctgatttatatgtgttaactatgagtgtaacatccccccattccccgttgacctttttttacatgatggaaggccccgctttgaggctttccctaatcttgaggaaaaaaactatctttaaatataattctagttctcataaagcttt

SEQ ID NO: 21825 - DNA, 278 bp, Glycine max
  Clone ID: PAT_MRT3847_119711C.1
atactgcattcttcattattacatatctggttaagctattttgtatttatttttttattactggattaggtttatcccataggaacttgggataagcaattcgaaatggaataatgatttttttgttaaaaaaaaaaataaaaaaaaaaaaaaaaaaaaaaaaaaaaaaataaaaaaaaaaataaacaataatataaaaaaaaagggcgtccacaaaattaattaactccataacccaaaatttatttccgaacatttacattccgtctcccaatttt

SEQ ID NO: 21826 - DNA, 389 bp, Glycine max
  Clone ID: PAT_MRT3847_119712C.1
cctcgtgccgaattcttcggtgccatcctcggtcacgatggatctgtctgggccaaatccgccaatcttaacattagcggacctgaagctcaagctgttgccagaaacgctttctccccctctgttcaaggaactggtctcactgttgctggaaagaaatatctcaccttaaagactgacgaacgatcattctatggtaaacaaggaactggaggaattgttgctgtcaaaactactcaatctgtattagttggaatttatgaaactcaacaacccggagctgccaccaccaccgtcgaaaaactcgctgattacttaatcaacagtggatattaaatttatgaatattgcaaataaaactttctttcactaaaaaaaaaaaaaaaaaa

SEQ ID NO: 21827 - DNA, 1745 bp, Glycine max
  Clone ID: PAT_MRT3847_119713C.1
aaaaacctttgtggttagtaatggaatttaagaaacctagcattcctctaaggtctttatcacaattatttgcccttcctctttgtcataacaaaagtggactaggtatgtatagcactcacatatattattacttttttgtctgagatacactacaagcctacaactctgtctattgcacaatggatgcagatgcagctcctttgcacatagcaatgtatccatggtttgctatggggcacctcaccccatttctccaccttgccaacaagttagccaaaaggggacacaaaatctccttcttcatacccagaagaacacaagccaagttagaagacctcaatcttcacccaaacctcatcacctttgtccccatcaatgttcctcacgttgatggtcttccttatgatgcagaaaccacttcagatgttccctcctctttgttcccactcattgccactgccatggacctcacagagaaaaacattgaacttctcctccttgatctcaaaccacacatcgttttgttcgatttttccacatattggctaccaaacttggctcgtagaataggaataaagtctcttcagtactggattattagccctgcaacagtagggtacatggcatccccagctagacaaagagaagatgacatgagaaaaccaccttcagggttccctgattgttccatcaagctgcatgcacatgaagttcggttccttgctgcagcaaggaaactagagtttggcaatggtgttcttttctatgatcgtatctcagttggtgcagatttgtctgatgctattggattcaaaggttgtagagaaattgaagggccttatgtggactatctagagacacaatttggtaagcccgttttgcttacaggtcctcttgtgcccgagccatcaaattcaactttggacgcaaaatggggtgaatggcttggtagattcaaagctggttcagtgatttacattgcatttggaagtgaacactctttgcagcaaaaccaattgaatgagttgttgttgggtcttgagctaacaggaatgccattttttgcagcacttaagccccctattgagtttgagtccattgagaaagctctcccaaaagggttcaaagaaagggttcaagaaagaggggttgtgtatggggggtgggtgcagcaacagttgatcttggcacacccttctgttgggtgcttcataactcactgtggtggagcttctctaactgaggcacttgtgaaccggtgtcagttggtgctgttgccacgacttggttccgatttcatcatcaatgcaagaaccatggggggaaaattgagggttggtgtggaagttgagaaaggggaagaagatggtttgttcacaaaggaaagtgtgtgtaaagctgtgaaaactgttatggatgatgagattgatcagcttggcagagaagtcagagcaaatcacaacaaagtgaggagcctcttgctaagtaacaatttcgagacatcttgtgtagatgctttcagccacaggcttcaggatttagtctaagttcagccccagtttaattaaatcactgtataagttctatattattgacactgaatccagtagggttatttggtcgtgtaagaactaaaaagcgtcctttatgattgatgcattaaatcatgggttgagaaagaatatatgtacaaaacctagtcttgataatcttaaagaaatgtttattattttgtaataatc

SEQ ID NO: 21828 - DNA, 217 bp, Glycine max
  Clone ID: PAT_MRT3847_119714C.1
ggaaaggggattttttaatgcatgaaacactgacgttacttaccagaacacgcgacaaaaactatagattgcaggaccccgcaaatgtaaaaaaccctttaagctaagacagatcagatggatcaagggcataaccaccaatgacaacagatctttaaatcctttaaaaataaaaataccctataaaaggaaccggcgagaacgaccggttcaccgg

SEQ ID NO: 21829 - DNA, 1139 bp, Glycine max
  unsure (1)..(1139): unsure at all n locations
  Clone ID: PAT_MRT3847_119715C.1
cccacgcgtccgcccacgcgtccgcccacgcgtccgtacggctgcgagaagacgacagaagggggttacgggtgattctatctaagttgacgttttagcagtcgtcgctgccagcctagtctaccataacgtaatcgagattttcgctattcacacaatcccttcacactcttaatttacgctttctgttcagcttcgttgtgcggtacattttctttgtcccttcccttctcctctcgacgcaggacactatggccgtcaccgtcaaactaatggctctcattgtttcctttttcggcctcttgtctttcattttgggagtcatagccgagaacaaaaagcctcctgctggaatgcccgtgcccgtcaaggatggtgtgacatgcaagttctcagccgatctaacacttgcattggggtatctttctgtaatttttcttattgcttccacagtggttggatatctctctctgttttacccttacaaagggaaagctgttccacaaagagttctctttaaaagcacgactttcatggttttcttcaatgttgcattgttttcgactggactagctctaactatgctgttatggccaacaatcactgaacaccttcaccttaaacgcaatgtgcatcatgatctcacatatacatgccccactgctaaaactggtctccttggaggtggtgcctttttatcccttgattcatccctcttttggttagttgcacttatgctggctgacaatgctcgggaggattttttggatgaagacaaagatgttgaacttccctcacatgttaatcatgcagatatgatcatatagcagtgaatttgaagaggcgtctccaaatataccatctagcgtgaaagaaagggtttatctctggaactatataccaagtgatgttgaaagtctacatataaaacgacaataaagttgtagtaggacctgtaggaactctgaaaatgcaattaaagattagtttttcttttgagttattcgagacatatgttgcagatttgtttatatgaaatttgatttctatttctccattggacaaacttagttattcttttttatttgaaaatgagaaacttagtctcttttataatcccnnnnnncnnnnnnnnggat

SEQ ID NO: 21830 - DNA, 251 bp, Glycine max
  Clone ID: PAT_MRT3847_119716C.1
gagattaaacaaaacaccacaacatgggaggtcataggcagaagaagtcttcttccggtttcttctctattttcaacattttctcatcaaggaagcccagaggagggtactatgatgcctctgattcggggcgcaaggtctggcctagcgattacgacaaaggtaactggggtgttgctgaacccaatatcgacatgaaagctgaagctttcattgccgagtatcagaaacgtgtttcagaatctgcactc

SEQ ID NO: 21831 - DNA, 249 bp, Glycine max
  unsure (1)..(249): unsure at all n locations
  Clone ID: PAT_MRT3847_119717C.1
gaattcgagctctgtacccggggatcctctagagtcgacctgcagtgaaggaagtcctggatgtcccatgcatttaatctcaacctacaagaaaaaagtaacttgaagagttagtactgagcaacatgtagactagcacagtttgcctattttganattattagagccaacaactagcaatagttntcacccccagaagcacccaaaggtacaaaanaagagtgaatggtgtgagtgtgggtctgagtt

SEQ ID NO: 21832 - DNA, 349 bp, Glycine max
  Clone ID: PAT_MRT3847_119718C.1
ttgagccgtgctcataaaactaccacatattaagacatgccagccagctctaagagtggctggatgaatgacatcaccaaacctggactaatatattagtcatgacactttaatagtacaaggctccaaaaagagtcaaataactctattagctaaagatatgatgatgccgacggaattaatcagtatacagactatgcctgatgctatgtttgaaggcagttctccactggacaagaattgctcactttgttaaataagagaacgaatgcgcctttatccacattgcacacacatatactgatacttcgtatggtagacaacctttttgggacattaatgaccagac

SEQ ID NO: 21833 - DNA, 527 bp, Glycine max
  Clone ID: PAT_MRT3847_119719C.1
acgaggctgatatggctgaagaagttcacagcaaagccaaagagattggcactgtgtgttcaattaagtaccctctttcagggaaagatcttgagcaacatggtctcctgcaagatggatgtactttagatgcttcggctgtgctttatacaagtgtaaaatcagctcgagcttctgttgcaacattacataaaaaagagataggagggggaaacgtttgggcacgccaacttggtggagagggctccaagactcagaaatggaagcttattatcagaaaccttcctttcaaggcaaaagataatgaaataagagatatgttttcatctgcagggtatgtgtgggatgtatttattccacaaaagccagacacaggtctgtctaagggttttgcatttgtaaaattcacctgcaagcaagatgcagaaaaggccattcaaaagctcaatggatcaaagtttgcaaaacgactcatagctgttgattgggctgtttcaaaaaagatatttagcagtgatacaaataat

SEQ ID NO: 21834 - DNA, 169 bp, Glycine max
  unsure (1)..(169): unsure at all n locations
  Clone ID: PAT_MRT3847_11971C.1
agaancacgcancatnattatanccattaagatganaccgtacctaagtgcaatattcntattatnctnatcctaccttcngaganangaggngangctnannattgataggacgacgatnacaangttttggngcanggttacagatgcgacgataaaaaatttccag

SEQ ID NO: 21835 - DNA, 433 bp, Glycine max
  Clone ID: PAT_MRT3847_119720C.1
acccacgcgtccgacagcttgcggtcttattccatcacgcaaaataaatcaacttgccgatcgaagattttataccaaatcgtttgtgctgtcatctcttttttgtgatgagcttcatcactttctaatggtgggacatttaagcctagaagctgagaaaattcaaacccttgcattttttttttatcgcgaaagttgggtcaaaggaagatagtttacttctgtccaaggacattggaatgtcagcattcaaacttcaaagtaatatgagccattccattattcagtgttgaaaagtgtgcgcgctcctagtcttagagaaaatagaatacttatcaagattcgagaaatgctggaaaaaaatatactacccatttaacatattagtttttccttagaggacatattagttatttttaattgaaattcataa

SEQ ID NO: 21836 - DNA, 664 bp, Glycine max
  Clone ID: PAT_MRT3847_119721C.1
gcgaacctttgtcttgatgtgatatcactcactcaggagtcttagctgcttcattaagcagtgacgacaagagggcccctagagttagggaagaggttgtgactgttaaggagaggactaaggacctgtttgggtaagttttctctagaaacacttctaggagaaaaaataagaagaaaaaaaatgaaataaatttctccataggctaaagagagctcccctttagctaatcattaattaattcttagatgttccctcatcttttacagaagttatatgagagagcttctacaaattagctaatggctagctaatggaaaactattttaacctatggagaagttcatctcatctttttcttcctattttcttctcttagaagtgtttctaaataaacttacccaaacaagccctaaggctaatgaggagatgactgcttccttgaagtagcacatgcgcgctgtgatggagcccttgtcggctctggagtgccagttaggcacttgtactaagagtaggaaacctagtcatctgcattatcacttatcaggatcatatggatgcccaattcttggatggtgaagcctgactagggacattatcactttttgtattaattttatcatgtttttgttgtgttttttttttttacaatttaatttat

SEQ ID NO: 21837 - DNA, 382 bp, Glycine max
  Clone ID: PAT_MRT3847_119723C.1
aaggagaggtttcccgtcatcactgtatgacgtcctccttctttgggggggggggggggaaagaaaatgcggaaggagaggaaacagagagtagagagataacgtgtctccgaaaaacgatagggcgatgcggaggcagaggggtgaacctgacgaagcgagttagggtagcgggctggaagtgaagcaagtcggccaatgttcgggcactagtgggcgtagaggggagtgtagtatcatgtgtagcgggtggaatttgaccaaccgtacaaagcctagttgttaagaaaactggtggtcgtacgcgaattggggcgttggtaggcgaggtgatacgcgggagtgtaaatgttaccctaagaatattttggataagaatagt

SEQ ID NO: 21838 - DNA, 523 bp, Glycine max
  Clone ID: PAT_MRT3847_119724C.1
tcgcggacgcgtgggcgcagagagagaaacagaaagagagagagacgttgctttttaacgccggcaaggaattttcggtcactctcgccggaaagcctgttttccgtttacagactgaaatactctgtacggctgaacatctcgaatacacccggtcctgcatttctcggattctggatcgagacttctacaacactcttggtgctgatgctcttcataccttctaattagactaactttgaagcacacccaggaaaaagaaaagtaccttacttgcaaagcgggatgtagagatcggatactgtgtagtctttatcttctgtgaccatttcttatgttagtttactatcatgtgtacgggggctcagtgacgggggcttgaataccctcaccgcaaaatactactttatagtcgtgtaccacaccattccgttgcggtcactcactctcaaatctagccgttaccaaaaaataaccagcttttttttttatgattttggcttgtgcttaatctgaatttggg

SEQ ID NO: 21839 - DNA, 174 bp, Glycine max
  Clone ID: PAT_MRT3847_119725C.1
gggtcttctttaggtagagaccaaaggcaaaaccttgtgtgagagtaagccaaagggccgaaactcctccgcgtcagagaaccaaaagggggaagagaccccggggaaaaaaagggggggggacggggaacctactcaccagtgtggtcccaattttgaaaaaacgtttcccac

SEQ ID NO: 21840 - DNA, 722 bp, Glycine max
  Clone ID: PAT_MRT3847_119726C.1
cccgggtcgacccacgcgtccggctttttttgtgggctaaactccgaccatgcttttggaaatcaatccctgaagctggcaaaatgaactagtgttagtctctactagatggcgttgagattgtcatgagggatctctttacagacattaacaactgttaaaaaaaagagctgacggtttccaaattcgaaactaccccatccttaaggggtatatagtattcgatttaacaaatacttaaattaggaaatgatatatatggtgttatatagaatgtggatatttaacattactttctcttcattatttaaagattggggactgtaagttttgcattaagacagcttctgtgtgcatatgcgcacacgcacatttgagagtgaatcttgtataaagaaagtgtccaaaaacttatgttctgtattagaaaaggaatgtgaagcgacaattctcggctagggcatatatttaggacatttgattgggtaattaagttcaccttcaacacaaaagcatatctaatttcccttttacaatatctacaaccagtcaagtatacgtatgaggacaaggttgataggccatagccaattttatgatcagtttattagccctaaaaacatgatctaatattgggagtgttgtttattagttaatgctttacatgtatgctgacctcgctcattatagcgtgaggccataatttccaatcacatatgcta

SEQ ID NO: 21841 - DNA, 2523 bp, Glycine max
  Clone ID: PAT_MRT3847_119727C.1
cccgcgtccgaagaaaacccccgcagccaacccgacccgtcttctttctttcttggctgaaccataccacacaacacaaaacgcaagtcaattggcgtcggcacgattcagagatttggttcgctgcctgaaacctaatggctccgaaggccaaaccggcgccatcgcagcctgctcctcctcctgccctcgaagatctcttcaccacgctcaaccgccacatccaggcttccgcatacgacaatgccgtcaagctcacagatcagattctcgccattgctcccggcgacgaggacgcgctccgatgcaaggtcgtcgcgctgataaaaaatgaccgcgtcgaggacacactctccgccattcattcctctaagaagcagctcgatgattttcatttcctcaaggcatactgcttatacagacaaaacaagttggatgaagctttggagtctttgaaaagacaagagagcaatgatgaaactatgcttttggaatgtcagatattgtatcgacttgggaaaatggatgcttgcttagatatctaccgcaagttccaaaattccaagattgataacatggaaataaattctgttgctgctctagttatggctggcaggtcatctgaagttcaaggaatgctggattcacttcgggttaaggcaacaagcagctttgaattggcatacaacactgcttgttcattaattgcaaggaatgagtacacagatgcagaacaactcttattgtcaggccgaacaattggtcaagaggtcctgatggaagataacttggctgatgatgagatagaaattgaattgtctcctatagctgtacaattagcctatgttcagcagcttcttgggcgtaagcaagatgctattgaagcttatacagatgtgattaaacgagatatggctgatgaatcatcaattgcggtggctgtgaacaatcttgtttcactgaaaggtccaaaagatgtttctgatagcctaaggaaacttgatcgattaaaagacaaggagaatcaaagcttccgactagctcctggactagacttgaaactttcagcaaaagaaaaggaagcaatatatgcaaatagggttgttttacttcttcatgccaataagaatgagcaggcacgagaacttgtttctgcattaccagacatgtttccagaaagtgtgataccaatatttctgcaagctgccctcttggttagagagaacaaagctggaagggctgaggaaatactagcacagtttgctagtaagttccctgagaagtccaaagttgttcacttagcccgggctcaggtagctgctgctgctggccacccacatattgcagcggattctctggctaagatatcagatatccaacacatgcctgctactgttgccacccttgtgtctttaaaagaacgagctggtgacattgatggcgcagctgctgtgcttgacgctgcaattaaatggtggtccaatgctatgactgaggacaataagctcaatactataacacaagaggctgcttctttcaaactcaggcatgggaaggaagaggatgctgctcaactctatgagcagctcgtcaaaagccagggaagcatagaagcactagttggtctggtaacaacagttgctcgcatggatgttgttaaggcagagctttatgaaaagcagctgaaggctctacctggtttaaagggaattgatgtggacagcttggagcgtacttctggagtgaaacaagttgatgctcctcgtgttggtgtccctgaaacatacgaggaaggaaagaataagacaaaatctaagaaaaagagaaagagaaagccaaggtatcctaaagggtttgaccctgcaaatccaggtcctgccccagatccagaaaggtggcttcccaagagggagagatcaacatataggcccaagaggaaggataaaagagctgctcaagtgagagggtctcagggtgctgtagttagagataagcatgatactggtgcctcatctaacaattcaaatccaaaatcaaaccagggaacctccaaaggagctgcgcagaatgcagtttccgagcaaaccaagccttcatccaagtcaagaaagaaatcgaggaattaaataggatcatggtttttgatgaacttttttatttgacaatttgttaatgctgttttcaatgactaagatgagggtccatacatacactgtggtctgtgggttctaattcaaaaccgtcagttttggttcaaggaatgagtatatctgttagatgcaagcatcaatgtgcaagtttgtcgtgcgtagtttgtttgagtttatgggaatcattgaaatatcacctttctgttgctgaacgcattattttctttgataaaaaaaaaaaaatttccaaaaaaaactcgacactagttctttgtgggggtaaacttgccctattctctaattatatattccaataatgtatcaaagtttgaatacttaaagattgtatattataaaacttataggatgtcgc

SEQ ID NO: 21842 - DNA, 548 bp, Glycine max
  unsure (1)..(548): unsure at all n locations
  Clone ID: PAT_MRT3847_119728C.1
aaaagagctggaaatattaatttatcatggatgaacagcttcttgggcgtaagcaagatgcttttgaagcttatacagacgtgattaaacgagatatggctgatgaatcatcaatcgcgggggcagggaacaatcttgtttcactgaaaggtccaaaagatgtttctgatagcctaaggaaacttgatcgacttaaagacaaggagaatcaaagcttccgactagctcctggactaaacttgaaactttcagcaaaagaaaaggaagcattttttgcaaatagggttgggttacttcttcatgccaataaaattgagcaggtctttcttctttctctggcttgcccttcttgaatcatcaattttgggtatttattctttcttttgaaactgggcatgggagcatactgttgatcattactgtactattaaaatttgnaggcacgagaacttgtttctgcattaccagatatgtttccagaaagtgtgataccgatattgctgcaagctgccctcttggttagagagaacaaagctggaagggctgag

SEQ ID NO: 21843 - DNA, 362 bp, Glycine max
  Clone ID: PAT_MRT3847_119729C.1
ctatgacgcacgctgccctcggacgtaagactcggaatcgcggcatcgtagctacaagtcgtgttccctcagaatacttccctcggcgggagccttgccgatcaattggggaatacagatggtctgactttcatgcctaaaggtaacgaatacactaggtctatcatgaagggcactgaaccacaaccgctcatgcaggaatgagaactgtcagctggaaccacaaaacatccttagatgcagagacggaggtataacaactgcatatgtctttgctcgcgctggacataaagctcactcaataaatgagatgaagatcagtgactatgactcatatgtcgatcctgcaagctaccgcttgc

SEQ ID NO: 21844 - DNA, 193 bp, Glycine max
  Clone ID: PAT_MRT3847_11972C.1
actctatgtgaatatgcagggctgtgtttgctgtgctatccactctcatgtagtgagggtacgatcccgtaccgactggaggaagcgttagccttcacataaattcatgaggcgcggggatgatgcaccaagacctggtcagcccggtcaaggacctcttcctgctgggacagcagcggctcctgtacgaacc

SEQ ID NO: 21845 - DNA, 306 bp, Glycine max
  Clone ID: PAT_MRT3847_119730C.1
cggctggagctcgagccgattcggctcgaggagagactcaagaagaaggtctatgaatttcttttcatggtggatgcaattgatgagtatgctggtgggcaagtgcaaggagtaccatggcaagaaattggtttcagctacaaaggaagggttgaagctagatgattagactgaggaagagaaaaagaataaagaggagatgaagaagttatttgatgaactctgcaaggtcattaaggacattcttggagacaaattggataaagctgattgtctttaacagaattgttgattccccttgctgtt

SEQ ID NO: 21846 - DNA, 892 bp, Glycine max
  Clone ID: PAT_MRT3847_119731C.1
gctctttctttctctctctaatggaagacaataatgaagaatgcatcgcggggctatgtttgggactgggactgggattgggatcaggacatgttccaaagaagaataagcagaaagagaacaaggctgtggtgtgcctagacctagcgtttgagctttgtccaaaaggagaaaaagccgttaataacgtgaatcatcatcatgataaggtagagagaatcagcttggagagaatccacgactaccccaatgaaaagagcactgattctgataacagcaacaacaacggatgcagaaagaaactgaggctttccaaggatcaatcatccatgcttgagaacagcttcaaacagcatagcactcttaatccggtcctcattcatgcacttgctgctcgattgaatttaaagactagacaagttgaagtttggtttcagaacagaagagcaaggaccaaactgaagcagacagaagtggaccgcgagttgttgaaaaaacactgtcaaaatctaagtgatgagaacaaaagattgaagaaggaattgcaggaactacgtgccactaaaggttggaccgtcgccaccatgcattccactatccaaaccggcgaccctgacaacgttgggttcttcctgcgttcgcgagttatgtcctgtcgtttttgctcctgtccctggggggtaggacggcgttgtgtttgcgggtggttttgggttccctctggccggtcccaagaccttactcgtgcatcaagcaccggttacaatacgtaactcaaaaactttctgattataattagaaggaaaaacagtacatattattgtattcctccggtccccacatcacaaacatatagaaaactggggcggcttagatacgtatcgttagtaat

SEQ ID NO: 21847 - DNA, 479 bp, Glycine max
  Clone ID: PAT_MRT3847_119732C.1
tttttgtgaagagggcataatgtggctggtccaaattaattcttcttaaaactacacatcacatactggcataacataattcacatacggatcctaccacatcatgaatacctattaaagatactactcctcttgctcatccctttacttatcataccccagtttgcacgattggattatagcttcattgtctgctattcttgacaagaggagcttccattttgaggggaaaaccttgtctgtcactcctacttggaccatagcctaacaccaacctagatggcgatccatgcaccgcgacctggagctgtcctcttgaacccccactctaactgccctctgccacaacttgtccccttttttgatccgcccatgagcctaccagatggccgactaccgccacaccgagctgaacgacttgtacctgaacctggccagagtcaatgtagaaggctgcatgtgcccatcctctagttcct

SEQ ID NO: 21848 - DNA, 329 bp, Glycine max
  Clone ID: PAT_MRT3847_119733C.1
gcacttgatccaaacttcaataagctctcaatggatcacatattttcagcttacaagcttacggcaactatagcaatccttcttgactatgatggtacactaatgcctcaatcatccaccattgataatattccaagcattaaatccattgaaattcttaatagtttgtgtatagataagaacatcatagttttccttgttagtgctataaacccaaagattcttttccaatggtttttcttccttgttaaaatcttgttaatttcatcttatcatttttactttcttaataattaaactaaaattaatatattttaaacacatttttt

SEQ ID NO: 21849 - DNA, 369 bp, Glycine max
  Clone ID: PAT_MRT3847_119734C.1
gtctaggacgccgtttgttggttcatgagtacctgaaccggggctcccttgaccgaaacctctttctgtggtgaacgctgtttgcaatggaatgagaggctctatgtggcgcttggaacaaggacgctggacgttagttaccttacacagtgggagtgtgtacaaggagattataccatctgtgacctcgcaaccaagagagacattctgcttgcaaggatcaggcctcaggctaagatatacgattagtggactctccgaactattgattgcccaacagtttatttgggtcacaacaatgagaggctcacgtggataccttgctgccgatgggctcagaaactctggcatatcacaaaaaactgatgt

SEQ ID NO: 21850 - DNA, 349 bp, Glycine max
  Clone ID: PAT_MRT3847_119735C.1
cataaagtggcaatgatcacagttactttatgaagggggattatacgccgtggcatgtggaacttctttagggtggagaatgagcacttgaacaacgttggaaactaccgtgccttcaagtcagtccctcatccttttagttactatgatgataaaaatgacaaggatgcttagtggcaccccacttcagtgcatgattacagcagctggaattcatagcaaaaatgtacgtggaattggatatgaaacgtagtatgaaagaaaattcaacatagtatcaaagaagctgggacatatacaggatttaatagatttggcttttacttctttacagagaaatcttgataaa

SEQ ID NO: 21851 - DNA, 256 bp, Glycine max
  Clone ID: PAT_MRT3847_119736C.1
cttccttcttatccggatcatgcagcacagccaatctatctacaaggggaggatgagaatagtgataagcggagtaccacggatctgtattcataactgacagattcttctcttgtagttttacatgaccaccgcgttatccagatgcatatacaagcatcttggcgaagccatcatcctggaatacatatgattggatgactatgttcagaccaaagctgaccaaatgctggattgagatcacaggttgctgtaa

SEQ ID NO: 21852 - DNA, 549 bp, Glycine max
  Clone ID: PAT_MRT3847_119737C.1
tttttttttttttttttttttttttttttttttttttttttttttttttttttttttttttttttttttaaacccctaaaatatttggccaaaaaaaaacggaaaccaggaccgccccccggaatgggggggggggggccggaaattggttcaaaaaaccaaaaggaggagggtgttttcggaaattggttaaaaaaaaccaaaaaaccacgggggggggacccaacaaaggggggctggtttttaaaagcccatggggggacctaaacaaggccatggggggacccagcgcacgggatctaagggttttaggggaccaaaaccccgggcaaaagctttttcccccttaaaccaaaccatcctccttaaaaaggtgggccttttttgttttaaaggccccgaaaattcccccccacacgttaacccccccatttttttaaaaagggaaaaaacccttttggggggggcaacctcccagggaagttggaccagcggcaagtttttaaacagggccaccataaggggctttgggcgcaagtttttcttggg

SEQ ID NO: 21853 - DNA, 307 bp, Glycine max
  Clone ID: PAT_MRT3847_119738C.1
cccacgcgtccgtgtagagcctgagatggaatgtccaagcagagcttgtgcactgcagatgggccagtggttttctttgcatttatgtctgttctcttaataaattgcttagttgcagattttgactgccattgggggtttataacttgaatgaaatttgctctttgtatgttggaaataccctgattgagccaatctgatcagacttgcaacacattcccttttggccacctgtctaaataactaaaagttccgcacccatcgctcttaccaacaatttctcatcctgaatggccaatgggactcc

SEQ ID NO: 21854 - DNA, 479 bp, Glycine max
  Clone ID: PAT_MRT3847_119739C.1
tcgaggctctaacctatcacacaacatctgattctactttgttttttcctcggtcaccattcttgcagttcctgaagaggaacttgaattttatcaccctccaattcacctccctcgcgaatttcaatctcatatcttgtcttccttcctttcatcactactactcaacttaatatataggaagctagctgttagtcctctactgcttgcatcacttcaaattagcaacaaacttaagcccatcaaaattattgcaattacacatatataaagatatatattggaattctccaattgaattcacttcctttagttcttgtatattactcatagacaaaaaaaaaaagaagaatggatcctattacagcacatggtcactctcttccacctcctttccacacagcaagagatctccacctccaccaccaacagcaacaacaccagttccactccttacaagaagacgagcaaagtggaag

SEQ ID NO: 21855 - DNA, 756 bp, Glycine max
  unsure (1)..(756): unsure at all n locations
  Clone ID: PAT_MRT3847_11973C.1
gattttcattcttccacctaaaatgaagtcttatttaaacactttttatttttgtaatggattctttctttttgtgttcttaaaaattggatgcatctgtcatgtaactttacgtagtattgctatgataacgactcttagatagacatttaaactcttacttatctgaacacacatctaacattagttgttggatggttatttatgcctaatattaaatttcttattgttttttgaatttttttattctgaaagtgagatctataaagttcatgcttcctagaaaaagaaatagaaaaggaatggatacattgctttgaatatataggtatgctcaaaagtaataatgaaagggtacgcatccttcgaattttgaggtattggtagaaagcccagttgcaatataggccttgagatagcattatgcttgctatacacttgtatgcagtatgcttgtcacataatagctacaaacttgtacttgaagtcatctatctgcaattatggcctcaagtcatcagtacatggctagctgatttatttgcactattattgtttcaaatttaacttcaactttaaattattggtgatcatatctttattttggatgcagagctgaatatgaccccaaaagtgatttattggatcaggagttcatgctgaaaggaaaatggtatcaacggaaggatgtagagataaaaacagtcggggntgatggttctcaatgcagccattacttgcctatagtcagccctg

SEQ ID NO: 21856 - DNA, 321 bp, Glycine max
  Clone ID: PAT_MRT3847_119740C.1
actacttgaccgcccacgcgaccgcgaccactggcaggggaatccaaagccgagccccgaggcaccggcgccaggaacgtacgaagcgcaccggactccaccgggaaagcatccgcgccaccggacggacggccaccccaacgcaggatgcccaggacacaagagaccggcacactccctcacaggaaagcgcccccaggaccgagtgcgctcgaaacccacaaaagccctcagagacaaacaggcggacggggaaaccgactatcccccagggcaccacccgaagcgaaaaaagaaggcccccctccaaagggggaggag

SEQ ID NO: 21857 - DNA, 1433 bp, Glycine max
  Clone ID: PAT_MRT3847_119741C.1
gtacactgttcctatggctaccaccgaaggttgcttggtcgctagcaccaacagaggctgcaaggcaattcacgtctccgggggagcttcctccatgctcctccgtgacgccatgaccagagcccccgtggttaggttcaactccgccaaacgtgcttctcagcttaagttctacctggaagaccctctcaatttcgattcccttgccgtcgttttcaacaagtcaagcaggtttgcgagattgcaagatattaaggcagcaatagcagggaagaatttgtacattagattcagttgcactacaggggatgccatggggatgaacatggtttccaaaggagtccaaaacgtgcttacttttctccaaagtgattttccagatatggatgttattgggatatctgggaatttctgttcggataagaaggctgcggcagtgaactggattgaggggagagggaaatcggttgtatgcgaggctgtaattaaagaggaggtggttaagaaagtgttgaagaccagcgtggaggctttggttgaacttaacatgttgaaaaatcttactgggtctgctatggctggtgctcttggtggcttcaatgctcatgctagtaacattgtttctgctgtttacttggccactggacaggaccctgctcagaatgtggagagttctcactgcataaccatgatggaagctgtgaatgatggcaaggaccttcacatctctgttactatgccttcccttgaggtgggtacagttggagggggcacacaactggcgtctcaatcagcatgccttaatttactaggagtaaagggtgcgagcaaagagtccccaggtgcaaattctaggttactagcaaccatagtagcaggttcagtccttgcaggggagctctcactcatgtctgcaattgcagcaggccaacttgttaatagccacatgaaatacaacagatctagcaaggatatcaccaaaattggatcctaattaagctagctagctagcttggacaagaacttaaaattgtatcatcaatagtaaaagcaaagaatgcaatgcaattgtataattattagcttcagaaggacaattaattcgtgttggtgggagatgacctgcaattagagtacttcattaatgtctagtcactttatacgagtgttttatctgcttctgatgtgtacagaacatgaataagactttagtttaattttgctactcttctttttttagtttttggtcttttgatgaaaaacttgttttcaccatatgtatgtgttgtgtgtcggtcccatcatcatctaaagcaaatgtatcaaggatgtggtattttagaattgtgttttttctttgtcattatttatgtattctccattattttgtcattttgggaagatgaaaaacatcgcccctcatgggtgatttc

SEQ ID NO: 21858 - DNA, 638 bp, Glycine max
  unsure (1)..(638): unsure at all n locations
  Clone ID: PAT_MRT3847_119742C.1
tgcataactatgatggaagctgtgaatgatggcaaggaccttcacatctctgttactatgccttccattgagggtgggtacagttggaggggggcancacaacttgcgtctcagtcagcatgccttaatttattaggagtaaagggtgcgagcaaagagtccccaggtgcaaattctaggttactagcaaccatagtagcaggttcagtcctagcaggggaactctcactcatgtctgcaattgcagcaggccaacttgttaatagccacatgaaatacaacagatctagcaaggatatcaccaaaattgcctcctagctggacaagaacttcaaatttgtatcgtcaatagtaaaagcaaaggatgcaatgcaattgtataattattagcttcagaaggacaattaattcgtgttggtgggagataaacctgcatttacagtacttcattaataatgtctgtttctgatgtgtacagaacatgaataagacttagttttgttactctttttttttttttttggtcttttgttgaaaaacttgttttcatcacatgtatgtgatgtgtgtcggtctcatcatctaaagcaaatgtatcaaggatgtgatattttagtctcttgtctgttttctttgta

SEQ ID NO: 21859 - DNA, 148 bp, Glycine max
  Clone ID: PAT_MRT3847_119743C.1
aacacccatctatatgaatttggccggaacctacacaattaaagtatagagcgggtgttactcccaaaagaagcttatttataaacccaacgagagccatttagatcctcctcggaccaaaatgggccacaataaaccaacacaaacc

SEQ ID NO: 21860 - DNA, 1627 bp, Glycine max
  Clone ID: PAT_MRT3847_119744C.1
acgaggtgctgctaaaggtgaggggaagttaagaaaaatggaggggttggcatgattttggcaaatggtgtatttgatggtccaggattagtagctgattgccatgtattacctgccacggcagttggcgccaccggcggcgatgagatacggagttacattgggaattcgcggactccggccaccgcgacaatcgtgttcaaggggacaaggctaggggttaggccagcacctgtggtggcatcattttcagcaagagggccaaaccctgagtccccagagattttgaagcctgatgttatagctccaggattgaacattcttgcagcttggcctgatcatgttggaccctctggggtaccctctgatgggcgtaggactgagtttaacatcctctctgggacttcaatggcttgtcctcatgtttctggtttggctgctttgttgaaagcagcacatcctgattggagtcctgctgccattaggtctgctttgatgaccactgcttacactgtggacaacaagggtgatcccatgttggatgagtccactgggaatgtttcatcagtgtttgattatggtgctggccatgttcatccagtgaaggccatgaaccctggattggtttatgatatctccacttctgattatgtgaatttcttgtgcaattcaaattacaccaccaacactatccatgtcattactaggaggaatgctgattgcagtggggctaaaagagcaggacattctgggaacctgaattacccttcattgtctgcagtgtttcagctatatggaaagaagagaatggctacacattttattaggactgtgaccaatgttggggaccctaattcagtgtacaaggtcaccattaagccgccgcgtggaacggtggtcacagtgaagccagacaccttgaatttcaggagggtgggacagaagttgaactttcttgttagggttcagattagggctgttaagctttctcctggaggttctagtgtgaagagtggctccatagtttggtctgatgggaagcacactgtcacaagtcccttggttgtgacaatgcagcagcctctggattagagtttgaggttttgggtgtagaaattttgggtttttatccatcatggatatcttataaaaaagttagctctatatgcttaatagagaatgtgtttgtgaaggtgttctgtttgtaagaactggtggaaggatggtttgttagaaagagcgtgatgccgctctgccaaaagggggaaaagttattatcatagtcaaaggtatggtggaagcatatctttcatgttgtataattaagaatgtttgtagaaaatgttgtgtttagaagaggataagtatatttggaaggttcctttcctttttgagtgatgctgtatgttgaatcttttgaaattgtttaatatcttgttcagtcaaatctttggtaaacccatgtggatagagacggtagtgttttatactgcaagaaacaaagctggttgaagcaaccaaatcctaaaataagtacttgttgctttaaatcggaaagaattgattttgatagaattatttttgaattgtaaaatgattgattgacatatgtatttaaatttatttt

SEQ ID NO: 21861 - DNA, 231 bp, Glycine max
  Clone ID: PAT_MRT3847_119745C.1
agaaggaacaggaggattcaatggatgacccagttgcctctgatgccgacgaggacgacgacgatgctgattcagctggccattacaccgatgctgagtcaaagagcgaagctggaggacacaccacggcacatggtgtgcatgattggctcgatgaagtttgcactgcagctacctagtcagcggatcttatatcccggaaagttatatcattctcagttgtagtgtttc

SEQ ID NO: 21862 - DNA, 287 bp, Glycine max
  Clone ID: PAT_MRT3847_119746C.1
atataatgggcattcatgggagatgatattataccagatgttagaagtattgcttgctccctgatggctcggggccatcaaacctatatctagcactaacattcctgctaggatcgccagggaagcagctgctaacagatccaaatatgctacctgccctaactgtatatcaggagccttcttagttttgcacctttggagcccataaagacactgctccgagagccaggatcccaagtggctattgcgatcccaatcctcatcctgaattaagcagcactaacatt

SEQ ID NO: 21863 - DNA, 332 bp, Glycine max
  unsure (1)..(332): unsure at all n locations
  Clone ID: PAT_MRT3847_119747C.1
nnntcncangtacgcatgcacggagttcngctcganngcnatacnantcactngnntgnattgatccatngctnnatnacatnaatantgtacnttttggnnactantgttggnacnggtgacgntgnncagnnnagcagaagtcncnncgggtcgntcttnngtgnnttgggcttctgcnanngcggtacnnngannagccaaacttntanannccnctanancantcgngacaaaaagcnccattnctntatnggnattgannacannnaccgagannggncncantnnggcggagnttgctnctagtgggctnncancatnccctgncn

SEQ ID NO: 21864 - DNA, 207 bp, Glycine max
  Clone ID: PAT_MRT3847_119748C.1
aaaaatccgaaaatccttttttcggggggggacgctaaaactaccccttgattttttggggggctgaatttcttttgggggccttagttttcccccaatgaatttaaggcggggaaaatggaagttcttgcccaaggggggaaaaaaaatattaaaattttgtactggggcaccccagcccaaattaagggcctccttaattttccc

SEQ ID NO: 21865 - DNA, 556 bp, Glycine max
  Clone ID: PAT_MRT3847_119749C.1
ctcgagccgaatcggctcgagggtgattggagtgtgttatgttttgaaatttggcatctttcaggagatcaggtctattgtaaatcaagttcttaaatcagtgtaattgtggaccaaaaaattgtcaaattataattttttgcataccatgctaatagggagcaacccttgtcatggaaaaaagggaaaaaagaaaataaagtagtccaagatcctgagttatattcatgctgcagtatatacaaatgaagcaccaacaacagaaatagagcaggtgtagtattaagataatggaaaatgagagcctaagctcttaaaaaggatacaaccagagtctcagctcctcagagaaaaatgccttcctatattccccactccaaatattccagaccttgggcttcccatggttacaggatgttaaatatctatgattctatcatattcatattcttgtatgtaaactattgattatgtggacagtctaacaaatcaataactttattgagttgttttatatgatgaggattatatgcctaaagaaattcataaagtttat

SEQ ID NO: 21866 - DNA, 287 bp, Glycine max
  unsure (1)..(287): unsure at all n locations
  Clone ID: PAT_MRT3847_11974C.1
gtntgctagtaattnaataggttgcnaaaattgacctttgccttaatgcccaaggatgcacgttccaaagtcggtcattccttccttcaattaacgctntcttccancgnctaagccagtccttntttctttccatgccgtttccgttacctcttccccttttctnctgcttgncnttactacnaactcttttnatctantttcccncaanttgtggtatgannttgnncataacccattntcaatgccnctttctgcccntacgtnatgganccancaatgcncat

SEQ ID NO: 21867 - DNA, 440 bp, Glycine max
  Clone ID: PAT_MRT3847_119750C.1
gggtaagctttttttttttttttttttttttccttttttgctttttttttttttttttttttttgtccaaccggcggcgacaattaattttttataaaaaggggccttttataaaaaagcccacaaggccactttttttaaaaaattaccctcgaaaaaagggttttccaacaaaggggggcaatttgcaaaaaaaaaaaacccccgggggagggaagccaaaaaacaaaactcgggggggggggggggcaattttaacccaaaacgcggggggacaaacaaattgggaaaaaaaggggttcggcccctgggaaagatgaaccagacccgccccgaattaaaacacttgggctccttgggaagtttggaagatataaaacccagcctgggccagggccaacaaatggggggcccaaggggtaaattggaaaccagggggg

SEQ ID NO: 21868 - DNA, 285 bp, Glycine max
  Clone ID: PAT_MRT3847_119751C.1
acggggggaagcagctaaagaaaaggggcacccctaaaaactaaaaggagatccatatcaagattagatatacacctggaataaatgatgaaactcacacaaaccctcagcaaaacaaaaacacttttataaaaaggagaaaaaaaaaaaaaacaggactgcctcttccctagcccatgaaaccagacataattgctgacaccaagaaagaccccaccaaaaggccaaagccgctggaaacaaaaacagccccactaggccttggtggtgaaaaggagaaggcgg

SEQ ID NO: 21869 - DNA, 568 bp, Glycine max
  Clone ID: PAT_MRT3847_119752C.1
ctaccgatggtacactgactgattatcacctgacccggataccttcgtcatgaaccgggagctggaggtgattcacagcagatgggcaatgcttggtgcccttggctgcaccttcccacagatccttgacaagaatggtgtctaattcggctaggccgagtggttcaatgccggcgcacagatcttctaacagggaggccttgactactagggccacccaaacctgaatcatgctcacagcatccttgctatctgcgctgttcatgttgtgctcatggggattgatgaaggttacacagttggtggaggaccacttgttgaaagactagaccgaatctaccatggttggtgctttgaccctcgtggactggctgatgacgctgatgcattcgctgagtctaacgccaacgactttaggatcagtcgcttggctgtggtctacacgtcaggctgctctagtgaggttattgtcactggtatggggactatccagagacgttacgaccacatctcttgtacatgaagcaacatatgggtggcttatgccgataacgtggctcctggacac

SEQ ID NO: 21870 - DNA, 383 bp, Glycine max
  Clone ID: PAT_MRT3847_119753C.1
cggcccggaatacccgggacttcccacgcgcccgaaataataccccaacaggcggcaaccgcataccggggggatctacagaggcccaacccggcccactgccgaaaagaaacataagcggaatctgagcaacacacataattgccggctaaccccaccacggcagacacaaaacctggactaaacacgagaaaaatccagccccgacagaagaggaaaagacggaagcgattagaaacaaaggcatacctgcagaagccctcgcaacgcgagctcatgaatttgaaaaacatgctgctcatgaaagccacaaggaccaaacccctgctggcgacaagccgtatcccactaaggtaaagaagctcgcaaaaactacgaaccct

SEQ ID NO: 21871 - DNA, 336 bp, Glycine max
  Clone ID: PAT_MRT3847_119754C.1
ggcacaataacactttatactctagttagaaaaaagttataatgtcggaaaccatgaccttcaaattctatgtcaaaacacataattatcttggaaataaaaagaaataaaattgatgtaataaaagatttatagatttaaagcccaaatctacctttgtatcaaaatgcagagttttcacacaatctaagtctgttttgcaaaccaaatacgttttgcaatcaacatccatattgcaaatcaaggaagccatgaatatgtctttttcaccctgtcacaagtccttgcacttaaatcgctttgttggcagaagaactgatctttttcctgcttttg

SEQ ID NO: 21872 - DNA, 684 bp, Glycine max
  Clone ID: PAT_MRT3847_119755C.1
cccacgcgtccgcaaatgcatacaattactacaatgttgtatctgcttctgcgtggttctcactcaagttcttctctttcttcccttcttcctcgatctcaatcttcccaaccggattttgctctgtggggggaggggataccgtcggacaggtcggtgactccgggagctaaaccacttcttgtttgggatttgtagtagatttggcctaatatttgaattagaccgtgtagaattgcatctggcaataggttgttgagtagtacgcataacgcattgttttgtgttacaaatattcttaagcttttctggggaatttttttagtttgggggatacaatacaatttgtagctttggttagtgattctccaagatgtcaaaatttgagggtgttattgtctccgatcaatggcttcaaagccagttcacgcaggttgagcttcgcagcctgaaatccaaatttgtctctttaaagaatcagaatggtaaagttacatttggagatttgccgcctttaatggtgaagctaaatgcattcagagacatgtacgctgaggatgagattggggggatctttgggtgaatcaggcactgattttaccaatgacattgattttgaagccttcttaaaggttagatatttgaatttggtatcttcccttctgtcgtcttctcgcagccgta

SEQ ID NO: 21873 - DNA, 339 bp, Glycine max
  Clone ID: PAT_MRT3847_119756C.1
tttatatttttcttttctttttatatcattaggcggtattttttaaagaatttgggggttccccacaagaatactaaccgctgcggtaaaaaaacatcctctagggggtgggttacgttttaacccaaaatttattaaataagaagcgcccttcaaattgtgcaaaagttttttttcctcttgaagctgtttttggctaaaaccaatgtccttagttacaaaaattgtgtattaaacaagaatccactttccaccaccaaacgaaaaaaaatgccctcatagtttgaatatgatcaaaggaactcattatacaagcatgctataggttcaaacaaccct

SEQ ID NO: 21874 - DNA, 142 bp, Glycine max
  Clone ID: PAT_MRT3847_119757C.1
aattcgccgccgacccacgcatcagcccacgcgtccgctcatgtctctcttcgcttaatgttcatttatcccgctcggtcctcacctttacttcctgggagtgtttgtattagactatgggttcatggaggtaatgatggtt

SEQ ID NO: 21875 - DNA, 309 bp, Glycine max
  Clone ID: PAT_MRT3847_119758C.1
agattttgctctgatttcagttcttgaaactcaccggttgtaatgatcaatgtgttagacccgtagtttatcaagtatagcattagcaggaaaaaaaaaaaaaaaaaaaaaaaaaaaaaaaaaaaaaaaaaaaaaaacgaaacaacccgaaaataaaaaaaaaaaaaaaaacataaaaaattaaatggcggtgcctaccgcgcagacagtttataccctacatgtaatcatagaaatagccctggtagggatacaaattaccaattacttgaattaaatagagaacatacggagcactaagcataaaat

SEQ ID NO: 21876 - DNA, 265 bp, Glycine max
  Clone ID: PAT_MRT3847_119759C.1
accaccacaacagaaacaacaacaagcagcaccttcttcgctccaacgtcggaaccctcagccttagggttttcgcagtgtctggaaactccgcgttcaaaatgaacctcagcgagtacctcgtcactctggagaaacccctcggcatccgattcgcgctaacttctgatggcagaatcatcgtccactctctcaccaaagggggaaatgcggagaggtccaggataattatggtgggcgacacattgaagaaagctggcgattc

SEQ ID NO: 21877 - DNA, 337 bp, Glycine max
  Clone ID: PAT_MRT3847_11975C.1
ggctcctaaattatcgggagtttgtcgccactgctgttcatctggaagagatgcgaaatgaatagcatgttcgcaaagccttccaatcttttgatcagaacaaaagtgagtttattgagacagaggagctgtggaccgccattatctgatgatctcgacacaacaccgtgagaaggggccaacgctcctatagcagatagggacacatacaacgcatggtggagaagttacgacgaatttcctactatcatgaaggctggcacacattggggacaagcatcacaacaggactcaccagagatgattgccagtctcagctcttacagatgacgaggga

SEQ ID NO: 21878 - DNA, 517 bp, Glycine max
  Clone ID: PAT_MRT3847_119760C.1
ccacgcgtccgctaactttctcgaaaactcgcagtgtctactatttctttccacactctagacacgatcaatctgaagacccaaggtgtgatcccatggaaacactactcgcttgagaacaattaacctttctgaagccctaaatttgttaggactcgtaccgagagctaacaaactgatgccagtagctaagataccacaaagacagagcagttcaccgcgagagacccgaatccctttacaaactataatgaagcaaatgccagctcacaggctctgggctcgaagagaagcgcctgagaggcgataatgcgcatgaatttgaagagcgatctgctattccctcaacgggaatagcttcattctgctcgggaccggacgatatactacaggcccagtgtggaccctggaaaaacaggagaccgctgatctggaatagtgcagcatctcgactattgcgagagagacagccgcgacgtagatctagaacgatctacctagattgctcatgagattg

SEQ ID NO: 21879 - DNA, 219 bp, Glycine max
  Clone ID: PAT_MRT3847_119761C.1
cccccgaaaaatgcagttcaataaatgtttatctcaaaaatgccactatctcatttcataaagtaaccctccacatgtttgtcatcccgcttaactccctactggacaataatgatgttatatgatattacataccttctgacaaatgggaaaatcaattcttctaccatccgtcgtagacctgtgaagtcctttttgtaatctgtaacatgtgttccc

SEQ ID NO: 21880 - DNA, 261 bp, Glycine max
  Clone ID: PAT_MRT3847_119762C.1
agccaacacaatttgaggggcattctattgcaaaaggaccctacaagtttggattatctgtacattccttaagggtgggctactaccagtcgtgaggctttggcaacttaaactgtgtcacccgcggctattgccccccccgccctttgtttccatagaacaagcaatgtaataaatttcttcaggcgctggatgaaaagcgtgttctgattgacggtttgccagtggttcaaggcacccaagggggttctcatgcacacc

SEQ ID NO: 21881 - DNA, 430 bp, Glycine max
  Clone ID: PAT_MRT3847_119763C.1
gtttttctttttttttttttttttttttttttttttttttttttttttttttttggggtttttttggtctttcttttttttttttttaaaaaaaaatgcaaaaaagccttaatcataaaaatcttcgcccgaccccgtgaaattattaaaaatagtgggcccggggcccccaaaaagcgccacctctctttggggggggctaaaaataaaaaggcgccccccgggaacgtggcaaaaaaaaaactgcacccgcctcattcttggggcttagggggaaaaaaaacccgttctttttgtcgaaccccccaatgtgggaattgggaaaacccccaaagagaggggaagctccaacacctcgggtggcccacccttctgttcctttgaacatggactaaaaacccccgcccttgaggaggtgcccgaattcaaa

SEQ ID NO: 21882 - DNA, 1442 bp, Glycine max
  Clone ID: PAT_MRT3847_119764C.1
ggctcgagtctttttccacaaaatctcacatcatgaataatagaatgagttgagagtcttgtgttgttcacctgtaacgtaacaagtaagctccagcactgtcttttattctctttcctttgatccatggaagcctgtgatctcatgtgatagttggtgtgctgcataggaaaggctttctaacgtgtcttctaaggtggtttcactgctccacggttgccgaatctagcttcttgcttctttctccttccaagatatcctttgattcaactttggatcttcacctctgatttcctttcatcgttgggtttatacacccttggggtttcccctcctcacccaactgtgtgcaacaaccacaaagtgtataccgtgtgttcttcctagaggggagaaaaaatggccacactttcagatattggggttgcagctggcttaaacattttgagtgcatttattttctttgtggcttttgctattttgagacttcaaccttttaatgatcgggtatacttcccaaaatggtacctgaagggtttaagaacagatcctgtgcacggaggagcgtttgtgcgcaagtttgtcaatttagattggagatcataccttaggtttttgaattggatgccagctgcacttagaatgccggaacccgaactcattgaccatgctgcattgcactctgctgtttacttgaaaatgcctggattggaccgctgtggtttaccttggggaggttaccggttgattttaaaatctttgttccaatagcatttctggcatgggcagttctggttcctgtcaacgccacaagttcccggtctagaaagtgctggtctggacaacataacttcgagtgacattgataaactctcaatttcaaatgtccatagtacatctgaaattaggttttgggcacacatactagttgcttatgcatttacattttggacatgctacattttactaaaggagtatgaaaaagttgcctcaatgagattgcaatttcttgcagcagaaaaacgtcgccctgatcaatttacggctcgtagagttgacttttcaccattttaatgatgagtttttctatggagcacttctttctggtatattgtgctgctttttatctaccgcactcattttttatcagtttttggcagctttgagatgaagcgatgaaacttgatgttttgtttcttgtgttagaggtggtacgctacttggtcatttttctaggcagaccttgatcgtatatatcatgattttctgtacttaacaattctgtagattattggtgaggatttgctggtcataggcaagcacattaataagctagctatgtatatcaatatataagcaaaacaatggagtgatgactgttatgtggcttttggatgtatggaaggcacataaaaagttaaaggactttgaagaagttatat

SEQ ID NO: 21883 - DNA, 155 bp, Glycine max
  Clone ID: PAT_MRT3847_119765C.1
ggggggaaatcaaagttaattttgcttaaacgggggggtgtgtcacaatttcaagatgacaggccttttgccattgcccttaagactttttttttcaccttttttgaaattgcttatgttcgaaggaaaattcagactttcaaataaatttctta

SEQ ID NO: 21884 - DNA, 276 bp, Glycine max
  Clone ID: PAT_MRT3847_119766C.1
tgccacgcctccgtacacgcttccagacgaactgttcgaacatcacacattcgtgcacttcatgcactcaaatccttctctaggaactcttgctacatttatagaagaaagacacaccataagatagacataaccatacccttccaccattattcacagaactgataatgccactgaactcattatatctccattggctctaacatctcaattcccacttactatatgaaccctataataagtcaaacttaagattccccattctgaatttatata

SEQ ID NO: 21885 - DNA, 369 bp, Glycine max
  Clone ID: PAT_MRT3847_119767C.1
tattcttcaatggggtgtacccaacaagattgaagaatatcttccttatccttctcagtaagtgtggggagatcaacaacaacaccaggaaggttaaggaagatattcttcaatggggtgtacccaacaagattgacatgattgctctttcatttgttcgcaaaggctcagatcttgttaatgtccgcaaggttctggggccacatgcaaagactattcagttgatgtctaaggttgagaatcaggaaggagtcctgaattttgacgaaatcctgcgcgagactgatgcattcatggtggcacgaggtgatcttggaatggagatcccagttgaaaagatattcctggcgcagaagatgatgatataca

SEQ ID NO: 21886 - DNA, 418 bp, Glycine max
  unsure (1)..(418): unsure at all n locations
  Clone ID: PAT_MRT3847_119768C.1
cccacgcgtccgcggtctcgtgggcgcaatgtgatttctgcccagaacctccaaagcttcccttctgttggncntnggtgtttttctactcaagaaccttgtagtgatcccttggtggtcaactggtgctgacatcattgttgtgtccactcgtatttattactgattaggacaaggctgccgctcatctgaagggtggtgccaccaaggtttttatttctgcccctaacaaggatgccctaatgttggttgttgttgttaatgagcacgagtacaagccagagcttgatatgattttgtacgcttgctgtacaaccaactgctttggtccactcgcctaggttatgattgacaggcttggccttggtcagggtctcatgaccactgttttttttttcacttgttcccacaagactgt

SEQ ID NO: 21887 - DNA, 102 bp, Glycine max
  Clone ID: PAT_MRT3847_119769C.1
caaagaggaggagagcgagaccagaagagacagcacacatctcattaacctctagctgcgatgaggctatatgggtggtagtgcattctagcagctatctct

SEQ ID NO: 21888 - DNA, 1910 bp, Glycine max
  unsure (1)..(1910): unsure at all n locations
  Clone ID: PAT_MRT3847_11976C.1
gctcgagctttggaatggaatgaaacctcttcttccctctctcctaattctctctcactacatccatcctcgtaaaacaaaacaacctcttacctccgttcaagtttcacacgttcttccactatgtcctggttgagacacctctcctccaagttctcctccaccaccatcacaagcacgcgccgcttcacttccctgtcccggttcagtacctcgaccgctccggctcgtcatgcgggcctggggcccactcaggcccatgagaagcccagggtggtggtgctgggctccggctgggccgggtgccgcctcatgaaggggctcgacactgcaatctacgacgtcgtttgcgtgtcccctcgcaaccacatggtcttcacgcctctcttggcctccacgtgtgtgggaactctcgagttcagaaccgtggccgaacccatcgccaggatccaacccgctatctccagagaacccggttcttatttcttcctcgccaattgtactgccattgatgctgataactatgtggtgcattgtgagtctgtaactgaaggggcacaggcaccagatccttggaggtttacagtctcatacgataagctagtgattgcattaggagcgcaacctaccacttttggaattcacggagtctatgagcatgcaatttttcttcgtgaagtttaccatgcacaggaaattcgtcggaagttgctcctgaacttgatgatgtctgatgttccagggattgaagaagaggaaaaacaaaggctgttacactgtgtggttgtgggaggtggtcccactggagtggaattcagtggtgaacttagtgattttattgtaagagatgtccgtcagagatatgctcatgtgaaggactacatccacgttactttaattgaggccaatgagatattgtcttcctttgatgtccgactcaggcagtatgccaccaatcaattgacaaagtcaggagttcgacttgtccgtggcattgtgaaagatgttgaagagaagaagattatcctaaatgatggtactgaggttccatatgggttgctggtatggtctactggagttggtccatcagctattattcgctctttggatcttcctaaagctcctggtggaaggattggcattgatgagtggcttcgtgttcctacagtagaggatatattctcaataggtgactgcagtggatttgttgaaagtactggaaaaacaccactaccggctttagcccaagtggcagaaaggcaaggtaaatatttaggaatcttactaaacaaaataggtaaagccaatggaggccgtgcaaacagtgcaaaagatgtagactttggggatcagtttgtttacaagcacatgggaagcatggcatctatagggagttacaaggctctagtggacctcagacagaacaaggagggcaaagggttatccctggcaggttttgtcagttggtttatttggcgctcggcatatctaactcgagtcatcagctggaggaacagattctatgtagctatcaactgggctactactcttgtgtttggccgtgatataagcagaatatgaaacctttttaggctataaagcaataagatgattaagtgtatttaattggatttggattgcatttataaacagatggcaacttaaaaaaggttactcggaagttagcttgaaggggaaggcaataaattaaatttggctgcctcggctcttttataatagtgtatacacgttatcattcaatttgtagtatatttgattgtatggctctaaaaaacctattttcatgtttagacggatccccaattgtatgatcaaatttgacaatatattgttaacaagattcttttgggtgcataanntttgcaccnnnnnaatagtacgagacccct

SEQ ID NO: 21889 - DNA, 363 bp, Glycine max
  unsure (1)..(363): unsure at all n locations
  Clone ID: PAT_MRT3847_119770C.1
ttttcgctttgtgagacaagnatcgatcattgatctgaaacgaaaaaattgagtatccttatattactgcctggatttgactaatcggtcattagtcgatccaagtccggcattccattgagcctatatgctagatcagagactcctgttccggggatcaggcctccactggggttgcctgattgtcgcgctcaataatgacgctcgatccaaagagctcactgattaatccccgaaactgaaacaagtgatgatgaatctcatatctatgtgacgtgtaagcggggtaaatagaagctaaccatatctatcactgaacttcctgaaagaacagccattgttgacatatagccattattatca

SEQ ID NO: 21890 - DNA, 238 bp, Glycine max
  Clone ID: PAT_MRT3847_119771C.1
acattcggcccgcctttttttgggttgttttttgtaagtgggttcttttgctgtgtgcattcaggggaataggaaggtgctgtttgcgctgggttccgagtttttgaagctggagatggtgtccgtgcaattcagtgttcgagtctgagattcctgactttgttgttgatgacgaggaggaggaagtgccggaattgtttccgctggggcctgctgaggttgctgttgatggccacgt

SEQ ID NO: 21891 - DNA, 252 bp, Glycine max
  Clone ID: PAT_MRT3847_119772C.1
gagaatcatcaaagcataagccttctataaattggagctagccatccaaagagaaaaccaggccttaatcccataaccattaattcctctagcaacaaccccttatgatattgatatatagccaactgaaataaccctaaacccccataatatagagggttccactttccaccatggattctccaaagaaacctaacaagatcagagatattgtgaggcttcaacagatccttaagaaatggagaagggtag

SEQ ID NO: 21892 - DNA, 976 bp, Glycine max
  Clone ID: PAT_MRT3847_119773C.1
acggctcgagttcatttctaactttctttttctttgcagtttaccttgtagctcatacatatttcagtgtagagactagagacagacagatcctgtgtgcacttgttccgatccaacaccatatcgtatttctctggatgataagcttgagaaggggaaagaaatatcgccatcacttgttagagcaatggaagaatcattcatttcgttgatcatattctgaccggactatgcatcttcacgtttgtgcttagaagaactcgtgacaatacttgaatgcagagataaatatggacagactgtaatccctgttttctgcaaaatggaacccgcagatataggacatcaacttgagagttagataaatgcatttgctgagcatggaagaaaatatgagaccaacgtagtgcaactctggagagatatgcttagaagaaaactgctaaggtatccgggattgtgtcgtcaaatcggttcctctgtctgtcctctcaacaaagctcatcctcaaagccaatgtgtaaggtctgcgacaccacattcgccgcgtcaacccagatgtgtcccgatttcaaattttggttgtgcaccatctcctggttgttaaaatccatagccattcccgaggatcaatcgagtgaactgtactattctgtaggggccattgcagttggaaaccatccatattatgcatattgtagagtggcaagtaaccgaagctggagtttgacttgaatgatggttctaatgtcttcatcttatataaaaagaaagttgtagttatagtcaatggtggaggctacggtggaccacctttatagggttctctaccaaaaaaactaagactattttgtgttaagcacgcatgatatgaatggttattgaccatgtagaacgtgccaacacattctagcattaattttaattagtatgtaacttgcatgttttatttaaaggagaatgctcttgttaaaaa

SEQ ID NO: 21893 - DNA, 499 bp, Glycine max
  Clone ID: PAT_MRT3847_119774C.1
gaccgtccggattccggctcgcccagctattctttaggatgtgcgggtgctttgagcatccataatttgcaaacaaatggttctatggtatcaaatcatgttatcaaccctggtagcaccttgaagtcatcacaaagttgatgtctgccacatgcagttgctgatactaagttagtttctagaactgaagagcattcacattatagtacaaaaggtgggaataatggcatcctatctggcactgctacttcaaattctaaaaatgacctgaaaacatctgttctaaaagtttctggtcaacttataggatcaaggttgtctaaaccctttccatcagctgttgggagttatattactggaaaatacagtgataagggtctttttccatatgatttgattgtcaagctttataattggaacagagaggagttggaaccatttggccttataaactgcggaaacagctgttatgctaatgctgtactccagtgcttggcat

SEQ ID NO: 21894 - DNA, 301 bp, Glycine max
  Clone ID: PAT_MRT3847_119775C.1
caaaaggccagagcacagaaggggtgaattgttggcaaggcaaaagggttggagtgcactcaattggtgatcacacagctattgagctcatcggtagagaccgccctggtcttttgtctgagatatcagcagtccttgccagcctccaattcaatgttatcgcagctgaagtttggactcataacaggagaatggcttgtgccctttatgtcaatgatgctccaaaccaagccatggatgactcaaaaagattgtctattatggaggagcagcttaaccacatcctacgcggttgtgagga

SEQ ID NO: 21895 - DNA, 587 bp, Glycine max
  unsure (1)..(587): unsure at all n locations
  Clone ID: PAT_MRT3847_119776C.1
agtcgcangcacgcgtacgtaagctcggaattcggctcgagcaagaaggggctcaattacctctgtccaagctatntatgtncctgnngntgacttgacagatcctgntnctggtaccanttttgnntcacntggntgncacaacagtgtnatgacgncaggtcntcgagnntggtanctagtnccnctggtngngccccttggagtctacatctcgtatgctttccccccttattttgggtgcggatcactacgaaactgctcgtggtgtacagaaagtgcttcagaactacaagaatcttcaagatatcattgctattttgggaatggatgacctcagtgaagatgataaattgactgttgcccgtgcccgcaagattcagcgactcttaagccagtctttccatgttgctgaacccttccctggtgccccattaaaccctcccgagccggagggagagccgttgccagctccaccgggtgtgctgcatggacaattccgatgccccttccagagcccgccgctctcaatggtaggcggtatttgaggagccattgccaaggcccaatacattgccacggaatct

SEQ ID NO: 21896 - DNA, 408 bp, Glycine max
  Clone ID: PAT_MRT3847_119777C.1
gtacattgattattatttttatttacactcttttttcacatttcctaaaaaaaacacaaaagaaccaaagggaacaaaaaaaaaaaccaaaatacaccgggaaaggggggaaatgagggaacattggcaccaactgggtgccgaagagcacaggcaaaacaaggcccttcccaaccaaatcaggacgctatttggtcccacaaaaacacaaaaagcacgccagaaaacccccacaaaaggtgcacaccagccactttgggatctgatcgccaggccaacaaaaacaatggtatgccccagctgaggcccaccaggaaagtacaaagccgggtttagaacggaaggcaaacagaagctatagaaaaaaagtgcccccaaagtggcaggacggaagcttaagggaatcgt

SEQ ID NO: 21897 - DNA, 487 bp, Glycine max
  Clone ID: PAT_MRT3847_119778C.1
gggtggggtgggagggggacgatgacccatagcagaacacttagggaaacaaagttggggcctaacgtaaaaaggataatatgatagcataacaacggtgatgtattagaataaagcagaaaattggtgaggtattagaaaaagaaaaacggtggccagcaggggtggaaataacaagagataaaagataaggaggcctagtgttgacaagagtagccacatgcatgtagttcgacagtgaggcgttaaaagagacggcctaaaattggcccgtgaggaaatggagcaacggagtaagtagcgcgacgtaccgtaaggagtgcaacgacgcgtatggggtttgatagagtaatggcagtaaacggaaggcagtgcgttgtaaaattcaacgtgcaggcagcctacttgcggtggccttaagagctgtagtagagtaacattggtaagtaggcgagaaacgtcagcattattaggttgtgccccagat

SEQ ID NO: 21898 - DNA, 348 bp, Glycine max
  unsure (1)..(348): unsure at all n locations
  Clone ID: PAT_MRT3847_119779C.1
taccaagtatctatagggaaagctgacgcgcacgcaggtatcggatcctgtatagcgggcgctacccacgcatacctctagggatacatgggtagcagcccggtaatagcaggatcccagagcttaggaggcgctacgcatgtctacgtattaggtgttgtatagtgagcatgtaagataacacatggactagaccgtggtttctgagcgaaatgactggcaaatacacatgtcgacacacaactcaatgccgtaagcataacatgcaaatttcgcagcggtagtgagtgagataaggcccataccgatgcgccgttctcactagcgctcatnctgaatggaaaatgg

SEQ ID NO: 21899 - DNA, 488 bp, Glycine max
  Clone ID: PAT_MRT3847_11977C.1
tcgagtcatcagctgaaggaacagattctatgtagctatcaactgggctactactcttgtgtttggccgtgatataagcagaatatgaaactttttaaggctattagtaaagcaataagatgattaagtgtatttaattggatcattttggattagcatttttcaaaagccagtaaatctcaagagatgaatttcagtaagctgaacagcaaggaactgtactagttcttgatatcaactatgcattcaatctgtctgaaacagtgggaactaaaaaaaggttactcgggagttggcttgaaggggaaggcaataaattaaatttggctgcctctgctcttttataatagtgtatacacgttatcattcaatttgtagtatatttgattgtatggctctaaaaaacctatgtcgtgtttagacggatccccaattgtatggtcaaatttgacaatatattattaaagagattcttttgggtgcctaac

SEQ ID NO: 21900 - DNA, 1285 bp, Glycine max
  Clone ID: PAT_MRT3847_119780C.1
accctcagtttccgccccgtggggataaggcaattacgaaaaacgacggcgtttcgcggtcgtggttttcgtgctttgtgaactctccggtgggtttaggggtctaaaaaggccaatgtggctgctgatgttggtgaccgctattagctgggtggcgtggttcccttatgtgttgttcgacactgattggatggggcgagaggtgtacggtggtaaggtgggggacaaagcatacgattccggagtgcatgtgggggcattggggcttatgctgaactctgtggttttggcattgatgtcgttggcggtggaaccgttgggtcgtttggttgggggagttaagtggctgtgggggatcgttaacgttattctcgccgtttgcatggcaatgacggtgcttatcacaagggctgcagaacatgaacgctaaaacgccgtttccgctgttgggcatccctcagttggtgtccaagcggctgcattgactttcttctccgtccttggtgttcctcttgcgattacttacagcgtcccatttgcactggcatccatatactcctccacttcaggagcaggccaaggtttatctttgggtgtcctcaatgttgcaattgtcgtgccacagatgatagtatcggctataagtggacagtgggataagtggtttggtggtggcaacttgccggcgtttgtgttgggtgccgtggcggctgccgtgagtgccgtgttagcggttgttctgctgccaacaccaaagccagcagatgtggccaaggttacttccgtcactgctgggagtttccattagtatatattatagagttttacatgcatgggacaatattagatggagacttttaatttaaatttggtgagtgtgtattatttaggtattagacccatcaaataactctttagggtgggcttaagttttatccttgttttctctaataaatatatgtacaacaacattaaaaaattataaatccatcaaatgcttcgtattgccattttggcaacccaaaaaaaaaaaaaaaaaaaaaaaaaaaaaagcggccaaaaaagaggaaaaaaggaaaaaaaaaaaaaaagtttattccctttagggagggttaattttagcttggcactggccgtcgttttacaacgtcgtgactgggaaaaccctggcgttacccaatttaatcgccttgcagaacatccccttttcgccagttggcgtattagcgaagaggcccgcaccgatcgcccttcccaacagttgcgcaacctgaatggcgaatgg

SEQ ID NO: 21901 - DNA, 132 bp, Glycine max
  Clone ID: PAT_MRT3847_119781C.1
gtgtgtgtaggccttagacaaacactgagatcatatttaagatgccaaatcacgatttgaaatatcatttccgaaggtagaaaagctacatttgttttatacatataacctgcgttgatatatcctaaggct

SEQ ID NO: 21902 - DNA, 322 bp, Glycine max
  Clone ID: PAT_MRT3847_119782C.1
caagattgcagctcttctaagttcttacacctccattgaacaatggcctacacatcaccatgggtgatcgggactttacttgtttttgacaagcttttaaccgttgatttggacaaaccatttggcaaccttttgcgtaaactgagagctgcaaatccaccaccccatcttgcctaatcatcagagctagatcctatgctcctcaactccgtcagacctaaaaaacactggcttcatccaagaagggtcttgttgccattcacaagtccaaagctacctgcttgcatcttaagccttcaacttgtctagctaacactgaatc

SEQ ID NO: 21903 - DNA, 269 bp, Glycine max
  unsure (1)..(269): unsure at all n locations
  Clone ID: PAT_MRT3847_119783C.1
ggaancggctcgagcaggtggataagtctgcatggatgactgatgaagaatttgcttgttaaacgtttgctggcgtaaatccaaacgggattaagagtcttgaggaggggggaccacgtatcaagctatatacacaagcctacggcgatcatacctgtataataacatatcaacatttggtacctaactggggtgggctcactgtttatcagtctatccatagcaagaagctgttcatcttagatcaccatgactatcttattccatat

SEQ ID NO: 21904 - DNA, 646 bp, Glycine max
  Clone ID: PAT_MRT3847_119784C.1
aaaaatatcttggagtattatatatttcactttcacattcattacaataaaacgctccaccgtactgcatcgttgccctgagactcttatcacaaatcatttcaactttcaaccaagctccggtcccatcgaacggcccagattgaaatcatcaaatcctccgcagcttctccgctttgatcacggggttggcacgtgcaatctcctctcttcccactgtcttgaaatcgaacccgcacgcgtgctcctccgggtacgtgtgggccccgcagaacgtcactccgcacctgcacttgaacccggtcagccccacgcgcttccgacacgtggcacaccggttcggttgcgcaaccgaacctgagtttatggaaatagaactcgacgccaccgcgaccgtgaccgtgacagcaacctcaacctccgccgcagacggcggtggagattccatgagcacatcgaccgccgacggcggaggtgacgtggacgacgacggtttcgccgaggaggcagaagagagcgcggtttcgattgtggatttcgtcgacgcttcttcttgctccttcaaacggatcgcgctgtagcatttggagcagaggttcatcgatgcggtgctaccgaagaagccgcagttgttgacgcagagtcg

SEQ ID NO: 21905 - DNA, 1146 bp, Glycine max
  Clone ID: PAT_MRT3847_119785C.1
tacgcctgacggctgcgaaagacgacagaaggggaggagcaagcttaagctgttttctctgctctttgatcccgtgaaaaaaaaaatggctggagatgaagaaaagcttcgaatagtgtgatgtttccatggctagcctttggtcacatgatcccaaaccttgagctggccaaactcattgctcaaaagggtcaccacgtgagtttcgtatccacccaagaaacatagagcgtcttccaaaaccgtcactaaacacacttgatatcaatttcgtgaaccttccactgcctaaagtccaaaaccttccagaaaacgcagaagccaacactgacatcccctacgacgtctttgaacacctcaaagaagcctacgacgttctccaagaaccgctgaaacgttttctcgaatcttccaaacccgattgagtcttctacgacttcgctcccttttgggtgggttcaatggcttcgaagcttggcatcaaagcgcttttttcagcatttgcactccacccttctcggggttcttagcagggggacccctgtaggtgcaacttgcttgattaaatccttgagtttctccatgccacattccgaaagaatgccaaatctgattggattagttccagtaaatgagtaaccaaaaaactcaccttgacgtggtatgttccacttcccgttgtaatacataattgcatcatgagtaggagtgatggttgattgaagcaggttgagcatagcatccggtgttctaataatggtacataataattctatagggccaacacccgagtattggtcattgcacattaacattgtgtaaacatcatcatcatttttcaattgtaaagattgaaaaaaatattgttgacctgcatctatgaatggctgtcggtagtagatttcatccagtagttgatcgttggttagttgaagggtgttgtccattctacgcttgagtgtatcaaaagaacagttgttaggaactcgcattggtgttggaatgagactttgaaaataaaccctagtttggttgtaactgattgatccatttggaagaatgaaagctaatctagagatagtaatggtctgactgcttgtttcttccgaaaatgacatagtaataagattgaatttggtttgtgtg

SEQ ID NO: 21906 - DNA, 1439 bp, Glycine max
  Clone ID: PAT_MRT3847_119786C.1
gattattatgaatttgtccagtttcgtggtttcttctttttttctctctcacatcctttctgaatctgtttaatcaaatccttccccgttaagattcttctcaccatcgttctttattattatcatcccctcctcttccttccttctcctctcattccatacctcaacaaaacaaggttcagagacttttccgattcctggaagaagagaagagaaaacctaaatcacagatccatggcggaagaacaccgatgtgaacctcccgaaggtcaccgactctgcgtcaacaactgcggcttcttcggtagcaccgccacgatgaacctctgctccaaatgctacagcgcgatccgtttgaaggagcaagaagaagcgtcgacgaaatccacaatcgaaaccgcgctctcttctgcctcctcggcgaaaccgtcgtcgtccacgtcacctccgccgtcggcggtcgatgtgctcatggaatctccaccgccgtctgcggcggaggttgaggttgctgtcacggtcacggtcgcggtggcgtcgagttctatttccataaactcaggttcggttgcgcaaccgaaccggtgtgccacgtgtcggaagcgcgtggggctgaccgggttcaagtgcaggtgcggagtgacgttctgcggggcccacaggtacccggaggagcacgcgtgcgggttcgatttcaagacagtgggaagagaggagattgcacgtgccaacccccgtgatcaaagcggagaagctgcggaggatttgatgatttcaatctgggccgttcgatgggaccggagcttggtgatttaatctcccccgtcctcgtgtatgcgagagaaagaaaaagagagagtgagagggaaaatgcggttattatgtaacattatgattatgatgatctgtgttttaattaagacgaaagcttgaaaagtcggtttgtctggtctagaagggatgatgaaatgaacgagtcatatttatttggctttggtccactgtcgggggtggttgaaagttgaaatgatttgtgataagagtctcagggcaacgatgcagtacggtggagcgttttattgtaatgaatgtgaaagtgaaattattctactccaagatattttttgtttttttttaatcccgcttgaatgatttatatgcctagtatgctctatgacagaggagaagggagtgcgttatgtttccaccaccgacggtgatgaatcaattgttttcaattgcgagagtggggtttccaaacccgtatttcctcaatgttgattatattaattttaattaggtttttctgattcaccaagctgcaaggttcaacattttctacttttgtccaatatttggtgttcttgattggtgggtgtggaatttgatttatgtttggatttgaatatattgaacttgatttggtgttgttaggtttt

SEQ ID NO: 21907 - DNA, 361 bp, Glycine max
  Clone ID: PAT_MRT3847_119787C.1
gtctgcatattcctttttaaagagagaattaaaatttgttaggggaaatttttaaacttaattcaccccccccccccctcttaagttattgaggccacttgtttaacaatccacgtgaggagcatcctcagcaacaacagcgacttcccgttgcctacgtgcggatgttgtgggcctttgccgctgaggagcatcatctgaatcacgattatcttctctctctctagggctcttcctataactctacctaaggtacgacctaaacctctaattctaaccataatctgcaaatttgcacatacataaaaatttatgtcaaaattcaaaacaatacttaaatcaattacaataatatcattcc

SEQ ID NO: 21908 - DNA, 456 bp, Glycine max
  Clone ID: PAT_MRT3847_119788C.1
gctggatatatcgtatcctaaggctcctagcatgtcactccatcattgactgcacagttgttgctgatcagcatgctcttcctatacatttgcagaggctctatggcatgaacgctgtggccaaatactttgcttccattgatgatggtgctggctcactaggcccttttatgatgttggctcaagacaaggctgcacttcaaacttggtcagtttttcccttcttgtactctactctattgtcaggagagtgagaaattatctatgatatgagactattacatgtctatagttctgttgaatttgcatacatataacacatactagaggtttatttcctcttccctttaaattaaaaaacttgactacgtgtcacctgaagagtgacgaagacaataaacaagtaggctgtggcacatatggtgatctcaaaccatacaatactttttccttgac

SEQ ID NO: 21909 - DNA, 527 bp, Glycine max
  unsure (1)..(527): unsure at all n locations
  Clone ID: PAT_MRT3847_119789C.1
cccggccgnggtangcggncgctctaaaactagtggatcccccgggctgcaagaattcggcacgagctccacaaagatctccaccgccactcgctcnagtcgcgcatgagcgacgtcnacatggtcgacagcgagctccaggaccacctcgactacctcgacgactgggccaagcccgagaaggtctggtanntcgctcaccacgctcccgggctcgtcgttcatccagcccgaaccgctcggcgtcgtctgcatcatctcgacgtggaactaccccgntgcaactcgcgctgcaaccactcgtcggggcgttgancgcgggaaactgngtgctgctgcgtctgccnaggcgacgacacngtncgtggcananccnancaacgcgctcatttcgcctcttcgccaaagtacggtggacaaagagattcntgcgactggtgcncggtggtgttggactccaccaaaaacatggctgggagnatcgctttcgaacctcatctttctngcaacaggggggggactttttc

SEQ ID NO: 21910 - DNA, 383 bp, Glycine max
  unsure (1)..(383): unsure at all n locations
  Clone ID: PAT_MRT3847_11978C.1
cggaccggaaccgcccgggccgagccaggcgaccgcataggatcgcgaacaggacagagagggaacggggggggagggaacaaaaggcacccacggaagcaacaaaaangagagggcgacaaagcaaggaccgggacggagaggaaaacccgccgaggccgccccgggaaacgagaagacagaaaggagcgaccgggggaacccacagccaggaaggacagcggaacccgacagcacggagccagagcagaaggcgagggagaaaaacggaacacgaagaagggagggggcgaggaccaaggccggcccagaaccaacaaagcagacaagagcaggagggaaaacaaggagaaagggcagaaaaggaagaccgcggaaacaaa

SEQ ID NO: 21911 - DNA, 275 bp, Glycine max
  unsure (1)..(275): unsure at all n locations
  Clone ID: PAT_MRT3847_119790C.1
gaacaatggnatccacagngtngnagatganggttcaggagggnngggttnggancctgaaagaaggttctagnggagaatngggtttgggtnaggtngtgtactggatgttcagagaccaangtgtgacagacaattgggctntgatcnangntgttgntgaggncaacaaagccaangttcnngttgnagttgttttcaatntnttccacacatttcttggtnnaaaatcnngtcattagggttcatgctcaggggttgngccaattntgnca

SEQ ID NO: 21912 - DNA, 435 bp, Glycine max
  Clone ID: PAT_MRT3847_119791C.1
ggctcgaggtttggagaactctgctagcattttgtttggtctattggcaggagtgttttttgctagagccaaaatccgagagagatctcaatcctgaagaacagtaaatggaatttgatttctgggttcagttggacattcagtccaagtctctgaggtgttgtcaagagatggcatcagctaaactaaactgactctcccattcttcatatatccaacttggtgatggttcatgattccttctccaagggacaatttttggtccatgttcgtttggatcttttgaggaaggggctgcttggattgattgcattggctcagactgggagggaaaattgccactaattttgcatcatgtgacttcattattcccatgtatcatcacattatgatttgcttgatatgaaaattctaattgaaatgaaaaaaataaaa

SEQ ID NO: 21913 - DNA, 572 bp, Glycine max
  Clone ID: PAT_MRT3847_119792C.1
cgagaattgaacctgggacctctcgcaccctaagcgagaataatcataccactaggccaatgcccaccttggttgaagtgaattgttataacattgtgaagcattttctgaatggaatatgtgctacctttgcgaaatttactattgtcattttaaaaatgaataatgcttggtttgtgatagcatcaagcacaacacatctcatctatatctatgtgagatggtaaaattatagtgcatttaggtgagtgtttgcaaaattgattttgaagcaaaatggtttatgttttcattctaaatagaagcaggttagcaataaaactatatatataattttttattcaatgcataggcatctatctaaaatcatattagttgatatttcaatgtgattttggataattcaaagtgaatccgaacatgaacagggtgtacgggtttgtatgatttgaggagagattaactctttggatgacattattcttaaaaaattgatgagttgtgagtcctttatcaccgggtttggatatttattcaacaatgatttatcacatgactacatgagagttcat

SEQ ID NO: 21914 - DNA, 311 bp, Glycine max
  Clone ID: PAT_MRT3847_119793C.1
gacacagtcatgtgcactactggcactgtgtctggcttgcactccaacacagatgcgatcaggcaaaatgacattgaaaactggtggatcgtctataattggagaacgcatagtgcaccttttcaatgttcgtgtgatcccaaatatctaaacatgccaagtgaaagagcgaagaaaagtctaagacaatgtctgggatcagttacacgattgatgagacccttcatgtgtgatgccacaagaaagatgaagagcacacatggaagcaacaccatggtggataattcaaaggggagcatcattgtgaacac

SEQ ID NO: 21915 - DNA, 320 bp, Glycine max
  Clone ID: PAT_MRT3847_119794C.1
ggctcgagcacataaactgcttacatcaaacatattgcttaaaccacccatcgatctttgggtatggggtgcattcaacctaagccatcacctcctgctcccattatgatattcaactaccacacatcagcggctggcataccaatgagcgaagaatgtttcacgcgacatgtggatggccaagccaaagcttcagtacctgcagcgaacgcttgacattctcaagtcaattctcagccaactaactcacagtctgcaaagccagagcaattccaacgatcccagtagaaccgcacctagaatgatctgttgctcagcta

SEQ ID NO: 21916 - DNA, 1209 bp, Glycine max
  Clone ID: PAT_MRT3847_119795C.1
aagggtaagaaaacaattatttagtaatttccttgatttacaaatggtgtagaagtttcatgataattcagataaaaaaaaagtctcaagataaatacttaaaaatcaacgtcactaccatgtattaataatatccacggtttgaatgtgaacaatctttgaccagtcttggcctcctgagttctggcaacgctgcttcagcaacggacaattgccagaaattttaagatgtgaaatggatttgggaagaccctcctctggtaactgttggaggttggggcagtcatcaagattcaatcccttgagagaggagagctgacagagccccttgtattccagtttttctagatttggaaaatcatggatccatagataagtaagagagagtggaagcaaaccttcatcaggaaaagattcctcatctaggttactaatcaacaaccattccagagagggattttctcccaaagcccctttcaaagaggccataagtccgcacgagcatttatagagtcgcatctgttttagatttgatggcaaaccttcttcagggaacgactcaactctaggacaatcatctattcgtagctccttcagagatggctgcatatgcatgcttccaggcagtgattctaattgagggcactttctgattttcagaaatctgagatgattatgggtgtgatcctgtgtaatcatccgtagattacgaaagccactaagatgaagggtcctgagtgttgggaagaaatctagcggaaaagtctttagagagtcacagccataatccctcattctacaattgcaaaatattacaaacatttcagatagcagagggcaacaaaaaatttccagttcttccaaagtatcagacttttccagcaacaatgcttccatgctgtgtccgcccatgctgagctttttcaaagtagcccagtcaagttgcagctttccaaagtcttgtagttctagttctagagccctgggagctgaagcctcaagttgtctgcactttctaattcctagcctccttaaaggaagaagttgctctgggaggtcacctttcagcttgggacatttgcttatatcaagatattgaagacatggaaaagcacctgtcacagcttcacattcccatttttcccatgcttccatatcgtagaacttcaatctttccaacgatggaaataaagaggagcggacgcgtgg

SEQ ID NO: 21917 - DNA, 551 bp, Glycine max
  Clone ID: PAT_MRT3847_119796C.1
cgcacgcgtgcgttccaaccaaaaccatttgttgctggagtcgtggcctaggctctagacgccactgtgtttaaaagagaagctgctattctgaaggacagatgtaaacatccgtggctcaaggacgaccccttcagaggggacacaagagctgatgggtagtatcccctgcattgaaatctaaacacggactgcctgtacgattaattgatctcaaaagcacgatcatgtatattccggtggtctgatcatctccaccactgtctagtattcctacttaatcaacatcttgaaccacgccacatactctattactagtccgtcctacctacccttatagcattttgctgaacagctatccctaaaggtcatgatctgtgtacatacccgatcgaacaggtggattgacctagcacatacgcatagctaaatcctagcccccctgatgaaggtgacattcactatagaaagcccggcacacgcaatgcatgatgcactgcatagactatggaaggacattgcactgcacattactgtaaagattaccccgc

SEQ ID NO: 21918 - DNA, 1643 bp, Glycine max
  Clone ID: PAT_MRT3847_119797C.1
aattcggctggagtgacacgtgtgaaggtacccgacacgtcgaaggcgcgcgtggcagcaacgattgggatgagagagtgcaaagagagatgcttgagggattgttcgtgtgtggcttacacgagtgccaacgagagctctggaagtgggtgtgttacttggcatggaaatatggaagacactaggacttacatgcaagtgggacaaagtttgttcgtgcgagtcgacaagcttgagttagctaaatatgcaaaacatccgtatggttctctaggcaagaaggggatggtagcagttttaaccgctgctattttcttgtttttgttgttggcgatcactttcgtgtattggtttgttaaaacaaggagacaaggaataagaagggatcgcaagtattcctttcgtcttaccttcgacgactcaaccgatctacaagaatttgacactacaaaaaattcagatttaccattctttgaacttagctccatagctgctgcaacagacaatttctctgatgctaacaagcttggccaaggaggttttggttctgtttataagggtctattgattaatggaatggagatagcagtgaagagactgtcaaagtactctggacaaggcatagaagagtttaaaaatgaggttgttttgatctcaaagctccaacacagaaatcttgtgaggatcctaggttgctgcattcaaggagaggagaagatgctaatctatgagtatttgtcaaacaaaagtttggactccttaatttttgatgaatcgaaaaggtcgcaactagactggaaaaaacgatttgatatcatctgtggggttgctagagggatgttatacctccatcaagattcgcgattgagaatcattcatcgagacctaaaagccagcaatgtcttgatggactcttcattgaaccccaaaattgcagattttggtatggctagaatatttggtggggaccaaattgcagcaaacacaaaccgcgttgttggaacctatggctatatgtcaccagaatatgccatggaaggacaattttctgtaaagtctgatgtatacagcttcggagttttacttctagagatcgttacaggcagaaagaatagtggtctatatgaagacattaccgccacaaatttagttggacatatatgggatctatggagagaagggaaaaccatggagattgttgatcaatcattaggagagtcatgctctgaccatgaagtccaaagatgcatccaaattggtcttttatgtgtgcaagattatgctgctgacagaccatctatgtcagcagttgttttcatgttgggtaatgactcaactcttcctgatccaaaacaaccagcatttgtttttaagaaaactaattatgagagttcaaatccttcaaccagtgaaggaatttattcagtaaatgatgtaagtataactatgattgaagctcgttgaaggccaaggcttttggatagtatatgtggaaagcctgtatgctattgtatgatgctatagtatcatgaatccaaacaataataaggtttggcaaaatattgtatatgacatttcgcatattatccagtttagaacgatgatgtaaaaaaaaaaaaaaaaaactcgagactagttctctc

SEQ ID NO: 21919 - DNA, 187 bp, Glycine max
  Clone ID: PAT_MRT3847_119798C.1
caggggactaaattaattgatccatggttatttattttttgtttaacccaacggatttaaaattttttcccacagggaaaggttttgggtccgtttccttgctttttaccctttattaattaaacatggcacaacaccggtggttgtttaatttaaaaccctactaattttcaaggagggtttccct

SEQ ID NO: 21920 - DNA, 304 bp, Glycine max
  Clone ID: PAT_MRT3847_119799C.1
tcgcaacaaacacagccgcggccacgtcaagttcattcgatgctccaactgcagcatatgctgtgctaaggacaaggctatcaccatgctcctggtgacgaacattgttgaacaggctgccaccacagatgtccacgacgcttgtgtctataaacaatacacccttccaaacctctatgtgaagatgcagaccagtgttgactgtactatccactctcatgttgtgagggttagatcccacactgattggatacagcatgagcctccacatccatacatcagacgcacggatgatgcaccaagg

SEQ ID NO: 21921 - DNA, 399 bp, Glycine max
  Clone ID: PAT_MRT3847_11979C.1
ggcagttgcaggcttcctgcacgctactgaaaaagaaataaaatccgtttttatgaatgcgcgaggggaagagagactctctctcctcttcctgggagcgacgtttagagagagaaaggtttaattcgccactcatcgaatggaacctcgggttgcgaacaagttccgtcttggccgcaagattggtagcggatccttcggcgagatctatctcggtacgaatactcagacaaatgaagaggttgcagtttaagctcgaaaatgtcaaaactaagcatcctcaattgttgtacgaatcaaagttgtataaaatactgcaaggaggaactgggatcccaaatgtgagatggtttggagttgaaagagattacaatgtccttgtgatggatttactgggac

SEQ ID NO: 21922 - DNA, 883 bp, Glycine max
  Clone ID: PAT_MRT3847_1197C.1
tatgttataagattatgatgtcctccgccgaaggaaataaaattattaaaataatggcagaatagtttttttgttatttataatctatttcatcattttgcaagtattattttatctatatttattatattttaaaaaatataattattataataaggggatatatgcacgagtcttgcatgggtacaatattgtaggtttttttaattattattttatattctaaattggtaattttttacattctaaatatttaaagcataaaattggtatttaaatttatagtcatttgcttcctgagctatttagagttataaataaaattttaatgacttttatattctatatattcaaattattttatagaatcactgaatcaaaactatgtaaaagcatttaatggcggtactagtcatacgccacctgagtgggcataacagaaatggaaaacaaatttctgtattggttatcaaaattaattttgtagtaataaagtattttatctgttatgtaaaaataaatttaatttataatatttaatgcccgtccatgtgggtaatagtgaatgagtagattaaacttgcagacgtttccttggaaatagaattcagaatccataaagaaacgatattgttgttggcttgaggaatggtgatcgtgaggctgatcttcaagaatggaatcaccgaataatctaagtttgttttggtgtacgccgttgtccctgttgaggggttcaaatgtaatagccatcttttgtatttttacacatgcatagattgacctctatagccatatatctgtttctttgttgtagtcatatttgttcgggacatcacataacatgtcttgattttccttctttttttttttttttacaatt

SEQ ID NO: 21923 - DNA, 110 bp, Glycine max
  Clone ID: PAT_MRT3847_119800C.1
cttgaattttcttcatccttcctctgttctcctagaacttgattacttgaacattcccctatgaccagatgaggtggttccttcctggatttcctgggccaagtcccatt

SEQ ID NO: 21924 - DNA, 343 bp, Glycine max
  Clone ID: PAT_MRT3847_119801C.1
gcagcccatcggtcatgtggtcaatgttcgggagtgggtacgcgtccttgggacacgctcaattcaagtctatgtaatccgtgcatattctccactttccattcggcttcttgaccatgaccacgctgaaaagtcaagtggagtagttgatatctcttatgaaactggcgatcgccaacttgaccacttcttgtcacactgtttggcacctctcttctcttatctttctcttcctttgagtgactagtttgacatcattgcatatagcaagcttatgatagtgaaagctcggattgatgtcgggcatatctgccatggaccatgcgaataagtcagtgtgttc

SEQ ID NO: 21925 - DNA, 404 bp, Glycine max
  Clone ID: PAT_MRT3847_119802C.1
aggacattacctccattgttggcaacgggggaggagtgcaaggcatgcagggggggccaccagtgggcaggaaaaagttggggactttttcttacctgccagaccttgaggaggcacaatgggcaaaggaggtggaatacctttttaggaggggagggattcctggttgggaattcaagtgggggaacggtttctggtcccgggggcccaccaggtaaccaggttactacgagggccgctcctggaccatgtggaagctgcctatgttgggtggcactgaggcttttaaggggtggaaggagcttaaggaggctaaaactgattaccccaacggtttaatccgaataatcggattcgacaacgttggccaggggcagggcataagtttaatggcttccaagccc

SEQ ID NO: 21926 - DNA, 233 bp, Glycine max
  Clone ID: PAT_MRT3847_119803C.1
gcttcttcatcgttgctctcggagctgattgtggcgatctggcagaataacgacacgggtacagacgactgaaggaattgctcctgggctgaactcgtctcgcaggatcatcaatagcatcctcttcgtcatcaggattacgagggacaatatcgtggtcactacgcagagcaccaatctcgcagttcctacaatgcccagtctgtagatgaaggtgaagatcgatggctccc

SEQ ID NO: 21927 - DNA, 1597 bp, Glycine max
  Clone ID: PAT_MRT3847_119804C.1
caaatcctttctactgttacggtcctctcatcttcagagagcacttgccagattcagattagattcatttcatttctcatttacacgaattcggctcgaggtaagtatggtggttatcttagcagcttgagaaaggaatttctaaagaaaaggaaaaaaggtaagctaccaaaggatgcaaggatgatactcatggactggtggaacacacactataggtggccttatcctacggtaattgaaattaatatcatgaagtatatatatagcaatatagcttacgttatattgtgtattgctcattaacagtagtatgtgatctgatttgatgaaatatgccaaattgccaatataaagccaccttgaataatgtatgtccatcagcaatgatttgaaatccatagtttgtaattatggtcaagttgtgtgttatgttaaccctgcacaaaacattctaattgcttaattgcagaaaaattgtaacttggtgaattttgtcgccgatttgtatattgtagtgatatagtaattttcttcttaaggtagtccatgactagaggattcataacttgcatatttgtactgtgttccacatgcctagagaattcctattgttttgtaaaggaaaaaaatgtggttttagtccttatactttccacttaaactttttagttaaacttggctttatcctgataatttcaaagtgatgaatttaatcttccaacttttggaaatacgtgaattcagtccctcttcatgttttaacttgaactttttgaggtggattttagcctctaagaagaagagggactaaatttacatattttctaaagttggagaactaaatcaattgaaaagtatgggaatcaaaaccatgtttgaatgagagtatagagacaaaaaacgaatatttttcccttttttatatatttctagtagaggatgaactctacaaagttttgtatgaacttctgaatttaatatgcgagcatgggtaatttcatttttgttagttgcagaaaatgaggatgaaattgggtaattactaattaagcatgcgtgcttaacttaaatttgcacatgcaacttaccctgagccctggtggccaattaatcaatcaagcacagtttccatttaaatagacattgccaaatcttatataaatgccttgaaactaatcatttgttaggaggaagagaaagtgcagctatcagaaatgaccggacttgatcaaaagcagatcaataattggttcatcaatcaaaggaaacggcattggaaaccaacagaggacatgcgatttgccattatggatggtgtaagtggcagtggcttaggaggacctatgtgatttatttctcgagatggaccgtgttgattcccaatacttgtatcttctgctcgtgtgatgtgtgtataccttctattccgcgagatattaattttttgaacctacatttgtatgctaagtaggtccttcagctatatatatatatatatatgcaagtgtaaaaaactgtagctaatatacgcgacgacagtgataatcgatcaatgttactgaatcattatttcatggcaatacgttatactatt

SEQ ID NO: 21928 - DNA, 706 bp, Glycine max
  Clone ID: PAT_MRT3847_119805C.1
tctcgcttgagagagacagtaactactggtagttagttatgtattagaatctgtaggatggcagctatgtaataggagtatatatctgattgtagattgtgtaattgggcagtgtgaagttatttgtagtttgtggacagagaatacactctgtaggagacttttgtctctgggacagcaagtgtattgctgtatagtgtgtgattccagtgttctatatgatattttattatgttatcaattggtgttctatcaccttgggagattgagcttgaagtgtgcgtaatgcacatacctacctactgtgttgaaatttaactttttattagaagaatgagggtgagactctgccacttgatcattgaggctcgtatcatgacaaaaatcaacattgtgcaaggatgggggaaattaaaatgaaaaactattctgagagaattttattactgaaaaatgatgtgatgaattaactgattagcaatacagatcagatatacattacatttgtagactgataattaaggacagaaataactgtgcaactatgtaacttcttaactacctaacggcagctgtagcaacaacctagctgactcaggacaagtttgatacaacagaataaagtgactaccatatgagtaatactgtctttgacagtgctgtttgcagtaaatgattggttaatgtgttgagatcacaggtacgt

SEQ ID NO: 21929 - DNA, 285 bp, Glycine max
  Clone ID: PAT_MRT3847_119806C.1
acgtgggttaaagaacatgttaacaaccattcctcgtgggggtcattctaacttgtgtggctttaaacacgtgcgacgccctgcggaagtgagaatgacttcgcggacaacgtgggcggcgacgcatctgaggaatccttcttggaggtggagagagaacaaccggagagagagaggataaggagcacctcgtacccaatatatactccggtcttagggcgcaggcactactattgcccacacactgtacaacaatgtgtcttgaagctctctggcctaactggt

SEQ ID NO: 21930 - DNA, 1028 bp, Glycine max
  Clone ID: PAT_MRT3847_119807C.1
tcccgccatggaattgtctatcagctaggcatttctgatcacaataccagttctgctgtttcctggctttcctggttttctgggtttctcgtatctcggattcacgctgtggtttgcttgcctcccggagctcatacccagccaaagagcatatctattatcggctggtccagttccttgtcataattcttgcaatacttgtgatagttggtttgctggaattcactaaattcaaattcatggatattttcactagcctgttggcattcatacccacgggctggggcctgatatcgattgcccaagtattccggccgtttttgcagtccactatcatttgggatggtgttgtttcagtggctcgtatatatgatataatgtttggagtcattatcatgtcccctgtggcactactatcatggttgcctggatttcagaatatgcaaaccagaattcttttcaatgaagcattcagcaggggcctccggatattccagattgttacagggaaaaaatcacagagttgactgtgaattgagggttgacgctgaaatgatatgcacagggccatagaagatgagagattaaactttctgtgttccaaattttcatctgggtatgtgagggctgttgttgattgagttggtgactgtgattatattttgtttgtttggtggatagcggagattattttctgctttcctttgatggtcatatttgttattgtaattagtcaatttctcatgtttttcaaaattagttttgttcggtgatcttctgattatgtgtgctgttacacacccctggcagaaaacggttcattgtcccacagaacgataggcattaccatgattcagttttgttagcttatttccgtagttgaatataaaaaacatgattaattcaaaaaaaaaaaaaaaaaaaacgtttttctcagatttccgatagatataatgcacaggttatacagttctctgtaacttctaaagtttagaatgataggtactaccccggttcaatttaagctg

SEQ ID NO: 21931 - DNA, 431 bp, Glycine max
  Clone ID: PAT_MRT3847_119808C.1
caatgggacgtggtggggtggggacacgtattattttctcaatcttctatctgcacttcccaacccgttctcatattcgtttcctatcgggtttaaattagaaaaatattttttttaaaaaaatattaaaaatttaattttaaaaaaaatatattaattgttaaatatttatttttaactacttatatgtcaataaatttattatagcgtatatctaaaaaaattattaagaaaaaaatattaaattatgtaaaaattttaaaataaaattaacaagtaataaaacttgacctttagattaaattatataaaaattctaaaaattttaagttgcgagacgggtccgaatttaggacagatgtagtaatcccatatccgacttttggttatatgagaaaaacctgaattcaaatccatatccgatcaattca

SEQ ID NO: 21932 - DNA, 348 bp, Glycine max
  Clone ID: PAT_MRT3847_119809C.1
agatcaccgaacaaaactaattttgaaaaacatgagaaattgactaattacaataacaaatatgaccatcaaaggaaagcagaaaataatctccgctatccaccaaacaaacaaaatataatcacagtcaccaactcaatcaacaacagccctcacatacccagatgaaaatttggaacacagaaagtttaatctctcatcttctatggccctgtgcatatcatttcagcgtcaaccctggaagcaagcataatacagaccttattagctaaaatgataaatacacaaaggatgggtagccctaattaattcagtcaagtgaaaggttcaaaggaggcaaaacaccca

SEQ ID NO: 21933 - DNA, 885 bp, Glycine max
  Clone ID: PAT_MRT3847_11980C.1
tctctcctctcctacgagttgctttgaatttgttgaaaaataatgactgctgctggtaataatattaatcaatgatgaccccgaaattcaaacacacttcagtagtagtagtagtagtaagcactttaatttcctattttgcacaaactttcccttcctcttccaagcattggatccattaattcattcctgatccaaaaatctaagtctaatataatctaatttaatctaaatctaacacaatcttaacattctaaaatttcaatgttaatagcaataccttttcattacataggaataggagtgtaggtgatagtaacagtgtaaaacgactcatccattaccgtcgtttgaatctttacgacactcttcacgactcggcgaagcgtagggtgtgtagtacggaggcgaagcacacggcgtcgaaaacggcgtcgtcgtttcgtccagcaacaacaactcctcaaccgcgaccacaacctcgtctaccaccgccacgcgctcattatccaaacacgcacgcgcacttttcttacactcctcggacaaaccgttaccgttatcggactcaacctcttctctctcttcctctttgatcgtgaacagcatcctggagggaccgttaccgttaagacactgctgccacttcatcacgtgctgttcgagttcgagctccacgtcatcatcgttactcggagaagacgaggtagaagaacactggagcgaagcctcttgcggctccacgcgcacacgcggacggagcctctgacggcgttgccacagcacgtacacgatctccgcgaacagggccaccagagtaacggccgttatagtcattatcgcggttccgagcttgctcagacccatcatcttcgtacctaaaag

SEQ ID NO: 21934 - DNA, 1093 bp, Glycine max
  unsure (1)..(1093): unsure at all n locations
  Clone ID: PAT_MRT3847_119810C.1
ctggnngatttacgctgtggntagtttatggcccgaaacaaatatgcagccaaagagcatatctattatcggctggtccagttccttgtcataattcttgcaatacttgtgatagttggtttgctggaattcactaaattcaaattcatggatattttcactagcctgttggcattcatacccacgggctggggcctgatatcgattgcccaagtattccggccgtttttgcagtccactatcatttgggatggtgttgtttcagtggctcgtatatatgatataatgtttggagtcattatcatggcccctgtggcactactatcatggttgcctggatttcagaatatgcaaaccagaattcttttcaatgaagcattcagcaggggccttcggatattccagattgttacagggaaaaaatcacagagttgactgtgaattaaggaggtgctgttgaaaacataactgcagctgatccatttcccatttcacaacggctatatttgtgacccatcccattatatgtcttgttattaaaggttttggcggttcttttatctgattcatgttttctggtgcctttcatgcatacacctgtggctttctgtaacctttgggttgacgctggaatgatatggtagagagggccatagaagactattaaactttctgtgttccaaattttcatctgggtatgtgagggctgttgttgattgagttggtggctgtgattatattttatttgtttggtggataggggagattattttctgcttttcttggatggtcatatttattattgtaagtagtcaattctcatgttttttaaaattagttttggccggtgatcttctgattatttgtgctgttacacacccctggcagaaaacggttcattgtcccacagatgataggcattaccatgattcagttttgttagctcatttccgtagttgaagatatagtgcatgtttaattcagaaaaataatcgtttttctctcagatttccgataggtttaatgcagtttatacagttctctggaacttctgaagtttagaattataggtactagtaccacgattcgattt

SEQ ID NO: 21935 - DNA, 442 bp, Glycine max
  unsure (1)..(442): unsure at all n locations
  Clone ID: PAT_MRT3847_119811C.1
gacacatacaaagcttcagagtctttactctctctgtctctctcgctctctctctctgcgtaaatcgcgtcttccaccaatcagcttgcttgcttgctacctgatctgtcaatactgcgtcgtttaggaccaatccctcaccctccaaggatatggcaatgccggagacaatccctcccactactcccagtgctcaagttgtcggcaatgcctttgtggagcaatattatcacattctgcatcaatccccagaattggtgcacagattttatcaggattcaagtttcttaaccagatcagacagcaatggtgtgatgacaactgttgcaactgtacaagatatccatgaaaagattatttcccttgaatatgaagattatacagcagaaataaaaactgcagacgctcangagtcacataanggaagtgtgatagttttagt

SEQ ID NO: 21936 - DNA, 1091 bp, Glycine max
  Clone ID: PAT_MRT3847_119812C.1
aattcggccgactcttgagcctctccatcagcgggagtcatcgtctctagtgaattgtgatctccgaatccgaacacaacacacagccagagcgtctcaagctttactctctctctctctctctctctctctctctctcttcgtaaatcgcgtcttccaccaatcagatggcaatgccggagacaatccctcccactactcccagtgctcaagttgtcggcaatgcctttgtggagcaatattatcacattctgcatcaatccccagaattggtgcacagattttatcaggattcaagtttcttaaccagatcagacagcaatggtgtgatgacaactgtgacaactgtacaagaaatccatgaaaagattatttccctgaaatatgaagattatacagcagaaataaaaactgcagacgctcaggagtcacataagggaggtgtgatagttttagtaactggatgcttaactgggaaggataatgtgagaaggaagttctcacagacattctttctggctccacaagaaaaaggatattatgtcttaaatgacgtctttaggttcattgaggagaatgacacacctcagataaattcttcctcagtaagtgtcatcaatgaaaatgctgaagcagtgcatgagccagaatcagaggatctgcatgctcccaaacatcttgtggaagacaatgcaactttggcagagggtgagaaccttaataatggtgctgaagtttatcatcctcaggatgaggaagaaggatcagttattgatgaagaggttgctgaaccccctacagatttaagtcagaatgatattgttactgttgatgattcaacttctgctgtcctggatgatgcaccaaggagatcatatgcagccattgtcatgaaaagtcatgtagcatctggtcatgtctatgttcccagccgagctgcaagaatagcatctgctaaatccagtgaacaatggcctactactgccaaatcaacccctgtgcctgaggcattagctcctagtagtgatagtgcacctgggagcagtgatgttcatgaagaagctgaaggtcactccatatacatccggaac

SEQ ID NO: 21937 - DNA, 491 bp, Glycine max
  Clone ID: PAT_MRT3847_119813C.1
ggtttattgctttttttttttttttttttttttttttttttttttttttttttttatggtttttttttgttcccccccccccggaaaaaaaaattttttttccccccaaccaaaaagggaagggggcccaatgtgtttaagcaaaatcctcctaaaaaggggggggggggggggggcctttttggttgggtacccaaactccttgtgggggggggaaaaaaaatgggaattttttgggacaacccggttgaaatttggccccggggcctgggaaccccggccccccattaaaggagccgcgtaccgggaaaatacctggggggggaggcctctttatttcgaggaaaccgggcccacctgacctttggacccagggtgcaacagggccattttttggggtccccccccccccaaaaggggcggagggggaagttccaaaccacaacagccccccttgggggtgggattaccccactagttgaggggggggg

SEQ ID NO: 21938 - DNA, 320 bp, Glycine max
  Clone ID: PAT_MRT3847_119814C.1
ggaattcggcacgagggtttgtgtttgtattttagcttcgtttcatccaactgaatttacttccaattcaatccaacactcacgtttgtccattgaaaagtgtgattctttcatttaatgccatttcaactgatatccaaacacatcataaatgaaatatttcttttttcttttctacaagtgtttatggattttattttatttttttttttttagcctttatcaaacatggaaatactactaattatgtttagcttaggattttatgagctagatttttctttctgtaggggctgaagttgtgaaggatattttactcg

SEQ ID NO: 21939 - DNA, 187 bp, Glycine max
  Clone ID: PAT_MRT3847_119815C.1
cattcctgagcttattgaagggattcacaaagattattccagtagtggttatggtggtgatatggccggcgcagctgctgcaaacagcctaaacaaggaattggggccgaagttgagggaacatatgcagagctgcgctgatcatcctgatgagataagcacgtctaccgaggtcacatctctggtt

SEQ ID NO: 21940 - DNA, 663 bp, Glycine max
  unsure (1)..(663): unsure at all n locations
  Clone ID: PAT_MRT3847_119816C.1
aaaaaaaggtaaaaagcaacagcgggagtcatcgtctctagtgaattgtgatctccgaatccgaacacaacacacaaacaaagcttcagagtctttactctctctctctctctctctctctctctctctcttcgtaaatcgcgtcttccaccaatcaggtacgcacgtgcgtgttctcatcaactcctttcttccccgtagtaattgtcggatactctagtttttcagttatgcttttgttttgcactagcagcttgcttgcttgctacctgatctgtcaatactgcgtcgtttaggaccaatccctcaccctccaaggatatggcaatgccggagacaatccctcccactactcccagtgctcaagttgtcggcaatgcctttgtggagcaatattatcacattctgcatcaatccccagaattggtgcacagattttatcaggattcaagtttcttaaccagatcagacagcaatggtgtgatgacaactgtgacaactgtacaagaaatccatgaaaagattatttccctgaaatatgaagattatacagcagagataaaaactgcagacgctcaggagtcacataagggaggtgtgatagttttagtaactggatgcttnactgngaangataatgtgagagggaattctcacagacat

SEQ ID NO: 21941 - DNA, 1006 bp, Glycine max
  Clone ID: PAT_MRT3847_119817C.1
acgagaggagggcggatttgctggagttcctcctacagtcatggtcaaatgccttgataaaggattgcgtccgattgaagattatcagaatgattcagctaatgttaaaataggatctcttcagatgtttatgaggaatattggaagttgtgaagacatgggccctagtgcttttccagtggaagaggtacacaagatctctgtgctggatatcaggttggtaaatgcagataggcatgcagggaacattttgattgccagggatggtgaagacggtcaaactatcctcattccaattgatcatggctattgcttgcctgagagttttgaagactgcacttttgactggttatactggccacaagctaaggagccttactctcctgacaccattgattacataaaatctctggatgctgaagaagatataaagcttttgaagtttcatggatgggaccttcctcctaaatgtgcccagatccttcgtatatcaaccatgcttcttctgaaaggtgcagagagaggactcactcctttcgccttaggaagcatcatgtgtagagaaacactgaagaaaaaatctgtcattgagcagattgttgaggaagcagaggaagcggcatttcctggagcaagtgaagctgcatttcttgatctggtttcagtggtcatggatagtcatttggatgagctattcccgtgactgaatatacataattcacatacttattactactattttgataatacagtgataaagtggtcgtgcttgtttcgtcttcaaagaggatccatcaaactcgtttagtagactgtggttaaaacttctgtattgaccaatcaagcatttgatgcttgtattgcaaatatcgacttctcttatatatatatctcttataacatggaaatatattgaccaggaatgtttatggagtcctgtgcaataatattcctcttatgttctttggtgaaaataaaattgtttgaataaagttgtccttttcat

SEQ ID NO: 21942 - DNA, 603 bp, Glycine max
  Clone ID: PAT_MRT3847_119818C.1
gttcgttcaatcaacgaagccacattggcattgcccatgcgcttgttctctctgctgatctctgcttcttcttcccactgtttcgattttccacttccaaggataagcatccttatctgttattttttctcgcctgctcaaagtcattttcttagttcctggtggaataagcattttcaactatggccatttacggaaccaccttatccttcaatgtgagttgaccctttacttttaatccaaaatttgtcttatgtaatattttgtgggattgagaagtctcttgcttaggttattggaaaattactatacacaagcatttgtgttgatctacaatatactggataagaattctaggaatgaatctggattcacttcaactacttgaaaaagaattttggaaaataaagaaggctttctcaatggcggcgtgtctgctttgattgatttccaagtctgttagaagctggtatattatattaatatatatgcttataatttccattgcttggttgcaaataagataaccttgaatttagctgaagaaaatcgactttatggattgctgaggagtgaggataaagttatacttttcctctcaat

SEQ ID NO: 21943 - DNA, 416 bp, Glycine max
  Clone ID: PAT_MRT3847_119819C.1
cgacccagcgtctctcaaacaataagttatagtcgacttggtcttatcatccaacctttattcccgggcaaagtctatataagtccggagctttttaaactttttactaattacatacactttgcaattaattttcacatataatttcctttcatttatatatatctattaaatttatttaataactttacttcccttatattcttcattataaatatactattattatcttacatattatcatacttacattaattataatatacatctttcaattaagtttctttctcttatgttcctattttcttataatatttcctaccgtctttttttttatttacttttattatttatttttttcatttaattttttcaaattttttatttattttttttcaatttaaatatcatctttt

SEQ ID NO: 21944 - DNA, 396 bp, Glycine max
  Clone ID: PAT_MRT3847_11981C.1
ctttttcttcatatcttttggaattgcggctgatgacaccattgatgacgcggtcttttcccacgagctggcgcacatggtggagattcaagaaaagattgagttgaaagttgcacaggaggaattacttacagattggtttactgatgggcgtactacagcacctctgacagctgctgtgtgggcttatgggtgtgctttggtgcatgatatggcacaggatacaataccaggtgcttttgcaattgatgttgtgatggcagccataatcactacgattgcctatgggctcacacctgggattaaaggtggtagtttatggggcaccatttctgagaccatttctcagtacactgtttggaatactgtggggacagtgaggacaccagtgaggtc

SEQ ID NO: 21945 - DNA, 535 bp, Glycine max
  Clone ID: PAT_MRT3847_119820C.1
aaaaaaaaaaataaaaaaaaaaaaaaaaaaaaaaaaaaaaaaaaaaaaaaaaaaaaaaagggcggacgatataaaaggaaacaaaattgggcgcccgttcttgcggatccaattttacttccgtcgtcttgcaaacgtttagctattttatagggtctcttaaattcaatcaattggccatccttttacaacccctttactgggaaatccctggggttacccattttattcgctttgtaaaacatccccatttccccacctgtcgtaatttctgaaaaggtccgcaccgatggcctttccaaacacttgcccatcctgattggcataatggaacgcgccttgtaccggccctttaagcgcgacggttgcggtggttacccccatagtgaccgctacttttgccatcgcccttgcccccgctccttcggctttcttcttttcctttttcgccacttttgcgggctttccccgaggatttctaattaggggtttacttttagggttccctttaagtgtttattggggccttgacccc

SEQ ID NO: 21946 - DNA, 437 bp, Glycine max
  unsure (1)..(437): unsure at all n locations
  Clone ID: PAT_MRT3847_119821C.1
gaacnggggnngaggnaaagattgaaaaggactgtctctcatgactttaatgcccacagtcaaatatggcaatggaatattttattgagactaagaactaccagaccaatatatctgaaacactacacgaccacctaccatatctaaatacttatccttcacaaactcagacaaagtttacctcacaaatgcaacttaacagacatgggataaagaatactgcctttcaaggaatcatacatctatgagaccatcaatcccatccacatgatcatatattcgagatgatgaagatgacatggagatccattagatcaagaaccaccaatccaaccaccacgttgtacaggatcaaacaccactcaaatctatcacatcatatggcattttactgatctcaatcccaacacattcttgccatagacaccattgctaca

SEQ ID NO: 21947 - DNA, 617 bp, Glycine max
  Clone ID: PAT_MRT3847_119822C.1
attcgagctcgttacccggggatcctctagagtcgacctgcaggagtatatattgacagcacttgcagataaaacagtcatttttgtgacccatcaagttgaatttcttcccgctgctgatttgattctggtatggctgtacggtttttcttcacattcaagcataatgcagtaagaggccaagacaaatacaatgaggaaacatgtatcaaacaacacataggaatcagtttaaatattgattatatgaaactgaagttcttataaggatatcaacatgagatgttgccagttgtaaaaattataatcaggaggaaaaatagataattgtaggtaatattaaattgatatatgcacaagaaagttcatgaatgaaactcttttcgattcatctttaggttaattgaatccattgccgatacttttatttttatgtttcaataacttctaataaatctgtatttcttattacattgatctgtagtcactttaattggcatttggcttgatctataattatatttaattcttccaaggactaggaagaatcctattcaaatattatgtttaaataacttctaataaaatctgtatttcttactacattgatcctgtag

SEQ ID NO: 21948 - DNA, 842 bp, Glycine max
  unsure (1)..(842): unsure at all n locations
  Clone ID: PAT_MRT3847_119823C.1
ccacgcgtccgcggacgcgtgggcggacgcgtgggcggacgcgtggggtttcgtcttttcgttcttctccatttctctccattcttctgaatcttttgttcctctccattcttctaggttcttttctctcctatcctgctgcgttttcttttttcatttggttggtttggccaaaaaaccgaaaggttgttgcttggtaaaaccgttttctctcccgtgaggaaaacccaaaggctgaaacctttttgcttggtttgatagttctttgcttggtttggccgaaaaatgatttcttggttcttttctatcttatccttctacgtgatgtatttgatttctcctttggtttgtggttctgacggtccaaaaaattgtatttttttgtgtttctcgggcttatttgactggctgactattgttcttcctttgcaacacaaaaacttcaatttttttgcgtcttctgcctttgttttgtgttatgacttttcgtaggacaaaagcttaaatttttttgggtgttctgcctttgtctaatggttcaatatattttttggcatgtttattttttttattaatcactattgtatgcagagaaggtggaaaaacacactaaagttacgatttttatctcaaaaaactccatgagtacaggtggaagaagacactaaagctgcgatttttatctcaaaaactccatgaatacaggttcattttcttgctgtgtctatcanagctttaatttttgtgttcctgagcattctccgacgtgcttcccccgccattttcaatttttatctncaaactccatgaataccagggtcgttttcttactttggttttcc

SEQ ID NO: 21949 - DNA, 313 bp, Glycine max
  Clone ID: PAT_MRT3847_119824C.1
caattcctgaatcgacccacccgtccacacaacatggaatccacaccatcatgtagtaaccctgtctcactatacagtctacattcccgggcgaatgcactaccaacaatagggctttaaattcatgactgcatcaactctacacactatctcactacctctcatcccttataactcttctttccacccatatgccctttactctctctctccaaaacccacttatttcaaccctcatcctatcttccatcacaccatgcacgcctcgcacatccaagattccgatggacggacactagacctcgtacaatcg

SEQ ID NO: 21950 - DNA, 478 bp, Glycine max
  Clone ID: PAT_MRT3847_119825C.1
gatttatagttctgttttaaggcatattgtttcgttcttattcaatgttaattgttagtgagacatcaattttactttataatgtcaaatacatgtatgtattcaaccttgaatgagatttttttatcaccttgttttgttcaaaatgtttaggttgacagctactttcaagcatatcagctaagagaacactgactgatttttatttttatttttattttaatttcgagtcacattttgaaatgcgagacctttgtcacattctctttcaggatccttagcttgtaactcattgctgttatcttttagataaaattcttattactactgtggccttcactctgaactcgtttgtactttggtttgtagatagctttatgtgtctttcttaatcttatgttgtgtgcctttcttattcattcacttactttatggtctttccttgcccccaaatctattattaatcttctcaaatttt

SEQ ID NO: 21951 - DNA, 1390 bp, Glycine max
  Clone ID: PAT_MRT3847_119826C.1
ggctcgatctgctcaaagcctaatcaaatttttctctctttcacttatttattgactccccaaaagcttttcaaacctctctctattcctctctactagtcaccttctccctttcattcactccacttcttaacaccacaaaacagaacaacggcagagcaaacaacaagaaaaatggtgttgctgtccaaagcaacaacagaacaatactcctacatcaagaactacatgccaactgcattctcctcaacaattcccatagtggacctctccaaacctgatgcaaagacccttatagtgaaggcttgtgaggagtttggattcttcaaagtcatcaaccatggtgtccccattgaagctatatcccaattggaatatgaagccttcaaacttcttctctatgccactcaatgagaaaaaagtaggacctcccaatccatttgttgggtgtagcaagaaaattggacacaatggggacgttggttggatggagtaccttcttctcaacaccaagcaatcaagaacacaacttctctgtttatggcaaaaacgctgagaaattcaggtgtctgttgaacagttacatgtcttctgtgaggaagatggcatgtgagattcttgagttgatggcagaagggttgaagattcagcaaaaggatgtgtttagcaagcttctaatggataaacaaagtgactctattttcagggtgaatcattacgctgcttgtcctgaaatgactctgaatgatcagaacttgattgggtttggagaacacacagacccacaaatcatctctctgttaagatccaacaacacttcaggccttcagatttatcttagagatggaaattggatttcagtcccaccagctcgagccgctttttttattaacgttggtgattctcttcaggttatgacaaatggaaggttccgaagtgtgagacacagagtgttggcaaatgggttcaagtccaggctttcaatgatttactttggaggtccacctttgagtgagaaaatagcaccattatcctctctcatgaaaggaaaagaaagtctatataaagagtttacctggtttgagtacaaaaaatcaatctacggttcaagattatctaaaaatagacttgaacattttgaaagaattgcagcttcgtaatatatattctagagaattgtttgagacacttgtcaatacaaaatgggagattacaatatgtagtttgtatactataaatgctttttttttttttttttacttttaaggttatttatcaatcagaaggcttcatagacaggataacatatgtatccattttgtttaaatgctagtgaatgacatctaatgttgttatcaaaaaacatttgttaatggtcaaaaacttgaaa

SEQ ID NO: 21952 - DNA, 140 bp, Glycine max
  Clone ID: PAT_MRT3847_119827C.1
gtggatatgcaggtcaaggttcaagacaatccaaacctggtagtgagtgtttatcagctggattaccatggttaaaatactggtttacactcatgaatgctcggtggaaaaagctgtaaagggacctgtataacgatggc

SEQ ID NO: 21953 - DNA, 142 bp, Glycine max
  Clone ID: PAT_MRT3847_119828C.1
aattcggctcgaggttcagcaatacacatgaagttgaactttccagttgctggtatgattaaatcacgtttaaatcttaccagcaactggaaagatttaaacgtgattgaataatgaatgccaaattcgggtcttggctgac

SEQ ID NO: 21954 - DNA, 1540 bp, Glycine max
  unsure (1)..(1540): unsure at all n locations
  Clone ID: PAT_MRT3847_119829C.1
aaagcnnggagttgggctcgagcagatcttgaagcaagcaaatatcagatggctgagtacaggatctctgtttatggaagaaaacagagtgagtggggtcagctggctagttggtttgttaacaatgctctttatagtaagaatgccgtatggctaatccagttaccacggttatacaatgtgtacaagaatatgggaattgttacctcctttcagaatattctagataatgtgtttattcctctatttgaagtcacagtggatccaaattctcatcctcaattacatttgtttttgaagcaggtggtgggatttgatcttgtagatgatgaaagtaaaccagaaaggcgtccaactaagcacatgcctactccagctgagtggacaaatgaatttaatccagcatactcttattacctttattactgctatgcaaacttgtatacactcaacaagctgcgtgaatctaaaggaatgaccacaataaagttgcggcctcattgtggagaggcaggtgatagtgatcatttggctgctgccttcctcctatgccataacatttctcatgggattaatttgcgtaaaactccagttttgcagtacttgtattatcttgcacaggtcggattagctatgtcaccacttagcaacaattcccttttcttggactataaacgcaatccattaccaatgtttttccagcgaggtctaaatgtctctctctctactgatgatcctttgcaaattcatttgacaaaagagccactgctcgaagaatatagtgttccagcaaaggtatggaagctctctgcctgcgacctatgtgagatagctagaaaatctgtgtaccaatctggattttcacaccaagcaaagtcacactggcttggggataaatatttgttaagaggttctgaaggaaatgatattcacaagacaaatgttcccaatttgaggatttctttccgatacgagacatggaaagaggaaatgcaatttatttacgctggtcaagctgtctttcttgaagatgtagacccatgaagcaagcctagtcaaattcaccattcaccctgtgataaccctaacgttggtactgtactgaatgttcttttgagcagcagcagcagctttgacagtgagaagttattgtaaccttgaagataaccctcggttatatattaacataatcacaaactccaaaatgacatgctaccttaacactcttggttactattagtatttgcaccatataataaattatgtaggaaagcgctggcatttgtaatcgtctttttaggtggtaggaactagggacacttgtgctagccttgttatttattagaagtaattagcagttagtataatacaatttgctcttcatgaatatacagaatggaatatcatcttgaaactatatttaatttgtgtcaatttgatgctaaaggaagcagccactctgctgttcattattgttattttcattagggaagcaaacgagtttgcataaaatatatttagttgacagaccccgttagtt

SEQ ID NO: 21955 - DNA, 437 bp, Glycine max
  Clone ID: PAT_MRT3847_11982C.1
acgtcgtcattgctgctggcgataaaggtgcctacatggcacgcatgcatgcagcagactgaacgtagcaagcaagttttgcagaaacttttcagaaagggtttgcaagtgggagtggcggaataaccttctcccctataaaacgcccttatacgaatgaatggaaacaagctgtacggaacttggtgaattttgcttgctgcttgctacgctttggcttggtggttgttaccttgtgctggtggtgaaaagtttgaagtgggttctcctcttgctttctcaaattttgtaagtagttaatatttgttgtgttaatttattttatgttgcttcttaattaaattatttattttagttttaggtattttgtaagtagttaatatttgttgtgttaatttttttttgtgttacttgataattaaattatttgttttagt

SEQ ID NO: 21956 - DNA, 105 bp, Glycine max
  Clone ID: PAT_MRT3847_119830C.1
cggcgagctctagtacttattccttaagtatgtgcaataattttgcccctatacaagacaaagggttggtctagttaatgtatagtagcaaagtgttacaattca

SEQ ID NO: 21957 - DNA, 250 bp, Glycine max
  Clone ID: PAT_MRT3847_119831C.1
gctggtacggctgctgcgcccgctccggccgtcccgggatgacccacgcgacccacgcctccgttcacgcgtcacggcgacccatcgcggcatgccaaaaacatcgaatacgcatcttgtctgatatcctgactaggaggagagtgctgttgcagcatgggtcggggtgctagcgacttagacttcactggctataagggtgagcgcatcctagacgcgcaggcgctgtggtgctcgttggacccctatg

SEQ ID NO: 21958 - DNA, 994 bp, Glycine max
  Clone ID: PAT_MRT3847_119832C.1
ctttctcggcggcgagagccgcgattcgagccgcaggcgcgccaagttctacgcggatttcgaggagcgtaacttttcaacgcatgccggaaagtgcggtgcatctaatgaatacggtgattatgaccatattaaaggtactacggctgcgacacaacggtgagactgaaggggatgcattttcattgatgggtgttgttgaagagagtagtagtggcttcgattcccgcattgtgaaagagggttgagggagatgatagcgatatctcgaaagtggaaggatgtagaggtcagaatggatctcaccgatgacttgttgcatatggttttttcgtttttggatcatcccaatctctgcaaagctgccagggtttgtaagcagtggcgaggtgccagtgctcatgaagatttctggaaaagtttgaattttgaagatcggaacatatctgtagaacaatttgaggacatgtgtagccgttatcctaatgccacagcagtgagcttatctggttctgctatttacttgcttgtcatgaaggccatctgttcattaagggctgattgttctatgttgagaagactgactatcaatgattctatacttggcagcggtattcaggagatatcagtcaatcacgacaggctgtgtcatctccaattgacaaagtgccgtgtgatgcgtatagcagtcaggtgcccacaacttgaaactatgtcattgaagcgcagtaacatggcacagactgcgctcaattgcccccttttgcaagagcttgatataggctcttgccacaaacttcctgattctgctattcgttcagctgttacatcatgctcgcaattagtttctttggacatgtctaattgttcgagtgttagtgatgaaacattacgagaaatatccatgaattgtgctaaccttagttttcttgatgcatcgtactgccccaacctattcttggagactgttagactgccaatgttaacagttctg

SEQ ID NO: 21959 - DNA, 263 bp, Glycine max
  Clone ID: PAT_MRT3847_119833C.1
tatctcactttcatactcacccttattgcagtatgttgacctcaatggcaccaagttcggcagtgccagatgaacaggcaagcccctgaataatgctgtccaatttctgattgtttgattttcattttgtttttgatagagaggtttcccttctgtattgacatgctaatcctttttttggtaaaaatgagagataatatttataattgatacacttacctaccatcaataaagggtttctgcaattttcactcaaacaaaat

SEQ ID NO: 21960 - DNA, 243 bp, Glycine max
  Clone ID: PAT_MRT3847_119834C.1
agacaacgaaaaaagctcttcttttccgcctgtttccaaggacaaataaacaacctcccccaacacaattaaatcccctcccagagtacaataggggttaagttgtcctcagaaaatgggaaataaagaatgatgcatctgagacagaagaaattttgcagaagtaaaaatatttgaatagatacacaggttccaacaaaatattatctcctaccgggggcggttttgcctttgcttaaacca

SEQ ID NO: 21961 - DNA, 1875 bp, Glycine max
  Clone ID: PAT_MRT3847_119835C.1
ccacgcgtccgaattttgatttagattttccttggcagcaaagccaggcaaccagcagtcgccattattgtgccagtgaagcattcatctttcaatatcgtttagtggatcttcctccaatcaatattcgatctcgatgctggttagggtttacggttttctgaagggaagggaagttttccagaatggggtttctggttccgcttttcttccacatcgtcgctttcatttgcaccattgcagctatcgctttggccgttcttcacatttacaggcaccttctcaattacaccgagcccacttatcagcgttacatcgttcggattattttcatggtcccggtttatgcactaatgtcattcttgtcccttgtaatacctgagagttcaatctattttaattcaatccgggaagtctatgaagcttgggttatttataatttcctatcactgtgtctggaatgggttggtggtcctggagcagttgtactaagtttgactggtcgggttctaaagccatcatggtttctgatgacctgttgcttacctcctctggcgcttgatgggcgttttatacgtaaatgcaagcaagggtgtttgcagtttgtgattttgaagcccattttagttgttgttacacttatactttatgcaaaggggaaatataaggatggaaatttcagtccaaagcaatcatacttgtatcttacaatcatctatacgttctcatacacaatggctctctatgctcttgttttgttttatgtggcatgcaaggatctgcttcaaccattcaatccagtcccaaagtttattataataaaatctgttgtattcctaacttattggcagggtgtcttagttttccttgctgcaaagtcagaatttattaaggatgctgatgaagctgctctacttcaagattttttcatttgcgttgagatgcttgttgctgctgttggccacttttatgcatttccacacaacagaatactctggggctaacataggtggatcccgtggattgacagctagccttgctcatgctttgaagttaaatgacttttaccatgatactgtccaccagtttgcaccaacataccatgattatgttctctacaatcatggtggtgaaggtgaagagggaactaggaagtataggtcaacgaacttttgttccaattggccctgagatggacacggtgagaagaaataagcatttgtttggaaacaagacagatgacgtacaactctcaagttttccttcaaatagtagcagcccctcaaattctgatcccatctctgatgttccacattctggtgcaatgaaatcttccttacttgtggatgtgtcaaattctttgtctgtgccatacgatatgacacttattcgacttggatgcatccagttatcctgaaaaagttcctgcagctgataaagccggttctaggtgacaatgaggaacattcagagccaagttagtgggaaaattgtcattgttgaagagagtagagagtaataggggcatcctacatctttctcttctaggagagaattatgagtaaagtgtggtttgtttgattcccaggaaagcatgtaagcaggtctggctcttgcgtctgtatcaatgttgcttaaaagccctaatctctcccaagtccgtaccaaaccaatcaatcctcttgataattggtcttcagtcttgatactgtaattgtctccactgattgtgaatcgtgtgcacattgtagatacagaaatggttgacttacttcaaacacgacgacaggtcctgagtgtatctggattttaactaaattaactaattgatcggttattttctcattctgtcattgtcaccacttttaccttttt

SEQ ID NO: 21962 - DNA, 514 bp, Glycine max
  unsure (1)..(514): unsure at all n locations
  Clone ID: PAT_MRT3847_119836C.1
aattcggctcgaggctggcgaagaagaaacgacagaaggggtccccacagaagttagtcaaaatgaagcacatgcttggggtactgtacaaaactggtaaagccaaaacattggggcaaacaaaccacaaccaagccattgtgttgagttgtgcattaaataatgcgtatttactattctgtttctaacaccttctacgcatcaaaagggctttagttaacagataattacaaggttaagcagctacttttttggcacgtaaaaaggaaattaatcaacaaggctttgaattgctcttggatatggtctactcagacatcctaagtagatttaggtaacagaaaccatgagagacaggttcaacttacctatcattagacagcttctaataaaatggctttatataaaaccggcaattttcgaaattaggagtagtagcgataattgaggaaatcctaagactaagtangaagttctgtatgaattttcctattgccatgtgacttgatgtgcg

SEQ ID NO: 21963 - DNA, 682 bp, Glycine max
  Clone ID: PAT_MRT3847_119837C.1
taagcaatacaattttatttccgatactaaccatgaatgcctcaattggaataataaaaacgtatttcctattttgtgctcccaaatcatagctaaggaataaaaaaaaacacttaacaaaaatgctatgcttctatggtaaactttacaacaaatgaaatgtgcaaatgtttggcaacgaatcccgtcactaattacaataccaaaaacatttcttattttctaaattagccactagggagcaagattcaatcatgtgtctccacaatacttggcaacgaataaaaaacatcattccagagttttcttgccatcagatatctgatggtgttcccgtcacatttagatatccctcggtggccattcatacttcacctttttattgtggcaacatgtgggcacttaccaagagtattccacagaatgtagtccccagaagtaacctgagttgaaaactccataggtgcttttacagctggatagatgctcacagatttaggatcaacggcaactccagatactgatgccccaacaatcttgaacgatactttagcataattgtatgcctgccagcaaaatggctcctctaaatcgactggaggaagacccttgttcattttccccatcaaatgttcttcattaaccatggtactagcattttctgcctcattatcactatccc

SEQ ID NO: 21964 - DNA, 710 bp, Glycine max
  Clone ID: PAT_MRT3847_119838C.1
aaccatgaatgcctcaattggaataataaaaacgtatttcctattttgtgctcccaaatcatagctaaggaataaaaaaaaacacttaacaaaaatgctatgcttctatggtaaactttacaacaaatgaaatgtgcaaatgtttggcaacgaatcccgtcactaattacaataccaaaaacatttcttattttctaaattagccactagggagcaagattcaatcatgtgtctccacaatacttggcaacgaataaaaaacatcattccagagttttcttgccatcagatatctgatggtgttcccgtcacatttagatatccctcgggggccattcatacttcacctttttattgtggcaacatgtgggcacttaccaagagtattccacagaatgtagtccccagaagtaacctggttatgaccagaaataataaaagacatgaaaagatatcattgacactgaaactgaaaggagcagaaaattttaggaaatttgtcttattcagtagggttcgcttgaagtatgaatcactgatcctacacaaacaaatacctgagttgaaaactccataggtgcttttacagctggatagatgctcacagatttaggatcaacggcaactccagatactgatgccccaacaatcttgaacgatactttagcataattgtatgcctgccagcaaaatggctcctctaaatcgac

SEQ ID NO: 21965 - DNA, 1068 bp, Glycine max
  Clone ID: PAT_MRT3847_119839C.1
ccccctccttgctactttctcgtcagtctcgccctcgtcgtctgcgcctccccatttttcttctccttcaattcttcaccatggatcgtgtcagccataggggttcacggtttcttctcgatgcgtctccgctgttagagttggagttccaacctaccatggatcctgtcatcaattgggtttcaaactttcttcacagtcttcagcattgcatggatcctgtcatcaactgggttttaaactttcttcacagtcttcagcattgcatggatcctgtcatcaactggctcatgtccctgataagttgcttagcgacaaagattaatcaaatacttgaaaaattcactgggcatcaatttaacgttaagactgacgcttgtgatgaaatttcattgggtggagaatggttgttgtatgttgctattgcagttgttgtagcactggcagctattcctgttgtctggttgctttggaaggtggtttttggtgttgtttggttgctttggaagctgatttctggtgttgttttgttgctatggaacgtgatttctatttttgtattgggtctttggaacgtgatgaggaagattttctgttgttgttgtgaaagagggaagacaatgaaggctccagggaggaatattcgcatttatagagatgattttgaacgtagccctaagaactacttccgtaacttgcgcagagaccaacgtaactggcgcaataatcaacctcatacgattttggtttgaaatctcaaacgtgtaaatccacgtcaaactagaagcacctttcagttgcttctggtgaaactcatgaaaaaatgaacgtcgtgctgttttattatattaaagcttgtctgtgtttgtgtatatggtgcatgtttgacgtgatttcggtagatatggtttgaacaaatggttacaaagattctgttatttgtgttgcactacatggatgagattgaagtgtagtttgattatgaatgcaacagtccatgttatttgatgagaattgatcaaaaaaaaaaaaagagacattgggtgaatggattttactattggaaaa

SEQ ID NO: 21966 - DNA, 566 bp, Glycine max
  Clone ID: PAT_MRT3847_11983C.1
agacaaaaaggcccagttacatatgactcaactggatctaaagatgctatgttgtcaagttctaatttcttctggtcaagtggaactgcaaagcgaggtgctgtctcaggcaaccgtgatgtagttggcagtgagaccgaggcctctcgttctctgatcctggattcaagtcagggagcacttcgtaaaatccctgcccctggtgctcagagaagttcagctatcatgtcatctgagcacaaccgaacatcctctggcagaaacacatccaacataaagaatttggagacaactcttaggggtattgagagcctgcatttcaatgacgagagggtacattattagcagctaccactctcaaattctcgatcacctttcttctttgtaaattctaaaaggcttatactctttatgcattgtgttgaagaaaagctgcaaacaagttgggaattatccctcataagtatacaataaagaatgtctataggcagcttcctaactaaactggccttgtaaaaggcttctgttcatacagtgttatactgacaaatgtttttcttcacctt

SEQ ID NO: 21967 - DNA, 463 bp, Glycine max
  Clone ID: PAT_MRT3847_119840C.1
cttcttcttcttcttcagggactcaccatttcttctccttcaattcttcaccatggatcgtgtcagccataggggttcacggtttcttctcgatgcgtctccgctgttagagttcgagttccaacctaccatggatcctgtcatcaattgggtttcaaactttcttcacagtcttcagcattgcatggatcctgtcatcaaatggttcatgtccctgataagttgcttagcggcaaagattaatcaaatacttgaaaaattcactgggcatcaatttaacgttaagactgacgcttgtgatgaaatttcattgggtggagaatggttgttgtatgttgctattgctgttgttgtagcactggcagctattcctgttgtctggttgctttggaaggtggtttttggtgttgtttggttgctttggaagctgatttctggtgttggtttgttgctatggaacgtg

SEQ ID NO: 21968 - DNA, 134 bp, Glycine max
  Clone ID: PAT_MRT3847_119841C.1
ctctctcgtgcgttcgatgcgtagtgacggagcgagtgcccgtggcatatggagagctgtcatggttggaggctacaaactaatgggcgttgagaatgaggttggatgcagaggaactctattgcttgccatga

SEQ ID NO: 21969 - DNA, 248 bp, Glycine max
  Clone ID: PAT_MRT3847_119842C.1
gttcatgtatgtatgcaatggtgcatgatatttcattgtctacagtaccaggtgattacggcattggtgttaagtagacatctatatacactgtgatggcatatcgcctcaatcctggtatagcagagcaccgctcataggagcaccatctcattagcgcatgggtgactcaaactggacggaacagaagggccgcagaccgaacaccaatgattgatggttctagctagcaacgctttagttaggtc

SEQ ID NO: 21970 - DNA, 121 bp, Glycine max
  Clone ID: PAT_MRT3847_119843C.1
aaattgccagatcagaactcctggcgttaagccagaacattggtgaataccggttttggtgtcaggatgcaaatgaccatgtgtggtattggccacaaacaacatattcatgtgagttgcg

SEQ ID NO: 21971 - DNA, 333 bp, Glycine max
  Clone ID: PAT_MRT3847_119844C.1
agatcgcgtgggccgcccttttttttttttttttggctggggttccttttttctctccccctccttttttgttttctttgggggaacaaaaaaaaggggtctatttaccgggaatccccaaacaccggcgttcccaaggaaaactgcgccgaaaattttctgccccgccccaacaataccagtttcctaagccccgcaaaaacctcctaccgggtttttccaaacccctcccccacggaagccgtggctaaaaatttgcccccccaaaggattaaatccctcccccccccccccgtccattaatgtaggctaaaaggcaaaaaaaaaaaacca

SEQ ID NO: 21972 - DNA, 309 bp, Glycine max
  Clone ID: PAT_MRT3847_119845C.1
ggggaggcatgtattttcaactttgataaccaggcgcataagctgtgattgtccacaacatgtggatagcaggaaaaacgagtgcgttcgttatcaacgacccatcctttgtccgctatcactcccatgactcttcttcttattgtgactcgacactcttcaaccactcaacaaagtgcatggtttttagtggttaaaccatggcgttcacatactctatgcatttatctcacacccttctttcacgtgctgggttccttcataggaggtcctctgaccgcgtcctactctacatttgcatcattctgt

SEQ ID NO: 21973 - DNA, 357 bp, Glycine max
  Clone ID: PAT_MRT3847_119846C.1
aaatatatcaatatacatggggggctcctattttgtattacatactgagggtagatcaaaatattgtaatgttcaaaggccagtgtccatagacaaaatgcaataccagttgtcaataaatgcctgaatgtctgcccataaaatacaacctgttatcatataaaacccttcgagacagcacccctggaatttataatttttataacataatctaaaacttgcgtcttacagacaccatttcaaacattccctggactgatgaaacaaaattatatatattattcaaacctctaggtgagaacccttactaactcaccaatatggcaaggcagattttcctggggaaatatctctaat

SEQ ID NO: 21974 - DNA, 243 bp, Glycine max
  Clone ID: PAT_MRT3847_119847C.1
atggaggaccagtttatcggcaattgaaagcaagattccattttttaatttaaaaaataccaatcccgaggaattacttataaaaaaattttataaagaaggatgttcagacatggcatccctgctttgcttaaagacaacacatgcaccaagggaagggacataagctcctcgaattaaggccttagataaccgctttcaaaattgtcaaatgggaaaggactaggttgttgacttccaaat

SEQ ID NO: 21975 - DNA, 778 bp, Glycine max
  Clone ID: PAT_MRT3847_119848C.1
agcaggaatttctccagagagaagattgtgagagagaaacaaggcctgcaagcttttcaactcagtgattttcacaggtatttcaccagagaactgattgtgagaaaggtcaagaagaacaaggccaagtttgtcagtagtctcagcaattttactgggaataggaccagataaagcattattactcaagtccaaaacaagaagtttctctgagaacacaagcctaggatatattctatacttcaaatggttccctgaaaggttcaaatgagtcaaagcttgaaaagaagcaatacaagcaggcaatccccccgcaataagaatttgttgggacaaattcaacacagttagagactgaactgaagctgcaaagcaaggcaaagtaccagcaaactgattggaagcaagattgagcaaaaccaaaggctgttgaaaatcaaccaaattaccaaacaagagattgttctcaaggtccaaatacttgagggacttcatgtaaagcaagctctcaggtatgccaccactgaatgaacagaaaccaagatgtaacttttccagatttgcagagaagttaccaatccaagcaggaagtggaccccccaaaccagggttcccactgaaaacaagctcagtgaggtgcctgagcctcatgaaagagtctggtattccaccatgaaacctgttgtggctgagatcaatggctcttaggttaagcaagttttcaaaacactcaagaagtggggctgtgaaattgttgtgtgacaaccccaacttgttg

SEQ ID NO: 21976 - DNA, 1049 bp, Glycine max
  Clone ID: PAT_MRT3847_119849C.1
ccacgcgtccggcctgtcaaggtttactgatgtgctgagactgattgatcaatcatcattaaaacctaatgctatgttgcttgatgaagatgatgccagtagcttaacccggatagcacttggcattgattgctttctggctttaaagatgacagtattgctgccttacaaaacattacagttgcagtgcctgggtgcagttgaggatagcacaagacaaggcatccctcaaacaaggagcaaagattatgagttattaattctcattttatcctctgggattctcacttctatcatgattgactccacctatggtactattttctcttatatctgctatttggtgggaaacttatgcaatcaatgtcaacaagctctggtgtcaggtagaggaactaacaacaatgaagatcatgagaatcagttgcttcttttcacaaggatccttttcccaaatttcatatcagaacttgttaaggctgatcaacatattctagccggatttcttgtcacaaaatttatgcacagtaatgaatcactcagtctcgttaacattgccggggccagtcttaataggtatctggaaatgcagctgcacatactacaggtcaaggagttccctgttgagaagacatgtaaaacattgaagaatactgttggcaggatgagaggccaacttagcagtttgattcaatccatattgccattgctttctgctagtgttagttgataatcgtttcaatttgattacccccgctactccttttatccatttcagctgattgtttgttttagggtagcattttgtatcaattagcatccaagggtttttggtgattactatttacgtagagatattttctattgaatagagataaattgcttggccaaaggaaaggctagttagagatttaaaaattcgttcatatatgtatgtgtattcgaagttgtggctttgagacttgtacttatctcaacaaagaactggaaacttgtgtattggttaataattaattaaatgtcttccgagttgactttgagaacagatt

SEQ ID NO: 21977 - DNA, 565 bp, Glycine max
  Clone ID: PAT_MRT3847_11984C.1
ctcaaatattatctatcaaaatcagaacggattcagaatacccacttatatgagttatttgggtctaaactatggttcaatcggctcgaggcttgctgcacgctactgaaaaagaaagaaagaaaatccgtttggatgaatgcgcgagaggaatcaacccaatcaagagaaactctctctcccttctacacttttaagaagaaaaagtgtgtctgatttccaattttgccctcaccttttcgtgatttctcatttatatcctgctccttttcgtttccatttctttgctgctacttccaactccttccattctgaactttgaatctctagggtttaattccccactcatcgaatggaacctcgggttgccaacaagttccgtcttggccgcaagattggtagcggatccttcggcgagatctatctcggtacgaatacccagacaaatgaagaggttgcaattaagctcgaaaatgtcaaaaccaagcatcctcaattgttgtacgaatcaaagttgtataaaatactgcaaggaggaacctgggattccaaatgtgagatggtt

SEQ ID NO: 21978 - DNA, 1069 bp, Glycine max
  Clone ID: PAT_MRT3847_119850C.1
taacgtggttggacaaacaacaagtcggttctgttttgtttgtttcttttgggagtggtggaacactctcacaagagcaaataactgagcttgcttgtggtttggacttgagtaaccataagttcttatgggctgtgagagcaccaagtaatgtagccaatgctacatatattggtgaacaaaaacacgttgacccgttagagttcatgccatgtgggtttttggagagaaccaaagagaaaggcatggtttttccttcatgggcaccccaaattcaaatccttagccacagttcagttggagggttcttgactcactgtggttggaattcgatccttgagagtgtgctaaagggtgtgccattcatcacatggccactgtttgcggagcagaaaatgaatgcgattttgctatgtgagtgtctcaaagtgggagtgaggccaagagttggtgaaaatggtttggtggaaagggctgaaattgtgacggtgataaagtgtctaatggaagaggaagaaaaggtaagaaaatgcgtgaaagaatgaatgagttaaaagaagctgctattaatgctatcaaacaagatggggcttctacaaggaccctttctcagttagcactgaagtggaagagtttggcataagaaaataagttttattgaatgctttgatcaggatcttggtttaatttattagttattaccttctttttttttctgtttctgctttcctagtaagtaattctgtggagtattgtactagaatttctgatctagaacgagatcataatgataatttgcactattaggctcgtgttgcagcatgcttatgtggcaatattttattcgacagacgactttagataaaattttggcatgaggaaacaagttttattaaatgctttggtaggatctttgctttcttacttttcctggtttttctgcttttgtgagacacctaataattcactagattccttgcattagtgagcattgaatataattgcttggtctagaacgactgagctaatcacattgtagcatgcttatgcagcatttcattagacagtt

SEQ ID NO: 21979 - DNA, 542 bp, Glycine max
  Clone ID: PAT_MRT3847_119851C.1
tttttcctggttttttttttttttaatgatatgaccaaaataaagtatacaagtaaaagacaatttttacattttgagttagcttttggaattgaactagacccaaatccaaatatctaaggaataagactgtaaaattgcattgcaggggatggttttaattttaagcttccagttagaaggatttgtgtaacttgaattgtttttttggagaatcagcaaaatcactacaatgcacagttcgccattatatttcccgggcacacacttattggcaaaaataccagtagtggcaaaggatagaccagggcctaggggtatgcaccttgttcttcatctcaaataagtgatgctaataaaacacaagtttttggtgaaggccacagaaatgtaaatgcagcaagtggaatttgtaaacttaattgatgtttcattgaatggcttgacctaccttgcaacatttgtttttggcctgaattcccttggtttattcctttattctggccagcttgccctcaaatccatcatgggagattcaactg

SEQ ID NO: 21980 - DNA, 302 bp, Glycine max
  Clone ID: PAT_MRT3847_119852C.1
accacgcgtccggagtttctgtgtgctcttggactggttgttaaaatggacggtcacactaagggtagttgcaatgtgattcaaaggagtgacggcaatagaatggatttagtggtggataagtctgcatcaccaacaatggtaacttgtgaattggttccaaagattttgagccgtctcactaaaccttgctacgctgctgttacttcctgggacagataatcaaactgccactgttacgttcacgcttgtggatacgatgccaactttgtaccttcctgttgcacctaagtgtcactaca

SEQ ID NO: 21981 - DNA, 489 bp, Glycine max
  Clone ID: PAT_MRT3847_119853C.1
cccacgcgtccgcccacgcgtccgcccacgcgtccgtacggctgcgagaagacgacagaagggtacggctgcgagaagacgacagaagggcaatactgatacttatttaattcaatgaaacaagcatcaatcacacaataacacaccaatcaaacacaatcaaaatcttagaatcaaatacaatcaatcaatcattaaccacaaatatttcaatcaaccaatcaatccttatttatccaaatcactaatatataagaggcctaattctcttctaatggaaaagaatgtttctttggggagaggttttgtgaagatatcagcaagctgattctttgcatcaacaaattctagcacacaatctccctttagaacatgatctcctagaaaatggtgcctaatttctatatgcttggttctagaatgttgaactagatttttggaaagattaattgcactgggattatcatacctaatgggtattgtcatacc

SEQ ID NO: 21982 - DNA, 250 bp, Glycine max
  Clone ID: PAT_MRT3847_119854C.1
gtcggaagagggaatcgaactcacaacctttcttccctcccttctctttatactaccaaactaactttataacttccttttcttttttccgtcccctgttgtttcttgtagagtctagcttgaacagaagtacacatgacacaactagaataggaacaaatgttccaactcataagaagcactttgttttactaatcacaacctttaaaaaagtagagcagaacaagtagattttaccataattggatat

SEQ ID NO: 21983 - DNA, 1794 bp, Glycine max
  Clone ID: PAT_MRT3847_119855C.1
ccctcttctcttcttccttaaccatccaacccataatctcccttttctagttgtaattatttcttaggagaggggatcgaacccgtgacctttctcctctttccttctcccttaaccatccaacccaccttaatagtaataaccccttttttctagttgttattgttgtgactttgggagtaattgcaccccgcgctcgcacacgccatcgagcatcaacgcaaatcgatggcggcgatgggttccctcgcaaaactcatcatcgttcactgatgaaaccaaaacctaaaccctactccttcctccctctcaaccgatttcttcgcgcgctacaatctcgtcccctcatggcccaaaccccaacatctctcgatgcagagcacccctccgacaacgaccagcacatgggctttcgggcgcggagcctgagcggagagtctcgggcggagcaagcgtgggcccattggaccaagctgggccggcccaggttcatagtggccccgatggtcgacaactcggagctgcctttccggatgctgtgccgcaagtacggtgcccagggcgcgtacacgcccatgctccattcccgcattttcaccgagaccgaaaagtataggaacgaagagttcaccacttgcaaggaggatcgaccgttgtttgttcaattctgtgccaacgatccggatgtgttgttggaagctgcacgcaaggtggaacgtttttgcgattatgttgatattaatcttgggtgtcctcagcgcattgctaaacggggatactatggtgccttcttgatggataaccttcctcttgtgaaatctctggtggaaaaattggctgttaaccttcaggttcctgtttcatgcaagattaggctctttccaaatttagaggacactttgaagtatgctaggatgcttgaggaggctggttgtatgcttttagctgttcatggccggacaagagatgagaaggatgggaagaaatttcgagcagactggaaagctatcagggctgtgaagaatgcagtcagaatccctgtccttgcgaatgggaacataaggcatattgatgatgttagagactgcttagaagagactggggtcgaaggggttctttccgctgagaccctgctagaaaatccagctctctttgctggatttcgaactgctgagtgggtgtctgaaagtgaaggtaccaatgtggatggaaagctggaccaggcagatctgctaatagagtatttgaagctttgtgaaaaataccctgttccgtggagaatgattcgttctcatgttcataaattgttgggagactggttcagccttcagcctcacatcagggaggaacttaacaaacaatctaaactgacttttgaatttctttatgacatggtggatcgacttagggctacaggtattagaattccactttacaaagatacccaagtggaacttacagcaggcagttacccagattaacagagctgcacgccaacatttggagttcaaatttaaatcaatgaaatatcttatgcggtagaggtggtgcggccagccaaagctagcatgattgcacatcatttagatacaattttgtagtgattagaagtgagaatagttaaaatttctaatatgtgctgtatttgtgttcattcttattgcaattgccaattgacagtgttgtaccctattaaaacgcttatgtttgctcagagcagataaatttatgcgattaccttgaaagtttcaaagaaaaaaaaaaaaaaaaaaaaaaaaaaggaaaaaaaggaca

SEQ ID NO: 21984 - DNA, 516 bp, Glycine max
  unsure (1)..(516): unsure at all n locations
  Clone ID: PAT_MRT3847_119856C.1
cccgcgtccgcttgcaaagagttgcggaggggcttcctccttacacattggaccaactaactcattcttgcatcaaaatcgtggaattggagcgtgtctactattacattctcaggaacactgaaaagtcactcatcctcaaattaacctcattgcgccgtttcttccaaggccaagcactgggtggagatggaaatggaaatggaaacaacaacaattacccccaatttcctgagttgttccatcccgggtttcatcctcagtaccggttcaaaaacaagcacaaagttgttgataatgttgtgtttattaataaccctgatagcttctatattaggattgaggatgttgagaggttcaagaggctgagtggggtggnaggagttgcatgtggacagagatgctgctaggttgcaattgggtatttgttttgatgacaatcgtgttccgagtaacactngacatttcagtggggaatgttgagcctgatggtaatgttgagtcctgtggtggtgt

SEQ ID NO: 21985 - DNA, 265 bp, Glycine max
  Clone ID: PAT_MRT3847_119857C.1
agcgagacctcaggtcaggcggggcggccatcttagattaagcatatcaataccctgcaataatatatcacaccaaaaaaaaaaactatgcggcccctttatatgaaccaagcttacgtactcgcgcattcgacttaataacacttctatagtgtaacctaaatgaaatgcaatggccgataattaacaacatcgcgactgggaaaacactgacgaaacccaactaaatcgctttgaataacattcccttttaaccagctgttgt

SEQ ID NO: 21986 - DNA, 583 bp, Glycine max
  Clone ID: PAT_MRT3847_119858C.1
caaattcattctcccttcttttcctcacaaaaatcctctcttttttatatactcaagtctgtcctagtaaaactacaatctcggacttgttaaccgttgaatagtcctaaaatttgaacgtcaccctcggaactcattttcgcacattctcgctgttgagatttgtgaaataatgtctgtagagagagaaatgtcccacacacgaagacagtgaaattgaggctccaatcccttctccttctctctaacgcttgaaattctaacaaaacaaaggaaacgcttgaggaatcttaaggaaccactaaagatgctgctatcactaccggactacacacatgagctctcttagaggtaagagatgaattgatcgcaattgaagttagaatgaacatgtgtagggatccttagatgatcaaattagggttaattttagggtgttttatgcattttgattttgtctgtacaatgataactaaaaatttctcatgtttggcgggttaattgatgccctgatgcaaattggatggtttaattgagtgtttgacttttaaatgttagaaatctaaaaatttgggaaatcttg

SEQ ID NO: 21987 - DNA, 265 bp, Glycine max
  Clone ID: PAT_MRT3847_119859C.1
tgatgttgttgtggctggcggtatggaaagcatgtctaatgtacccaatttcctgcctgaagcatggaaaggatcaccccttggccatcattcacttgtagatgggatgccaaaagatggttagcgggatgcctataatgatgttggcatgggagtgtgagctgagctatatgcagataaccatgcgttaacactacaccaccagaatatctatgctatttctattatgaactgtggaattgtgtctaagaaagaggcgcctttt

SEQ ID NO: 21988 - DNA, 1753 bp, Glycine max
  Clone ID: PAT_MRT3847_11985C.1
ttacggctgcgaagacgacagaagggagccttgaagatttattcaacttctgcagtcggaaattgcctctcaaaactgttcttatgcttgctgatcagatgctaaatcgagttgaatttgttcattccaaatcatttttacatcgcgacatcaagccagacaacttcctcatgggtttagggaggcgtgcaaatcaagtgtatattattgactttggcttggccaagaaatatagagacaccactacacatcagcatattccttacagagagaacaagaatttgaccggaactgctaggtatgctagtatgaatactcatctaggaattgagcaaagccgtagggatgatttagagtcacttggatatgttcttatgtactttttaagaggaagtctcccgtggcagggattgaaagcaggtactaagaagcagaagtatgagaaaatcagtgagaagaaagtttctacttctatcgagtctctgtgccgtggctacccctcagagttcgcttcatacttccattactgtcggtcactgcgatttgatgataaaccagattatgcttatctgaaaaggcttttccgtgaccttttcattcgtgaaggattccagtttgattatgtctttgattggaccattttgaaatatcagcaatctcaaattgccacacctgttcgtgttattgttcctgctgctggacaaagttctgggctgccaccagctgttgtaaatgctgatagacagacaggtggggtgaacagtaggcatactggttggtcttcatctgatcctgctcgaagaagaaactctcgacctattgcaaatgatggaatgtcgtcaagacaaaaagccccagttccaagtgattcaactggatctaaagatgttatgttgtctagttctaatttccggtcaagtggatccacaaggcgaggtgctgtatcgagcagtcgtgatgcagctgttggcaatgagactgagccctctcatcctctcaccatggatgctagtccaggagcactccgtaaaatctccatgctcaaagaagttcacctatcatgtcatttgagcacaacagaacatcctctggaagaaatacatcaaacatgaagaattacgagtcaactatccggggtattgagaccctaaatttcaatgacgagaggttacagtattagcagcttccattctcgactacctatcatagtaaattcttaaaagaattttataaactaccgagtggagtgtgttgtgttgtctgtgcattttgttggaggaaagctgcaacaagatggtaatggtcactataaagtgttaaagaaagatatgctcaagtggtctcctgacaaatctggccttgaaaaggcttttgttaacacagttgaccgtgttggttctacttctaccatctttccctcttttatatcattattatttagtaatgtctcatgctttcttggctctttcttttatggatatatatatatcatatatcatgtttgttgaaatttcatcagccaccaactggtaaaacgaccactgctacaatactacaaatttcaggggctctttcacgtgcaaagaaggaactacaaattcgtaagcaagatgtgaactgcgttggtttttataaattataaacattttaagtgtcaagtgtcttgtatggcagtggaattccgagttttatttgaaaaagaactggttgtcatatccgttattaacatgaaaggataaaaatgtcttcctat

SEQ ID NO: 21989 - DNA, 835 bp, Glycine max
  Clone ID: PAT_MRT3847_119860C.1
caaaacttgatagaggtaaacttaacaaggaacaaagtgcttacatgccccagattcctgatattgccaagtgtccagagcatctgctgccactgaaagagtgggaggatgcatttcttgccgagttttctgcactgagaacgaatttctcatgccttgatggttcaagtgccatacattctggaaatcttcatgttcattcctcacaaatagttgggaacaattgtggagaattttctagtgttatgagcagagatgtgttacttaataatcatttgagaattggtaatgcaaatgatcaacctacgaacttgactgctgaagataaggatagaacactgtcttcagagaatcctgaagcgaaaacttcagctgatcaaagtagcagcagcagctcccacactccccctttgctttccgtaatcttagcaatggactctgtagcccgggtatcaagtttgttgaaacgaattaggttgctagaggctgcagacactatgacaaggaatgattgcatgtggctttttgctctctgtgcaacagttgatgctccactagatgctgatacttgtgctgctctcaggagtctgctaaggaagtgtgctagcatccgtgccggaaaggctgaattggatgaggaggttgtaatgttgaatatattggctacaatttttggaaggtactttgggcaatctgaaaactgaattcccagtttgtaattttgttgtgttatgacaccttctgttttgggaactggtatggagccaatgacgtgtatgttatgacagataatatggagtgttttttttcataatagatttctacttctatattc

SEQ ID NO: 21990 - DNA, 413 bp, Glycine max
  Clone ID: PAT_MRT3847_119861C.1
aggggtcgacaagagtgtgactcttgctcctacggatcctcaattacgatgaggaactcagaactacgtagttttttaaagaaagaaagttatgtgtagagttgattttagacttttgaaaggttcattttaaccgttaaaagtaaaggagatagttaaggcattggaccttgaatggattcaagtgattttttatggataagaagcttgatttatgtgttggttttaactttggtttcacttggttactttcaaacacattaaaagaggacttgcaaagtaaatgaccagttgaaactttattttacaatgattatatgaggtttcagcacaaacaattggttgaattttacttttacaattgttggaacctgcccttcttcggcgggggcgcaaaaaggccactcggatgg

SEQ ID NO: 21991 - DNA, 499 bp, Glycine max
  Clone ID: PAT_MRT3847_119862C.1
actagctgtcgatctgtggctagcaatgtaccaaggtcctgtcacctccggcacaacggcactcaggcaaaaacagcgcatgcaaggaaggcctaaaatgttaggccgagagtgtaattctagtcgccagcctgcgcggcttaaacggctgctcaactgacaaagcagccaattggctgttacgcgtaaacataccagacccgagactagcaggcgacagctgcaccacaaaccatgtagtatattcccgcaaacgcgttgtaggcacttgatgacgccaaatatgcctagaccgggcctaggtagcctactgctgaacccggagaaatggaggagaattagcttggtggtcagcacgtgtcaaacaacaattaggtggtcactggggccactgcacggacgttgtatgcagtttcttaaaacgagcaaaccactgcggtacaagctacaacacaggtcccagaacatgttaaaggtggagaggtggtactaagggcaa

SEQ ID NO: 21992 - DNA, 1259 bp, Glycine max
  Clone ID: PAT_MRT3847_119863C.1
taagctcggaattcggctcgagggcagcgagccagagaagttgcaactgcgaacagaacaagttcataatgccaaagtcaaagagaaatagacaaggtttgcgtttcgtttctctagttattcctttgttgctgttgttgcgtgtaatcaaaatttgaagcgaaggcgacgattttgttgacatatctgaaaaaaacgcagttacgctgtcaaagacgaagaaaaagggaagagaccacaaagagacgatagtgaacggaataaaagatgcggcagaaaagtacgggtgcgtgtacgtgttctccttcgagaatatgaggaatcagaaattaaaggagttcagggaacagttgaaatcgaatagcaggttctttctgggttctaacaaagtaatgcaagttgctttaggtcgctccgcttcagatgagatcagacctggccttcacaaggtttcaaagctattgcgtggagattctgggatgtttttcaccaatttgtctaaggaagaagttgaaaggctgtttaaagaatttgaggaatatgactttgcaagaacaggaagcattgccactgaaaaggtggatctcaaagagggtccattagagcaattcacccatgagatggaaccttttctcaggaagcaaggcatgcctgttcggttaaataaaggagttgtggagcttgtttcggattttgttgtttgtgaggaaggaaagcctttgtcacccgaggcttctcgtatactgcgtttaatgggaatcaagatggctacatttcgacttagcttaatttgcagatggagtcccgatgagtttgaactttacatcgatggaccagatgaatcagatatcgaatgctcgtaggacctcttttaaaacgtagaagattctggagccccatcctccaaagaaaaaagattacacaagatatgactgacgcatatgtaatttacatcttcagtgctatagactgtgtagcgttttttggattatgtattcttagaagagtttatttgtggaaatgcagagagatttctgtgaactaggccaagctgtaactttataaaaagttcaaattactgtgatacaattttgattggcttaggggtttttatttttgcttgtatatataatttctatcaatttggaagagcagagtctaagtatctcttaaaaggaaggcttaatatggtatcactttttgtttatgttttgtaattattttgttttgatatattaaattttaaaaattttattttg

SEQ ID NO: 21993 - DNA, 1773 bp, Glycine max
  unsure (1)..(1773): unsure at all n locations
  Clone ID: PAT_MRT3847_119864C.1
ggtattgaccaacagtatttgcattaatttatttgactcggatttcttgttttctcatagactgctttttaaatttggtattgaccaataatatttatatccttattacacatacccgtagcttacaaggtcacgtatctctcgtggatcaactaagccgaataaccttcagcatgtgccgaaattacggtctgaaggatcctgaacattgatgattccacactcacgcacttttaatatcattagaaattgaccttaaaacaacattacttatatgaatagatcttgtttctccccggtcggtgacgctataatccaaattacggtgtcgttttcggttcgtttaagcatcacctatcccaattttattcataatcatattaacaacaacactactaccacttcccagtatcttaatctagtccacaaccaccctcagcataatgggcaactgtttggggaagtcggagaagaaattaacggcggagattgttccacgcgacggggccaaagtgtatcccaccgtccgtttacacggctcgcccaagagcattctcgccgcttatatccgtttcgcgcttctccacaagtccgtttcgttggacttggtcgaaacggaaacggagcgcgtgggagatggtggtggtggtgcggttacgctccaggtggggtcggaggttgtttcgggctcacgcgagacgctgctgcggttcatcgacgcgcgcttccctgggccctcgcttgggagcgggagggaggacgaaacgacgccgttgctggcgagcttgacgcgggcgcaccacacgagcatgctgtggcacgtggagaggatggttaagtgggcggaggatctcacgacacgtggcggaaagaagatcgtcgatccttccgtggggactcccaggatggagattagaaaattcgccaagagctactctgagctgcttgagctcatgatggaacacgctcagatggaagaaaccatcctcttccctctttttgataaggccgatcgaggacttgctaaagttgccaaagaggaacatgctagggacctacctctcatgaatggcataaaaccagtcataaaatctgttggggttttggactctggcagccctgattaccatgaggctttgtacagcctttcttctcggctcaaatcattgcaggggcaatgcaaacagcattttgcagaagaggaggtggagttacttccgctaatggaggcgttggagttgagcaaagagcaataagtgagtgcacttgagcagtgttttgatgtgatgcaaggaacacatggtcggttgttgaagtttcttcttgaaggtctccctcctcatgatgctatgaagtacttggacttgatcagcaagtgtagggacaaagaaaaaatggaatctatgctccagaagatagttaagtgagagatctagttaatgggttcaatcatagtgcgcacatggatgaactgtcaggcttgctttgtcaatagatgtaaaattgttttttttttttttttttttgtgccagttcttctaaagcatatgtgtagggtttcttcatagttctgcttttgtgatctgggacattcttgttgaacatgtgtctgcctggtcttttgattaaggaagcagaaagcatggataggatttggaaaagcagggcgtttacgttattcattctccttttcctcgtgatagtttggacaacgttgtcatgaacatgttnntaattaactgtacatccaaacatattctatagnnngtcccg

SEQ ID NO: 21994 - DNA, 808 bp, Glycine max
  Clone ID: PAT_MRT3847_119865C.1
ttgctaaagttgccaaagaggaacatgctagggacctacctctcatgaatggtatcaaagaagtcataaaatctgttggagttttggactctggcagccctgattaccatgaggctttgtgcagcctttctactcgcctcaagtcattgcagaagaggaggtggaattacttccactaatgaaggcattggagttgagcaaagagcaagaagtgagtgcacttgagcagtgttttgaagtgatgcaaggaacacacaatcggttgttgaagttttttcttgaaggtctccctcctcatgatgctatgaagtacttggacttgatcagcaagtgtagggacaaagaaaaaatggaatctattctccaaaagatagttaagtgagagagatctagttaatgggttcaatcattgtgcacacatggatgaactgtcaggcttgctttgtcaatagatgcaaaattgttttttttttttttgtgtgtgtcagttcttctaaaggaagttaagtacccagcatatgtgtagtgtttcttcatatttctgcttttgtcatctgggacattcttcttgaacatgtgtcagcctgaccttttgattacggaagcagaaaacttggataggatttggaaaagcagggcgttctctttttctttttcttttttccttttccctttttccctttttctcatgatagtttggataaggttgtcttgaacatgttcataaataatgtacatccaaaatatatgcacccaaatacattcaaaagtaagttaagtatgccagtttacctgttttgatttgtaa

SEQ ID NO: 21995 - DNA, 175 bp, Glycine max
  Clone ID: PAT_MRT3847_119866C.1
ggctcgtgggaataacgttgttgtacgctcctgaaaaacaagcgttgggaggggtcttgctaggatccatgatgtggcattgcacgctaatgacactgatccacccaacctataggggggagaagctgaaggacattggggaccctggacacccatcatatgttatttgagtgac

SEQ ID NO: 21996 - DNA, 804 bp, Glycine max
  Clone ID: PAT_MRT3847_119867C.1
aatttaatgtacgcatctctcttttctttaatttctttctcttgtcatctaagttatcaatttaacctatttttgcagcagtttgtgacgccgccgtctgttgtggcggtgatacagtataattattaagagacagggtgagaacaacgatggatatgtgtaacgtagtgcatgcgttaaagcccattctgctaatggtgctggtgcaggttgcaaatgcttgggtcaatgttctctacaagctcgcgcttaacgatggcatgaacttgagtatcattgttgcttaccgttatgtttttgcaactgctttcattgctccacttgctttcattgttgaaaggaaaacgaggacaaagatgacttggacgatactgtttcaggcatttctgtgcggcttaattggtggagcattgcctcaaaacttaaacatggaagcgattgctttaacttcagtaacgtttacaacagccatatccaacctcattccagccatcacttttatcatatccctctccttcggattggagagattaaatttaagaagagcaggagggaaggcgaagataattggaacaataactggaattagtggggcaatgctactgacattcattaaaggcccattcttctttgcattatcattattattattattattattattattagccttctggtcttggcttggttttactttatggttattccaatgttaaatatttattaaattagattaatcaggtggcaaattaaaatttcaatgtaaacggcttgataaaatttaaggttttctttagattgata

SEQ ID NO: 21997 - DNA, 123 bp, Glycine max
  Clone ID: PAT_MRT3847_119868C.1
ctaaataaagcttaaaaaagatctctcttataagggtggtgactcacatgaataccatgggagggggaccttcatttggggctatcgattcattcgatgattgctttcttaaattattcgcat

SEQ ID NO: 21998 - DNA, 299 bp, Glycine max
  Clone ID: PAT_MRT3847_119869C.1
ggctcgaggtcagacttaaacctattttcatgtccctccggacaccacaacatggcggcgggagcaaattctgccaacaccaacctttgtgtaaacgttagcaacaatggagccctgagagctaaggaccccctgaacagaccagcgacgacagaggctagagctggcagccacctcgaccaggtcaagcgcacgccacaggaagaccggaggcccgtcttcaagctcagagaagagaccccaaccatatctgagggcgcggccatcgaggcccaacaccaaagggtgactggggagct

SEQ ID NO: 21999 - DNA, 2476 bp, Glycine max
  unsure (1)..(2476): unsure at all n locations
  Clone ID: PAT_MRT3847_11986C.1
gtgaagactacgatcattctcacactcactttctctgtccccttttcttcgtcgcctccgttttcttggatccgtttctatttttccaatggagccctccgctttttccccatttcccaattttgccctcttcttctaccatgacctacttgaaggcgtagctcgagtccgtgttcgcttttccaattcccaatttcccaaactccgttgggtttccgtcgaatggttacccttcctttaatcttgagactttcatgtatggattaatgcatttgcattgtgaactctccgtgcttccttctacagagaaagagagaagctttgtgtgtctcatttttcaatcttctacgcatctttttgcgatttcttatttttctcctgttcctttcctttatttttctctgctactacttggatctccttccattctcaactttctttcaatctctagtgattaattcgccactcatcgaatggaacctcgggttgcgaacaagttccgtcttggccgcaagattggtagcggatccttcggcgagatctatctcggtacgaatactcagacaaatgaagaggttgcagttaagctcgaaaatgtcaaaactaagcatcctcaattgttgtacgaatcaaagttgtataaaatactgcaaggaggaactgggatcccaaatgtgagatggtttggcgttgaaggagattacaatgtccttgtgatggatttactgggacctagtcttgaggatttattcaatttctgtacccggaaattgtctctcaaaactgttctcatgcttgctgatcagatgataaatcgagttgaatttattcattccaaatcatttttacatagggacatcaagccagacaacttcctaatgggtttggggaggcgtgcaaatcaagtgtatatcattgactttggccttgctaagaaatatagagacaccactacacatcagcatattccttacagagagaacaagaatttgactggaactgctaggtatgctagtatgcatactcatctaggaattgagcaaagccgtagggatgatttagaatcacttggatatgttcttatgtactttttaagaggaagtctaccttggcagggattgaaagctggtactaagaagcagaagtatgagaagattagtgagaagaaagtttctacttctattgagtctctctgtcgtggctatccctcagaatttgcttcatacttccattactgccggtcactgaggtttgatgataaaccagattatgcttatttgaaaagacttctacgtgaccttttcattcgtgaaggattccagtttgattatgtctttgattggacccttttgaaataccagcaatcttcaagtgccactgcccctgcccgtgctattggtccggccgctggaccaagttcaggtgtgccaccactggttgcaaatggtgatggacagttaggtggagaggatggtagacctaataattggtcttcatcagatcctactcgtaggagaaactctggacctacttgttaatgacggaatcttatctagacaaaaaggcccagttacatatgactcaaatggatctaaagatgcgatggtggtgtatttatttgtgaattgattatctgttctatgaagtcagcatatttcttgcagaaagttctgtttattaggaaatttgttttcatgttatttacgaatctctgcatggtttatcagttgtcaagttctaatttcttccggccaagtggatctgcaaggcgaggtgctgtctcaggcaaccgtgatgtagttggcagtgagaccgaggcctctcgttctctgaccttggattcaagtcagggagcatttcgtaaaatccctttccctggggctctgagaagttcagctatcatgacatctgagcacaaccgaacatcctctggcaggaacacatccaacataaagaatttggagacaactcttaggggtattgagagcctgcatttcaatgacgagagggtacattattagcagctaccactctcgatcacctttcttctttgtaaattctaaaaaggcttatactctttttgacgaactaaggagtggaatgttgtctatgcattgtgttgaagaaaagctgcaaacaagttgggaatatccctcataagtatacaataaaaatatatgtctaggcagcttcctaactaaactggccttgtaaaaggcttctgttcatacagtttgtgttatactgacaaatgttttgcttcacctttacgccccttttttatactctttatgcattgtgttgaaaaaaagctgcaaacaagttgggaattatccctcataagtatacaataaagaatgtctataggcagcttcctaaaaaaactggccttgttaagggcttctgttcagacagtgttataaaacaaaatgttttttttccccttaaagaaaaaaaaattatntaaggaaagaaa

SEQ ID NO: 22000 - DNA, 481 bp, Glycine max
  Clone ID: PAT_MRT3847_119870C.1
tagccccccagagatgaagagcaccatcttctttgctctctttctctttggagccttgaccacctcatacctaccttcaggcatcggtgagttcgcgccccataatgaagggaaccctcttgaaaaagggggcacatattatatctgtgtcagacataacagcatttggagggataagagcagccccaacgggaaatgaaagatgccctctcactgtggtgcaatctcgcaatgagctcgacaaaaggattggaacaatcatatcgtccccatatcgaatgcagtttatcgccgaaagccatcctttgagccttaagttcgattcatttgcaggtataatgctgggtggaggaatgcctaccgagtggactggtggggaggatctaccaaaaagacctgctgctaaaattgatgagaacaaagataccttgcgtgggatggttagactagaaagagttcctgatgatgaattcaaaaacta

SEQ ID NO: 22001 - DNA, 880 bp, Glycine max
  unsure (1)..(880): unsure at all n locations
  Clone ID: PAT_MRT3847_119871C.1
caataaccatgatatactcaaaatcaatgtanaataaattaaaaaaaactagaatcgctaccacgaattccgcaaatctaacggaatattcgaacaaacgcgcattccagtcgccattccaattccgagagaaaccagatttcacaaaaagaggaaccgattcagttttcgctacaacaagcaacggatcgatgcgcgagaatcagttggagcaaaaagcacaaaaccgatgacaactaacaagagattttcccgatccgcgcatcgcatttcataataacgaaaggaataaaagggagcgagatgaagcggtttcgagaacaatgttacctcttgctcggacaagggtttgcactgcatgagctgagaaatctgctcatcgaggtttccatgcgaattcgaaggcaccgaatccatgttctagtactccacctcctgaccttgctcgttgaggtcgttctatcaatatcctctctccgaatcgatggaaaccctagatctcactcggaaaacccctttcgccttttcggtttgtgtttgttgtttctggtttttagaaagagagagaaagaggagaggggtggtggtggtgaagaaaccaaagcgttttggaggcttcgttttattccggacgcgtggcacaattacactagacgcagctaataaagaagcatattgaattcgaagtaccaagcacaaaatgcacatggaactagccaaggtcattaaatcaagatcctgcttaggatcaggaagggctaaagatcataaatcatggaaccttagcaaggatcataagctcatacaaaattctaaatctatatgctatatatgctccggacgcgtgggcggacgaatgggcgaacgcgtggagtagatc

SEQ ID NO: 22002 - DNA, 669 bp, Glycine max
  Clone ID: PAT_MRT3847_119872C.1
ccacgccgtccgaattaatactccaattaattaattgttagcatggcggagtcccaaggtgaaggtggtggtgacagtggcgcttctggaagcaggcgtagaggcattgcttccaggcgcgccatggcagcacaaacacaagatgaagcaatggtggaatcttcacccgcaacaccatgtggggcatgcaagttcttgaggaggaggtgcattgaagggtgcatctttgcaccccactttggtaatgaccagggtgcagccaagtttgcagctgtgcacaaggtgtttggtgctagcaatgtgtcaaagctcttgtccaacatttcggtgaaccgccgcaatgaagcagtgacaacaatatcatatgaggctcaggcaaggttgtctgatccagtttatggttgtgtctccaccatccttgctctgcaacagcaggtggcaactttgcaagcagagctagctatgttgcaaactcagctgatgaatagtaggtttgcctatgcaagtgcacttcagaccacacagctacaacaaccaaatatgaatgcaggagcactacaaccagcatattccaacaactcatgtgcttcaaccaaccttctgaacttgagcagcttcaacaataacactggcctttgacctttgaatggacacagcacccctcctcat

SEQ ID NO: 22003 - DNA, 619 bp, Glycine max
  Clone ID: PAT_MRT3847_119873C.1
caaaaacctccttgcccttgcggaccattttcatttttcatttttgaattatcaacaaaaaaagacacctcaaaatgaagcacaaacactttttgtaagaaaacaaaaacaacagcaaattccactgttcgttttcaccactcaaatgctactactctcacttgctcacaaaacaaaaccccttcaattttctcaggtataggaagaaacaattccaagcgaattgcaactttcacgaactgaatttgtttctgttaattttttcgcgtatttgtgagaagctacgaattttgataccgtgaaaatggcgacatgttatacaccttcgaatgttagaaattcgccgggggtgctggctgtagttggaggaagaacaatttcagagaatcacgtaggtaacagatcatgcttcctgagaattcaagagagcaagaccgtgtttggcagcaatcgaaagtgtggttcatttcaagtgaagtgttctgcgatcagtcgcaatgatccttttctggatctgcaccctgaggtttcaatgctcagaggagaaggagggagtgcattgaaccagcctagacctagaaaggatgtatcaggtggaaaacgtgccgaaagtttgaaa

SEQ ID NO: 22004 - DNA, 484 bp, Glycine max
  Clone ID: PAT_MRT3847_119874C.1
tcctttttttttttttctgttataggacaaagaaacatcccatttctttgcattagacgtttatttaatccatgaaatccttgggaggaattgtattcacataatctaacattacgggatgaaactgctctattgcttgcacgtatgctatgctgaaacaaccttggtactataggactaccatccaaccaaactatgcagtatcctaggtgccttcatcatatatatcaggacaattaactgccctaagtgctgcagcagacgcagtaagacatctttcgatcaaacgagtttaatcacaaatgtgcatataagatctatgaatacgagcaaagaactgcatcttatgatgcacataatcagcatattggcatgttacatctagcagttgacactctctagggaatgcgtgggtgaatcctatactagttagtttacttgggatgcctctatgctgatcagagcaatgttgaaaatatggctc

SEQ ID NO: 22005 - DNA, 298 bp, Glycine max
  unsure (1)..(298): unsure at all n locations
  Clone ID: PAT_MRT3847_119875C.1
agctactgcaaccccatttgtgtgcagggttcatattgccctcaagttgaaggcagttgaataccaatatgtcgaagaaaatttgaggaacaacaatgaactgcttctcaaatcccacccacttcacaagaacgctccagtgtctattcgcaatgaganacccatagcacagtctctagcgattcgtgagtacagtggtgagacctcgaacaacaaccccatcttgacttctaaaccttaccccagacccttggctcgtttctggaccncactnattcatgataaacgctcttggcgc

SEQ ID NO: 22006 - DNA, 429 bp, Glycine max
  Clone ID: PAT_MRT3847_119876C.1
gtttttccttctatctccctgacgtccaaaaggctgttggtgcctaccgttcaacattcactcactgctgctccctgtgaaatcatgtccttagctacagacacacctgaaggaggacatcaaacatccttccatttctcataggaagttgtcaaaaccatatcccaataggggattttagcggggaccaggattcatgctgtccactattgtgatcataaacacctcatttttgaactatctcatgattcgcaatccaagattacagctccaactggaagctaggatccacaaatgacatgttggaggttgtgtaactgattatggaaaacacatgaccttaaccactgtaagaggagctgctcacatggtaccttatgcacaacctttaagagcacttcctctattcagatctttagtgcggggcag

SEQ ID NO: 22007 - DNA, 239 bp, Glycine max
  Clone ID: PAT_MRT3847_119877C.1
gccttgaaataaataccataaaataaatggcaataaaaattaattgacaataaaatatttaagtaaagatagaaatactaaactgggattgtgacgccgatcttgattaaagaatgtataggtttgaacttgttcatccccaattttctactaatctctcttgctcatcccaaatttactaaggttttctaccttagcttccccgtgggtggaaattctaaactacatgctgataccaa

SEQ ID NO: 22008 - DNA, 375 bp, Glycine max
  Clone ID: PAT_MRT3847_119878C.1
acttcccatggaacctttgtctctaaatatacagaggagagataaacaatacttttgcacacctactatagcatataacagagctcaggatgtgtgcaaatacggcgatgcgctattgccaacaagagacattttgtgacggttaacacggagatacacatctagctaaagcgctccgtctatgaatagggatatgtggctgctacctgacgtacgggtcttagtcctgacagaggatctgccgaccgtcacagacttgagacacgcatctaactagggtacggacaccttcgacacaccttgaagctgttgataatcctggcgcgaagtctgttcatatgaccatgcaccattgacgttcatgaacacaccctt

SEQ ID NO: 22009 - DNA, 711 bp, Glycine max
  Clone ID: PAT_MRT3847_119879C.1
tccataaccccccgatttccctcttcccctctttctcttcctatctctccctctctcttgtctatgtgacacgtgtcccctgaacttcaccatcctgggcagcacgaaacccagctccttcgacacctcgcggtgccaggtgatcagccaatccctccgcctcgtcctatccgactacctccgccgcagcggcttcttcctccctcccctcaacgcatccgacacatgctggacccacttccagtcctacgttaacaacttcgacccaacctacaatatcacctcctcctgcggtttccaaacctcgtggatctcccaaggctgcaacaacgtcaccaccaaacaagacttcgagtccctggtccctcaaccatccctccagaacatccgtaacaactgcaaccaatcgctcgagaacaactccccctgcgccctctgcacctcttcgttttcccctctcccgccactgggagactccgtcggaaacctcacccactgcaccgactacgcttttatctacgccgccgctttcgccaaccgcttcggcccctccgaccccggcaccgccaagtgcttgttctcccttcagttctcctctacaacaacaattcctcctccagagaaaaaggttattattgctgttgtttctgttgtctgtgtcttggtcgtgttactgctggctctctgggtttgggtttattgcaagctgga

SEQ ID NO: 22010 - DNA, 639 bp, Glycine max
  unsure (1)..(639): unsure at all n locations
  Clone ID: PAT_MRT3847_11987C.1
gattcagtgggtgatttactttgnntacttgaagctgatgtaggaattgtgattggttcaagttcaagccttagaagtgtagggacgcagtttggtatttcatttgtcccattgtattctggcttggttaagttgcggttgctagtcgttgtttgtgtctctcgcacccaaattcatgctaggctaaaagaaagaaacatatatatagtgaaatacaaatacacaagcaggtggctaattttataagcggccacagattttctgctgtctcatatttctcttacaggatgttgcaattcagagatttggtgtcattctgattagtggatatgctgtaatcagggtatctgcaatttcctggaattttctcaagtgtttctttgacatttgtgtttgctcattgttgttgataacttttttccccctgaaatcttgtcaggtatgagaaatttcagacagcaataatacaaatgcttgttagatcaggacatcaattcaggctttgaagtgttgtacgggtatttagtaggctattgctgttccataattttaagaattcggcagagatcctgtgtattttcagttgactccttgatcatttatgaatgcagatgcagaagtgatgttcatgtttaaaaa

SEQ ID NO: 22011 - DNA, 171 bp, Glycine max
  Clone ID: PAT_MRT3847_119880C.1
cgagagaatagggacaaaccatggctaaggggaatccatgccctcgagcatactacagatgcactatggctgttggttgctcagttagcataccagttctacgctgtgctgatgatagaacaattatcggtgacaacatatgacggctcacataatcatccactgccacca

SEQ ID NO: 22012 - DNA, 442 bp, Glycine max
  Clone ID: PAT_MRT3847_119881C.1
ctcttactacgtcaaactcttatgggctcaattgagtttataatggtacgtatacaaataggaatttttttaacaacaactcgaccatgtttgtgtcataatgcattttttctgaactgagttgatgccatgaatatactaatgctagagcaaccttttatcggccctatgatcgatatgggactcctgccggagcttgtggctttgatgaatttgggagagccatgaaatgtcatgattgaagagtcgcattggagaagtctgatgtattttgtgtatggagctggatagagaacatgttatcagtgttaggtgcctagtagcagagggataagattctactgtaccatacatgtgggcgacggaccaatgatatgtagacagaggatactatggcatgagcccacgcgccttattgaaattgacacgcgatgaatattta

SEQ ID NO: 22013 - DNA, 231 bp, Glycine max
  Clone ID: PAT_MRT3847_119882C.1
ccactagggggggaagacgctactgagctgttttcaaactactatcatcttgtacatataccactgatttatgtcggggaggacttatgcagacgaacaatctgccatgaccgacgtatgctgtttccggtttcatcttgttatgatcgtgtcactcttctccattctcattctcattctctgtcgctcatcgctatcaatcacgtcctctcgcttagctgactgccatgt

SEQ ID NO: 22014 - DNA, 664 bp, Glycine max
  Clone ID: PAT_MRT3847_119883C.1
ccacgcgtccggcgcccgtgttccatctcccgtcatcgtccgacgtggcgcgcgctataaccctgtaattgatacgctgtcttcaaacttcaaacctctcgttaagttttcgcttcagcaaacgcagcgttgccgtcgattccctctgcgttttggagcttcgtgttgtcgtttaacagatcggagttttcctcgccatgaccgaaaccgaagctttggaggatgcgaaggaggtggtggtgttggaggaagaagagtgcgcggagaaaatggtgtacatgtggggataccttcccggagcctcgccggagaagtctccgatactgtctccggcgccggtgaatctctccgatcgttcactcgccggagattcgtggaaggacgtgtgcggcggtggttgcggattcgccatggccatctcagagaaagggaagctcataacgtggggttctgcggacgatgaagggcagagctacttaatatcggggaagcatggggagattccagggctttatcagcttcccactgaggcttcagtggtgaaggctgctgctggttgggctcactgtgcttcagttaatgaagaaggtgaggtatatgcctggggctggaaagaatgtgtgccttctgggaaaagtattactgatttcatcactgtgggaag

SEQ ID NO: 22015 - DNA, 628 bp, Glycine max
  unsure (1)..(628): unsure at all n locations
  Clone ID: PAT_MRT3847_119884C.1
ccacgcgtccgacagaataagaaaagggcgagtgttagttacttgtgttcaataaagcacttaataacatgctgtgttctaattttttactaccttttcatcaacgaattcggaccagaatcgcattggccttttcatagggatcatgtggaagaagggagggatcttgcttccaggtctcatcaatatactcaagaatcactagtgattctgccaggggcttaccgtcatgcacgagagccggtagcttcttgtggacagggttatactgtaggagcatggcactcttgttgccgagatcttccacatattggtactgaatcccttttagttcaagaacccacttgaccctgaggacaaaaggactaccccagaattaaaaaccaaacacttgcacagttctctcattctcgtggcttatacttgcacacgcgttgaaggatcttctgttgatctgaggggaaaaaaagtcatcccaatgagcctgaaatagtcaaatgttctaatcgtaaacggaaagtagatattttgaataaaagacggactaaggatccaatcatgtaggtgcaataatgaaaaataaaacaatagaatgcanataaaaaggagaaaaaaagattatatattg

SEQ ID NO: 22016 - DNA, 720 bp, Glycine max
  Clone ID: PAT_MRT3847_119885C.1
gacacatgctttttcttttagagaaattacatatgcttatttataaccaataatgttgggaaaggaacatacacaatttggagaaaagacgaagataagctagctaaggcagcaatgggtaatccttctaagcttttcccatttttctttgcattcattgtgtttctgatgcccttagtttccttatcccacaatgacttctctacctttgccataaaaaccgtttcatacctagtttcctttagtgaaaatccaaaccataatggccacatcaccacaagctccaatgaaagagacaaatcacgtctttggaggaaagccttcattggcttaaaaaatactcacgagccatcttcgaatatttctcgagcaatatcccttaatgcaagagagtgttttcctgtggagttaccttctgatgcaataacttctacccgttgttgtccacctaggccatctccttctaatatcatagatttcaaagattttgcttctccaaacgccacgcttcgagtaagaaaacctgctcacatggtagatgaggagtacatagcaaaacttgaaaagggcattgcactcatgaaagcactccctgatgatgacccacgtaatttcattcaacaagcaaaggtccattgcgcttattgtaacggtgcctatcacctacgccatccctttcaggacacaaaactcacattcacaggtctttggtttttcttt

SEQ ID NO: 22017 - DNA, 321 bp, Glycine max
  Clone ID: PAT_MRT3847_119886C.1
ccctcgcgtccggagaaacatgggtggcttaagctccttagtgctggtggttgcagctataattctatcccctcaagttcttgctaactatgagaatcccccagtgtgcaaacctcccactgtgaaaccacctggttatgagcccgctgttgggaaggctcctgttttcaaagctgctgctgaaaaccccccactatataatgctgcagcagagaaaccacctatgcactagcccccattggagaaacccccggtgtgcactccccctgattaaaaaccacccttcggcaaagacgccagatgtgaaaccaccacatgtct

SEQ ID NO: 22018 - DNA, 2254 bp, Glycine max
  Clone ID: PAT_MRT3847_119887C.1
ctcagaagaagatcggctcggacgcactataagctaaagcagcaatgagtactccttctaagcttttatctttattctttgtactcattgtcttgctgatgcccttagtttccttactcaacaatgatttctctatcttcaccattaaaaccatttcatacctagtttcctttagtgaaaagccaaaccattactctaatttcagcattattccatacaaagcccaaaatagtaaacaaaatggccacatcaccacaaactccaatggaagagacaaaccacgtctttggaggaaagccttcattggcttcaaaaatactcacgagccatcttcgaatatttctcgagcaatatcccttaatgtaagcaagtgttttcccgttgagttaccttcttttgcaataaccaattcccattgttgtccacctagaccacctccttctaagatcatagatttcaaagattttgcttctccaaacgccacgcttcgagtaagaaaaccggctcacatggtagatgaggagtacatagcaaaacttgaaaagggcattgcactcatgaaagcactccctgatgatgacccacgtaatttcatacaacaagcaaaggtccattgtgcttattgtaacggtgcctatcacctaccccatccctttcagaacacaaaactcaacattcacaggtcttggtttttctttcctttccaccgttggtacatttacttcttcgagcgaatcttgggaagcttgctcggtgacccgaactttgccttaccgttttggaattgggatgctgtagaagggatgcaaatgccaccatatttcgcaaaccctaactcgtcgctctatcacaaactccgaaaccccaagcacttgccaccgcaagtggttgacctgaactatgatccatttgactttaatgatgattcaccttctcatcaacaagcttcgtataatctagccttcatgtgcaagcaaatggtgctagcaagtaccaaagaattgttcatgggaagcccttttcgactcggcgataaccctactccgggtattggctctatagaggctgctcctcataacacggttcataaatgggttggtgctgctgataagccacaccgctcgagccgaatcggctcgagcacagctgctagagatcccgttttctatccgcatcacacgaactcggatcgactgtgggggatatggaaaaaattgggagaaggaagaaaggactatagtgatgatccagattggttagattctgatttttacttctatgatgagaatgccaattttgttcgcgtgaaggtaagagattgctttgatactaaaagattggggtatgtttacgaagatgttgatcttccatggttgcgaacgccacccacatcgcgaaaaagcaagctactaagagaagccaaaaagggttcacttttgagttcaaagccatggaaatttcctttggttttggattccataacgagtattgttgttaagaggccgaagaaatggaggagcaaggaggagaaagaacaagaggaggaggttttggtgatagaagggattgagtttggaagtgataaatatgtcaagtttgatgttcatattgatgatgatgaagacaatttgagtggtccggatgacacagagtttgtgggaagttttgtgaatgtgcagcatgggcatggccataatgtcaaaactagctttaaggtagggatatcgaaagtgctggagagtgtagaagctgaagaagacgatgaggtgctggtttctttggtacctaaggtgggaaaaggggatgccataataggaggcatcaaaattgagtttattccaaaatactaggattattttgtgggtgtgaaaattttacactttttacaagttttgttgtttatgcttttaaaaggtagttttttttttttcctttttttagtgtagcaagtcgagctcgtattctctgtggctggattttgtccaactaactgaaatatgagatgtcgaatttgctatatattttacagcaattggggaagggaaagaatgtgaaggaagttgaaattttggatgtggggaagtactcctagaagtagatataaatttgttgtggtgcatgtctttcaacactagtgcatgtaaagaaaatcaaataaatcaatttgattttctagaactaattttcataataaaaaattgagtttgatgtaaaaatttgtatgagttttgtttatatgaaaagtgattttagt

SEQ ID NO: 22019 - DNA, 978 bp, Glycine max
  Clone ID: PAT_MRT3847_119888C.1
ctttcttctccttcactttctccatccatttttagcgttcagtgcttttgatgcttctgctgtccttccagatcttgcacatcattcagttcttctgcttcttcttcactcagatttctgtggggtgttcctcatgtcacggaagtaaaggcaaaaggaggtttctcttcttacctatatgaacttttggtgttgaatttggttggtgtttaaattattgaagagtgtattggaggattgtggagaaggaagtgttgaggttgattgtggagttgaaaaggattgaacttgttttgttgattattgtttgttgaagtttggtttttttctcaatggctgtagaggagtctgagcctgtgattggggagctggaaagggaggagaatttgattgctgcggtaaggcatattgtgaaggcactggggccaaataagacccttactagtgatgccaagaaaattctggcagatcttggcactagattgtcctccatgtccgtacctagtgagaaggaggaggggaaacaagggcaagggaaggatgatggtgataatcatgatgctcttgtgttggaacaggatagggttgatgaggatgaaaaagaggctgatacagcaaaagcagcatgggtttgtcgggtttgtctgagttcagaggttgatataactatagttccttgtggtcatgtattgtgtcgtagatgtttttctgcagtgtcaaggtgtcccttttgtcggcttcaggttacaaaagctatcagaatttttcgtccgtaatatctccaatgcttttgtgatcattttatttggacattgtcagagttccattcgccaatataggctaactgaagttggctaagattaatcgggttacattggactctgacgtgaatattatgtttttgtgattgagccccaaaaatgggtactgttgaaattttctggtaaataggccccaagggaaaaaaaaaggtttggt

SEQ ID NO: 22020 - DNA, 411 bp, Glycine max
  Clone ID: PAT_MRT3847_119889C.1
acatgacagggagcttattcctaaaaatacacacatttgacacatacttacgccaattaaaagaggtgcgtaaattttcaaatgggctaaacatactcaataagagggtcttgcctaatttcctttattggatataaacaaacgaacacgcgcaagaaaacacatgttccactatcatgcagaggattccgaatttttagaatatctgatctttatccgaggaacataaaaagctggtataagaatatgtaccagcattataaaaagcttgagagattgccagaagaatatcaaaaactgctgactgtttggtaatgtctataaagaaactcatatgccatgaagtttgatttgcccactcctaacttcacattgtaaaacctttattagggccacatacctttatttgga

SEQ ID NO: 22021 - DNA, 298 bp, Glycine max
  Clone ID: PAT_MRT3847_11988C.1
cagaggcgaatctcgtggtgaaccgatgatacggatgcacgaggaaggtcggactcagagtacttcatggccgatgcggacagatcttattaggggagctccattactccgaccgacactactgaagatactactacgcacgcggcaggagagaagtgatggtgagggagaatccggagactagagccgaaactaacgctaacggctgtcataatacttggcataaggaagatacctgaacggatcagaatctcgaaacgacgtggtgaacggtcgagctttcgagggatcggtgtca

SEQ ID NO: 22022 - DNA, 1151 bp, Glycine max
  Clone ID: PAT_MRT3847_119890C.1
tttctccttcactttctccatccatttttagcgttcagtgctcttgatgcttctgctgtccttccagatcttgcacatcattcagttcttctgcttcttcttcactcagatttctgaggggtgttcctcatgtcacggaagtaaaggcaaaaggaggtttctcttcttacctatatgaacttttggtgtcgaatttggctggcgtctaaatcattgaagagtgtattggctgatcgcggagaaggaagtggttttgaaactttgctctgataagaaacgtccggaagttgaacccgtaaatgggagcagcaatatggttggcaaggaaatattgccacaagatgcacgtcttgtgcagttccatccattgaggcccttttattctggcgaaatagtggcttggcggtctcaacatggtgaaaaactgaaatacggtaaggtttctgaagatgtaagaccatctgcaggtcaagctctgtacagacttaaaattgaagtttccccgggggatacacaaagtttcctttcatcacatgtattttcatttaaaagtgtatcagcaagcagtcccctaaaagaatcattggtgcatgaaagccctgtattaggcagtaacaggccccatgttgatttcccagagagctcaggaaggggagaaagctactctcaggtgcagcctgtgagagatcagtctggcaaagtttcagctgcagaactggtgcaggctgtcaatgaaatcctctctgctgctgggatcaaaatggacgtggaaaagcaggctctacttcaaagaacagtaaatttgcaagaaaatctgaaagagtctcaggcagctcttgtgttggagcaggaaagggttcaaaaggctacaaaagaggctgatacagcaaaagcagcatggatttgtcgggtttgtctgagttctgaagttgatataacaatagttccttgtggtcatgtattgtgtcgtagatgttcttctgcagtgtcaaggtgtcccttttgtcggcttcaggttacaaaagctatcagaatttttcgtccataatatctccaatgcttttatgatcattttatttggacattctcagttccattcgccaatataggctaactgaagttggcaaatattaattggctacattgaattc

SEQ ID NO: 22023 - DNA, 104 bp, Glycine max
  Clone ID: PAT_MRT3847_119891C.1
ctcacgcgttcggaaacgcaaacaccagattttcagtcatattgaacagacctttatgcggtctagttgcattctagaatatgaatggacattaacacgatctc

SEQ ID NO: 22024 - DNA, 139 bp, Glycine max
  Clone ID: PAT_MRT3847_119892C.1
ggggcctaagcagtatgattggagagcctacaggagttggttagagctgggtcaagaatgtgggttgacacttggagctatgatgtcattccatccatgtggagggaacgttggagatgtagtaacatcccaattcccc

SEQ ID NO: 22025 - DNA, 274 bp, Glycine max
  Clone ID: PAT_MRT3847_119893C.1
ggaacaagaaaaaaggatccaaattttattaattggggtaaattacccattgggaaaaaataggttcattttggagcaggatctcccggagttcgaaacaaacggggggggggcggggctgtttccaaaaggaaacagggcactagcctaagtctaaccattaatcttccccgggattttccccaaaacatattccgaataatccggggaaaccttaagggggccttccacatcaacacggaaaccaactggggggggattgggtattttcact

SEQ ID NO: 22026 - DNA, 427 bp, Glycine max
  Clone ID: PAT_MRT3847_119894C.1
ggcatcacggaacaacaagaaagcgtccagcagccaagccaaccgaattcgcgccctctccaatctgaaccgtgcctgcggcgattccaacagcgactccgagtaccctcaaaagtattacaccggcgacgaaaagagtaaaatgcttatccaggatccttcgaaaggaaatgatggtgatgaaattttcaatcaagctaagcaacttaaagctattgaaaagcctcttaatcagcttcaagagcctccaaagtcaactagctgtactggaactaacaagttactctcaaagaaaactgcacaatctactaataatcagcgacctgaagctattattcataacattattttctaaagtaatagttgcactataaataatggaccattgagaagtttaaacgatcctcaaaatgcctcattggtagag

SEQ ID NO: 22027 - DNA, 119 bp, Glycine max
  unsure (1)..(119): unsure at all n locations
  Clone ID: PAT_MRT3847_119895C.1
tttggnaagggagggaaagaccatanatgaatancaattggagtntcttatgaattccctccanaatatgtagttacgcttcgctgtctcnctccctncaaacatcataatcgaaactc

SEQ ID NO: 22028 - DNA, 226 bp, Glycine max
  Clone ID: PAT_MRT3847_119896C.1
cttactcgtacgcccacgcgtgcgaaactgagagagaatttattagatggagaaaactctgcgccgctctccaagctgacgcacaaaaaaacatggcagagggaaaaacactcggcgcggctctagatctctacagaaacaccaagagcgcgatgaaatgcgcacgggagaaccgatcctacggaggcgacaacacacgggggacagacaattacccacaccatat

SEQ ID NO: 22029 - DNA, 2501 bp, Glycine max
  Clone ID: PAT_MRT3847_119897C.1
acggctgcgagaagacgacagaaggggacgcccagccttttccgcttctgcttcatcctcccctttccctaacctccttcttcttcactactaatcttcacaaccatatcatccccaaaacaaaaaaaatccacgtatttgaaatccgacgctgtttttgatggatttagcgtgcaacgatgaaccacctaccgcgaatattcggcaatagaaagaagcaagcctccgacatggacccgacgaagaagaagaagaagagtaagggtaagaagcatcagcagccgaagctcgagcgccgcaacgccgccaagcacttcgaatacgacgccggatcgttgtgctcgtcgcgcgatgagtacgacgcctcgacgtcgtcgtcgtcgtcgttgcactgcacgcgctcgatggagctcttcgaccgcaagagcttccgaatcgagggcgtggagggcgagttcgaccagatttgccgcagcctcggcctctccggtcccgaggacttctccattccggccgccgcctgggaggccatgaagctccgttgctcctcggacctacttcctcgccgcccgaagcacggcggcgaggaagaggaattcgacgaagagccgaaggagaaggagaaagaggaagtggaaattgcagtattagagagcgaggatcgagctagggttttggatgaatgtgttgttcctgctgagagcagtggttgctgtggtggaattaagggttttcggcctccgatgttgaagccgccgccgggggttagggtttcggtggtggacgacgccacgtgttccacgtgggatttgatgcgggattttgcgccgaaaggggaaggaggagggaaggatagttacgtggaattaaattcttctgatgatgaacccacgcgtccgatgatcatgagcgagaagagaaggaagaagaagaagaagaagaagaagaagaaggggaagttggtggagtgagagtggagagtgtagaagaggaaaatgcggcggcgattgcggagattgtgggtgatttttcagggttttctacttcgaatgaagatgattcttctagcactagcactggaccaaggtctaataatatatctcccaatgggagaatcaagcgtgttattaccgcgggtaactggcagaagggtgagcttttggggcgaggttcgtttggttctgtttatgaagggatttctgaagatggattcttttttgctgtaaaagaagtttcactacttgatcaggggaatcagggaaggcaaagtgtatatcaactggaacaggagattgcacttttgagtcaatttgaacatgagaatatagttcaatacattggcaccgaaatggatgcatcaaatctgtatatctttattgagctttgtaaccaaaggttcccttcctaaacctctaccagagatataatcttcgagattctcaagtatctgcctatacaagacaagattttgcatggtttaaagtatcttcatgaccgaaatattgttcacagggatattaaattgtgcaaatatattggtggatgcaaattgatctgtttagcttgtttattttggattgacaaagtcaaccaaattcaatgatgtttagtcctgcaagggaacagcattttggatggcccctgaggttgtaaaagggaaaaacacaggttatgggcttcctgctgtatatggagtctgggatgtactgtgttggagatgttaacgggccaaattccatactctcacttagaatgtatgcaggcattgtttagaattggaagaggtgagcctcctcatgtgcctgattctctttcaagagatgcacgggattttattctgcagtgtctaaaagttgatccagatgaacgccccagtgctgctcaactcttaaaccatacctttgtccaaaggccactgcattcccagtcttctggttctgcatctccttatattagaaggggttaaacttgtcacctccaactgtgaaagataatgaagatctgacattcattggatataaaagtatctccaatgttcaatcttcaagttgctagagttggtctcgggtgtattgttgtaacaatagttcattgtgttgtgccttcagaattcagagtttgcttgcttgtaactttactcaattttttaagcactgctttggatctagcaatggataggcaatccagagagataactcaccctttggctttaacgccatatttgagaattatggtccacgtgttatctaattaatgtgataatttgtctgttgtagcagtgtaaaatatcaacgtcaagctgtaataggttgttcgaggcttccccttttgtttgtttagttagcatatgaaagaattcttaggctaaacctttgggagcggtagtaacaaggattagataccatgctatatgtacatatcacctttattagtaagcaattgtttgtttatatctttattttgttcccgaaactctttatgaccatttatgagatatttgg

SEQ ID NO: 22030 - DNA, 793 bp, Glycine max
  Clone ID: PAT_MRT3847_119898C.1
tcggttcacagggatattaaatgtgcaaatatattggtggatgcaaacggatctgttaagcttgcagattttggattggcaaaggcaaccaaattgaatgatgttaagtcatgcaagggaacagcattctggatggccccagaggttgtaaaagggaaaagcagaggttatgggcttccagctgatatatggagtctgggatgtactgtgttggagatgttaacgggcgaatttccatactctcacttagaatgtatgcaggctttgcttagaatcggaagaggtgagccacctcctgtgcctgattctctttcaagagatgcacaggattttatcatgcagtgtctaaaagttaatccagatgaacgtcccggtgctgctcaactcttaaaccatacctttgtccaaaggccactacattcccagtcctctggttccacatctccttatattagaaggggttaaacttgtcacctccaactatgaaacataatgaaggtacatattgttacataatcttctgccatgtttaattcatgatatctgaaatcatattgaaaatatggtcatgactgtccatcctttcaataagtttcattcataactaatgatgtatttgggatggggccaatttaaaatacttgaaatgggtagtttcagtcaaattggatgcacatatcatacatagccatcagttaagttggggttggggttcaaatatagtgtcattcttatttaggggtgaatgttcatgctaataattaatttctgaaataagaggagggggaagagc

SEQ ID NO: 22031 - DNA, 380 bp, Glycine max
  Clone ID: PAT_MRT3847_119899C.1
tctttatcacattagattacttctaccaagctactacattattaacttactctttctacatctcattcaaaacaatcatggcctctcttcattccattacatcatcaacaaatactgcccttaatgtaaatgcattggcctactacatcgcagcctctgatggcaacttctaccaggattttgacgtaactcgaggagatggccgggccacgatactcaacaacggagatcctctcactctatcccttgacacagcctgtggctcggcgcttcatgccaaaaaccagtatctatttggcaagattgatatgcaactaatgcctgtacccggaaattctgaacgcactggcacacgctatcatttgtcatcacacggatca

SEQ ID NO: 22032 - DNA, 493 bp, Glycine max
  unsure (1)..(493): unsure at all n locations
  Clone ID: PAT_MRT3847_11989C.1
gtgcgagatttaatgagtttgtgaattccctgctttctgattctaaggatttctggcctacaatatgatgatttagtgaaggttgactgtaatttgtatgagatccaaattgagaagtatcttgtggaaggactaaatacttgcttaatggttcataagggtcaattgttggtatctctggagaccctagtgttccatttgtgtactggatttctgtgggtttatctgcactatctccctctttcctattgccagaattgttgtcctgaaactcactgtgaacagaaacagtttcagtccaagaaaacttttcaccattcatttgaatagtcttcagcccttgtgtgtctgagtaatatagtccatagtcagttgaaggaactacaggtagttgctttggtggataagcaaagttgctaggatgactaaatgctgagcagacattgngactgctgtttctgcctatgctacaattttgtttcacttgttctgg

SEQ ID NO: 22033 - DNA, 314 bp, Glycine max
  Clone ID: PAT_MRT3847_1198C.1
tttttgcaaagagcaaacctttttttattaaatccttggttacatcgaaacatatttctggagggaactaagtaagaaacatttacatgtatgaccgacttctgtatactgtcgaatatgttactggaataaaacaagaaatgagggttaggctagaaagactatactacgctctgtggtatggctgtaactgagattgatatatcacctaaaattcatcaatatctatgagaaagcattgcttacacgatcaaaacccagatcaaaaggagaaaggagttactgggtcatgaggcgtggatcttgcagcatac

SEQ ID NO: 22034 - DNA, 514 bp, Glycine max
  unsure (1)..(514): unsure at all n locations
  Clone ID: PAT_MRT3847_119900C.1
atttttactcacacccacaaaagatcgtgaaaacgcaacaaaaattacactgtagaaaaaataataacaaatacaagaatgtaacgtggttcggcacctcttacttacgtccacagaaccgtctaaaaaagtatttcactatcacaaaaatgattataaaattgtaacccacctcaaatagtgtatcactctacaaactcaagtaccccactcaatggttacaaaaaatgataacactctcacacagacatttttctctcaacaaaatgactttgtttcacaatctctcttctcacacactctcttcatgtgttgtttctccactaattctcgtctctatttatagtgaagattgctaccaactataataaataagtttttttggaagttgaaacaaaaataacttccaatgcatccattcaaataatcttcatctagtaaaatgcaatcttctactttacatttaaaccacttaaactntagtgataaaaattcaattcccaatatgcatgca

SEQ ID NO: 22035 - DNA, 749 bp, Glycine max
  unsure (1)..(749): unsure at all n locations
  Clone ID: PAT_MRT3847_119901C.1
tacaaaaaaaatactcaaactcagctcttaagaaaggtgatatttacaatgaagcactcaaatctggtgcaaagggtttgccttttctcaaggtcttggatgatgggaatattgaaggaatttctgctttagtatcaagtatggatcctacaactagagggaatttgttaaggcgatgctcttcaggaccaagtgatctgattctatttgcagtgggtcatcatgcgtctgtaaataaaactttagaccgtcttagagtttatgtagcccatgatctaggtttaattgaccttggcaggcattcaattttgtggataactgattttccgatgtttgagtggaatgatccagagcagaggcttgaggctcttcatcatcctttcactgcaccaaatcctgaagacatgaatgaccttgcatctgctcgtgcgttggcttatgacatggtttacaatggggtggagattggtgggggaagtctgnnannttatnaacgngatatacaacanaaggtaatagagattgttgggatctcaatgggggaggctgaggcaaagataggttatcttcttgcagcgcttgacatgcgggcttcaccacattgaggcatagcttatggggagtacagaatggttatgctgtctgcggggggctattgcatcacagatgtcattgcttttgcaggacaaagcactgcgcagtgtgcctnactggatcaccatctgagtgattccgaacagctggaagaa

SEQ ID NO: 22036 - DNA, 197 bp, Glycine max
  Clone ID: PAT_MRT3847_119902C.1
tacagtgacacaatccgtgagtttccgtaacattttgaaagctaaaaaaggagtaattacataagatgtatggttccgtaaccttacatgcgacgtcataactcttcaaaaataacacggacgctcaatacgatggaagcctacgtacacctgcatgccaggtcaaaactcttcgatactgtcacctaaactcaatt

SEQ ID NO: 22037 - DNA, 484 bp, Glycine max
  Clone ID: PAT_MRT3847_119903C.1
ttcagaccggccagataccagatttgatcttgagttaaaagatgtatctgacattttctcagggtcttccttcaaggttttctctgattccttggagagtgggggagttatcaaagtgttatgtgtaccttctggtacaaaaaaatactcaaactcagctcttaagaaaggtgatatttacaatgaagcactcaaatctggtgcaaagggtttgccttttctcaaggtcttggatgatggtaaaggatgaatttgctattaataatatgtattttgtgatattgggagatatttattatattccattgtctattgcataaacctttgattttagggaatattgaaggaatttctgctttagtatcaagtatggatcctacaactagagggaatttgttaaggcgatgctcttcaggaccaagtgatctgattctatttgcagtgggtcatcatgcgtctgtaaataaaactttagaccgtctta

SEQ ID NO: 22038 - DNA, 256 bp, Glycine max
  unsure (1)..(256): unsure at all n locations
  Clone ID: PAT_MRT3847_119904C.1
tcaattatgaattatgacatgtggtattagttcttctctggaggctacngttgcatccctgccaagttggtatttaattagagtggctagtaaaagatgctttatccttttcttgaccctatttcatactgtctcttatattgattgccagtcttcacataataatatatgtggtttctgtaatttataagcctttatacaagaatttaataataattgangatgttgctcagtgacacttggatatcattctttg

SEQ ID NO: 22039 - DNA, 388 bp, Glycine max
  Clone ID: PAT_MRT3847_119905C.1
ggaaccaaacacgaccttagtctcctccatgattcccctcaaaactcatcctcattctcccttcatcttctccgtttccaaaaccaacccactttacttctctttgctccccacttctatctctcttctctcactcaaacaacccccaccctctctctcttccaatcttctcagggtttcaaatgttggagtttcagtttgcagaaccgaacaccacgaagaagaggaagacaagggggtttcgttggagcttcacgacttgtccccaaatggggaagtgtatcagaaaacgctgcaattggttgagtgttccatgttcgctgcactcaccggtttggtctatttcttgagcaactcccttgccattgagaattacttcagttgtttc

SEQ ID NO: 22040 - DNA, 677 bp, Glycine max
  Clone ID: PAT_MRT3847_119906C.1
ggctcgagcacaatctcagaagaggaggagagatcgagttatataagaatggcatgcatagagagagcatctccagcactgaagcaaatactgctcaaactttgctggttgctgagaagcccctggagattgatcatcacttatatgaatttgggtcagtggagtaccatattcagtctcaagcctctaatccacaagtagcttacttgtcaatatcaatgccacctctatgccatggagtcatacaaaatgaactttcttcttacaccattgaaatggtaaagggtctttgtccaaatgttgtggggattgcagagccagccaaagaaggatatcaacttactctgaagcttaaccttaatcagattccacaaaacaaagactatgataaggtcattaaggagatttcaacagtacattcagtaattctgagttcacagctgaaagaaatattgtggaacgtgaattttgatgatgcacttcaggggatgtacaaacccatcaaactagtctaccatccaaaagaccatttctttctcattaggcagccacaaagaatcatagcggtattcccaattcgttttagagaaaagtcagatgtgatcattgcaacggctttctttcaagagcttgtggattgtgggagttcagataaatgggccaaggtaccaccttgc

SEQ ID NO: 22041 - DNA, 251 bp, Glycine max
  Clone ID: PAT_MRT3847_119907C.1
cgcaactcagttgtcgcctgacgcggagtgtcaaacgaaaagcgcgcgaactttgacattttttttttcttaattttttttaatcgcgtggcactcgtaaggtgttaatatgaagtacctggttgttttggctgtattcgctctggcttttgccgcagaagagaagaaagaaaatgacgcccctaagacttttcagcggttgatccctgctgatgttcttagagacttccccggcgtctgtttcgcgtcca

SEQ ID NO: 22042 - DNA, 404 bp, Glycine max
  Clone ID: PAT_MRT3847_119908C.1
ttactggacttttgcatgttttatgcttgtcccctgctttaatagaatgaatatgagcccctggcttttgagaagaaaatttgtgtagtctcttttcatttgaagctggtgtcgtgattatggtatatacccaccatagtgctacttttgtaaccttgcgatcgctcactgtacatatcaattgcagagtttggtgagattgtacataattgcagtggttggaacttcttgcaagacccttgctcttatataattatagtctgttgcagtgttcataggaatgtggtgatgaaggatgagtcttaggtatgaactgtacattaattaatgatgataagggaaatgttactttttactaaagatatgccttcttccattcaaaaaaaaaaaaaaaaaaaaaaaaa

SEQ ID NO: 22043 - DNA, 203 bp, Glycine max
  Clone ID: PAT_MRT3847_119909C.1
ggcggctcgatacgagatgcctttttgcccctcacacgtattttgccttggcaaccgaaccaaggaagctttttggtcggacactttcttgtttggatctcgcagcgcgggtattgattgatcgctctacttaagaggagacaccaggtcatgttttctgtaaacagggccaatttacgggaacacaccgggaccatctaaaa

SEQ ID NO: 22044 - DNA, 180 bp, Glycine max
  unsure (1)..(180): unsure at all n locations
  Clone ID: PAT_MRT3847_11990C.1
tgannttggttaanatgganttggtgnnnncgcantcnctcttctgagangtgtgngtncnacnnccgntgtgggtnaggcntgcacngggntcaattgcagtgatggttggtggngcccnagaanagaaggtatgtagaggaaggatggatgactangaacntccnagtgacaattccc

SEQ ID NO: 22045 - DNA, 514 bp, Glycine max
  Clone ID: PAT_MRT3847_119910C.1
ctttctggagttctcgccattcatcacccccaccaatctcctcctcctccgtacacatggccacgcttgccgattcttttctcgccgacctcgatgaactctctgataacgaggctgaaattcccgaggataacgatgtggatgccgcagacatggaagaggatgtcgatggcgaccttgccgacctagaaaacctaaactatgatgacttggacagtgtttccaagttgcagaaaacccagaggtacactgatgttatccagaaagtggaagaggcacttaataaaaaggagtctgaggtcttgtttcaggtagtggatatagaagatgatcctgaataccaactgattgtggattgcaatgcactgtcagttgatattgaaaatgaaattgttattattcacaactttattcgggataagtatcgtttgaaatttccggagcttgagtctctggtgcatcacccgattgattatgctcgtgttgttaagaagataggaaatgaaatggatct

SEQ ID NO: 22046 - DNA, 1222 bp, Glycine max
  Clone ID: PAT_MRT3847_119911C.1
tcggacgcgtcaaccactctcaccggcatctcgctggtggcgctgcaattcaaggccttgctgaagaaaaatctcttgctgtcatggcggaacaagagagccagcctcttacagttactctcccctctcatattcattttcctcatcttcgcaatcgacaaggccatcaaggcacagacctcgacctcctcctcctacaagagcgtcactgaccctcccatggaaccttctccccccatcactccctgcgaggacaagttcttcatcaaactcccctgctacgacttcgtctggagcggccacgccagccccacgttccagaccatcgtcgcccgcatcatgaacaacaaccccggccgccccatccctccctccaaggtgaagtcttttaaggaaaagagtgaagtggatgcgtggcttctcagcaaccctatgcggtgccctggagcgcttcatttttcggagaggaacgacaccgttataagctacggtcttcagaccaattccaccagtcttcagcggcgagggaagtacgaggatcccacggcttcgtttcagctccctcttcagcttgctgccgagagggaaattgccagataccttattggagatgcggatttcagttggaatgtgtttctgagggaattcgcgcacccttccatgaatcctttctctgctgtggcttcaattggtcctgcatttttcctcgcgatcgccatgtttaattttgttcttcagattagctctttggtgacggagaaagagcttaaacttcgccaggcaatgaatatgatggggctttacgactttgcttccatcttttcctggctcatctgtttgttagttgtcacaatcctatcgtccctcgtcatcgttctctttggaatcaaaatcaagtttcttgtaatcgtatggtacagccctaatacttgttcccgatgtgctaatgtagctgttcctagatgtttcaatgaaaatatggaaagagaagtttaatttttctccgaaacagaggagagaaatctcaatagagggtccaggacaggcgttccatattttatttaagtttttgcaaatttttgtttgaatttattgtaaaattatacccaggacatcagttatttatgctcttacatttaaaggtggattttttgtttgaaagattatcaatcctatagcaagacagtaaatgcatttatgaattgggcattgataatcgcgt

SEQ ID NO: 22047 - DNA, 767 bp, Glycine max
  unsure (1)..(767): unsure at all n locations
  Clone ID: PAT_MRT3847_119912C.1
ccacgcgtccgctggagatcagattattgtgagggactccgagatccatgaaaatcgagatattgcaggtatgctattttatactagtacgcgattaacttttccttatgtatacagaaattgtcatattagtattttgcagatgagctttgtgatgaggaaatggaaacacaacataccgaggcaggatttcgtggaacactcttaacatcgaacgtttcatctcaggtggtttaggaagagcactttcagtggtatcatctttaacattagtgtatatacaagttctaaagataaaaatcgagtgagaaaaggaagagggtggtgcgatttaattatgtaaatctatgtgcctgaactttacatacaggtcctaaagccaagataatggcaaattttggaatgtttctctttttgttttggtttgtgtgtgtgagcaaatgctcgaaggttgagctagctacctcatttaaaagtgaaggtatgtcacttgcacttttagatagcctaatacgagggattttgagcagtggtaatcaaattaaagaattacatgcatagtgcattacaccgccctagttttttcttttcaagtgttttttgtctttacttttgttgtctggtttgtttccataatatttttttattggtacgggnnnnnnnnnnnnnnnnnnnnnnnnnnnnnnnnnnnnnnnnnnnnnnnnnnnnnnnnnnnnnnnnnnnnnnnnnnnnnnnnnnnnnnnnnnnnnnnnnnnnnnnnnnnnnnn

SEQ ID NO: 22048 - DNA, 367 bp, Glycine max
  Clone ID: PAT_MRT3847_119913C.1
gcagatcttcgttaagaccctcaccggccagactataaccctagaagccgacagctccgacttttttttttacggcaaggctaagacccaggcacaggagggtatctccccagaccagcagaggctgatcgccggcggcaagtagctcgaggaccgaccgacccttgctgactacagcatccagaaggagtccactctccacttggtgctgcgcccccgtgccggcctgcagatctccgtcaagacccctccccccgagacccttaccctcgacgtgcagagttcccaccccactgacaatggggaaggtcaaaatccaagacaaggaacgaaatctaataggcccgcccgcaggtttatttttcct

SEQ ID NO: 22049 - DNA, 374 bp, Glycine max
  unsure (1)..(374): unsure at all n locations
  Clone ID: PAT_MRT3847_119914C.1
acgcgtncccgacagtatgacaatacttcaaataggacactaaatactttcggcctgtggaggatacaggggggctcagttagcgagaaatcacacaaatgatcagctgacaaataactacatgaaggggaaaaaaaaacaagccgtacttgatggagacgcatcatctctcctactgaaatagatattactgcagacactcataactgttaccctctgcacaaggagcgtatattgacagatgtcaccaccccaagctctgctgatggaattccatgctataactaggctatgctatccagaatattgtcatgttcacctacagcagatcagcattcatcatgggtgcagaccaccaccgatgaactaaataa

SEQ ID NO: 22050 - DNA, 526 bp, Glycine max
  Clone ID: PAT_MRT3847_119915C.1
gaataagctaacttataaattttaaagctagttttactaaatacattcatcaattaaagtttattgaaatttataaaatgataagtttcaatcttatgtagtcgcaatgctattatttcagtgacttgaaaaaccttgatgttagtgctcaattgctgttgcttttttaatgcattgcttgttgttgtgggaatttgattacatacggaggcattttcatttggaaaggtactagaatatagaagagagaaatgacaaaactcaaaaggttaatatcgttgctttgcgtgagactactactatggtctattgggggatatttctctattaccgccgaactacttaatattaaccatttaacagaatcaattctgtggagtattgctatataaaatattaataagttttgctgcaataattcacccaaatttgatatccttcaaaatctcagatcatggttttaattttaaattgccatctatacaatggtaattttgaccccaatagttgactcttcacaattgta

SEQ ID NO: 22051 - DNA, 359 bp, Glycine max
  Clone ID: PAT_MRT3847_119916C.1
gaaacaaattgaattgttttgtggtgataaaaactcaatgtctccaaatttatttactaaatatagtacttgaatttgaaaagaccaaattttttttcccggatcaaactgaatttctaatttcaaaaaatctattcagggttcttttcaacttaaaaaacccacattttttaacttatcggaatctcaaatgccaataacaaaaaaaaatttaattgtgtaaccatttaacaaccgatacaaatttgggttgaggcaaaacatgttttgtacttcaaacatgccttctaaacaaaaactaatttcccagccaaaacataataccttaacgctttttaaagaacccaaacaattttccc

SEQ ID NO: 22052 - DNA, 313 bp, Glycine max
  Clone ID: PAT_MRT3847_119917C.1
ttccttgtaaaccatggcttgcccacaatatatacttccccactggagagcggtggctcgccggcgcagttttgcccgctatttcgtgagctaccgaccacatcttacgctagggccatcccaccatggcgtggaatcacggatatgaactcaggaagcggcatgtgccatgatgtgcgccgacggttaccttatgactggagcgatatcaccgacccttatacctaccggaccgttgctagtaccgatctgactgaccttgtcaaggagggttcattcccattttcttcggctcctacagtgcctcccctaa

SEQ ID NO: 22053 - DNA, 596 bp, Glycine max
  Clone ID: PAT_MRT3847_119918C.1
aaaagtcataaaaagcataagaatctgcaacaaatagtcatggctgcgcttggggaccaatcagaggaacaagccatggctgcccaacctaaacctcagaaccgacccatttctaacatcgtcatcgtcgttggtaccttacgattgttatggtttccgcaaggggttccttgggtccgttatcaggggacatacaaagatcttaatataagcttgatttggccgggaaaagatccaactttgggggttgatagtgtaggcacgatatcatctgctcttgtaacgtatgctgctattcaagcattacaaccagacttgatcatcaatgcaggcactgctggtggcttcaaggccaaaggagctagtattggtgatgttttcgttgtatcggaatgtgcttttcatgacagaagaatacctatacctgtaagtgttattcctcttggtagttcttgattgttttgtcttttgcactcttctctacttgacttaaagtgtagttgactatggcaagtttatatttaagactgcaatgaatggaataatcttttggtagtggtggtgttctcttattatgtatgtgataggggagaagt

SEQ ID NO: 22054 - DNA, 418 bp, Glycine max
  Clone ID: PAT_MRT3847_119919C.1
ggggaaacctgaaaataaaaactttttttttttacaaaaaaaaccttttttcttttcttttaaaaggggaaaaaagaaccctttgggaatttgaggaaaggttggaaacctaccttgggactttgaagcttttgtttgtttacaaacaacaagggggactttcctttttaaaaaaaaaacccaccttggggttggaaaaattttggaacaggagtctccaaggaaaaatttgtttggggtgttacacgttggtggagctcatccccccttggtttgaaaatggcagccaaatttgatgatcattctttgacagccccgtttttgaatccttttaaaacccccggccggggccttttttaaattcggagggggggtttttgcttaaattcagggggtttttttcccccccccaatggtg

SEQ ID NO: 22055 - DNA, 332 bp, Glycine max
  Clone ID: PAT_MRT3847_11991C.1
ccacgcgtccgaggaagcgtttgcgacgtttttgaagatgttggatgaaggggtggaacccacgaatgttagtatgatgggggctttacatgcttgtgccaatttaggtgatctcgaacgagggagatatgttcatagattgttggatgagaagaaaattggttttgatgtgtctgtaatgaattctttgatatccatgggttcaaagtgtaagagggttgatattgcggcctcagtgtttggtaatttgaaacataaaacagtcgtgacatggaatgccatgatattagggtatgcacagaatggatgtgtaaatgaagctttaaatgtat

SEQ ID NO: 22056 - DNA, 1557 bp, Glycine max
  Clone ID: PAT_MRT3847_119920C.1
ggtggggaaaaaagatagaagaacccggctgcccaacccggaaaagtcataaaaactgcaacaaatagtcatggctgcgcttggggaacaatcagaagaacaagccatggctgcccaacctaaacctcagaaccgacgacccatttctaacatcgtcatcgtcgttgctatgcagacggaggcacttcccattgttaacagatttcagctcaccgaggaccctgactctccgtttccgcgaggggttccttgggttcgttatcaggggacatacaaagatcttaatataagcttgatttggcctggaaaagatccaactttgggggttgatagtgtaggcacgatatcatctgctcttgtaacgtatgctgctattcaagcattacaaccagacttgatcatcaatgcaggcactgctggtggcttcaaggccaaaggagctagtattggtgatgttttcattgtatcagattgtgcttttcatgacagaagaatacccatacctgtttttgatttgtatggagttggtgtacgtaaaacctttgaagcacccaaccttgtaaaggagcttaatctaaaggtgggtaaattgtctactggtgactctttagatatgacacagcaggatgaatcgtcaatcattgcaaacgatgccacagttaaagatatggagggagcagctattgcttatgtttctgaccttttgaaagttcctgcaatgtttgtaaaagctgttactgatatcattgatggtgacaaaccaactgcagaagaattcctgcaaaatttggcagctgtaactgctgcacttgatctggcagttgaacaagttattaattttattaatggaaagtgtgtatctgaactttgacaactcaatttcaccttacgagttttttctgtatgcaatgttacacgatggggttccattgtacactactaccattattggttgggaatttgtgagatttaagcaaaaatacaaacttataaactgaagatattgcagccccatctcccatctcccttttgtactgttctggccttgcaggctgtataagttatctgacagattgtgcaatcattgtaaacatgtatgctgacatactttagtgaatcacataaagcaatatggttttgattgtttgtctctgaaatatttccatgatgatggaatgattgagtaagttgattttaataatggaaggcccctaattcggttaaaaaaaaaaaaaaaaaaaaaaaaaaagaattttttttttatccaatggtacacggggggctcccaattgtacactactaccattattgggttgggaatttgtgagatttaagtaaaaacccccacctataaaacctgaaagtgcagccccccctcccatttttttttggcactgttctgcccctgcaggctgtataagttatctggcaaagattgtgccaatcattgtaaacatgtacgatgacatactttagtgaatcacatgtagcatatggatgattatttgtctctgaaattttccatgatgatggaatgattgagtaagttgattttaa

SEQ ID NO: 22057 - DNA, 318 bp, Glycine max
  Clone ID: PAT_MRT3847_119921C.1
agcaaattgactgacacggcaagttggggctgtctataggctcaacatattagactttgactacatatgtcattgttaacctgctaagctttcagaatgagataagaactcttacacgcttgcggtaaccaatatgtaatcaagctttttacgttctgtgctaagaggggacaaatattcttgggtgaagaacatgggaacggaggaattctgacgaaaaacttgtcttgagaggaaggcaaatctgaactaattgaggctacaacgttttaaatcgcgcaaggagtagggcataccatgtaataccttgacactgat

SEQ ID NO: 22058 - DNA, 756 bp, Glycine max
  Clone ID: PAT_MRT3847_119922C.1
gactcaaaatcttggtagttttgtttatgatcaatgaggcatcaaatttttgtctgcattttacaaaatgacaaagttttgtcaattgtcacgcaccacactatgtatacatcattatatatttactctcttggacacaccggtcttcaatctactagattttttttttgctcagccttcaatctactagatgatgcaaaatactagtacaaataatattaaaagcaacaaaatgactacttggtcttttatttatttatcaaactttccaatattctgaaatttagcagatgacacagccactaggatcctcttcgtaacttgtgacatagtgactttgaccataatgtggtgtcatctgataataaaggggataggcttcatggagctttagaggaactggtacttttgctggctccacattctccttcttctcctcttttgctggtccaactgaaactatttcagtgtgacaacactttcgtagcttcgacactgcactcactggatcaatgtcccccaacacgatcattttcatgtctttcatatcaacagaaactgattcaacccctgaaaggccagatgctgttttcatagctttttgcttgattctatcaccatgtaagtccaactgtaagactactttcttcattgttgttgctgaagcttgcttgtgagagctaacaacaattgtttggtgacaaatgacaattgcaaaaaaggaagtctttttattttggaagacgcgttgtgatc

SEQ ID NO: 22059 - DNA, 359 bp, Glycine max
  Clone ID: PAT_MRT3847_119923C.1
agggctgcgagggagtgctcctgatactcaaatacaggggtggtgagaactagcttatactggattcctactggataagctacttgtccttacaagtcccatgagttgtgaacgtcaaaggactacctcacgattaccgagcattcattctatgttctgaccaatagttacttaagctcaaccccaatgtatatgtatccgtgcttgctgctcgagatccaagaactgtagactctgttgccattattatggatttggaagataaggattctgaccctatggtgcgtgcgcgtgctattcaccaaaaagccatgcattttcgagctgcctctatgggttccttatatatacagactttt

SEQ ID NO: 22060 - DNA, 902 bp, Glycine max
  Clone ID: PAT_MRT3847_119924C.1
ccactcaaaatcttggtagttatgcttatgattaacggatcaaatttttgtctacattgtacagaatgacaaagtcgtgtcatacacccactatgtacagcatatttagtctcttggacacaccataatcttcaatctactagatcatgcataatacaaataaaagtaacaaaaaatgactactttgtcataaaatcaaactttctaatattatgaaatttagcagatgacacagcctctgggattctcttcgtaacttgagacatagtaactttgagtatactgtgatgtcatatgataataaaggggataaggttcatggagctttagaggaacaggtacttttgctggctccacattctccttcttattctcttctgcttgtccaactgaaactagttcagtgtgacaacactttcgtagtttggacactgcactcactggatcaatatcccccaacacgatcattttcatgtctttcatgtcaacagaaactgattcaacccctgaaaggccagatgctgtcttcatagctttttgcttgattctatcaccatgtaagtccaactttaacactactttcttcattgttgttaaagcttgcttgtgagagctaagcaataattgtttggcgacaaatgacaattgcaaaggaaggcgaagaggtaactatgacttttattttggaaatgaaattgggtgtaaggctatccctgagaaaattgcactcaattagaaactattgattagtggatgaaagggagccaattataaaacagattggtttcttcatctagttctgaccttcattgtcgttgctgaagcttgcttgtgagagctaacaacaattgtttggtgacaaatgctaattgcaaaaaaggaagtcttttccctttggaaat

SEQ ID NO: 22061 - DNA, 386 bp, Glycine max
  unsure (1)..(386): unsure at all n locations
  Clone ID: PAT_MRT3847_119925C.1
tataaaaaggaaaacgatgacatattgaagtgatcaaagannggatacattcaatgtttctatgctagactttttaggcatactacaaacagggcatacttgcagaataggctcacatgatctacacgagcagaagagtctgtaaggaagacccatctagcacgggttgaagagcataacaacatgtgccattcattctttttttcctaattaggtcaacctttattaccccaccagtgtcacctcctccgaacattgtgtattcaactcaacataattgcatcgtcctgtttgttacgaatgcatagcaactcgactctggaggctcattacctacccgatacagagctctgtcttagataaatcctatggggtcgggaacgggc

SEQ ID NO: 22062 - DNA, 610 bp, Glycine max
  unsure (1)..(610): unsure at all n locations
  Clone ID: PAT_MRT3847_119926C.1
cttttcgttggcacactcgaccgtgacttcaatcaatgtatcataacaccttcttctctggtaacaatgagcgtttcgttcatggatctgtccgtgcatcgtcgagctgcagtcgtctcggtcctgatcctacttctcggccttgtctttggtcttgccttggacgccaatgcacacattcccaagccctggaaccgcatatcgagtatcattggttggatctacttcttctgctggagcgtgagtttctaccctcaagtgtttctgaaccatcagagacaaagcgtcgaggggctatctctggactatacagtactgaacatgttgggctttacgtgctactccatcttcaatgttgctttctactacagtaagagtgtgcaacagcaatacatgagacgtcatgacggccaccgcaatgctgtagagctgaacgatgtcttcttctctcttcacgcantggtgctggtcgctgtgtcgctttttcaatgcaccatttaccctcgcggtggacagacctgtcggcaaccaaccctcttgtgggcccgggggacacttgtcgctgccgtgctctttactcttgccgccccggctcgggccattaccgatg

SEQ ID NO: 22063 - DNA, 291 bp, Glycine max
  Clone ID: PAT_MRT3847_119927C.1
agctgcgcgcgtgcgtcgagtcgtaattcggctggaggtatgtacattgaaagcactggatctgatgaacaagcgctgatcatcacagaggaatttgagtctgatgatggcttcacctacttataggaagaggaccttgacgcagttctcatcaagtgcttatctaatggtattcatggttaccttgacaatggctatggctagatgctagcatctgtactgaatgatgttgacaaatgagtcccgatagcactttgccggacgatatggtaatatcaccacccttggaca

SEQ ID NO: 22064 - DNA, 534 bp, Glycine max
  Clone ID: PAT_MRT3847_119928C.1
aaatgtaaaagctactcatttgaatgaaaatgaagttttacaaaagcaaattagaggcacatttacttccaaggagaagaaagcctaacaaaaaaaaactgaatcagacattaccaacccatgcccaaccctagacaacagtatcttgcatatcaagtattcaagggaaccaagatctaccatcaaagttttacaagtagaaacatcaaaagcaaaattttccaacaattttcttatgtcccgttggtttggagaattgaaggttcaactatctgccattagttaggtgcagaccaatactacatatcagctgcaaatataattgaagaatacaaaatatagcacaaaataaataccgctgcaacgaacttgtaacaataagtagcaggaaaagtaaatacacagtgacccttctttccatgttctgatattaaccaagaattcaaggaacaaccaaaacagccaaactataaagtgcattcaagttactttcatctgccactggcaggcatatgaatgtcattgctcatttat

SEQ ID NO: 22065 - DNA, 1351 bp, Glycine max
  Clone ID: PAT_MRT3847_119929C.1
ggctcgagaacgttagcttgtaacctaagtgggggcattaaagtgatgggacaaggctactccacagacaagagaaagaaagaaaaccccatttaaagttatttctttttgtactgtgcacatcacaagaagaacaaagatgggtttttgaaccatcacataaaagaaaaagagagagaaacaaaaaagaaatagggatattggagaaaaacaagaggaagctgtgcgagtgaaagaagatggaggagaatgaatgaggtgaggtgtgtttgttattcttcttgttgttgttttgttgttgctgaaatgggtttgttgaacacaagtgcatgtatttgactactagtgcgttaaagctcagatctttgtcttttgttctcccacctggtattttgaggttatcaatttgtgcactgagtccttccttaaccgaaacccattttgttggtttttttgggggttgttgagtttgtcttgtaccaactcggggttgatttaaatgaaggccgtgcccctaccctttcaggaatttagagggaacggggttttagattttgcttctgttgctgctgtttcagattcgttgttactcccgcagcaagagcagtttctgcaaaggtggaacccccaaagggaaaacttttgctatgtgggcattgagcccgccgtttctggtttggacctcaaaaggaaaacaagcagccctcccacatcctcctctacactgtcttcctcacgcgccagcagcggcggctgcggaggctggggctccgcggatagcaccaccggtgcggccacggccacggtggccgagaaggagaacaacccacctcaaggagggttagaggttgttggacaggcaagatgtggactgggaatggaggattgggagagtgtgttgtctgagtcaccaggtgaagatcattccattctcaagttgattatgggggacattgaggacccatctgtgggtttgaccaagcttttgcagggtggaagtgcctctcaggatgttgaattgaatgggcttggagtgggttttggtttggtgaatcaaagttctgtgcttgaccccattcctagtgtcaactttgtgagcagcagcattgacccttctggtcctgggaattgtgctgatttccctttcaattcccacagtaatgttagccctaatgttcccagtgttggttctggtctgaatccaaaccctacaggattccctacttcagctagcaatctctcacaagtttcactccctcagggtgtgtttcagccacagcaacaacagcatcaaccaatagaacctctggatgagaagctacaggttctcaatccccagttcattttgtac

SEQ ID NO: 22066 - DNA, 191 bp, Glycine max
  Clone ID: PAT_MRT3847_11992C.1
tttggttttggacattattttgttttaactacgggagctgttattttgttcttggggcagcattttttgggctggaagaagtttgcaaaaaaacaaggaaaatttgttttttttgccccggggttgtatcagaattttcttttgggccttttgaaaacggggaaaaaacagggggggaaaggggggaaggg

SEQ ID NO: 22067 - DNA, 388 bp, Glycine max
  Clone ID: PAT_MRT3847_119930C.1
gggagaaaaacaatttttttttttttaaccaattaaatggtgtccatttaattccaagggtggtaatttgaatgcaaaaggggaaaagccttaccagacctaaacccgttttaaatttgaacaaattcctttcttccttccttccaaccccagggatttacataaagcctgcttttttattggatgcatttctctaaaaccttacaacctttgacaattcattctgaaaggcccctgaatgcctgtgagaagtaacatcttctgcgggagtattgacaggcccaaattgttattttgcctgccacattttcgcttttatggaagcaaccgggtcatttaagggatcggttttcccctgcattctacacttgtgggaagggagtggttt

SEQ ID NO: 22068 - DNA, 443 bp, Glycine max
  Clone ID: PAT_MRT3847_119931C.1
gcttgacccattatatttttttaagattgaaaagagttcgttgtgcccacgtatcacgtgcgggaaaggattttgaggggggaagaaatatgcagggtctgctgctctttttgagagtgaaagagaacaccttttttcccggaggggggagtaattaaaaagaacacttggacagtatttgccccaaactttagaaagtttgggcaatgagaagaaactgaggacctccttaaagggctattagggccaagaggcgaaagcaggttattacggggtgctttggggaaaatcgaaatttcggaatttcttcagagggcttttaaatgagctgggggcgacaaatttgcatatttggacggaaatgaacgtctatattaccgcaaattgcccagagagtgctgagaaaaaactatatattgtgacgagggtaattttaggggggg

SEQ ID NO: 22069 - DNA, 516 bp, Glycine max
  Clone ID: PAT_MRT3847_119932C.1
agaattgaatgggtggaaagtgaaagagtaagacacaaagtgtaacttgagtgattagatctgatgagtgcagaaagaagggaggattgttggtgatcgatcatcgatcatcgatcatcgatcatcgatggcgtctgctagccttggaagtggtggggtgggcagttccaggtctgttaatggtggcttcaggggttcagatgcttgagatgtctttgagagaccacgaggacgttagagatagtgagcctgacatcattgatggtttgggtgctgagactggtcacgtgataagaaccagcgttggtggccgaaatggtcaatctaagcagaatgttagttatatttctgagcatgttgtgggaacaggctcttttggtgttgtttttcaagccaaatgtagagaaacgggagatattgtggccatcaagaaagttctccaggacaagcgctacaagaatagagagttacaaattatgcaaatgctggatcatccaaatattgttgcccttaggc

SEQ ID NO: 22070 - DNA, 1150 bp, Glycine max
  Clone ID: PAT_MRT3847_119933C.1
cccacgcgtccgaccacgcgtccgtacggctgcgagaagacgacagaaggggaaaacagaatgaatagagagagatggtgtagaattgaatgggtggaaagtgaaagagtaagacaccacaaagtgtaacttgagtgattagatctgatgagtgcagaaagaaggaaggattgttggtgatcgatcatcgatcatcgatcatcgatggcgtctgctagccttggaagtggtggggtgggcagttccaggtctgttaatggtggcttcaggggttcttccagttccgtcgattggcttggcagagagatgcttgagatgtctttgagagaccacgaggacgatagagatagtgagcctgacatcattgatggtttgggtgctgagactggtcacgtgataagaaccagcgttggtggccgaaatggtcaatctaagcagaatgttagttatatttctgagcatgttgtgggaacaggctcttttggtgttgtttttcaagccaaatgtagagaaacgggagaaattgtggccatcaagaaagttctccaggacaagcgctacaagaatagagagttacaaattatgcaaatgctggatcatccaaatattgttgcccttaggcattgtttcttttcaacgactgacaaagaagaagtttacttgaatcttgtacttgaatatgttcctgaaactgtgaatcgcatcgccaggagctatagcaggattaaccagcgaatgcctttaatatatgtaaagctttatacctaccagatttgcagggcccttgcttatatacataactgcattggtatatgtcatcgtgacatcaaacctcagaacctacttgtgaacccgcacactcatcagctgaaactatgtgattttgggagtgcaaaagtgttggtgaaaggagaacctaatgtttcttacatctgttcaagatactaccgtgctccggaacttatatttggggccaccgaatatacaactgccatagatatatggtcaactggttgtgtaatggctgaattacttcttggacagcccttgtttcctggagagagtggagttgatcagctagttgaaatcatcaaggtttttggggactccaaccagggaggagataaagtgcatgaacccaattatactg

SEQ ID NO: 22071 - DNA, 724 bp, Glycine max
  Clone ID: PAT_MRT3847_119934C.1
caggagatgattgctatcaattcagctgaaaagatacatgcagtggacaaaataataatgcagcagaatagatatcttagccagaaagtgtaacaatctcaatcaagagtatttccatttcccactcaaagcacgaatccattttccttcacatcttccacactgtgcccattatttttgttctcctgctgagtaggttcccccttgaccttttcttcattcaaccctgcttcttcctcttcttcttctgccacctttttatcaagagattgaatcaaattcagcaagcaagactctacatcctcattcaaacactttggcatgagattctcagcaatatcagcaggagtcacattggtcacttccaacaaattcgcaattctagcgaacaaatagtgcgaatcaacatccaagtagttcttggcaagcaccttgaatgcctcaaagcggcaataggacaattcaatgtgtttgtccatcctacctgtcctaataagagcaggatcaagcttgtccacaaagtttgttgtgaaaataataatcctctctcccccacatgctgaccaaatgccatcaatgaaattcaacaaccctgatagagttaccttgctattcttgttaccctcctcttcatctttcttactaggatcttttggttcctcttcctcacccctttccctcctcatgttcctctggccggtgagatcgagcgagcaatcaatgc

SEQ ID NO: 22072 - DNA, 309 bp, Glycine max
  Clone ID: PAT_MRT3847_119935C.1
gtgatttctttgctaccttatgctgaccttcctcttttaaaattatctaattacttaagaggaactacttatatactaagctagacatctaatatggattctccacaacgacaagccacttcatagaactatgttgggaactactaatagcctaattgcagagtgtcggtatctaactagactgggtggaacccatcagtgagatgagataatgcttttaaaaaaacatgagagtgtatattcccttgacagtgaaatgtaaaaaactcatctaaacgatggcttgatccctttgctagtggcaacatt

SEQ ID NO: 22073 - DNA, 134 bp, Glycine max
  Clone ID: PAT_MRT3847_119936C.1
cgattttggttgttatacattttcatccgttggttcgcttgtttgagaaaatattaagtggtgacatattatgtttttgtgaatcttgatactttaaaatatccagattttccattaaataatttttgatgatc

SEQ ID NO: 22074 - DNA, 493 bp, Glycine max
  Clone ID: PAT_MRT3847_119937C.1
gcgcccacgcgtccgtacggctgcgagaagacgacagaagggggtgttgaatgggtggaattggaaatcgaagtgaaaagaacggttgaaagtgaaagagtaagatgctattgcaattgcgctgctctcattctcaccacaaactgacacttgcctgcagttgaagatctgatgaattaattgagcatctgagtgcagaaagaatagaggatcgtggtcgatggcgtctgctagccttggaagtggtggggtcggcagttcgaggtctgttaatggtggcttcaggggttcttccagttccgtcgattggcttggcggagagatgcttgagatgaggttgagagaccacgaagacgatagagatagtgagcctgacatcattgatggtgtgggtgctgagacaggtcacgtcataagaaccagcattggtggccgaaatggtcagtctaagcagaatgttaattatattgcagagcatgtagtggggacaggc

SEQ ID NO: 22075 - DNA, 1865 bp, Glycine max
  Clone ID: PAT_MRT3847_119938C.1
aggagatagggagaaggcactgagagagatggtgttgaatgggtggaattggaaatcgaagtgaaaagaacggttgaaagtgaaagagtaagatgctattgcaattgcgctgctctcattctcaccacaaactgacacttgcctgcagttgaagaaagaatagaggatcgtggtcgatggcgtctgctagccttggaagtggtggggtcggcagttcgaggtctgttaattggtggcttcatgggttcttccagttccgtcgattggcttgtcagagagatgcttgagatgaggattgagagaccacgaagaacgatagagatagtgagcctgacatcattgatggtgtgggtgctgagacaggtcacgtcataagaaccagcattggtggccgaaatggtcagtctaagcaggaatgttagttatattgcagagcatgtagtggggacaggctcttttggtgttgtttttcaggagaaatttagggaaacaggagaaattgtggccgtcaagcaagtcctcaaggtcaaacgatacaataatcgagagttacaaaatatgcatatgctggatcatccaaatattgtttgcttaatgcattgattctaatcaccgacccataataatggacttccattttatcctgtacttgaatttgaacctgaaactgactttcgtggtgcaacccctgatgtcatcaatcggcttattccagagcatgcgcgtaaacagaacttatttatggctttgcacacctagcaattcccgtaccctcctaagttgtcgtcacttactagcaggttgtaaattatccggtttatccgagaaaaactccacagaaagagttactaggattatattattattatataatatgaaggtgaacggagaacctaatgtttcttacatatctgccagatactaccgtgctccggaacttatatttggggccaccgaatatacaactgccatagatatatggtcaactggttgtgtaatggctgaattacttcttggacagcccttgtttcctggagagagtggagttgatcagctagttgaaatcatcaaggttttgggaactccaaccagggaggagataaagtgcatgaacccaaattatactgaatttaagtttccacagataaaacctcatccgtggcacaaggtctttcagaaacgtttacccccagaagcagtggaccttgtctgtaggttctttcagtactcccccaatttgagatgcactgcattggaagcttgcattcatccattttttgatgaattgagggacccaaacacccgccttcctaatgctcgaccacttcctccactgtttaattttaaacctcaggaactttctggtgtaccccctgatgtcatcaatcggcttataccagagcatgcgcgtaaacagaacttatttatggctttgcacacctagcaattccccccatccccaccccccaagttgtcgtcacttactagcaggttgtaaattatccggtttatccgagaaaaactccacagaaagagttactaggattatattattattatataatatgaaaagtttcttttttcttttttgaatttatttatcgtcaaaggagtttgttttctatttttgttcaggagacaacgttttcatgtatatttatgtcagacatgtgcctctggttattctaggccctctctgttataacttataaagacatgatagtgttaggttatagtataatagtatagtatagtttatacgctgtattgtttggtttgatgtgttatgtatgttggaataattttatccattatagtatttgttgtccgatccagaaaaaaaaaaaaaaaaaaatttccaaaaa

SEQ ID NO: 22076 - DNA, 423 bp, Glycine max
  unsure (1)..(423): unsure at all n locations
  Clone ID: PAT_MRT3847_119939C.1
caggaatgatggaggagaagatgattcanaatttgcttcaagaggagactggtggcaaggcatgttatgacataattcttgtctaatagatttatggtataaaagtttacatatggattgtacttgtctgtcacaaagttctcattcttttgctgtctgttaactttctatccacagggggtctctattattaagatcactattgccaaagcatgtgcttctcaaggtatatatgatcttctcaaaccttaatatcaaatgccttcttaaaatatccctaagggtttccttctttttaaaccgtaaatggaaaagtaagaattcttagaaggcaaagacgtttgttctgtagggttcaggatcttatgatcctaatatattcctgaattgattctaaaactctagtcatatttcctgttctag

SEQ ID NO: 22077 - DNA, 298 bp, Glycine max
  Clone ID: PAT_MRT3847_11993C.1
ggctcgaggaaacatgcagagactatacaactttttcgcattttcgctatcaaccaccggaaaaggggggggggtgcaccgatactaaacctcccgcgttgaacgtgagatatctatcaatattatcccctctctcagtggtgcggatctgcacaaatccggaacgaacgctattgctagacaatctggagctgactcttcattggcggaccaagcactaaactcactgaatgctgaccacaatcatgaagcacagtcttcatgcacatttgaaccggctacaaacttaacttgtcat

SEQ ID NO: 22078 - DNA, 156 bp, Glycine max
  Clone ID: PAT_MRT3847_119940C.1
agcttgagctgctcttgtactcattcttagcttaatatcatccaagagacaccctaagacacggttcacagactctctcaaagagttacaagataaatcatcatggatttaccaggatgtgcgtttgtgcagacacttaatgtagcaccctgtcat

SEQ ID NO: 22079 - DNA, 485 bp, Glycine max
  Clone ID: PAT_MRT3847_119941C.1
taaaccttagaataatgtcttggctccttataattctgtttctcagcctcacacatggtagtttttcagagactagccacgacaagaagcttccttatgctgttgtggttggcactgtctactgtgacacatgttctcaacaggaattctccattggaagtcatttcatttcaggtgcctcagtagttgcagaatgcaaagatggaaattcaatacaaagtttcaagaaagaagtgaagacaaatgaacatggggaattcaaagtgcagctaccattcagagtgaggaaacatgttaggagaatcaagggatgcactttcaagttgttaagtagcagtgaacctcattgttctgtggcctcagtttccacttcttcagtgagtctcaaaacaagaaagcctggagggcacacattctcagcagggggtgtcttattcaaaccatttcaaaagcccaacgtttggtaccaaaattaaaatgaattt

SEQ ID NO: 22080 - DNA, 1414 bp, Glycine max
  Clone ID: PAT_MRT3847_119942C.1
atgaagggaaaagaatccggtgaagcaaaaggttatgcttttgtgaccttcatgacaaaggaattggcatctaaggctattgaggagctgaacaactctgaatttaagggaaaaagaataaagtgctccacatctcaagttaagcacaagttgttcattggtaatgttcctaaatattggactgaaggagatatgaaaaaagttgttgctgaaattggccctggagtaatttgtgtggaactgttgaaggacccacagaattctagccgtaaccggggatatgcttttatagagtattacaatcatgcttgtgcagagtattcaaggcagaagatgtcaaactcaaactttaaacttggcagcaatgctccaacggtgagctgggctgatccaaggaattctgaatcatctgcaatctctctggtaaaatcagtgtatgtaaagaaccttccagaaaacattactcaggatcgtctcaaggagctgtttgaacatcatggaaagatcacaaaagtggttctcccttctgctaaatcgggtcaagaaaagagcagatttggttttgttcactttgctgaaaggtcaagtgccatgaaggctttgaagaacacagagaaatatgaaattgatggacaattgctggagtgttcgctagcaaagccacaagcaaattcacaaaaaccagctttacttcccacttatccacctcatcttggttatggtatggttggtggtgctataggtgcaggatatggtgctgctggctttgcacaaccactgatgtatggtcccggaccaacccctggtggcatggcaatgatgccaatgatgttatcagatggaaggattgcatacatagtgcaacagccagggtttcaacagcctgccccagtatcccgacatgggaggagtggtggcagtagctccagtggtgggaaatgcagtaatgatgataatcgcaatcgtgggcatggccgctatcatccctactaacttaatgggctttaaggagctagcaaaacaaggaattgcacctgaggcctaaaagtgttgacgattcaaggcacagcgcccaactgattaagacaaacagggcgctgctgtgaatgcagttatgattttgtaatacatctacctagggccaagattcagttaagcatctaagtcaggttttcgtataattttacttatcttgtccatcaattttttgatctcaaattcttaaagagaccacagtgatctatctgaaggacatgataaatcttactagattgatgaaaaattatgtagaggtgtttcagatgtttagcttgcggttcatgtattcatgtttctaaccgtcgttctagaagaattggaacgatgtttgaatgagtattggtgccagtgcaaaacaaactcctcttgtcgaacc

SEQ ID NO: 22081 - DNA, 195 bp, Glycine max
  unsure (1)..(195): unsure at all n locations
  Clone ID: PAT_MRT3847_119943C.1
nggcnncgnctnatncgnttaancttcggggaaatttccgggctgcgnanggttggaggannntcannnnnaannagggntnncctanatttggattgcttttnggancatntngccaggggggaggggnaaatgaaanagcctcggnaangagctncccattccagtgngnanaagcaggntgtcgaagagcnt

SEQ ID NO: 22082 - DNA, 294 bp, Glycine max
  unsure (1)..(294): unsure at all n locations
  Clone ID: PAT_MRT3847_119944C.1
ggatttcactgaccctgattggttagngaaatcccttcttttcccacctggtattgttttccatatgctccacatcctatccacgttggacaccaanggatttcactgaccctgattggttagagtccgcatttttcttctacgatgagacaagaaccttgtgcgcgtgaaggtgaaggattctcttgacacaagncnagttggggtatgtttaccaagatgttgacattccatggctcaagaataagcctaaacctaaaagatctaaagctaagaagttggcattggcacaag

SEQ ID NO: 22083 - DNA, 341 bp, Glycine max
  Clone ID: PAT_MRT3847_119945C.1
aaagaggctatagcctatgaccttaatacaacctagaaatagctttataaaagctttacaacagatatataacaacttttctaacaccaaccaccacgtcagtgttgtgcctccgagttcagttgaagtatggtagtaatgtataccaaaatattttttcagttgaagtatgtggattacaaacctattcacacattgttttcagttgaagtatgataggaatgtataccaaaatatttgtaaaaaaatcaattatctctttattatgattactttattttaagtatatagtaatttattattttttttataaataatttatctcctcttttattgtccca

SEQ ID NO: 22084 - DNA, 113 bp, Glycine max
  Clone ID: PAT_MRT3847_119946C.1
acccatcgcatcaaaacacggattttctcatcgccagcatcgccttgtaagtgatcgtcaatgggttggtgcagccgattatattcactaacgggaaaaatgccaatccggtc

SEQ ID NO: 22085 - DNA, 400 bp, Glycine max
  Clone ID: PAT_MRT3847_119947C.1
ccaaattaaaatcgttccgggactggtgccctaaacaaaaaataaattaggacaagttaacacccccaccaacagggttatatgattatcatatgggacatcccacgattgaagacccgggcatggtgggaaacccctaatgacggcccatttaaacaaattcacaggactattttttaagggggaccctgaacatcctcatattacctccggtttgccaaacaggggtcctgtttagccgggttccgtgcccccactttgaagccccatcgctggcccggaatagtaggtgcccccggggggggactaaaaggtgcccttttacaaaaatttttttgcggaagcgcctctgtttacggggggccccttttccatccggacaagtttgcgcggggggggt

SEQ ID NO: 22086 - DNA, 410 bp, Glycine max
  Clone ID: PAT_MRT3847_119948C.1
tacggctgcgagaagacgacagaaggggaggaatcaactatatgtagaaaatggaaatttataattttttttaatgctttagtaaataaggtgtttgttgttgatgtgatggcgaatctattatgtctgtcttttgtgctttggtttgtgcacaagacatttcagtcgaacacctttatagaattttttttggagattcactgaatgggattttcttataagggaatggtgctccgcttgtttgtttcaaggtggaatcttagatttacagttgcatatgctaatgtagtaaaaataattaggtgatagtatattattaaatattaattatgtaggtgcattggatgtcccttaacttgtgatatttcataggtctttgctagaacagatatcttgcagaatttggatgt

SEQ ID NO: 22087 - DNA, 416 bp, Glycine max
  Clone ID: PAT_MRT3847_119949C.1
cgttctgagcagaaaccaatttagtggccacattcctcaaaatattggaaacatttcaaagcttaggcagcttgatttgtcactgaataatcttagtggagaaattccagtcgcctttgataatctgcgtagtcttagtttcttcaacgtttctcataacaacctctctggtccagttcccaccctacttgcccaaaaatttaactcgagctcatttgtggggaatattcaactatgtggctatagcccttcaaccacatgtccctccctagctccttctggttcacctcctgaaatatcagaacaccgtcatcataagaaattaggcaccaaagacataattctcatagtagcaggagtgctccttgtagtcctggtaacaatttgctgcattctgctattctgcttgataaaaa

SEQ ID NO: 22088 - DNA, 322 bp, Glycine max
  Clone ID: PAT_MRT3847_11994C.1
cccacgcgtccggacaagaccattgatggcagcaacaagctctggcactcttacagcaactgcgtccctagggcaaggcacgggcaccaaagccaatgctcttagagatgatgattcaatggaaacagcaacatacaccatgggcaaagatttgtgaaatggaccagactgagagaaatacttggtgacccttttcagctcagacgccttcatactagaaaggacaatgcccacgggattatcgatgggacactgctggcttatctgctgacccggaaacctttgacaagaacagggctcatgaggatatccataggagatg

SEQ ID NO: 22089 - DNA, 785 bp, Glycine max
  Clone ID: PAT_MRT3847_119950C.1
tatttctacaaccaaatcacccccaagtttcccgcatatagacttcatcatgagctctcagttcgagcaaggccacaacccccccactcaggaccagcagcccccgggactacagtctgagctcaagggccccaagccccaggacgagaatcttcccactgaggatggcggataccagatctacaaggcggccggcaagcttgagggcaagaaggcacttattactggcggtgacagtggcattggtcgcgcggtcgcaatcctgttcgccatggagggcgcagacagcttcattgcctacttgccccaggaagagtccgacgcccaagagacgaagaagaaggttgaggagaagggacggaaatgccacctgtttgcgacagatctgacggacaagaagaactgcaaggccgtagcagacaaggctttggagactatgggcgctgtcaacattctggttaataacgctgcttaccagatgatggttaacgacatccaggaactctctgaggagcaatgggaacacaccttcaatgtcaacatccacccctatttctacctctccaagtacatcatcccccacatgaagggagggtgacaccatcatcaacaacgcctccatcaacgcctatatcggccgccccgatctcctagattacacttcgaccaagggcgccatcgtcttctccactcgtgggctctccatcaatatgtcagcaagggctttcgcgtcaacgctgtcgctcccggtcctgtttggacgcctttgatcccctgcaccatga

SEQ ID NO: 22090 - DNA, 149 bp, Glycine max
  unsure (1)..(149): unsure at all n locations
  Clone ID: PAT_MRT3847_119951C.1
gggccgctcaagccggccgggccgnctatttcaacctctatattcccattaaaaagaaccagcttcggaatatactctttctccttctttgtntcctcactctcctcctacaataaccatctcttctcagaccgttctcctcaaagttg

SEQ ID NO: 22091 - DNA, 239 bp, Glycine max
  Clone ID: PAT_MRT3847_119952C.1
agatgattgaaaaataaaatgtttttagtcacattttttctctctctataacggtgttgtgcgcggtggcggcaagagaggcgaccaccatgagaaaccaatcgaggtagtcggagcagacgaagaggcgggagataaaaacagcggcaagtgaccccaatgctactccgaccctgactcttgcttcatcgcctgggatccgcaattggtttgactccctctctgcttcgccactgcaa

SEQ ID NO: 22092 - DNA, 449 bp, Glycine max
  Clone ID: PAT_MRT3847_119953C.1
gcgaagagaaaggatcccactggtcgaagctctgcggctgtgttatgcttctcaacactgtcactgactcgttgtcttgcagaagataacgcactcgttatcaacttgtactaggaatcatgccctcaggctcgtacacatcatcaaagaacaacgccagcttctctacctgcgccacaagaacactgttctctcctggctcatatacatcttccatgactgtgctgttcatagctgcgatgactgactgttgctgaactccacaagaacgagcttagtctgagaatgacacataaagaagctgtgggctgaaaaagttcatggaccctgtcaccctccccgatgctttagaaacggcttgcccatgagttgcttactgtgctaaaaacctcgttctctctgacaaagatagcattgtttcactacgaggtccccctatacctcttaaa

SEQ ID NO: 22093 - DNA, 299 bp, Glycine max
  Clone ID: PAT_MRT3847_119954C.1
ttaggctcattcatcattgtttggcgcttagaaaaaaaaaacacacatttgccaaacttgaagtctctctttaactcctctctgtggggaatcccagatctccaacccagagtccaagccccaccttcatctggttcgatcgagatggctcaaccaatctcagttagtgggccgcctagcagttctgtgcggagccatagactcttctggtctgggctggaacttctatattcataagagcgcagcagagaagtgttttcagctcgggaggtcctccatctttgtggatggcttgaact

SEQ ID NO: 22094 - DNA, 306 bp, Glycine max
  Clone ID: PAT_MRT3847_119955C.1
attcccgggtcgaccgcacgcgttcgagacactcaccgaggagtccttacaccggacttctgggacgaactctcgtggccccttggggtgaaccacggacgcatgggaaccgtctgaagcacatatcgagacggctgatcatactactgacgacagttcaagtggtggcactcaagcctgagtacagtacgtacgcgaagcttaatgcggtagctgttgaaacggcgaagatcctggttaatgaactgaaaagcactcacattacagtgacttgtattgcaccaggacctattgatactgatatga

SEQ ID NO: 22095 - DNA, 306 bp, Glycine max
  Clone ID: PAT_MRT3847_119956C.1
tgcattcgtatttctaactaattattgagttaattatggttacggcattgttccgcagagggatgagctaactcttgagttggttggtacgaactagggatatccgtccgtcgaaccttgcatcgatgcttccaacgattccactatcaatgttactttgcttgatcactttgctaagaatccacttgatagcactgagtatctgtgctaatttcgcagtgatcatcgtagatgtgcactatcagctaccataagttcacgcaaactatgtcctaaactttgccctaacgttactgatgatgattg

SEQ ID NO: 22096 - DNA, 607 bp, Glycine max
  unsure (1)..(607): unsure at all n locations
  Clone ID: PAT_MRT3847_119957C.1
cacgcgtccggtttgagagaaaatggggtctctaatggcctatgctacacttactctcgtattggcaataatagtctctctaagcttgccatctcaaacctcagctgatgacaagtacgactattcatctcctccaccaccagagaaaccctacaaatataaatcaccaccaccaccagtctacaagtacaaatccccaccaccaccaccacctgagaagccctacaaatacccatctccaccaccaccaccagtttacaaatacaagtcaccaccaccaccctacaagtacccatctcccccaccaccacctaaaaagccctacaaatacccatctcctccacccccagtttacaagtcaacaccacccccaccatacaagtacccatctcctccaccaccaccttacaagtacccatctcacccccagtttacaagtacaagtctccaccaccaccatacaagtacccatctcctccacccccacctaagaagtacaagtattcatctccacctcccccttaccactactaagtatagggatttactatatatatatatcatcccatggatctgaagaatgtgtgcanataaagaagattgatat

SEQ ID NO: 22097 - DNA, 332 bp, Glycine max
  Clone ID: PAT_MRT3847_119958C.1
caaataactcattccttgattagactaacagaccatcaagactgtttataacgtcgtgtatacaaagatggaatcattcaagaatgaaggatagtcttccaattatgaaggttatccctaaacaggatattctaagtaaatttatgccggcggcgggcttaattgatgaccataaccagccgagtgctttttctttcatagaaatcatggccgccgtcttgatctaagtacactttggcataataacatgacctcataagtgagaggaacataacaaccgcaaccaactgtgctacctgtatttattttgcctatcttaagaaggaaatctc

SEQ ID NO: 22098 - DNA, 683 bp, Glycine max
  unsure (1)..(683): unsure at all n locations
  Clone ID: PAT_MRT3847_119959C.1
ggggttgcggccgtccaacacgccggcccgagtggagaagcaagtggcgaatacgacgtcgtgggggtagcgaagcctatttccgaagcaagatcgtggtcgttgttgggggttcagacagcgcaattgaaagctcaggagcattgttccgataaatctgtcgcaggaaaacaaaacaaaaggaaaaagatgattagcattctcacccaggaacggcttctgggagcttcattgggagttgtattgacgggagttgttgtgtttgagcaacgcagatacatctacgcttctatttccgattcccaatctcaggttaaagaacctatatttgggaagaagtcacgttctgaatttgcacatgtatggaacaaaactgtggatcagacatttggacctttgataaagtctctcagctcacgtggatggtagaaatgttatgagtgattttatttttagtaccatctcttgtaattttgatatcaaaacatacaatacttggccttatttttgccttattctaaatagtttgttaaatggttgtgcacatgggcagtgctgacgatgtttaaaaaccagtgtaatgttttctgcaatacttttgtgttgctttaatatatgaatcaagatacctgattcttcttccttggagcactactaatttctanatattagaatttacttac

SEQ ID NO: 22099 - DNA, 1709 bp, Glycine max
  Clone ID: PAT_MRT3847_11995C.1
caaggacctacttgaagccgaaacagtgttcaaggaaatgccacaaagaaacgttgttgccgagtccgcaatgattgatgggtatgccaaagttggtcgcttggatgatgcccgtaaggttttcgacaacatgacccagaggaatgcattttcctggacaagtttgatttctgggtattttagttgtgggaaaattgaggaggctttgcatttgtttgatcaaatgcctgagagaaacgtggtgtcctggactatggtggttttgggttttgctcgcaatgggttgatggatcatgctgggaggtttttttatctcatgcctgaaaagaatatcatagcttggacagctatggtcaaggcatatcttgacaatggctgcttcagtgaggcttataagctcttccttgaaatgcctgaaagaaatgtacgttcttggaacatcatgatctcgggttgcctaagggtcaatagaatgaatgaggctataggtttgtttgaatcgatgccagatagaaatcatgtttcgtggacggctatggtttcaggtttggcacaaaaaaaacgattgggattgcttggaagtatttttgatctcatgccttgtaaagatatggctgcatggactgcaatgatcactgcatgtgttgatgatgggctcatggatgaagtttgtgagcttttcaacctgatgccacagaagaatgttgggagttggaacacaatgattgatggttatgcaaggaatgatgacgtaggagaagccttaaggctattcgttttgatgctaaggtcttgctttagacccaatcaaaccactatgactagcgtggtaacttcctgtgatggcatggtggagctcatgcacgctcatgcaatggtcatacagcttgggtttgagcacaacacatggctaacaaatgctcttattaaactttattccaaaagtggggatctttgctctgctaggcttgtttttgagctactaaagtcaaaagatgtagtatcatggactgccatgatagtagcctactcaaatcatggacatggtcaccatgccttgcaggtattcacacgcatgctagtatcaggaattaagccagatgagatcaccttcgtgggactcttatcagcttgtagccatgttggtcttgtcaaccaaggtagaagactgtttgtttcaatcaagggtacatataatttaaatcctaaagctgagcactattcctgccttgtagatattctaggtagagcaggacttgtggatgaggcaatggatgtagtatccactatccctccttctgagagggatgaagctgttcttgtggcattgcttggtgtgtgccgtcttcatggggatgtcgcaatagcaaattccattggtgagaatctattagagatggagccatctagttcaggggggtatgtactcctagccaatacatatgctacagagggtcaatgggatgagtttgcaaaaggaaaagaatgagagagagaaatgtgaagagaattcctggatatagtcaaatacagataaaagggaaaaatcatgtttttgttgttggggatagatctcatccccagattgaggaaatttacgtattgttgaaacagaatcttcaacctttgatgagggaaatgggctgcacaccagagaacttgctactcgtagattaatcctcaattaattaaagactaaccggagttac

SEQ ID NO: 22100 - DNA, 182 bp, Glycine max
  Clone ID: PAT_MRT3847_119960C.1
aaaaaatccgaccgcttatatttagacacacacggccactgcccagattgattcatataacacataacactgcacggtatataaaattttagcttatttgtcttaaactggcaatagatgaggatcttcatcatcatctacatcacccaccttactcatactccctaattctgttcattttt

SEQ ID NO: 22101 - DNA, 2069 bp, Glycine max
  unsure (1)..(2069): unsure at all n locations
  Clone ID: PAT_MRT3847_119961C.1
aaatgtttactcaacttcatttcacatatgaccaataagagtcccccagagaagtttttaatcccaaaatattggcagttagtacaatccagatgtgaatttgaattcaatgcaggaactaaacatttgtttccaaataatggacctaccaaaccaaattgcaccaaccattctttttaacttatatagaaaacaagttattaaaggatgcaaaacatggttgtgataattaaacttgacaatgagtggtgaaaaaaacactccaaaatgatgactttgactagcatgagaatcagcttgatccgctgttgtgtgattgcagaacgcggctgtcaagtattccagttctgttggtgaatatatttgaacagatgaaatagctgcaaaataaaatgagttctatatatgatgtccatcaatcttgaaagattacggctgcgagaagacgacagaaggggacgggcagaagcagaagtgggtctgtcttattcttaccccttggggccttgctgttgttgtgaagccctcttgtggggttcccttctgcttcataagatagactccttcaaacacttagagggaagaagaaaaaaaaaacgtctagaatcaacataaagtcaggcatctggagattctgattccaagggaaggaagtgattgatggagaacaagtatagtctaaacaggcagaggagtggaatatggaattgcttgagagatggagactttgaagaagaagaagtttgggctgttttcaaggaaaaacctgattacaacatttctggagttcacaagacaagggaaaaagggtctttttctcctcaagctgtccctaggactctcccaagtgcagcaaggatgatcccaaggactagtagtggcaatagtagtgctagttcctcacatgaaaccaaggttcttcagcaatcagcacctctcaacattcctgattggtcacagatttataggaacaagccaaacaagaccacccccaagagtgtttcaaggtttggtgaggactatgatgatttctatcatcattctgttaatgatgagggtgatggtgatggtgttggtgttgtcaattatggtggagggtatagtgatgatgaggaagaggaagagaatgaatatgatacaaaactaccccctcatgagtttattgcaagaaggcttgcaaggagtcagatatcctcattttcagtttttgaaggtgttggaaggaccctcaagggtagagatcttagcgaagtgaggaatgctgttctctcaaaaactggtttccttgaatcattgtaataaaaggggtttccatgaatcaatgaatcaaatttgtgatgtataggggtagggggtaggtagtggttgcttagttattgagattgtgtgcatgttgtgtatgaaagaattcgtttaggcatttaccatgaaaaatgcaatgattcaacttggttatggcaattgaaagtgcttttgtttgtaaaaaaaaaaaaaatgtttactcaacttcatttcacatatgaagagagtcacccagaggagttttttatcccatatgctggcagctagtactatccagatgttctttcatcagtggatttgaattcaatgcaggagctatacatttgtttcctgctgatctacctaccaaaaaacttgacaatgggtggtgagaaatacactccaaaatgatgactttgactagcctgagtatcagcttgatccgttgctgtgtgattgcagaacgcggctgtcaagtactccagttctgttggtgaatatatttgtacagatgaaatagttgcaaaatataatgttttcattcttttatgtccataaattttgagtgttatggttcattcctgaagatgaaaaatgagttgagatatccatgtaatgaataaatgatgatgctgcatgtcacccatgttatgtcatagtttcacatgcgtgccatcacttgcgcctctcatcaattgttgttcattactacccgtcaaatttatggttgtggttgctttataataaaggcnaataaaaatggtaaaaaaaaaaaaaaaaaagacgac

SEQ ID NO: 22102 - DNA, 683 bp, Glycine max
  Clone ID: PAT_MRT3847_119962C.1
accatgttgatttgcctttattataaagcaaccacaaccataaatttgacgggtagtaatgaacaacaattgatgagaggcgcaagtgatggcacgcatgtgaaactatgacataacatgggtgacatgcagcatcatcatttattcattacatggatatctcaactcatttttcatcttcaggaatgaaccataacactcaaaatttatggacataaaagaatgaaaacattatattttgcaactatttcatctgtacaaatatattcaccaacagaactggagtacttgacagccgcgttctgcaatcacacagcaacggatcaagctgatactcaggctagtcaaagtcatcattttggagtgtatttctcaccacccattgtcaagtttcattaacacaaccattttttccatcctttaattacttgttttctttataagtcaaaaagaatggctggtgcaatttggtttggtaggtacatcagcaggaaacaaatgtatagctcctgcattgaattcaaatccacatctggatagtactagctgccagacatatgggataaaaaactcctctgggtgactctcttgttcatatgtgaaatgaaattgaataaacattttcatcccatcagggcgccaaaaacgacagttcataaatataacttggagcactaaattga

SEQ ID NO: 22103 - DNA, 135 bp, Glycine max
  Clone ID: PAT_MRT3847_119963C.1
cggcgtgcgagaagacaacagatgggggaactgtgaagtgtattggtcactgacctatcttggaagagtttttaaggttgaacctttaaacccttttggctttagaatcttatatctgagactctgctgctatat

SEQ ID NO: 22104 - DNA, 434 bp, Glycine max
  Clone ID: PAT_MRT3847_119964C.1
gaaatccccccaccagcctcccttcgctcgatttctccaaaggataccgcagcatccgaatcctctcacgacttcttcctacctttaacgatctccttacgacctatcaaacctacttccatctactcaaacaaacaagaataacccaacatgtctggtttcgagaacggtgtcggcctttcggtcaacgagcagaaggacaggaggcctagccaggtcatgaacgcttctcagctcagcgagcgtggcagctacgccaacattgccattcccaacgagaccggcactggtgctgtcgaggttcctgccaccagggacagcgttgccgatgcctctccctacatgcacaccctctcccttgctccctcccagaaggacaggagaggttcccgcaattccttcggtgctcagctccccattcccaggtcgaagag

SEQ ID NO: 22105 - DNA, 610 bp, Glycine max
  Clone ID: PAT_MRT3847_119965C.1
ccacgcgtccgaaggccatagggacaaaatcaccatcagctgtaatcgaggaatctgggaatatctcatagtcatccagccttgcaggggcttgtctatttctctgaggtctcgttgatactgcatcatcatgaacaacattgtcttctgttcctacatccgtgtttagaccttcaattctggttctcaattcagatgtgccctacttatcactccaattccaggattgaccctcatcaaacttcaaatctctactcaacactagtttctgagtttgaggattaaaaaccctgtatgcaccagtagaatggtagccgagaaatatgagtttctcactcttgtcatccaattttctctttattgcgtctggaatatgcttatagcagatagacccaaagattctgagatggctcacacttggtctagtgcctgaccagacttcttctggtgtcttgtcttccaatctctttattggacatctattcagcagatacacagatgttgaaacagcctcaacccagaatttctttggcaggttctttgtctttagcatgttccttgccatgttgaggatggttctattctccctttctgctatgccattgtgctg

SEQ ID NO: 22106 - DNA, 205 bp, Glycine max
  unsure (1)..(205): unsure at all n locations
  Clone ID: PAT_MRT3847_119966C.1
ttttccttttttttttttttttttttttttttggggcattcgattttatcaacctaaattttctccaaggtctcaccaaattaaaagatttccgcaaatctgcttcaattaaggtatccagattttactttctagggaaatcatttttcttcatcttaaaaaaaaaaaaaaaaaaaaaaaaaaaaaaaaaaanccccggccccgg

SEQ ID NO: 22107 - DNA, 274 bp, Glycine max
  Clone ID: PAT_MRT3847_119967C.1
caaaggttgctgtaggtagatgtgtattgcagtagtgctaagtgctaatacgtgcagtgaacaatggattctgcatcagcatctctgctcaagtcttcacttgttcttgacaagtctgagtgggtgaagggacaaacccttcgtcaaccttctgcatcagttgtgagatgcaagctcaccaccccatcaggcctcagcatcagagctggttcctatgctgatgagctcggaaagatcgcgacaacagtggcttcaccatggaagggtatgttgg

SEQ ID NO: 22108 - DNA, 395 bp, Glycine max
  Clone ID: PAT_MRT3847_119968C.1
gacaatgggaacgcgagccgccaggcaggccccacaaacaggacgcacggctggcggcccggctactatcatacactgcgatgaattcagaggttacttccccacaaactacgaaagtgaagtgtcttacagatgcacgattatttattgatgcgactgatgtctacaggggacataccaagcaggaattttttcagtggtgatcaaaggctacagggagagcaaaagaatctgccacacattaagcctagtgacctttgttcccacttcgtgcttctaccctcagaatttgatagctggtactagaaccccgatattcattcttaatactgcctaagactcatggcaggaccaatcaagcctagcttcttcataagaaaatcctcatggctttt

SEQ ID NO: 22109 - DNA, 302 bp, Glycine max
  Clone ID: PAT_MRT3847_119969C.1
gagctcactagttggtggccgcccgctattatcattacaggggcgtttttttaaggaaaaacaccgctgagaccaccaataaatcccatacccaagaaacgggagaccaaaaactcaatgcccaaataagaaaagggagacctaacaaaaccgaaaagaagcagaaaattaaccaacaggccttcaaaaggggggaaaagaggaaaactcccaaggaagaccaccaaactccgcaaaaaaccaaagcaaccacgagggtgaaaagcaacccaacacaaaaatcgggaagaaggggaacagaa

SEQ ID NO: 22110 - DNA, 346 bp, Glycine max
  Clone ID: PAT_MRT3847_11996C.1
ctgggctaatgagcttattgctgtaattgggtgaacactcctggctatgatgggtttaaaggatgcgtaaacagaccttactgattgaaacccacttttcttgaaaggaagaatggagcgtagctgagcatgctatgtagtaaaaaagattaatatatataatcattcaatgacatattatgaacctgaaactataaatccttaacaaggttgtaaattcattttaaaatattgcaatcattatgctcatatgtacttgataatgcatctttaatgaggcaaagacaagatgagggccatcatacatgacataacatcagtgtatctcacataaaccatcacaact

SEQ ID NO: 22111 - DNA, 645 bp, Glycine max
  Clone ID: PAT_MRT3847_119970C.1
accgttcttttttttttttttttttttttttttttttttttttttttttttttttttttttttttttttttaaaaaaaaaaaagcccaaaatgatcttttatttaatattggggggcgaagggcctataaaaaacccccccgtgagaataaacccaaaagtccccccaggtgggggggcccatcccataaactttgaacaatcaaaaatataaaaggctcataattccaaaaccagggggggcccggacccactaatacaaagggggcaatccgtaagcaaatccaagagagaaaggggtaactaaaagcacatccaaaccccccccggggtttgctgagtcatgccagtttggcagcaaaaaacatcctaattatgcttaccaaactgatggggaatgttgcccttgccaaaattggaaagctgcccctttcgttgctgggatgaccatttgtagggatccataacaaagtcctttttgggagagggatcaagcccaaggagatcccctatctggggcatcgccccagtctccaagtccaaaactccatcatttttagacaggggggcgttttcacttggaagaaaccagcccatgttcccgttcaaaagccccccccctttcttactaaaatccggtggcaaa

SEQ ID NO: 22112 - DNA, 550 bp, Glycine max
  Clone ID: PAT_MRT3847_119971C.1
ctcgagccgatcatctctatattattttttaaaatatccaacatttgtaatatatgaaaacttattggctctttagaactaaaatttgaatatttcaaaaatataaagaccaaaacttacgattctgaaattcgtaagatatgaaaactaatgattgaactaaaagcaaataggatccatttttaagagactataaaataatgcttttaaaaataaaactaatgattgaactactgaagacactaattaaatttatatttttaaatattatctaacttttttttcgggcacgtcttgtgcttgaaaatggccatcttcaataagaatattcactttccttaaaaaaataataatattatctaacatttgaagtaatgaaataatataaaatcgtaataagaaaccaagatataaaaaatgtaaattaatataaatgattaaattgtgtgttttataaattaaaaattaaaattaattgataaaataatttatacctgtgtaacctttaagatgtgtttttatttttcttaaaaatatttaagattaaatt

SEQ ID NO: 22113 - DNA, 628 bp, Glycine max
  Clone ID: PAT_MRT3847_119972C.1
ttcgcggacgcgtggggttaatttcttcaaaggttgtataaatacacacgaatacgtgaggaacaacatggtgttctctcaatcagcaatattacgtgaggaagttgaagaagcgatgagtattcaggagctcattaagaaaccactcacttcagttcctcaacgttacattcaactacacaataatgaaccttcacttctcgcaggtgaaacctttagtcacgcactcccaaccatcaacctgaaaaaattgatccatggagaagatatagaacttgagttagaaaaattgacctcagcttgtagggattggggtttctttcagttggtggagcatggaataagctcagtagtgatgaaaacacttgaagatgaagttgagggattcttcatgctccccatggaagaaaagatgaaatacaaggtaaggccaggtgatgttgaaggctacggaactgtgattggatcagaggatcaaaagcttgattggggtgataggttattcatgaaaatcaaccctcgtagtattagaaatccacatctttttcccgagctcccttcatcactcaggaatatcttagagttatacattgaggaattgcaaaaccttgcaatgatacttatgggg

SEQ ID NO: 22114 - DNA, 252 bp, Glycine max
  Clone ID: PAT_MRT3847_119973C.1
aacaaattggtctgacctgccagattcgagtttgtgcgggaaaaccgagtgggagcattggagaaattggccagcgatcaaggggagaactgacagagctgcaacgtgacattggcctcatcaaggacaatatgccagacatgaaacagatcaaagaattgatcttggagtgcatgctgagcaagaaaaaggaaacctgcatcgaaaaaaggaagagttccacaatgttcttgaataagaggaccaacactt

SEQ ID NO: 22115 - DNA, 434 bp, Glycine max
  Clone ID: PAT_MRT3847_119974C.1
gcgtccgaatattcagaagtgatgagaacagtataatgaattatatgtactcatcactcggcttcaacagtgatcactacgtgactaatcttgttttatctgtatgcttacatccttctcacccttccccttccctattattttgaagtactagtcactcagaatttcagctataaatacttcaggttgtgtctttaacagacttaaaaaccaagcaagcaaaatgtcattattacacctaataaagctaacggtcatgttttcatattatctaattaatacctagagttcaaataaaatgcctagtatttttggggctgaagatacaacccataaaagtaaagccttggtgttataatacccaagagccaatattctaacgtgaggaaacagacaaatgttagtaaaatacgaacacgataatttctgctaac

SEQ ID NO: 22116 - DNA, 405 bp, Glycine max
  Clone ID: PAT_MRT3847_119975C.1
agctaacacactctgcacattatgccttgttcatagaacgaaaaatattatagggagaggcacatggtgctaagaagacaacactgatcaatacacgcctgagccacccaacgacgatgctatacgacgaggctcagatgcttctgtgaaccgctattatgacgatggccgtacacgaaacctacggtgcacaaagattatagcatctggaagcactgatgcggactcaagatgagcaaagggctgtccgacgagcatgcctgcacgactagagtagcaaggacagattcattgggacaatgtacaataacgaaacccgacgacctcgcccaaatatgcagtgaccagccacagatcctaaggacaccacgagcctaaatcggtaaacactgtaatctggacgag

SEQ ID NO: 22117 - DNA, 224 bp, Glycine max
  Clone ID: PAT_MRT3847_119976C.1
gacgacccgcccactcgcccggcggccgcccttttaaaccgcttttgtttttacaccattaatgccccacagaccaagggggaaaccctggggaggacacaagggccaagaaacagaaaaaaacaaccagacaagaagcagaagcaccaaccccaaagcaagcccaaacagcggaacgccagacacacaaggaacccccccgagacacggaggcaacaagggcc

SEQ ID NO: 22118 - DNA, 426 bp, Glycine max
  unsure (1)..(426): unsure at all n locations
  Clone ID: PAT_MRT3847_119977C.1
gctactcctcatatatattgagaaattattagatgattttaaattattatatgtccatgatttcgaccaatctaattttcgtatgacactaatcaaatttttgtaatgtactgactagaaagaattattaattgtcatgtatacattagtanctactagtagctagagatcatgatagtaccaaactacttaataacttaaggataaaataaaatttagatgtagttcttttggagttttaactcggtaagtctttatcatacggataattaagctgaaatttcaattctaataaaaaaaataccaaaaagttatataagaaagtagatttgtcctatttttttattttttttgagaggagttatgtcctaattcttgtcgctcacttttaatcctgatagtttttcaatagctaaaatgatttct

SEQ ID NO: 22119 - DNA, 1223 bp, Glycine max
  Clone ID: PAT_MRT3847_119978C.1
cacaggcagttgaaacctgaaacatttttattaatatatacgaggatacaaatttacagaggggggtgattatattctcttccaaaaaaaaaaattaaattcctggccgcttgcaaaaaataatagagtagataacgaaagacaaactgtatttgactggttagtcaatgttaagcctccacaattggtgatgataggtaaagtagtgtgtcatgtatatgaatctctttctgggtgggttctgtgtattcattcgtacagcattaaccgatggcgagatacacacgttaaacattcttccaaatgaaacccatgtatgtgcagcaaagccatgtcccattaggacaagcaaatatatatagatgatgttttaccaatgtgcactctttgctgtaagctatgatgctgtgtttggcgattttccagaaccatctaagacgatttcaaatagatcagcctcagactcctcatcaaaatccaatgttcgattattgttgttattgttattattattgttcccattgttgtggcttcctttggttgtggaccgattgagccactgagaatcaatccttccaattgagaatagctccttgctgtcatcatagcctatggtagcagcaggggaatttacaagtggggctatgaagcatggatttggtgttctctgggcatttgcaggtgcatatttaaatgcactttgtccaaaattaactaacaccagaatgtctatgtttgcagccaagattggaaagagtggtgtaccaaattcctctgtctgacagtgaatgacatgcattagctctgagtctaatgtgaagaaaaccttcttctgcctaggatcaaatccacaaccaatcactctatcggttcctacccattctgccttctctgattcgcttacaagtttcattccatcaagatagagagaaccgttggagttgaagccaatgctcccagtgtagctacctggaactctcaaaggaacagaacccccagcagttaacccaaaagagaacatcacagattcacccttcccaccttctccttcaacattgttgattttattactaccattgccactagtaacatgaaccaaagcctccgaattccctttaacattggagttaccttgaaccaaaagcttggtcttttcaccttccacactcttcccaacaaactcatactcatccccacgtgagtacaaaatggtcggacgcgtg

SEQ ID NO: 22120 - DNA, 1008 bp, Glycine max
  Clone ID: PAT_MRT3847_119979C.1
catgaggctctcccacaaatagcaaagaatagcaccaagtggttgagcattatttcaaaactccaatgcctacttctatgtaccccttcatattccttagcattctcatctccatccccctcacaggtgggacgcagctcatattggtgaacaactgccaagagagtgtgtggcccggaatccttggcagtggaggccacccaactcctaaagacggtggttttcacctttgcagcggcgacgaggtggtgttggaagtccctgaaggatggtcagggagaatctggggtagacaaggctgttgctttgacaccaaaaccggaaaaggcacttgtgaaacaggtgattgtggaggccttttgaagtgtggaggaatgggtggagtcccaccggctacccttgtggaaatgacacttggtacccctcaatccgccttgcatttctatgatgttagtttggttgatgggttcaaccttccagtgtccatgaagcctgtgggtggaggaataggttgtggggtagcagcttgtgaggctaacttgaacgtttgttgtccctttgctttggttatgaagaggcaaggaaaggtagttgggtgcaagagtgcttgtttggctgcaaaatcagataggtattgttgcactggggagtttgcaacaccaaaaagttgtaagccaagtgcattttcacgtctttttaagactatttgccctaaggcttatagctacgcttatgatgattcaacagggcttaagatttgcaaagcacatcggtatgttatcacattctgtcccccaaaaggttgatgggggcataacactagtagtgtgtgatgaacattgaagagatgtgtttttataattggtttattaattgttgttgtttaatctgatcgatgttgtgatgattctcttttcttcttgttcaagcaatttgccaaagtgaagtgttgaatcatttgaaactttcatgttgtacaattattaatgtttaatatgttagatggtt

SEQ ID NO: 22121 - DNA, 428 bp, Glycine max
  Clone ID: PAT_MRT3847_11997C.1
gcatgcaatttttgcttgcctctacttatgttttgaaatccaaaattatattatcatttacggaacattaggtaaacataagattaatcgcttatttattaagtgcttcttttgataagtttcaccgtgaaatttattgaaatgagttaaaaaagaattgagaagggtcataaaaccacttttataagcttctaaacgcctatttggtgcttaggataaggtaagctcaaatatgctccaagctcttccaaacaccccttagagggatgtttggtataaggaaagattttttatatctgaaaatcataaattctaagaatcatgattcttaaaaatgactaaaatctatttgattggtcataagagtaacgtagtatttttattgcagtaattttttttttcaactgttagattcacacttcttccgt

SEQ ID NO: 22122 - DNA, 1015 bp, Glycine max
  unsure (1)..(1015): unsure at all n locations
  Clone ID: PAT_MRT3847_119980C.1
ccacgcgtccgataaaatcaatccaccaaccaacacaaaacctgaatcatattattctcaactagatcatggcctcttctaactcctctctttctctccttctaccttctctcacaaccctcattctcctccaaattcaaacatgtgtctcctcatcacaattaacacaaaaacccctccttctgcctctcaaaacacaaacacaaacaccttcacgtaagctctcattccaccacaacgtcacactaaccgtctcactaaccgtaggctcgcccccacagaacgttaccatggtcctcgacacaggcagcgaactctcctggctccactgcaaaaaactcccaaacctaaactcaaccttcaaccccctcctctcttcttcctacactccaaccccatgcaattcttccatctgcaccactcgaacccgagacctcactatccccgcttcctgcgaccccaacaacaaactctgtcacgtcatcgtctnctacgccgacgcctcctccgccgagggcaccctcgccgccgaaaccttctcccttgcccgtgccgcgcaacccggaacatattcgctgcatggactccgccgggtacacctccgacatcaacgaggattccaaaacgacaggtttaatgggcatgaaccgaggatccctctcgttggtaacacaaatgtcgcttccgaaattttcctactgcatctctggggaggacgctctcggtgtcctcctccttggcgacgggacggacgccccgtcgccactgcagtacacccctttagtgacggcgacaacctcgtcgccgtatttcaaccgtgtcgcgtacacggtccagctcgaggggattaaggtttcggagaaactcctgcaacttccgaagtcggtgttcgtgcccgaccacaccggagcgggtcagacaatggtggattcgggcacccagttcacttttcttctcgggtcggtctacagttcccttgaagatgagtttttggagcagacgaaaggagtgctga

SEQ ID NO: 22123 - DNA, 310 bp, Glycine max
  Clone ID: PAT_MRT3847_119981C.1
accggacttggcattacattgaaaaaaaaaacctttttacttttcaattatcaaaatggctgcggggggtgtcacaggagcggggctaaccctaaggatagggttggcaatacctctttcctttccaaccccctttggaaccgttacaatggccgtatccttcgaccccaagaacggcaacaaactcactcttaccaaaaccgaggaagcttttcttgctgccaaggagctgatgcttggaagggtcaactccccaatttaggccttcaaaaccgtgggtggacaaccaattgtgattgattcaatcaaa

SEQ ID NO: 22124 - DNA, 726 bp, Glycine max
  unsure (1)..(726): unsure at all n locations
  Clone ID: PAT_MRT3847_119982C.1
ccacgcgtccgggagagcttaaaaggctggtccaagagggaaaaataaggtacataggattgtcggaagctagccctgacacaattaggagggcacatgctgttcatcccattactgctgtgcaactggagtggtccctttggactcgtgaaattgagcaagatattgttccactttgcaggtacataaagagggtgtccataatgtaaaatgttgtttctgtggagaatttgctgatttgtttcctgcttcccagtcataattgagtttataagtttagatagcatgaagctctaccttacaagtggaacttgtggattatttatgattgtgaacaattatgtataaaggttttaacaattatttcaccaaaaaagaaagtcaatgttaagttgtcagtttttgttttgaaggggctcctattgtaagggtcataagcatttcttcaggaaatgacatcactcttctatgcaatttcatagctgaagttggattcctcttatgtatcttacaggaaatcaaacatttaaggtgtatatttcgtttattgatgattttgataagaactntgcgagaagctagttgttgtagttagagagcccaaggccttatacttccactgtgacactcaagtttctgattcaaactgatagaaactagatcagatttatagagagaaaagcttctattaacagaaaagtgtgcaaatgattcccaggacttttg

SEQ ID NO: 22125 - DNA, 493 bp, Glycine max
  Clone ID: PAT_MRT3847_119983C.1
acgaggtcaccggggtatgctttgcttctgctggttcaggaattgatgatctcactgctcaaatacagggagttctttcactgccaacacaactgggaatgtttcgagaatacataggaaagctgacagcacttgttggacaacaacgagccgctaacatcatatccaacagtgtgtatcttgtttctgccggcaacaatgacattgccattacctattctcagatattagccacaacacagcctttccccttatatgccacacgtttaattgacaccacttcaaatttcctcaaggttcaccaccttcaaacttcaatttactttatcattaacattgacacgaaaaataaacatatattaacacacacaaaaattatatcagagtgacatattcaatgcctaattctagggcagacatatacatgcatttttactgtaatattaattatatatataattacaacttgaagagtctatatgaacttggagca

SEQ ID NO: 22126 - DNA, 319 bp, Glycine max
  unsure (1)..(319): unsure at all n locations
  Clone ID: PAT_MRT3847_119984C.1
ggaagcttganactttcatttcccacacattcccgagcgagagatagagattttcgctctcgacataacatacacacgtctagatggctcgtacaaagcaaatcgcgcgtacgtctaccggtggaatcgcgccacgtaagcagatcgccaccaacgcagcgatgaagtcagcgccagagaccgtgagaatgaacacgcctcaacggttcaggacggaacgggtgccgctgacggataatctcgaggaccacaagttcatcgagcttgacatcaggactcatctatttcagaagcacgttagagacatcacgcaggattt

SEQ ID NO: 22127 - DNA, 182 bp, Glycine max
  unsure (1)..(182): unsure at all n locations
  Clone ID: PAT_MRT3847_119985C.1
gctgctcatatcgacaggggctcaccatacngggggattttaaaaaatattgggggttctacacaacaaacgaatgagttacgagaaccgacatcgctccctacacacagaatactggtcagatcttgaagagtacaaccggcatcaggaatcacgataggaggaggggctaccatagactg

SEQ ID NO: 22128 - DNA, 247 bp, Glycine max
  unsure (1)..(247): unsure at all n locations
  Clone ID: PAT_MRT3847_119986C.1
cgtccgctgnttcttgcccatgnnagctctctagggacctgggaagcggcgcaaagtcctctgctcccctgtgtggnngtctggaagggagagtngaagacgaggaccgaggaagtnngtggaaaatccgttaaacgtntacgttntgctgttgtctcgngggaagagatcttgtgggctgttttttttttgtcggttcgcnngnagaacctagggggggtgtgcccctcttggtagcaacatcgcc

SEQ ID NO: 22129 - DNA, 469 bp, Glycine max
  Clone ID: PAT_MRT3847_119987C.1
gacccgaaaaaggcccacttcattatttaaaatggggttcaaaagttttataaaggggtcacaaaaatattttacaagctaattctttttgggcgctgggggtaaacatttttttaaacttggtcactttcttttccaagggggggaaaaaaaaaactttttttaccccccccccccgggggggtttgggcctttaccagagggtccaaatttttggcgacctcccctgggatttcctttcaacaaacccggggtggcctttggtcccacaaaaacacccctttttggaaaacctccccggaagaaaggccccatttccaaacccttcaccaaaataaaaattctttttattccaaaagaacggcctttggttttttttttttgccccattttttttggaagggggggccccacaaaaaccttttaaacaaggggggtttccaacaccccccaaagaaaaaaaataaag

SEQ ID NO: 22130 - DNA, 632 bp, Glycine max
  Clone ID: PAT_MRT3847_119988C.1
ctctctccttggggtttttaattggcttcttcatattgtacgtaccgacatgacccacgcgtccgggggttaaacactgcttctgcgtaggattcgatgccgctactccttcttcagtttctacaactgagtttcatataaagctgcttactacaaaccaacaagattaactaagaaatcatcttttgggacgatgcaaactgtttatcttaaagagcacgaaggaaatgcgcacaattttgtgggcacgttgtcttctgcagcttcagcaccctggtggagtgcttttggatctcaatctgttcatcagggagagtcttgtggccaagtgaaacccttttcattggagctgccaaactgcatagaccaacttgctgccactaagccactagcaagaggagctgaccaagtgttgggtaaagggcacataactcagtttacaatctttccagatgattgtaaaatgtcagatgatgcgcaaaagcttcagacaaccatgtcactgcagtcatcgcttactgatccacagtctcgttttgagaaaagggttaagcttgccacgatatgtgcaaaatatccctatacggatcaatttatggactcttctagcttatgcacctcaatttcgggac

SEQ ID NO: 22131 - DNA, 677 bp, Glycine max
  Clone ID: PAT_MRT3847_119989C.1
tcgagtggtgtgttgttttccattacacttgtactccttctgcgtaggattcgatgctgctactccttcttcagtttctacaactgagtttcatatcttctttctgttgatgtttatgctgaagactgaataaaaatctgagtgcctatggcgatgcaaactgtttatcttaaaaagcatgaaggaaatgcacacaattttgtgggcacgttgtcgtctgcagcttcagcaccctggtggagtgcttttggatcacaatccgttcatcagggagaatcttgtggccaaatgaaaccctttgcattggagctgcctaactgcatagaccaacttgctgccactaagctatcagcaagaggagctgagcaagtgttgggtgaagggcatacaactcagttcaccatttttccagatggttgtaaaatgtcagatgatgcgcaaaagcttcagacaaccatatcactgcagtcttcacttactgatccccactctcgttttgagataggatttagtcagcccatgttatgtgcaaaatatccttacacggatcaattttatggcctcttctcagcttatgcacctcaaatttcgggacgtataatgctgccacttaacatgtcatctgatgatggaccaattacgtaattcttaagcagtaccatggaatcattagacgt

SEQ ID NO: 22132 - DNA, 342 bp, Glycine max
  unsure (1)..(342): unsure at all n locations
  Clone ID: PAT_MRT3847_11998C.1
ctccttggggttgtgcttgttgttcaaggatggctttttgtaaaaaccactcaggggacatagatgtgccctcccttctgggtttccgctcactgctttctgctttaccattgctaatgggcccctctttacctatttttttgaactcttactgctccaagctaggggggcgagcatgggattacaggccttcaaaacttataatttctttgttgacgccggngatactcccttaataactgctggtgaaggtgccactccttacttaaaaacctttttcttgccttgccccctggctgggcaaaacttttccgtgactgctggggtggccttggctactgc

SEQ ID NO: 22133 - DNA, 1731 bp, Glycine max
  Clone ID: PAT_MRT3847_119990C.1
gtaattcggctcgaggtacgtaccgacatgactccaacctgatggggttaaacactgcttctgcgtaggattcgatgccgctactccttcttcagtttctacaactgagtttcatatctcctttctattgatgtttatgctgaagactgaataaaagtctgaggaaagctgcttactacaaaccaacaagattaactaagaaatcatcttttgggacgatgcaaactgtttatcttaaagagcacgaaggaaatgcgcacaattttgtgggcacgttgtcttctgcagcttcagcaccctggtggagtgcttttggatctcaatctgttcatcagggagagtcttgtggccaagtgaaacccttttcattggagctgccaaactgcatagaccaacttgctgccactaagccactagcaagaggagctgaccaagtgttgggtaaagggcacataactcagtttacaatctttccagatgattgtaaaatgtcagatgatgcgcaaaagcttcagacaaccatgtcactgcagtcatcgcttactgatccacagtctcgttttgagatagggtttagtctgcccacgatatgtgcaaaatatccttatacggatcaattttatggactcttctcagcttatgcacctcaaatttcgggacgtataatgctgccacttaacatgacatctgatgatgaaccaatttacgtaaatgctaagcagtaccatggaatcattagacgtcggcagtcccgtgccaaagctgtacttgatcacaaattgactaaacgtcgcaagccctatatgcacgaatcacgccatctccatgcaatgcggcgaccaagaggatgtgggggtcgcttcttgaacactaagaattctgttgacggaaatggtaaaattggaaatgaagtgcataaaactgttggtgaacaattgcagtctagtggctctcagagttctgaattccttcaatctgaggttggaacttttaattcatcaaaagagactaatggaagcagtccaaatatttctggttcagaggtgactagcatgtattcgcggggaggtcttgacagcttttctctcaatcatcttggatctgctgtccactcttttgcagacatgatagatggtgggcgcggtatgatcatacccaccaaatgggttgcagcagcaggtaactgctgcaaccttaaagtttgatttgcaaagaatcaagggtgggcttgctgtagcattgcaccaggcccatcctcgatgaggccagatgaagaagcttcgtttcagttgcgtgtgctgactgtgacaagtttcgctcggtaagatcgtcctcacatctggtctaggcaatccatccttggctcatactttggcaatccatccttggctcattgtaactgaaggcaactcatccttggcttgatgtacttgcagtaatttgtctttctgcacaggaatgttgttggcatggtacaaactaatgacttgatatcctgatgcagaagacaactatgtttctgtctttgtgtgaaaatgaaagcatgaaactctagttatgtgtgcttcgaataatgtctaaacgtggtgttgtattttgtatttctgacttcgaggaacaatgtattatagaaccttgttctgtggtctttgttagaaaaaataaagcattggtgtgtttttctcctgttgagcaatgtcaaaattttatcatcctttacatttagaaaaa

SEQ ID NO: 22134 - DNA, 373 bp, Glycine max
  Clone ID: PAT_MRT3847_119991C.1
gcccaaagacaaattaaactctaatttcttaattttaaactacctttttaactgcaacgagctgacaccaccaaattcatgtttaaagaccggatagatgacccctgaatcggaacaacaaacgaaggggtgatcccgttcccaaaactgggggggttttttctttcttccctgtaaggggaaacaagttccaaggcacaacccgatatttaaacgccagactgataacgatcttaagaaaaacaatacgtgcaaaaaggctttatccgggctaaattttaaaagaaccccttgagcttctcttgaaaggttttcaatggaaaggggcccgatggggggctccttgcccacgttgcaagagaccccgtggagg

SEQ ID NO: 22135 - DNA, 259 bp, Glycine max
  Clone ID: PAT_MRT3847_119992C.1
cagtcttcatatctaaaaatgttttcacttttccatctcaccatatcttaacgtgctttgcaaaatattcaaaaacctctacatttttaaattaacattcatcttaattgccaaatacttctcattaatctataccattttattataacaatttactacaataatcaatcaaatatctttaataatgttcaaaatcaatccaaatctatcatattgccattacagctcttaaataaacttctaataatgttttcaccat

SEQ ID NO: 22136 - DNA, 269 bp, Glycine max
  Clone ID: PAT_MRT3847_119993C.1
tctcgaattcggcatcgaaaaaccccagcagagtcctcacattgcactctcactctcgcaacttctgcctcactctctcactcgctcaggagtatataatctgagccatgtcagatctcgaagctcgcttgctcagcaagaggaagattgttaggtgaggatagtgtgctgaaataccatgagatcgtgcatatagtcgcagtccttcccatcccctctacgatttatccccgtacataccttggggatggaagatccgagtggaagtc

SEQ ID NO: 22137 - DNA, 347 bp, Glycine max
  Clone ID: PAT_MRT3847_119994C.1
ccaagcccagccaacaacgaccctacagatgtcgacgaggctacctgccacagataggggaccttacagcagatccggcgacaaacacaacgcgctcgcatgacatactaagaagactacaataacaatcagtccacgtacctagcggacattgacaacattaaccacaccgccaacgccgcccgcaatatacatatcctgggcttacctctgaggccaaaacagaaaaggttgaggtataaggcgcataatattctgcttcaaaggtcgtctctaaccatatcgaagaatgcaactgctactaaatggatgcatccaagggatctccaaatggacaatcctactga

SEQ ID NO: 22138 - DNA, 561 bp, Glycine max
  Clone ID: PAT_MRT3847_119995C.1
tttcaaaatggttaaatcatcttctgtagccattatcggtgctgggtcagttggtgcaacgatagcgtatgcacttgtgcttcgtaaagtgtgctctgaactctatttggttgacattgatgataaaatttgtgaaggtcaagttcttgatctatctgatggcactttccttactcaaactaaagtaaacaaaggatcttatgaggatgcaggccaatgtgacattatcattttctctgctggtgccaagcaacatccagaagaaagcagaaatcagcacattgaaagaaattataagattttaatctctgtgttcaactccatgaggccattgaacccacatgctattgtccttttggttgcaaatccagttgatatccttacctattttgctcaacagatatctggattaccaaagagtcaggtttttggagcaggaactttttggattctcgcagattgagatcagagattgctgaaaacttaggtggctgaaccagctgtgcatacctacattctaggtgacaagtgagagaatttcacgtgtcgcttgcagtagtg

SEQ ID NO: 22139 - DNA, 227 bp, Glycine max
  Clone ID: PAT_MRT3847_119996C.1
caggacacacttgccatctagggctagcttgaaagagcctgaggactgcctttaactgaatttgaattcagcattgtccttgcttctgagtatttgctgcatagttgagagcagttcacatcgatttcctggtaggcgtctgcattccctgtgggtgtcctgcttctccatcagtagctgcactacgggcgtagatcgacagactgttgtcacttcattctcctcgt

SEQ ID NO: 22140 - DNA, 679 bp, Glycine max
  Clone ID: PAT_MRT3847_119997C.1
ctactaacagagaggctaggaagttacagccactcataggaaattgattcaattgatacttttagtgtaaaaaaaagacaagattaggtaattaagcacagaaccatttagttgagagagtaatcaaatcaacgatatgtgcatgctaattagggataactcccgacttagactgtcaaaggctaaggaccctatcaaaatacataacacagaattactcatgcccattggtccccctccaatctgtttactccctctcctctccctcttctacagactcaaacaagtcatcccagtcagaaatttttgggttgcttacacagattgtcttctccatatgcagcatttccccaccttatttgccaaaccagcaaaaccaagaaaatggtaaatctttcctatgataaaagatttcctgtcataaggaatgcatggattcaggcaaaccgtggttgagaagatacagctttttcaccattaaagtcagaaattttatatacaatcaacaagagaatgaattagtgatgtgacactaatctaatcccaagcactaggcacaccttgaccataccctccaccataattgccacaatatccaccaccagttccgccaccatagtaatctgttgctttattaaacgagccctctttcctaaaatctcggccaccaaaacgggat

SEQ ID NO: 22141 - DNA, 128 bp, Glycine max
  Clone ID: PAT_MRT3847_119998C.1
agcaaattagagaacgagctttcagtgagcaattgaagcatttgaaagaagctcgtgatgaatataagagaagagcgcattagattaggggaacgcatttgggcctcggatcacgcactctctctatt

SEQ ID NO: 22142 - DNA, 229 bp, Glycine max
  unsure (1)..(229): unsure at all n locations
  Clone ID: PAT_MRT3847_119999C.1
tnaattttacttttattgccagattataattgtcattaaatcggagtataaacataccagataatagtggaacaaaaacaacgaaccacggaagaacacaaaaccagaaaagaatactgcaaactggagaacacaactgaaaaattacctgaagcataaaacataaaagcgcctaatcaaacgacagtcaagccctctagtgttgcgtgcaagcctctcataacacacc

SEQ ID NO: 22143 - DNA, 266 bp, Glycine max
  Clone ID: PAT_MRT3847_11999C.1
agctcaaatactgcggccgccctcaaactcaaagggggaatttttataaacgcattgtgtggttcatccatcccattggccatatcaagaaagatcaaccaagctcttctagaaaaaacaaaaatactcgacgaaggaaccatatgagaacttagacgccggagacaagcccctgagacactaattaactaacagagacttttcccaccataccagctcctcggtgaggcgaacagaacaaactgttggttcccctaccattcaaa

SEQ ID NO: 22144 - DNA, 298 bp, Glycine max
  Clone ID: PAT_MRT3847_1199C.1
tgcattgatagtttcgaaagcccccacgggcggggtattttgcacaggccagccgtttatactcaccaaagcagggcacaaatcacatgtccatgaagacacaagaaccacctgtgccattaagggtatacgttctacatgagaccacccagggctaatatttatatacgagaagatgcttaccctcatacagctaacaatctatatgaagcttaagcctacgcttccgctagctctacatccccagcggccgatccggaggatccaaaactaactgtacgcaagctatgccgaagac

SEQ ID NO: 22145 - DNA, 412 bp, Glycine max
  Clone ID: PAT_MRT3847_119C.1
ggctcgagacaccgttggtcttcttgctggaaaaataatccaggcttgccctgtttgggggcttatacttgtctgcgtacaacacaatggtggtggctatggccttgtcatggctcgactccactcaccagctgcgcggtttgcctttgaggtggggaagttcaatggaacatacagatgggttctttctttttaacagaggaaatgtatggcctttctacataaaaactagttactggaattggtcaatggggaacaaggtcggaccatttatattgcgtatcacacatctctcttgtcctgtctgccagaaacataagaggcctttctatgatgactacagctgtagcccctcttatatcatgttacaaggccaaactattaaacaagtgggatctctacttgaaatgat

SEQ ID NO: 22146 - DNA, 273 bp, Glycine max
  Clone ID: PAT_MRT3847_11C.1
actttacgatcggagcagggtcctgagactggagagattgaagctgcgaataagacgacgcaaccttactcaggcagattagacggttggaatcggggatggaccaagaagtgaacaacaacaacactgtaagcgatgtttcggtgaaggaagagatgatagccactctgcaggatagtagcccgctctgtggatccgccattcctggatcggactcgtaggagttgagttacgagtgtctcaacaatagtgatgaggtcggagggggttctg

SEQ ID NO: 22147 - DNA, 269 bp, Glycine max
  Clone ID: PAT_MRT3847_120000C.1
gtcgccctggggggtccggtcgcctctgtgctccgtcctgcccttatacctgcgcgtctcttgggctccatgctcgcgcctgtttcccagccggctggctgggttctgctggccacagtcagaacgccgttgaaaacttttttttttaaacccgcctgccctcttttgcgggggggccttctcggtggaggacgtttagtggcctcttgtggggagcgggtcgcgcttctccccgcttctccacgtctctgctggccgttattggccgc

SEQ ID NO: 22148 - DNA, 815 bp, Glycine max
  Clone ID: PAT_MRT3847_120001C.1
cctcccaaaacaccttctcctatttacgcccccccaatagctccttccccgggtaaccatccaccctatgttcctacacctccaaaaacaccttctccttcttatagtcctccaaatgttcccactcctccaaaaaccccctcaccttcttctcagcctcctttcactcctacacctccaaaaaccccatctccaacatctcaaccaccttacgtccccacacctccttctcccatttcccaacctccttctattgcaacacctccaaacactctttccccaacatctcaaccaccctatccatccaccatccctccctcaacctcactctctccatcttacccaccttcaccttcaccttcatctgcacccacttacccaccttcctacctggctccggcaacatcgccaccatccccgtcgacgtcagccaccactcccaccatttctccggcagcaacaactccctcaccgtcgtcgtcgtcgtcgtcgggggcgtcgaacgaaacgacgccagccagaccaaacggcgcgtcgtctgtagcaccgtcgaggttagggctgtattcactgaccattctggctggtgctgctctaagcaccattcttggttagaaaaatcaaacttttgttttttggaacttgagttatagtatatagtaattgtgaacattttcattttttttgctaatattgttattttggacagatgagatcgtgtctcataattaattttatgttgtagtataatctgtgtatctatggttaccaatgtgagttgtagtaattaccatcaattcattccttgttgctcg

SEQ ID NO: 22149 - DNA, 368 bp, Glycine max
  Clone ID: PAT_MRT3847_120002C.1
actgatttatacgggtcacaccctgtgtacatggatctcagaaatgaaggtggcaagccttatgcacatggtgttcttttgttgaatagcaatggaatggatgtgttctatagaggaacctctctcacgtacaagattattggaggggtgctcgatttttacttctttgctggacccacccctctcaatgttgtggatcagtacacttccttaattggcagacctgctccaatgccttattgggcttttggattccaccaatgcagatggggctatcacaatctatccgttgtagaagatgttgtcgagaattacaagaaggcaaaaatcccggttgatgtgatctggaatgatgatgatcacatgga

SEQ ID NO: 22150 - DNA, 1413 bp, Glycine max
  Clone ID: PAT_MRT3847_120003C.1
gcatttcggaatgcggcgcaacctatcaatgtatcactctgtatgttttattattagcgagtaactgccaaccaaaaggtgttaactttcaacgtatatgatttgaaaataaataaatgaaaggaaagagaagttaaagatgttattaattgtaatagttataacactagaattcaaaatataaaaaaatatctaaattttaatggtcattagaaatggagtggttatactcttgtaaaaaaaagtttttaactccgcctatgttctcataaccggtcccaagcccggacaaaggaggagggttttgatattaacaaataaaaattatcacggtctccgctagagcagtcacctattcctttggcttgtggagtggtgttgccgcatttatcatatgggactggccatgagagtaacatttccatccatgtgttttgttaaattttgttatttaaattgaatagggagtttcatgctatagacctattttttactgtttcttttatgtatccactgtgattcattgattatattactttccagtcattcgtaggttattattaagttatgtttttgcgagttttacttaattgtttaatgtgcttctagtctattagatgctaatttattattgaaaaaagcagatatgaataaactgggaacctaaaatttcttcggtgcttggtagaacacagagccaaaagctaagtcggttacaagagtctcactattaatattatgagtacagtgagcaaccatcatctaaaagttgataacaaagtaggcaatttaagatgcccctgctacatttaagcaacaataaggttgacaaagaatcagtttcagcactgcttgaactcaagcaacaataagtgcagcagccaatactcgagcttgctcatccttggcccgagtgggtccaactcatgaagtgcttgctcgacaagggatacttctgtcgtgaagagggaaaaatgttatgcaatgctggtatgggcatgaaggatttcaatgtcattagaaccgtgtgcctcaattttggtagagaccactttcatcttttaaggtttggccgtgatttagaactctgacagactgtgatactcaattggacaagaacctaggcttgatttataccatttttatatttcatatttgattttgtaccttaatggaaacttatttttacggttaagaaacgatggagtatggttccttattattggcaaaaatgtaagattgaaataactcattctccagagaatctcactttcatgctagagatgccatttttggttctccgagttgtgtaatgggagaaggtaaaggaattggattggctaagtggaaatttaattttatatatatacatgagacttgccattatattattcaaatgtgaataacaaggaa

SEQ ID NO: 22151 - DNA, 285 bp, Glycine max
  Clone ID: PAT_MRT3847_120004C.1
caaactcatgagcgaccacttaggcgaagccgcatatgccgaggctatgcacaattccattggagctactccggtttcaatgttctgctatggagagagagatagaatgacaaacccagatacgccagagcttacttcaactgtttctttcaccctgttgaaaaggcatccaagcttacctggtctagcagaatcagtgcctagaattccagttggtgtaagcaccaggaccctcatggggatcctcacagcagctgatctggctctgaatccaaaggtgcttct

SEQ ID NO: 22152 - DNA, 330 bp, Glycine max
  Clone ID: PAT_MRT3847_120005C.1
tattataattttgtaatcatatgaaaagcagttttacattacaatttaatacacacctattgttattcacagccaagttgaacagagccatagctccattttcaagagccatcacattcgctttaagcacagctgattgcagaaactgcataagtgcttcaacaaatccatgggtgcccataaaaatgctggcttcctgatcatcccgcaggaacagcctcatttgttcaaccactctacattttctcttccaattgtttccttctgccaagactttaagaaaactaaaataccgtgcattatctttctgtgggggcgaaaaactttttg

SEQ ID NO: 22153 - DNA, 323 bp, Glycine max
  Clone ID: PAT_MRT3847_120006C.1
gactcgagcagtgcacctgtcgtggatgtagattcaccctaagatactagttgtatttacacatatatatcaatacttcagtctggtggaattattgaccgcagccggcctcattctaaacccacatctcctactaatccatacattctagtctgctaatacaacataccactactcttactagcctattaaccattattccccccatctgcttatacaacttcaatcacttctttctaggatctaccatccactcaactttatcacactaccatagtttttcacctttcacgcacatttccccttcatcccacttccccctt

SEQ ID NO: 22154 - DNA, 2089 bp, Glycine max
  Clone ID: PAT_MRT3847_120007C.1
gcaggcgtccgcgctgcttcgcggcgttgtcaacttcccttcacccaaccaccttccatctccaaacaaacatgggtcggaaacacgacgccgttttggccagcgaacctgtcgccgaagaagccccctgcagccctgagctcgattccgagaagaagaagaagaagaaaaagaagaacaaaaacaaagacaagcaccaaaccgaaagcagccccaaacgaaagctcgacgaacacgacccccaaaacggcaccgaatcgaagaagaaaaagaagaagcaccacgagtccaaggggaacgccgaggaaaccaacggcgatagcaacaacaacaacggcgatggtgctaatcgcgaggaaacggcgacggatgggtctgttgtggtcaccggtaacaatgcgggagaggcgaaatacgccgcggtgaagagcttcgcggattcggggctgccggagaacgtgctggagtgctgcaagggtttcgagaagccttctccgattcagtcccgggcgtggcctttcttattggacggtcgtgatttgattggaattgctgccactggctcagggaagacgttggcgttcggcataccggcggttatgcatgttttggggaagcggaaggggaaaagttccaagggacgaaaccctctcggcctcgtgctctcacccactagagagctagctcaacagatatcagatgtcatgtgtgatgctggtaggtcttgtggtgtgcaatcaatctgtttgtatggtggaacctccaaagggccacaaatctcctcactaaaatctggcattgacattgtcattggaacccctggtcgtatccaggatctgattgaaatgggtatctgttgcctaaaagaagtatcttttgtggtacttgatgaagctgatcggatgcttgacatgggttttgaacaaatagttcgctctatactgggtcaaacgtgttctgatcgtcaaatggttatgttcagtgctacatggcctttgccagttcattacttggcacaggagtttatggatcctaatcctgtaaaagttgttgtaggctcagaagacttagctgccaatcatgatgtcatgcagatagttgaggtcttggatgaccgttctcgtgataagcgcctagttgctttactggaaaagtaccacaaatctcagaggaatcgagtattggtttttgttttgtacaaattggaagccaaacgagttgaaaatatgcttcaagaagggggttggaaggttgtatcaatacacggggacaaagcccaacatgatcgcacaaaggcactctcattgttcaagaatgcaagctgtcctttgatgattgctactgatgtggccgcacgaggattggatattccagatgttgaagtagtgataaactatagttttcctctgactacagaagattatgttcatagaattgggcgaactggacgagctggtaaaaaaggtgttgcccatacattctttatgcagcagaataagggacttgctggggagctggtgaatgttttaagagaagcagggcaaattgtaccggatgccctcctgaaatttggcacacatgtaaagaaaaaggagtccaaactttatggggcacacttcaaggaaattcctgttgatgctccaaagtctcaaaagaaaacatttgacgactctgatgaagactaagtgctggctacttgtgtttatttttggctgaagaaatatatgaattcggtcatttcttactctttttggccgagttatttattactttaagaggtaataaaaaaggttagttataaatagattagtgagtcttttcatgttgtagcatgcacccatctgtgctttcttttgtttttgtcttcactttgagatgataattttgtattcacacatatttttagctgtctagaattgtcttataagttacaatttccagggtttgacattttagatttttaattgattaattaattaatttactattttcatttggtggtagctcgcagttaaattttatctccccgactgctacattaattctgtaaccataactatgcttgttataccaatttatgtggattgtt

SEQ ID NO: 22155 - DNA, 283 bp, Glycine max
  Clone ID: PAT_MRT3847_120008C.1
gttttgttgatggggacaatgcagggacttaagcagcattttgttgcttaaggacgggcttcacgcataagaaaattgattgatttaatttaatttattaattgggttggatacttgatgcgtggaaagtcctcgtataaggatagatggttgattatgacccaggtagaactgtagagaggaggagattttctaattttatgttgtttagctcaaaaattggagagcagggaaaggaaaatatatttttggattggagttatcttcacgttgtattttatct

SEQ ID NO: 22156 - DNA, 869 bp, Glycine max
  Clone ID: PAT_MRT3847_120009C.1
acgagcctgaatccatccctcaccattgccttcgcggcctttcgccacttcccttggacccatgtcccggcctacatagcagcacaagtctctgcctccatatgtgcatgttatgctctcaaaggtgtttaccaccctttcctctccggtggggtcactgtccccaccgtcagcgtcgcccaggcttttgcaaccgagtttatcatcacttttattctcttgtttgttgtcactgctgtcgccaccgatactcgtgcggttggtgaattggcaggtattgctgttggggctacagttttactcaacattctcatatcagggccgacaagtggtggttcgatgaatccggtgcgcacgttgggtccagccgttgcagcaggaaattacaagcatatatggatctatttggtggcaccaacgttgggtgctctcgctggtgctggtgtttatacgctcgtcaagctgcgtgacgaggaggccgaaccgccgcgacaagttagaagtttccgtcgctaatttggcagcgcagcgtcactgttctgttcttcctccaccccacaactcaagtcatgtatctagctccttgtttgattttatatgtataatctaatataataaaatgcgggggaactcaacatgatcctatttgtgaatttatgtgtgtatggttcgtttcagttgtgttatgtacaccatgaaaagttagccttgtgggtgtagaatttcttaaaggactaactaaagccatgatgatttgtgctccttgaaattaataatatgtatgatttgtagaaaatggatcttttgatgttagattttcatgggacaaaaggtacttgaagattttgtattcattttttaataaatat

SEQ ID NO: 22157 - DNA, 476 bp, Glycine max
  Clone ID: PAT_MRT3847_12000C.1
tccaaggaaggtttcccgtcatcactgtatgacgtcctccttctttgggggggggggggggggggggctgcgcctaaggagaatatagtaagctaggagcgccaagatagcgaattataagactgttgggaaaaaaaaacaaaaacggaattatagtgtatgactagcgaagattaagatcgatgcagaagggaaaagggggagggtgtgaccagaagagataagtaaatagaatttaacgcaccccggataaattaattaaattatacatgaagactatgcgaaggagtaattacagatatgtataagggtgtatggggccggggtgtatgtagaaagacagtataccagacccaaaaaccaaaaacacacacacacacacacacacacacacacacacacacaaaggaacgtatagtttgcctgatgagcagtttagaaattggggaaagagagacagcaggtactacgggaag

SEQ ID NO: 22158 - DNA, 235 bp, Glycine max
  Clone ID: PAT_MRT3847_120010C.1
tattctttaaacgttgtgtttattttttttattcatcatttctaaaatctcctaacaagaaatgaggacaattgttcttccaatctggtgattcagtgattcatcaataaagtttttatacaaccgcattgcgagacatattcatatcttatagaaagagatcacgaacttttcattatgctccaatgtacacctcataattctgtgagctgaccgttgactgcatcaaatggtt

SEQ ID NO: 22159 - DNA, 515 bp, Glycine max
  Clone ID: PAT_MRT3847_120011C.1
gctgtgtagatatttcggaataagtggacaagggatgcaaattatactttcagaaattctttcgaaatatgtagttttgaagtttcaacacatgattagagcatgacaaaacccaaaccaaactatgctatgaatatattagatcaagccatgtcttccaggattttcaaagtctactagaactacttcaggtcaaagacaagcgacaggttggcctaaagcaaaggtggaagagatgtagaaagtttgtgttttgattaccatccatatagcttggatgcacgtcagtgaagcaaccaactattaattatttggggtccattttgacttgataattcctagaagtggagtagggatggtaattcaaatacagtatgtatttggtactctacttgatgggataattacaagactcgatttgggttaagaagtacctaaatgcaactatggagtaaacttttacctatgtcactatgtgaatttttccaatattagacttcatgagagctttgggt

SEQ ID NO: 22160 - DNA, 820 bp, Glycine max
  unsure (1)..(820): unsure at all n locations
  Clone ID: PAT_MRT3847_120012C.1
gctcgaaattcgctcgaggcgacgaggccgatctctacctccaagctgtcgacgaaatccagcgctctctctcctccgtctccgtctccgtctacgacctccgctgcatcgccgagcgcatggtctcctccggctacctccgcgagtgcatccaagtctacggcagcgtcagaaaatcctccgtcgatgcgagctttcgcaaactccaaatcgaaaaactcagcatcggagatgttcagcgtctcgagtgggagcagctcgagaacaaaatcagacgctggatacgcgccgccaaggtctgcgtcagaacgctcttcgccagcgagaagaagctctgcgagcaaatcttcgacggtgtcggaacttccatcgacgacgcctgcttcatggagacggtgaaaggtcccgcgattcagctcttcaacttcgcggaagcaattagcataagccgtaggtcgccggagaagctgttcaagattctcgatttgcatgacgcgttgacggatttgatgccggatattgacgtcgtgtttgattcgaagtcgtcggagtcaattagggttcaggctgcatagattttgtcgcggttggttgaggctgcgagggggattctgtttgattcctaannnnnnnnnnnnnnnnnnnnnnnnnnnnnnnnnnnnnnnnnnnnnnnnnnnnnnnnnnnnnnnnnnnnnnnnnnnnnnnnnnnnnnnnnnnnnnnnnnnnnnnnnnnnnnnnnnnnnnnnnnnnnnnnnnnnnnnnnnnnnnnnnnnnnnnnnnnnnnnnnnnnnnnnnnnnnnnnnnnnnnnnnnnnnnnnnn

SEQ ID NO: 22161 - DNA, 1254 bp, Glycine max
  Clone ID: PAT_MRT3847_120013C.1
gtacccgggtccccgcaattgtccgggccgataccctccccctttctgtccccacgcgtccgcttttttctaattatggagagcctcccgcttgagacggcggagaagatcatcctgcggtgggactcgacggcgtcggaggaggcccgcgacaagatgatattctccggcggcggtgaccgcgacgaggccgatctctacctccaagctgtcgacgaaatccagcgctctctctcctccgtctccgtctccgtctcctccgacaaagttaactccgccatccagatcgccatggcccgcttagaagacgagttccgcaacatcctcatctcccacaccaaccccttcgacccctcctccgaagacgaaccctcccaaaccctagactctctttccaccacctcttccccaaaacaccctctcaccaacgaagaaacaacagaagaagaatccgactccaaccataacaccatctctactcctcttttccgtttcaacagtgacgggcgctgcttcctctgttcactcttctgtttcctccgtcaactccgttaacagcagcagttaccgttccaccagcagcatccgcgagatcgatctgatcccctccgacgccgtctacgacctccgctgcatcgccgagcgcatgctctcctccggctacctccgcgagtgcatccaggtctacggcagcgttcgaaaatcctccgtcgacgcgagcttccgcaagctccacatcgaaaagctcagcatcggagacgttcagcgcctcgagtgggagcagctcgagaacaaaatcagacgctggataaaagccgccaaggtctgcgtcagaactctcttcgcgagcgagaagaagctctgcgagcaaatcttcgacggcgtcggaacttccatcgacgacgcttgcttcatggagacggtgaaaggtcccgcgattcagctcttcaacttcgcggaagcaattagcataagccgtaggtcgccggagaagctgttcaagattctcgatttgcatgacgcgttgacggatttgatgccggatattgacgtcgtgtttgattcgaagtcgtcggagtcgattagggttcaggcggcggagattttgtcgcggttgggtgaggctgcgagggggattttgtctgaattcgaaacgctgtgctgaaggaaccttctagggttgctgttcctggtggaacgattcaccctttgactcggtatgtgatgaattacataagtgtgatctctgattac

SEQ ID NO: 22162 - DNA, 355 bp, Glycine max
  Clone ID: PAT_MRT3847_120014C.1
aaatatatagaaacactatattaaacactggttgtaaaatgaacatcaagttgtgacggcaaccgatataaccccacacaacaatcattgtatgagaataatactaaacttttcattctgatgtctgcctgcacaaactaaattccgccggccctaaggttaaccgggtcaaaactaccggagaacttataaactttctccaacaactgaatggaataacacaaggatctaaacaaagttccacctttacccctggattaaaacctttaatactactacaccttacaaatgggttagccagaacttacaagcccgaagtcaaccttggccagttaacctaccttcatatctggta

SEQ ID NO: 22163 - DNA, 127 bp, Glycine max
  Clone ID: PAT_MRT3847_120015C.1
gtcgatatccaacaaggaaagatcagttcttcccctacgagggtcgggatgagtgctagaccctccaagaattgggggagcactcatccctaccctcgtaggggaagaactggtcgatatccaacaa

SEQ ID NO: 22164 - DNA, 403 bp, Glycine max
  Clone ID: PAT_MRT3847_120016C.1
ggctattggctctacctggtgacaactactctagcgacttgactacatctgatgagagagtgcaaggcccagatcatgatggatgtgatcctaagattggggcgattgatggacatggcggttctatgatgcgactatatgaagctagtcgccgtaaacgagcacatgatttggaccgagtacgtgacgtacgtgttgatgaacgagagtgcttacaggcactggatgcatgagcatgtctccgtggaggatgagatgacgactatatggagagacatgctattgactgatctgaggcacatgatcatgggctagatcccatggatggcgactggagctgacgtcgatgtggagttcaccatagtgatcagatgacatgagattgctgaaccacatttgaaga

SEQ ID NO: 22165 - DNA, 342 bp, Glycine max
  Clone ID: PAT_MRT3847_120017C.1
gatgatactcattttgttggggctaggttcattagctcagaataaggttaatttatagaatattctattgagtttgcagatcagaattcaattccatggtagatcataccaccatatataggacttgcttttcaaactggggtttcaatttctgagtgggtgtccagtggtttgcttaatctataagattttaatatgaattcagctcatttgatcccttatctaatctgcacaaacatgttgtcccacttttagctatagttttgttagctaagcaagaatagttctgctatgttcataaaaaaaaaaaaaaagaatagttcctgtggttgctcttgttta

SEQ ID NO: 22166 - DNA, 335 bp, Glycine max
  Clone ID: PAT_MRT3847_120018C.1
aaaaactgtattgaaagtgaaaaacaccttttttttcagatttaaactgaatgggcgttacatgtttcaaaacaatctcccttttactatttctataacacttataatttctccgactaggtttatacatttaataggtttgctccaaacaaaaatggaaaccaactttttagcttttccagcgactgatattataccccgaacttttaaggaaacatccacaagtattcactatctttaacccgacgtaggcttggtgtaaaccttttaaaacaggcggtgatttatttcacttgccgaccttttacaactgtgtgactgggaaatccctggaa

SEQ ID NO: 22167 - DNA, 660 bp, Glycine max
  Clone ID: PAT_MRT3847_120019C.1
ccacgcgtccgcttctttctaattaccatttcttgcacttttgtaattttaacaagtaaccttcttctccttctattttttgggaggaagttaattttcattttgtctagtatttgtttctttcttcatcatttcagtacgttggttttcatcattttaaaaacgataaaacatggccttagggaaatctccttctgttgctttaggagtttatatgtttatgtttgctagagagggctatttatatttggttgcataaggtaattttagagcaaactttgaacaatactttaactgttcttgaattaggaaatatatttacaattttacatgtatggtataagtgtaaatattttgggggtgcttaacaagcgttaatagtctgaaaaaagtgtgttactattgtgattctcagattttcagtactgtgatgattgatttctctccactgttctttctatgcattcagacccaataacatggttttcattcttgctatctgacagtttcagtgcttcttgtttaaatgcgtgtttgcttcatatgggatccacattaatgagaaattcatgtcaaaataatgcaaaagcggctatgctgaagtcaagcgtaccatagaaaatagaaaatttctggtttcactttattttctggttttaa

SEQ ID NO: 22168 - DNA, 270 bp, Glycine max
  unsure (1)..(270): unsure at all n locations
  Clone ID: PAT_MRT3847_12001C.1
agnnacttgtatcagctgcaaaatcatgnnatcagctattgcctncngagtnacanngnntnggtggnctcgnantcacggnccaanggctcctcctttagcttcanccggttgcagtggtcttatactcacctctttacaactgccacacnncatacnnaagttcngctatactcatagagncatcctcngaaggacttctctaatgagttggttgatagacncaaaatttgngccnctgaggtacgatgatcctatatatggtccacc

SEQ ID NO: 22169 - DNA, 770 bp, Glycine max
  Clone ID: PAT_MRT3847_120020C.1
acggctgcgagaagacgacagaagggtgtaagtagattcccctaacgttcataagctaatttgactagtcgttactaaataaaattgtttgtaaattaggttgttttctatcatactcgaaccgagttgttttgaatttgtagagtggttggaaaatgataaaaataaaaaaggaagggaaaaaaaatcacagtttggatttttcaacttatatttttaatcaatattaacacattaacatttatcaataaaaaaattctccatatcctaattttttcagtgggtttttttattgataacccaacttatcattgacgcatttttgttgccaaaacaagatacatagatatatatatgtatctactcacgacgtgtgagattatagcatcgaagagcattgctgtacagtgtagccgtaagtaacatctaggaaccacatttttatttttctggaactctgaggtcgaaaataacgagagacaaccctacacatgcacaagtttaaattccaattcatcaaataattggaaaacaacaaagcccttagctttcgagggcccttcaaataatggatgcagttcttttcaaagcttccgtaccaattaaacgccgtacctctccttctcaagtgttgaagtaaaattgaagcaattgcctcctacttgtacatgaggacaaccaaaatattcaagattatattacatgaacaataaacaacctacttctttcattatttaattgagttagcccaaaaaaaaaaaaaaaaaaaa

SEQ ID NO: 22170 - DNA, 494 bp, Glycine max
  Clone ID: PAT_MRT3847_120021C.1
gggccacaccccaatgggaaaagcaattaaccaaaaaaaacaaaggcgggaacaaatttcaaaaaacggggaagcccccccccaaattcacccctaaacaaaaaatcctatggtacaaaaggggccttcaatatttttataaaggaacaaaaatgggggtaaattttaaaccccaaaccaggccccctttttgccccctccttttttggccttttggagccaggaaaaaaaagggtttccaaaaattttgttttttggccccggggttggcctgcttttttaaaaagctgggccaaacaacgcttttaattttaaaaaaaaggattgggtattccaagcttttcccccctcaactggggcccatattttaaaatttaaatgggatttcccacttttcccataaaataatatggggcggcaaaatggggggcccccccaagagtttccggaggacaagggccacactccgggtaaaaaattcccctagtttttta

SEQ ID NO: 22171 - DNA, 263 bp, Glycine max
  unsure (1)..(263): unsure at all n locations
  Clone ID: PAT_MRT3847_120022C.1
naatgcgtagtctgattcgaanacngattgacgacagctcactaagcggagtccgccgctgtcgtcctttttttttttttttgaacaagaaactattttgtatttttatcgaacccctagatctatgaaccgggacaactgaatccaatacattttttattttatcattaatcaagaattttgcatatagctagggcggccctcacaaaccgcaaatactacttagctaataattaatctaaatgaggctattgctatactat

SEQ ID NO: 22172 - DNA, 452 bp, Glycine max
  Clone ID: PAT_MRT3847_120023C.1
acatctactattattttttatgccatttttgcttatttttttttttgatcactttgatctacaagtcacagccctgtttgctctccacgtgcactgatataacagcaactacccaaaaggcatgatacttcgcttttttgtgcacttctttgacatggagggcccagaagaaaatgctcccttgggttggaaacaacatataacccatgaggggccgggaaaaggctaggctatgtgccaagtgaatcacaggctaacctggtttgttacagaagaacaagaacactcgcacgaagaagcggacttaaaaacctgccaaagccttaccttgtgcaaaaggtacagttgctgtgatgtaactgcatcggacctaccactgcgaaaattattacgttgtcgtgccccccaatgtgtaaagcaaaatcgcgccacctaagatttccttgagcaaa

SEQ ID NO: 22173 - DNA, 413 bp, Glycine max
  Clone ID: PAT_MRT3847_120024C.1
tttttttttttttttttttttttttttttttttttttttttttttttttttttttttttttttttttttttgggggggggggggccccactcagtttatttttcggagccctcgatatttggaaaatgttttattttttcatccaaaggaacattttttttttttattttgggttggggaaaaaactaaaacaccccctcccccgaagggggaaaaaaggcttccttaaaaaccaagactccccaaaaaaaaaatggggggctcaaaaaagaatacaccctttcacaggggtattaaaaagggggccccctttttgcaaaaatgagggttttttggaaaaacattggtatggtcattggaccaactcctccaagaactgggggaacaacaaaggcaatttttatgggtttttt

SEQ ID NO: 22174 - DNA, 354 bp, Glycine max
  unsure (1)..(354): unsure at all n locations
  Clone ID: PAT_MRT3847_120025C.1
gggcttcgttgatcggtttgtgactcctccttctcctcgtgtgcagtgaccaggagagggttaattatgaacgacttaatgatctcgctctggatttctatgcgaggacatccaggtaatgaatatccttgtcaaatgttttgctgagaatttgttgatgctgttggttgtttactgttcaaagtggaaattaaaatcttattgtatatgtggataacgtttccttctaatataatggtaatgatgtatgtcaaattaaggccttgtaacttgtttggttntatgtttagggtttagggttgaagccttctaacttttcatgttttctaaaaattctgtctcctgaacccacat

SEQ ID NO: 22175 - DNA, 656 bp, Glycine max
  Clone ID: PAT_MRT3847_120026C.1
accataactaggtttagaaggaaaatcctcactataaagtcctgaatggccagttcacaactctattcggagtcatttctttcttaccgctcacaattctctaaattattttgctgtttcaaaaggaagaatataccagccattactttaggtcgtcacgtgaaaataaaaggataaaatacagtcgataaactcttttacaaataaagttgctaatgctttcttttcaaataacaagattgatcataaatgctttcatcatttaaagctgtccaaaatatgggagtttttacaaaatatatagtgtcatccagagcaaaggtgtccacagtgttggcttcagccacatgtatacaattatcaaattcctatacatcaggtctacccatacaaaaccaaagagtaaacctaacagtcagtcctagatacacccaccctcaaaagtatacaaaactaatccaaggagctgtccactccaccgtgcgctgaagcgtccgtgcaggttcatctagatgcaccaaagaagtagccgtgaatcgaatggtgccccgaaatcggcacctcgtgttgccttcgagggtctcccaagctccctctaggcactccatctcaactcgttcacggattagctgcgccgccaccacgatctacaagga

SEQ ID NO: 22176 - DNA, 271 bp, Glycine max
  unsure (1)..(271): unsure at all n locations
  Clone ID: PAT_MRT3847_120027C.1
gttttatgatgacttctgcctatattacttgcaaatgttatatgatacaatacaaagtataaatagtttgcttgaaaatttggaagttcttcaaccttgtatgatatttgtagtncgctgtatttgttgtcaataaagatgttgctgtcttattatgattcatggtggaaatacctatctgatgtttgatttttggggtatctttttgtttcatttcagtttagtgcaactgtttttggagttcaacagaatccagcagttatcgtatgac

SEQ ID NO: 22177 - DNA, 1363 bp, Glycine max
  Clone ID: PAT_MRT3847_120028C.1
gactcagccagggcagaaaattcagaagctctccctcttcctcacgttgcattttccttctcctccattctccattgagacgccatcacagctccaacctttggtgctcatttctgctccaaatctcgaaacaagggcattttcggggtcgtgaagtgcgtggctacgactgggacttcgaaatttcagacgaccacgcgtccgctgatggcggcgcaactaatccatgatcgtgtggagatggagtgcctagagggagcttgggaggctctcgaaggcaacgcgaggtgccgatttcggggcacgattcgattcacggctacttctttggtgcatccagatgaacccgcgcgtacgcttcagcgcacggtgggaggagacgacccaagggctacaccatatcgtctagtggagcccgtccaagtgatcgaggtaacgtcatccgaggaagaccccgaggaggatctggaggagctacctcctgagcctgctgtggatgcccttgactttctagagggtgatgaggatccacttcttgaggtggattctcccgaggaagtcatgtcggcatctgaggcagactctacggaggatagtggcccgggggagatggcgatcagcggaggctcttcatcatagtggacagctctttggattagttttatatactttttgagggtgggtgtatctaggactgactgttaggtttactcttttgtttttgtatgggtagacctattgtataggaatttgatgattgtatacatgtggctgaagccaccactgtgaacacctttgctctggatgacactatgtattttgtaaaactcccatattttggacagctttaaatgatgaatgcatttatgatcaatcttgttatttgaaaagaaagcattagcaactttatttgtaaaagagtttatcgaccgtattttattctattattttcacgtgacgacctaaagtaatggctggtacattcttccttttgaaacagcaaaatagtttagagattatgagcggtaagaaagaaatgactccgaatagagttgtgaactggccattcaggactctatagtgaggattttccttctaaacctagttatggtgaaaaaaaaaaaaaaaaaaaaaaaaaaagaggaaaaaaaaaatttactatggtttttgttatttaaattattactattaaaccagtcattaatttagggacgccacatgttgcgcctctttttggcaaagcaacgaagggtccatgtcatcttcttaaatacatacgtcgagaactttgctaccccaagacattgtatctaagaaagagacaatttctcgggctcccgtgttcataaattgcatatgtatc

SEQ ID NO: 22178 - DNA, 243 bp, Glycine max
  Clone ID: PAT_MRT3847_120029C.1
gtcccttgctctgtgtcgtcgtaacacaaaaagcggaacagagagatagaagcacactacgcaatgacagcttttgatcttcacaagacatagcttcgtgtgtgcgtagattttcttccttccagcttggaaagactgaagtctctgtctcttccaggtcatagtggcttcctcgaagatgatggtagccaatagctttgatatatatcgcaaggacagattgtcctctgcggcggaagaggt

SEQ ID NO: 22179 - DNA, 833 bp, Glycine max
  unsure (1)..(833): unsure at all n locations
  Clone ID: PAT_MRT3847_12002C.1
ggttgaaaacttaacatttctttgaaggtaatatgtggaagaatatcaatggcagtacaaaaaatataaatatccatgactgatattagaggttgatttataaaaataaattaaaatgacatgtcatacaagacctgcattacatgttacggactaacatgtcaatgtagattcttccatcttcatctataaactcacaaatacctagttgattccaaacggcagaaattggtgttcacgagacactcagggtatcgcaatcatagagcaactcttctctgaattcaaaagagaaccagtaacattaagaattgacttgaagcccaaaaattaagctgctacctgttcagggacttctgattgctgttgatgagattcctcaaagtgaggaggggttgatgatgatgggtgatatggtccagtcacctgagaagatggtcctgcagatatatgatatggcggtgacattttagctgatgctccattcgaaggaatagaccatcctgacattggaggagttggtccagctagtggatgatgttgtcctgccattggaggagacaaccctgatggcggatactgtcgttctgcccattgttggggcccacgtggtgttccataaggctgatgtcctgccatttgaggtgaaggtccagatggtgtataatgctgcgctgtcatttgcggggctaccctgctcacgtgaggatgatgttcagatgcattagggtggtaaggctgtcctgtattaggtgacgatccaggatgaggtccagtcattggaggagataatccccatgaaggttgatgcattcctgtcatttgagaagnna

SEQ ID NO: 22180 - DNA, 177 bp, Glycine max
  Clone ID: PAT_MRT3847_120030C.1
aaacaccaatcaaaaatatagtgtatttatgcatggacaatatacaaataacctgacggatctcacccaagaaacgtcctttaaacaagggggaaagaaagtctggcgaaatcacccaactctattacatacctactaccgatcagaacaattggccgcagagggaggaaaacatgc

SEQ ID NO: 22181 - DNA, 479 bp, Glycine max
  Clone ID: PAT_MRT3847_120031C.1
ggctcgagttcgaagtagggtatttgaatctatcaagaagttggaggagttatgtaagttgctggaagaagctacaaccagaaaccacactgaggaaaatggggatcttactgacagtgagaaggactatgatttgcttcctaaagtagttgaattttctgaagagaatggacttgtaggagaggacatttcaaaggtagagctttcagtgaatcaggaggaactcaaacaaaacaatatgcaggaagatagcattctgtccaacgacaaggctgaaaaaattgaatctcccaaacatgaggaagtgagtggaaaacggaaggaagatgagaccaaagaaaaggaggagagcaaagaaaaggatgattcagtagaagttgaatataaaatgtgggagagctgcaagatagagaaaaaggagttctcgccagagagagaagcagagcctgaatcatttgaagaggaagttaactcaaaaa

SEQ ID NO: 22182 - DNA, 792 bp, Glycine max
  Clone ID: PAT_MRT3847_120032C.1
aagaagttggaccgctacaagaatccgtggctagagttgaagatacagtatgggcaaaacaaagggaagttgtacaatgaagaatgtgacagattcatgatatgcatggtgcacaaacttggctatgggaactgggatgagttaaaggcagcatttcgaacatcacccttgtttcgatttgattggtttgtcaaatctcgcaccactcaagaactggctaggaggtgtgacaccctcattcgactggtagaaaaggaaaaccaagaatatgatgagagggagagacaagctcgcaaagagaagaaacttgccaaaagcatgaccccatcgaagcgtgctttggcaagacagacagagagtccatcttctttgaagaagcgcaagcagttaaccatggacgattatgcaagcacggggaagagaagaaaataatgaacatatgctctatattgcgtaggataagtaaggggttgttgggttttaaagtccttggtgatttggatgtggcccagacttggcaattgatggccaggcttgccttccaaaagccgtgctagtttgctaacaacctctaacttgtgtaggctccaaatatctgttgtatggctagttagagaatatcaagtagaaatgggttgttgtattgtaagtatgtatatctacaaaacaaatccttagatttgaacgactagttcaatgaaatatatgtagttctaacttaatgctattttgaagtagacatgcattaagctaacgtttggaaattccggttggccctggaaactccctcat

SEQ ID NO: 22183 - DNA, 492 bp, Glycine max
  Clone ID: PAT_MRT3847_120033C.1
cgtatatttatttttttttttttttaattttttttttttttttttaaataattttttttttttttgttttggggttttttatagggggggccgaaatctagggcttacctcccacctggaaataaattcaaaaccttttcttgggggcccccaaatttaacttatggggcgtcgtataaaaactgggggaaaggaaaaacccgggggtccccaagtaaattgttttggagtaaaaatcccttacaacaaatgggctaaaagcaaaaagggccaacccgggggcccttaacaaagagggcacctcccaaaaggggaatggggccccccccccgcttgccaataaaaaaaccgggggggcggggttcctcaaagaatggcccaacccctggggagaggccgtatgcccattggttcccattgtggcttttcttttcaccaaggagacgggcattacccgatagacctttaaagcgggggcctcataaaggggcc

SEQ ID NO: 22184 - DNA, 421 bp, Glycine max
  Clone ID: PAT_MRT3847_120034C.1
ggggaaaaaaaaagggcggggggaaaaggcctatttccccaaaataaaggggaaaaaacaaaccccccccctaaaaaaaaaaacccccgaaagggcggggggctccaaaacccccaaggccccaagggggcccaaaattgggttccgggctttacccacccccaataaaaaaaaaaaggcctttttttttagggaagggggggcccccctctcccattggggaagccaaaaaacaaacccgggacgggggaaaaggaaaaaggaaaaagggggtttttttggcaaccggggggacccggtttcttcaccaacccttggcggaagggggggggggccccaaacttggacccccccataaaaaaggccccattttttggaaatgggggcaaaaatttttttaaagaggggccgggacccaaaa

SEQ ID NO: 22185 - DNA, 173 bp, Glycine max
  Clone ID: PAT_MRT3847_120035C.1
ctcgtggacgcgtggggcaagttagaagacgacgagtatgatttaagctaccagaaaactctgtgatggagcccgatgttagggaagagccataggatttagattatgctaaggttgttggagtagaaattttatgggggggcttatcatgatataaactgatagtaattcgt

SEQ ID NO: 22186 - DNA, 190 bp, Glycine max
  Clone ID: PAT_MRT3847_120036C.1
gtcgtctcttgcgctgacctcgttgttctagccgcacgcgatgctgtatctctgtcaggggggcgaatatttgccgtgtgactgggagggagtagatggtctgagtttcagcatagacggcacaggttaccttccgagaccgtcttcccggaacgggcagctcctcgggagatttggcggcagagacttc

SEQ ID NO: 22187 - DNA, 150 bp, Glycine max
  Clone ID: PAT_MRT3847_120037C.1
gccagacgtgcgagcgcaccagggagcactgacactcaaacgggggcaatgtatacctggggcgggatctgctcgacgcatgccgctaatttgaccacacagattcggacgctccaaattcaccatacatcggtgccaatctatgaaact

SEQ ID NO: 22188 - DNA, 344 bp, Glycine max
  Clone ID: PAT_MRT3847_120038C.1
ggcaactgtgaaagggtaacccgggtgggttaaactttttaagggctttttataaaaaaatcgcagttttataaaaatgcatggtgtgtgcgcccaagaaacccccaccagcgggagggcccactttatgtgaagggcccctgtgatttgtaccagtgtgggaaaaataacctcctccagaacctggagatggagatagcaccggcaccttaaaatcacatttggcccagggcacaaaattcctccgtcaatgtttaaaaaaacattctcccacaaacccgataaataatctggtatgttttcatccgcatcctgtggagacaggataatttaacacgcccttc

SEQ ID NO: 22189 - DNA, 609 bp, Glycine max
  Clone ID: PAT_MRT3847_120039C.1
ggagtatgtgtgtgtgttaattatgtgtatgcatggtggaagctagagtaatagaggcgcaacaagatcactgttgttgtgggggctatagccagctcctcatcataagtggatcaatacataaaaaaggttaattagtaaagtcacacgtgctttctaacggtggcgcaccagaggggtttaggttcaggttcggggaagttcttggcggcggaacaaggcggcgatgaggaaacggaagagagtactgtaggttcggttccgagccatgtggtctctgcagcttcggcccaaaccaataatcagtgggtcccggcaagtggttctccaaggatgtcacgttttatgaatgctccttcctctccaggattgtctcctctgtttggcgttggccacaagagagcccgtgaagacgacacgggtgcgggtgcaagtgtgggtcttggtgttgttgcagcagcttcttcacaaacacaagggaatgaaagtggcggcggcgagaggaggaggagatacagaagagtgaggcagaggccgtgggggaaatgggccgcggagattcgcgatcctcacaaagcggcgagagtgtggcttgggacattcgacact

SEQ ID NO: 22190 - DNA, 439 bp, Glycine max
  Clone ID: PAT_MRT3847_12003C.1
ttccaggaaggtttcccgtcatcactgtatgacgtcctccttctttggggggggggaggggggggcgtatagataccagataacaaagtgtaggctagtggcaggcaatgtattgcgtatagtgcaggtagccgtgcaaatgcaaacgtttaatttatataaaaggtaaatatgggtgccaggggataaaatgatcggttacggttgttgtgacggagttttgggagtggtctttgggcaatgataaaaatgaaaagtgaggggaagcggataagaagtgatttgacaaagaggggataacggatagcggatagcagtaaacttgtatcctggtaaatgtgatgttaaattgggaaatagggcatttttgacggtacagtagttatttgggccgggaaaaaaagtataagatcccgtagaatggtaaattccgatccct

SEQ ID NO: 22191 - DNA, 1012 bp, Glycine max
  Clone ID: PAT_MRT3847_120040C.1
aaaaaaaaaatcaattttcattgctaccatgatttatgattaagcatattttatatacaaggaaaggaaaaacaaaatacatgctccaagccaccaagaacagtatttgtttgtattatctgcagttgtgcgaatcgaggaaatgaataaaagaaaaaaaatctagaaatttgaatgagtaaaagaatcatttggccgtaagcacgggattcaactgaagaggcctaggtggtgccatggttcttctcttccatagattaatctctttccgtggctgcacattaggattaagcgcacttgcagcaccaccaacggtcagaggcgcagagaaagggattatgatttcatcctctgcatcgctctccaatctatcatcataatacgaatagcaatccctttcctcaggagcaatctgagccttccaatcgaaattcgaaaatgtttcacgcccacttgcaaatcgcctcatgtgacccaacggcggtgcaggtgatctctcactctccaagtccgcatcagattgctgtttcctcgccgcgggtcgttttggtttccccgagtggaacgacatcatcctctgaaacttggaagcttgtttcttttcttctgtaggcatggacatggtctttgccgcttttttgatttggtttttcttcttcttgtgcttgatctgtcccatgcaggagattttgggggaagtgggttcttgagtttcaacacaaccatcctttgattttcttctggcttcaacgggaatcatagggccagagaagaaccctttgccgccatggtgtttgaacttgtgatccctgcctgggctgaagggagggttttggaatgtcatgctcactgctgcagccgctgcttttggcagtattttgaagatcttgttcttcagcttagattctttctctttctccttctccatttccccgagcaaagagcgaatttgttggaaccaggagtgcttgtgttgtatttatatatatgtgctcaactcaagacaagttaa

SEQ ID NO: 22192 - DNA, 552 bp, Glycine max
  Clone ID: PAT_MRT3847_120041C.1
agctcgagccgaattcggtcgagcaaaaactcacccccttcacctccaaggttacctctactgggtaatctgcatcaacttggtttgttcccacaccgcacactccaaactttggctcaaaactatggccctctaatgctacttcattttggtaaggtaccagtgcttgtggtctcatctgctgatgcagcgtgcgaggtgatgaaaactcatgacctgatcttctcagacaggccacaacgtaagatgaacgacatcctcatgtacggttccaaagaccttgcaagttccacgtacggagaatactggaggcaaatgaggagtctaactgtgtcacagcttctgaacaccaaaagggttcaatcctttcgcggttcgagagaggaggaaattgctagaatgatggaagacattaaacggtgttgtagtgattcgttgcatgtgaatttgactgatatgtttgctgcacttacgaatgatgtggcgtgtcgagtggtttttggaagagatacggtgggggagaagggactcagtttcagagtttgttgttgg

SEQ ID NO: 22193 - DNA, 206 bp, Glycine max
  Clone ID: PAT_MRT3847_120042C.1
gaggaccccaagtgagtcagatgatcgagataacttcgagcagtgtggtgacaatgaaaggactaggaatgttcgtggctacaatgttggtaccatggcaataccatgcgtacgatatgcgtactatacgaatgatcactggctgtacagtccgtactgcggacgtgatatgcacgagaaatacgcttgctggaggatcactcaac

SEQ ID NO: 22194 - DNA, 142 bp, Glycine max
  Clone ID: PAT_MRT3847_120043C.1
ggaactgattctgagaactgttgttgccacaaacggacatggttgacgcgggtggggtcaatcagttctgcaaatttagatagtatattgttttttgatcctcccggataagccagcatcatcctaggaggaatactctctc

SEQ ID NO: 22195 - DNA, 434 bp, Glycine max
  Clone ID: PAT_MRT3847_120044C.1
tacggctgcgagaagacgacagaaggggatatggattttgttatattgtaagtaacaacgagggaggaagaaggaaaagaggagtgataaacacaaaagaatgatgctcttctttctctggatcatcaattttggcgatgtggcaacataagaataaggaattcagcttttatatattataaataaataaactagctatttgatgtataaattgagaataattaatacatatttgccatgtatctattaaactttgcatttattttgtatttagaattgatgtatatttaaagtaacggttcttcatggaattaactataaagatttatttactcattactaatacgttacttattttttatctcattcccaaattttgtattttataagttagatataaaagtgaaatatttacccacattttcataataact

SEQ ID NO: 22196 - DNA, 718 bp, Glycine max
  Clone ID: PAT_MRT3847_120045C.1
tcgcgatctagaaccttatcacatcatagtcaggtggggtaacagaacaagggatgcacatggttccattgtccgactcggctagggtcaggtgtgttgaggtgttggataaggcaatttcaggagttcttttggccactgctgagattgcattcttccaagggtgcctgacttggcttttgtttaggctgtacagaatacatttcttgtatgtgtcaactgtcattgccttccttagccctttgctaccaatatttccatcttggcttgcaacaattccagcagcaatacagctagtgctagaaggcagatacgtagtggccattttcttgtctgttgctcacctctccctcatggattatggtgcaactgaaattcttcaagatgtgcctggacacagtgcatatcttgctggactgagcatcattgggggaatggctttgtttccatcagctctagagggagctattttggggccattgataactacagtcatgattgctctgaaggatttatatgctgaatttgttttggacgaacctgatgacaaggtaaaggagaaggcaaattaggtttctatttgtatttatgactgtaagtatatatttgcagttgaagatgtctgccactacattgttctttgtcattctatcagtggagcttgtctaggctcgccatttgtttggaactattcttcttatctatatcatttaattac

SEQ ID NO: 22197 - DNA, 293 bp, Glycine max
  unsure (1)..(293): unsure at all n locations
  Clone ID: PAT_MRT3847_120046C.1
ctaaggntcaaangtcgcgtgtggtatgttacggtaccagntcaccgcttgngttattatgngtaaagcattgtanatcnaggatgcacatgnagcggccctggaggtttngctggtnnatcggcgagcaatgctggaaggcaccgggtcaanttggatntnngggagnanattgacaatgtcgttccaatggttgcncagaccaatggttngtgtgagtcnttcaanagcnaaaagtgtgncncagccnaatgnggtctagcnttnngatagtntncnaaattctgngnggg

SEQ ID NO: 22198 - DNA, 324 bp, Glycine max
  Clone ID: PAT_MRT3847_120047C.1
atggaaattttccagtggattcttggttaccaatttttgtgaattgtctttatcctgtgagtcaattaccttcagaagctgtcgttgcaaatgttacatgtgggagtggacgtggtggtttacccacccttgtttgaattagttctgcagataacaatacgctcctcagatattatcataaggattcgctcagctctttgtggacggtaagaagattgataatcttactagagtagatccttttacagtagctttactggctggtctttttgttgttaagattgaaatcctgagttctaccgccactgaccctatgctgacgcg

SEQ ID NO: 22199 - DNA, 381 bp, Glycine max
  Clone ID: PAT_MRT3847_120048C.1
cccacccttccgccaacccgtccggtcttattgggtggtttaactccggaaaaaccaaccgggtttactttccaaagggttcttttgggcaggtttcgttcccaaaggttaaggcttgaaaaagggtgggttggtgaaggggaaggggggccaaggggttggtttaggttcaaaggggttcccattaggggagggttaagattcaaaatttaaggctggagaggactttgggggaaaggggctgggctggttttttccatgggaatttaatttgccaaagggttgaaaagattaagggagggtcaggtccattttggtgccctttttgttgggacctactggtcaatgcatgtaaaccttgcctaatttaagggctttgaa

SEQ ID NO: 22200 - DNA, 285 bp, Glycine max
  Clone ID: PAT_MRT3847_120049C.1
cactgagcagcgtctagctatgtcgatcgaactgtccaaggtcctgtcactgtggtgaaaggtcttctacgtgtggtgtgtgtacaaatttgaagcctacactctccaccgcctcaatcgccatccgcattcgcctccgggtccatctccgggcctcccatcaccctctcaccatcatccccgttcgccttcctcgacgttttagtacaccaccaccacacgcccgttccacatgaactgccatcttccgcaaccaacaacaagtcaacttccactagagtgatt

SEQ ID NO: 22201 - DNA, 165 bp, Glycine max
  unsure (1)..(165): unsure at all n locations
  Clone ID: PAT_MRT3847_12004C.1
ccaagaagaagacacggggcgccncccgaaagcccccggggcaagcgagccgaaaaccggggaaaccacaagacncggcgaaaaagggcnccncgcaggcgcagggncgggggggggcgaggaaaccgnggcgcgaggaacaagacnnaccaggagacccccagg

SEQ ID NO: 22202 - DNA, 671 bp, Glycine max
  unsure (1)..(671): unsure at all n locations
  Clone ID: PAT_MRT3847_120050C.1
ccacgcgtccggttaaaagtgtgttagagagagaaagaggaatcgggagagggagagggcgtggtcgttttcatttcatttcatttttggtcttcttgttcttctccaaataaaaattctccctatttcgtttccttaaaaccctaattttaatgttgcttctctgacacaacacaattcatcggtaaaaacctaaccaaacaagaaaccaatgactgccgagttagggcaacagacggtggagctctccaccctcgttacacgcgcagctaatgattcctatgcctctctcaaagaactcgtcgataaatgcaagtcctctgaattatccgacacggacaagaagattagcatcctcaaattcctcagcaagactcagcagcgcatgatccgcctcaatgtcctctccaagtggtgccaacaggttcctttaatacaccactgtcagcaactggcttcgactgtttcaaatcacgacatgtgtttcacgcaagctgctgattcgttattctttatgcacgaggggcttcaacaggcgcgtgcccccgtttacgatgtaccttccgccattgatattcttctcaccggaagttaccagcgtttgcccaaatgtatagaggatgtggggactcagtatgctttgaccgangaacagcagaaacctgctttga

SEQ ID NO: 22203 - DNA, 726 bp, Glycine max
  Clone ID: PAT_MRT3847_120051C.1
acgacccacgcgtccgggcgtccgcacttctcttcttcaattcattctagttctggattccgactcgccgcattgactcggtccgggttggggtcgactcagttcggtttttcattctctcgcgaatctaatctataggaaaagctaagggcacatcacaatgaaggcattgattctggttggggggtttggaacaaggctgaggccactgacactcagttttcctaagcctcttgttgattttgctaacaaacctatgattctgcatcagatagaggcccttaaggccattggagttactgaggtggtgctagccatcaactaccaaccagaggttatgttgaatttcttgaaggattttgaaacaaagctcggcatcaagatcacatgttctcaggaaactgaaccattgggaacagcaggtcctctggctcttgccagggataagctgatagatgactctggagaacccttttttgttctcaacagtgatgttatcagtgagtatccactcaaagaaatgattgaattccataaaaaccatggaggagaggcttccataatggtaaccaaggttgacgagccatcaaagtacggcgtggttgtgatggaagagagcacaggcaggttgataaaatttgttgaaaaccgaaattggttgtttggtaacaaaatcatgcttgaatttacctgctgacccctctgtttttggatcgaattgactga

SEQ ID NO: 22204 - DNA, 259 bp, Glycine max
  Clone ID: PAT_MRT3847_120052C.1
atttagtaatgcaggttgctaacagactattgatcaaaggattggcaggcatgttggatggaagttgtgagttattagcagtagggaatgtgcagtatttgttatttatggctgattgtagaagaccttatctttttcaaagccttgactaagattggagactgtaaagagatttcaattacaagtggttagactgtggaacataaggtgtgaattgtgattggatataatagcaatagtaactatacatttgctctga

SEQ ID NO: 22205 - DNA, 1959 bp, Glycine max
  unsure (1)..(1959): unsure at all n locations
  Clone ID: PAT_MRT3847_120053C.1
tcaaagctgaagagggaaagctaaactgccaccattagtgagcgaaatcgcaaaagccgtacccaccgacgctttcaccaaacaaggcctaaggttccttgacagaaaggatgatgacgagcggtggccaacaccatcgtaacacctcacgtactggaccgttgggttgttcttcgagaccctctctgactcgccgggttgactcgctcgagtttgggggtttctgattcagcccncttacctatctcaattttgtctcaattaacagggtcttacatcttaagcttctttgacagactgttctttctaatttaagttaccatctttagctgcattcgtgtcacgctcctttgaatgcccgtcacctctccggaattcccgcgacccacgcgtccggggaagatcgagacgtatgtggcaggtgtgggttcttcaattcattctagttctggattccgactagccgcgttgactcggttccgtttttcattctcgcggatctaatattaaggaatagcttaagggcacattacaatgaaggcattgattctggttgggggatttggaacaaggctgaggccactgacactcagtttccctaagcctcttgttgattttgctaacaagcctatgattttgcatcagatagaagcccttaaggccattggagtgactgaggtagtgctagccatcaattaccaaccagaggttatgttgaatttcttgaaggattttgaatcaaagctcggcatcaagatcacatgttctcaggaaactgaaccactgggaacagcaggtcccctggctcttgctagggataagctgatagatgattctggagaacccttttttgttctcaacagtgatgttatcagtgagtatccacttaaagaaatgattgaattccataaaagccatggaggagaggcttccataatggtaacaaaggttgatgagccatcaaagtacggcgtggttgtgatggaagagagcacagggcaggttgataaatttgttgaaaaaccgaagttgtttgttggtaacaaaatcaatgctggaatttacctgctgaacccctctgttttggatcgaattgaactgaggcccacttctattgagaaagaggtgtttccaaagattgctgcagagaaaaagctatttgcaatggtcctgccaggattttggatggacattggacaaccgagggactatatttctggcctgaggctttacctggactcattgaagaagaagtcatcatctaagttggccagtggctctcaatttgtagggaatgtcattgtggatgagacagccaaaattggtgagggatgtctcattggacctgatgttgctattggtcctggctgcattattgagcaaggtgttagactcaaaagctgcacaataatgcgtggagtccgggttaagaagcatgcttgtgtatccagcagtattgttgggtggcattccactgttgggcaatgggctcgagtggataatatgaccatccttggagaagatgtccatgtatgtgatgaaatttacagcaatggtggtgttgttttgccacacaaggagatcaagtcaaatattctgaagccggagattgtcatgtgagtgaggtcaatgatgttcaaaatggtagcatgtggtgaggaggtagaaaaattattgagtctggaatatgtttgtccgtttcatttggttttcctttttacttcatggcatttctttcctttctataagtcagttttttggattagaatgagtgatgccattgcattgatgaaaaggtcagcatctttgtaaatggcgttaagtttggtctgtgcaaaagttgtgtattttgagtgtgtatagaaataaattattggttagtggtttctctccaaaaaaaaaaaaatagaaaatcaacaatgccattcttacttgtttttcttgtttatttttctattt

SEQ ID NO: 22206 - DNA, 222 bp, Glycine max
  unsure (1)..(222): unsure at all n locations
  Clone ID: PAT_MRT3847_120054C.1
accgagcatacaacanaatatctatacaacanaacattaaacacttgaatattgtgacatatacagggcaccctctttggcaaaagaatcgaagcaacataagaagcctctcagtcaggctcaacgtttcctatggaattcggaaacaaagttatttttatatatagacctttgcgctctccacctacggacctggcggaccgtggtacccggaattcgacc

SEQ ID NO: 22207 - DNA, 580 bp, Glycine max
  Clone ID: PAT_MRT3847_120055C.1
ggttaaaactggttttattcttctctctgatcagcgaatagtgtgtggttgcatcgtgattactataattgcgaacaattgcataatgctactgcatttgtagccacaatgcagctgtggagactggagaccttccaaaccacaatattctccaattgtgctagtagacagcaacttgaatttcctgctcatatcaaaacaatatcaatttaagtgaacaataatattgctgattatcctaataattgaattggtataaaatgcattataattagtccttgttgggaaatcagaattcttgaagagctaactattgtttgataattctaggatcctctgcaaaatctaaatccaagttttttaggcttcatgattctgccatttaatttatattctattaggagtcaaattataaagataagcaagcatgattccacaatgttgtatgtagtagatggttgcgatggaactatcgtcccattaattcttgtttctatgctcttttttcctctattttggatttaatttttgaacttttttgcaccatcacttaatgatatttttatacatcattaaaaag

SEQ ID NO: 22208 - DNA, 343 bp, Glycine max
  Clone ID: PAT_MRT3847_120056C.1
gtgaagaccaagaatataaatgatacacttacgaagcggtcccttaattttgcgcactatgtggcaccaggtgccttatatgattaaatgaatactactgaagaactgcagcattgaagagtatagaaattattgatgagaaaaaaaaaactaagggctggcgtctacatatgagctggtatagcactaaattaattactgaccggatcctgctggcatcccaactatccctatcgagagcagatttacaacttggcgtatagatgggcatatatgatacctatgtgaacaaatggtgctgttacaatcacacatcatatacaatccgccttcattacatgat

SEQ ID NO: 22209 - DNA, 210 bp, Glycine max
  Clone ID: PAT_MRT3847_120057C.1
tcgcttcggggggggtggtaacctaattaagggtccatgatatttccaggcctacctttaggggtccttttttgaaaagctttttagctggccttaaattacccattcctgggggttttgccaaaactggggcacctttgcattttaaaaagttggcaaattgggattttttcaaaagaaactttaaccaaatgtctaatgttttggggg

SEQ ID NO: 22210 - DNA, 220 bp, Glycine max
  Clone ID: PAT_MRT3847_120058C.1
tcgcccacgcgtccgtgacgcgtgggcggattcttggttcatgtcttctcgactcacctggggaatcgcgatcataagggccgtgttcgcggcatctccctcaagcttcaatatgatgagcgcgtgcgccgtatggacttcttcctcgacttctccgctatcaacaccgaccacatataggtctacaaggataccctatacatgctccaatccctcggta

SEQ ID NO: 22211 - DNA, 150 bp, Glycine max
  Clone ID: PAT_MRT3847_120059C.1
gtacaatataaattaaagcgttatgtgcaagttcgttgccgccaaaaaaaccgaaaaccacgacaaggagcgcccgatctagatgatccaatcttacattctcctacgtgccacatgttacatattatatactttcacctaaattcagtc

SEQ ID NO: 22212 - DNA, 464 bp, Glycine max
  Clone ID: PAT_MRT3847_12005C.1
gttgaagagtggtggttgcggtggttgtggaggtggttgtggaggctgtggaggagggtgtgcaaataggttggagagtaccggctgtggaggtcgttgcggtgatcctttggttggtgactgtgacattcacgaacttcgcacagaaactctgcatcaactgtatgaattggctgacgataggtctatctctggacattcatactctggctctctcttgatgcagttttgtgatctactgcttatcagcgatgcactcttgcatttttcgcattcatatcctgcttatgctaattacacttttgagtacgcatactacttatggtcaccttcataacctgtcaacgcaacgagatgctgatctcatcctttgttgggacatatgcctttctgctcctgcatgctctttcatgttaactgcatctcataaacaatttatgcaacctatgtctcatttaatgcat

SEQ ID NO: 22213 - DNA, 725 bp, Glycine max
  Clone ID: PAT_MRT3847_120060C.1
tcccaatttggaatctctatgtctcaacaaactgacgaacatagaaatgatatgtcgcagtccagttacagttgactcatttgccaaattaaaaaccatcaaggtcatggggtgtacctgtttgaagaatctcttctccttttacaaggataaatttgtttctagtcttgaaacaattgatgtttctgattgtgattctttaaaggagatctttgaaatactagtaaatcctgacaaggttgagtttcttaagttgcactctttgacactgcagtcgttgccattatttactagtttttataattacagagtagagggaccttctgaatctcaactgacaaaagctcaaacagtagagagggatgagaaagaaattactattgcacaagatgaacgtagtggcatggctccccctctctttggtgaactggtatatgatattgcatacttttcctttaattttaatttatttgtcatcagtttttttttttaaattgttataattatattaactgtatacgtgcttgcttgcaggttgaaattccaaacttagagagcttgaatttatcctcagtcagtatccataagatatggagtgaccaaccactgtcaagtttctgctttcatagcttagtaaaattagttgtgaaaggttgtgataatttgagatatttatgttcattgtctgtggctagtggtttgaagaaactgaaaggactcttcgt

SEQ ID NO: 22214 - DNA, 1760 bp, Glycine max
  Clone ID: PAT_MRT3847_120061C.1
cccaaagtactaacagccaatccccaaaagcgaaagggtcccttccagtgaacaaccgggccgttgtcgccgacaatgccggccacgtttcccccttcgtcattcaaacaaaccctctcactctctgcttcacccctcttctaacaatagcctcacctttttcgcaaacacttcctatctgagctttgaattcgaatcttatgtcttcgatcaacggcttggttggccaccggagcgcgtctccgacatgagcaaagactccaccaattctcacaccaacccttcttctccgttgctctccgtctccgctgtcacctccgcctcccaattccccaccaaaaatgccaaaaaagttgtccttttctactgcgccgagaccaaggccctcgccgagaaaatcgctgccgaaactgatgccattgaacttcgtagcatctcttggggcaagtttcctgatggcttccccaacattttcattcctaatgctcaaggaattcgtgggatgcacgtggcttttctggcctcattcagttctccagcagtgatttttgagcagattcctgttatttatgcgttgccaaaactgttcattgcttcatttacccttgtccttccgtttttccctacgggcacttcagaacgtatggaggatgaaggagatattgccacagcttttactttggccagacttttgtcaaacatacccatttctaggggaggacctaccagtctggtgacatttgacattcatgccttgcaggagagattctactttggtgataacattttaccatgctttgagagtggcataccattgcttaaaagaaggctccaggatcttcctgattctgataacatatcagttgcttttcctgatgatggtgcttggaaacgatttcataagcaactgcagcattttccaacgatagtttgtgcaaaggttcgggaaggagatcaacggatagttcgtattaaggagggagaccctaggggtcggcatattgtaattgttgatgatttggttcaatcaggtggaactctgatagaatgccagaaagtcttggcagctcatggagcaacaaagattagtgcttacgtgactcatggtattttcccaaataaatcatgggcacgctttggacatgataatggggggcatccagagtctgcatttacttatttctggatcacagattcatgccccttaacagtgaaagacgtgatgaataggccaccatttgagattctcagccttgcaagctccatatctgccagtctccaaatctgacaggaacatactgtcattttcatttcatgctcaaaataatatggagaaacaaagcgacccagttaataataatagtcaaagttgagctcttagacattagtatgcggcttatagtaacaggtagacaagggagtagaagaccgcacaaattggttcaatctttaataatatctcccctcaactttgtcatctagttttgccaaggttgttgctgcaacatctacctgggttgctttcatctagaaattattgctgcttaatggtagtccatagaattctgttgtgttaaaaacaatgtactctatcttgtggattttggtagtatcaatcgtgtgtctcatccttactctatcttgtcaaattaaataaattatgatttcaaatgtccatcttaaaatttttgtaaagaactttctgaaaaaaaaaaaaaaaaaaaaattcctgcggccgcgaattcttctggtgccgaatt

SEQ ID NO: 22215 - DNA, 816 bp, Glycine max
  Clone ID: PAT_MRT3847_120062C.1
ctcccaatcttgggggcactaaagaaattttctccttttttcccccatagatcatctaagctatggcgaggacaagaaacaagagtttacaagcaaaactggttcttcttggggacatgggggcagggaaaacaagtttggttcttagatttgtgaaaggtgaattttccgagtaccaggaatcaacaattggagcagcattcttcactcatgtgttgtctttaaacgaagcgactgtaaaatttgatatatgggacacagcagggcaggaacgataccacagtttggctcctatgtactatcgaggtgctgctgctgccattgttgtgtatgacatcacaagcatggattcttttgtacgagcaaagaagtgggttcgagaagttctaagacaaggagggcgaggaatatgccaaagaaaatggcttgtcttttcttgaaacttcagcaaaaaccgcacaaaacgtgaacgagctcttctatgaaatagccaagagattggcgaaagcaaatccttcacgtcaaagtggaatgaagctgcataacagagctggagaaacaagaagaggattcttttgttgtacttaattattgatggctttcctcacctcacgtttgacgtgtccattgtttatgtctatgtaaatgtaattgctcagacaacaagaacaaaggcatgttcgatcggtgtacattgtaagatctcacgcccaaactctgtttatcgctcacaccacaactcctttctgtaaacgcattatttacacccacttgctgttggtcaaattttatttttatttattttttcggcatgca

SEQ ID NO: 22216 - DNA, 298 bp, Glycine max
  Clone ID: PAT_MRT3847_120063C.1
ggggttgggttaaaaacaattaacacatgcctaataatgaacatgaaaaggggcaaattccctaaaatacgggtttatgttacatacaaattctaattttatggcccgacttaatataattggaaacaaataatcgacacgttttaagaattttgaaagacgaaaacatttacgaacctgggaatgaatacccacgaaaaaatgttgcaaaagctccaacttttaaagacaaattggggtgctttttttatccttataccaattttttcaagggacaggccaagccccatggtttcct

SEQ ID NO: 22217 - DNA, 711 bp, Glycine max
  unsure (1)..(711): unsure at all n locations
  Clone ID: PAT_MRT3847_120064C.1
gctagaattgtaagttatttgacaatcagctaagccataataaattcatgcctatttctggctatgatacaagtaacgagaatacagggattttgtgaacgtaactgaccaaatcttttgatctggtactatatggacctaaaaccattacaagtacagcagattatgttcaaccatatcatactattacaaaattgtgaaaaattatgccttgcactctaagaagcaagacaaatgagactgacaaccttccatttgcatctgatgatttgcttttcgtagcgtcgcttgtccagattcctcctaacaggacacaaactcaggaaccactcccctttagagcttattaattagtagcattaatgaagtgcagcctgcagcagcgacagaaataacaattttcataaacaaatagtcttacttcttccgcggtctattatgcctaactttcacatattttcgacccgccttgtcagccccaccagtgcccaatgagaaactccctccagcattaaactcaagactgccagaagcctgaaatggagatggattctgtggagcaatgttctgttgagttgcgaaatggaaaggactcactcctgttggagctaatgctccaaatgcaaaatttgattgaagtngggcagggttgttgaccaaatacnnggagttgcggggtggagttgcttgaactgtgtcctctgccatact

SEQ ID NO: 22218 - DNA, 369 bp, Glycine max
  Clone ID: PAT_MRT3847_120065C.1
aattccggggccgacccacccttccaattggataaagtattaccaaattttgaattgcccatggggcctttaaaatggttgaacctggtggggtttgttttgcaaatgattactgccacccaattaattcaaaatttttcgccccaaatatgtaaataaaggcttctttccctactccccccaaataaaaatgctgggcaccactcctttttttttttttatccgggttgaccataactgatggctaataacgatccgccaccaaaatccccggtaacaccgaatgtgacggcgttggcattttgggcattgtttgggccttcgggggcatgatcttaatccttgtttactggactgccggaatttttg

SEQ ID NO: 22219 - DNA, 403 bp, Glycine max
  Clone ID: PAT_MRT3847_120066C.1
caatttccccctattttgatagtgcatttcttttagtagtgatataaaaagtgcaattttgagctattagatactcatttttcataatttctgtaattgcaaagcaaccgcagtttaatatacatgcttaagagtttaattttatgtataccctggttgtctccatcttctctttgaaaaatgtgaatgtgattaggaaaacattaattatatacgtgtacggtggaattggaattattgatattgagttcatcttgaggctgtcatgttcccatttccccatagtattggacatggttaagtaataaatcttttaagtattattagtatataatgggtttgctattaacattttttggaagattaatctcgtagtgtttgactattggaataacctgctttt

SEQ ID NO: 22220 - DNA, 364 bp, Glycine max
  unsure (1)..(364): unsure at all n locations
  Clone ID: PAT_MRT3847_120067C.1
ataataacacacactttttacatcattacaacaattaaaanatgtcnagaggatagaaatgttttttaaacatactcatcaacacnttcatgcctaatttcctttatttaattaaacaaaccaacattctaaataaatcactaattccttatcatacatatgattcctcattttcagattatctttctttaacctgttaaacaaaaaaacctctcttattatttttaccaccaatttcaaaatcttcatatattcccattacaatttcaaaaactttccactgtttaatattttcaataatgaaactcacatgccattaatttctatttccccactcataactccacattttaataccattttt

SEQ ID NO: 22221 - DNA, 353 bp, Glycine max
  Clone ID: PAT_MRT3847_120068C.1
ggggggggggggttattacatgtggacaactgttatgcagcataacagccttttggttccaaccattcctttttcataatacaatcagccaactagacaggaaccttgttaccggggggaaggtgatttgtgtttattccaaggacgtgaattgccaattattttatttaacccacgggggccaccccgaaaattccgggccgttactggtaggaagccacatttatcctttggtgggaaggtttaaatgggggcgtgtccacatacttaatctccttcggggccaaaattttttttaatgggaacatcacagatcttagatgccggcaaaataaaaagattagggtggggag

SEQ ID NO: 22222 - DNA, 396 bp, Glycine max
  Clone ID: PAT_MRT3847_120069C.1
atggtgaattgaggtaaacaacatctgtttgcacataacgttcaatagttggataatttatttctttcaaccttttaaattgttaagattaagcatagatgacataactgtaactgtgatgtgatgctagttttcatttttaattattctatcatagactgattttctatcttatctctgaactttaatttcttactctcaccccatttttcttaagttcatccccattttttttttaaattaacaataatacccttgatgatgtaaatttattttgaaaaattttggaatccatcttaattccaaccttaattttggttataaagttatatatgaaatcaatcatggttaccttttaattttttatatatttaaaaattattacatttttttttt

SEQ ID NO: 22223 - DNA, 968 bp, Glycine max
  Clone ID: PAT_MRT3847_12006C.1
aattcggctcgagcgagcatgtccaatattcttcttcagagctctagctctgaggaggatttgcagcttctaatggaacaaagaaaaaagaagagaaagcaatcgaatcgcgaatccgcgagaagatcaaggatgcgaaagcagaagcacttggatgatctcattgcacaagtggaccacctcaagaaacaaaagagcctaaccctcatgaaagtggacatcaccacaaaacactatctcgaggttaaggctgaaaattccattctctgggcccagaagactgaactcacccaaagccttcaatcactcaatgatatcatcgatctcatcaacaccaccaacggggtctaccacacggattgctatgatatcaataatcataataatcataacaattattacaataataacaataatttcatgaatcccatgcacatggcatatcttaaccaaccaattgtggccactgcagacaacatgtttctgtggtgaacaaattaagattttgtgctagtgtgttgttctgttgggagttgcgtcacggtggaatcattcatgagtgatggtaaggtaaatattagtggtacctactactagggtgaggcaatgtttattaagaattgggttttgttaattggtgttcttagctgattgattaagaatattatattattggagtgtgagaagaacttgcttgctacatatgatatgattaaatagtggaatcaaatcacatagtggcatttatgcatagttctgttgttgttaggttaggacaggtcaggtcaccaaagtggcatggtacttgccactgtccaatgttttggaaaaatggatgtcggtgtaagcgtaactgtgcaagtgtgccttctctatttttttcttttctttttatatcattaatatgatatgtaatgttatgggtgtgcttttatataaaaatggtattggttcttgcccccgaaaaa

SEQ ID NO: 22224 - DNA, 625 bp, Glycine max
  Clone ID: PAT_MRT3847_120070C.1
ggaccaaaacaaaaattaaaatatcttacaattccgatatgtaacaaaaaaaaataaaatgaaaagggaatgtaagggaaaccgggataattacatctctccaaaaatggctggagttccaaaacataggtaaagggcttatccaagacggaaggaacaaaattgcagcaccatattgatgcccagcataaaaaccatcttagggttaccacaaaaatgcattgttaaattgaagggcatctttttggaacataaattgcagcctcaggttgagccctaaagctagcacactgggcacgttcaaacattacgttccaatcttataaaaattttcgcaaacagttttcatcctaggccgagcctctggatcttcctcagggcaagacagggcaacatgaaacacagccagaaccttttttttgacgcgcactttttggagcaaagatggatcaaccatttcggataaggggctttcttgatcgaatccttttctaacccaccttaccaagtcagggacttccatggaagttgatggggggggagatgactctggtgacctcccagttagtatttcaagcaggacaactccaaacgaatacacatcccatttctgggtggttctgca

SEQ ID NO: 22225 - DNA, 208 bp, Glycine max
  Clone ID: PAT_MRT3847_120071C.1
ggagctttaatgggaagcttgaagatggatctttcgtggcggtaaaagtccttccgtttgacctgtcttccctacaatgatacagggaatggtgagccgacttatctacacttgctaacatcaatctccataatcttaaaccccccaaagagtatgctgtggaacgcattaatccacttcacatgtataattattttgcaaacactaa

SEQ ID NO: 22226 - DNA, 317 bp, Glycine max
  Clone ID: PAT_MRT3847_120072C.1
tctcctgagggcgctgcttacccaaagttctcagctttatatcccagaggttctcctgttgctctgttctcacttgctgcttctcgattccccttccgcagcaaccccggtcgaatccccaatcgtcgtcttgggctaaacccaccgccctgctcgttctttagtgggggggtgcaccattcaaaatcgaagcttgccaacggagccctcgccgccttcctccggcgagatgcacctcattgtggggcccatgttcgccggataaaccaccccgctccttcgggggatccagccgggaactttctacgggcggaaac

SEQ ID NO: 22227 - DNA, 270 bp, Glycine max
  Clone ID: PAT_MRT3847_120073C.1
cacaaaaaaggcatagctagagatagagaatcatggataaccctaaacaaacacttgggagtttcgcagtggtaacactactctttgctggggttattttgctgtacaactggtccacctctttctccaatgaattagtgctatcccagaaggaaccactatgcgagcaatcaaattctaccaccaccaatgttgaagcatatggagatagccttgactatgctttggccaaagcctcatgggaaacaaaacggtgataattgctatagt

SEQ ID NO: 22228 - DNA, 349 bp, Glycine max
  unsure (1)..(349): unsure at all n locations
  Clone ID: PAT_MRT3847_120074C.1
gcnngtctncacagcacgcgagacgcgnggctgcgggactccngncacaagcctcaangncnactagnntcannctcatttcccatccccggttctatacnacaaggtgtctggccngnnggnnantagtgcaatgagtagnatnactngttnttgcgntacaaccgagcntgngtgttcggcgttgcttggcatgagnagccctggcctcattantgcgnngaccaaganancagctttngccatgcatggttnacgngtnntagggantttggcgtnatggananttgcncanaagcnganngtgggtcgcagccattccgnttgttctcgncnngatctcgggagt

SEQ ID NO: 22229 - DNA, 236 bp, Glycine max
  Clone ID: PAT_MRT3847_120075C.1
gtatcttggatttgtgcctaatttagtgtcatttttacaatattttggcttgtagatccgatcttagtttacattaacataacgtgatcttaatgcaaaccatgtcaaccaaacaaacgtagaaaagcggaccctctaaaggatccaaactcacatacgcatacatacgacgacatagatcttccaaacagtcacccaaattcagatcactagacggcgcttaacaacttcaaaac

SEQ ID NO: 22230 - DNA, 1381 bp, Glycine max
  Clone ID: PAT_MRT3847_120076C.1
gacttcatttcactcacccctttaactgccatccattctttctctcttgaggggcaggggtaccacttcaaaaaatatcctctttgatccctttctctgtttccttttctttatcattattatataataacaccccacgcgtccgcccacgcgtccgaaatacttcccttacccccccctctctctctctcttaaaacaaacgaacaaacaaatatgcaagtggcggcagaactccaacgcgcccatcaccaccaccaaaggcacaaacaagacactcccatgtgccgccaaatccagctcactatctccgatcacaccaccgccggagacgacgacggcgaggatctcttcattccgcccctcaacttcgccatggttgataatggcattttccgctccggcttccccgaacccgccaacttctccttcctccaaaccctcggcctccgttccatcatatatctgtgtcctgagccgtatccggaggccaatatggagttcctcaagtcaaatgggatcaagctttttcagtttgggattgagggtcataaggagccttttgtgaacatcccagaggacacaatccgtgaagcactaaaagttgttcttgatgtcaggaaccacccagttataattcactgtaagcgtggaaagcaccgaacgggttgcttagtaggatgctatagaaaattgcaaaaatggtgcttgtcatctgtctttgatgaataccaacgctttgcagctgccaaagcaagagtttcagatcagaggtttgtagagttgtttgatatttccagcctgaaacattttcctatacccttttcatgtttgaagaggtgacatatataccaagctattctgagttgggtttactttctttagtttgtgaaagtgaagcccaggttctgcctttgaataaaataggaaaaggtgatgaactccttcaatgcattgcagcggcaaaaggaataattcttcttctcccattcttaaaataagataagaaaaattctaggaaaagtagagcattacctgtatttgtatgtgttataatttagccctatatttaccttctatccctacttggcccttagtgtatctcaccaccttttgtcctattttctttctctttgtttttatgtttttctttgctgctctcccattcatcaacaatgagtgtagatatatcttgattttttctcgaggctcagagaaattcaagaaggctacaaaaatgacttgtttgtctacccaaaatcttggtgggtagtaaagcagaggaacttataaaattttatttgctagattaatattgcttttcttattttatgttgacactagcgcagttcagtgagatggttattctcttatgctaattgc

SEQ ID NO: 22231 - DNA, 1000 bp, Glycine max
  Clone ID: PAT_MRT3847_120077C.1
gtcaagaaataatgacggggtcgtctcattctgactgatcagagtgtgggcgcgcaggtcgacgacagcagccggactgtctcgtccgacggctgcgagaagacgacagttgtgggagctattggtgcgcacgctaatgttgggagttatacgagctcgaacgtggttgcgatattcaaaggcccttcttcaaccatggaaggtagggttctcctctttgtccgctattgacggccggaaacaccaccttctgaatctgcaggagatcgagacagttctgaccgacgttaaagctgacgacgttaaggttataccagttcccaagcactgcgattgggctgatttcatggtactcgccactggcaggtccacctggcacgtcaagaacatcgctcaagccctaatttacaaggctaagcagaaacagagaggagttgaacgaatgatgctaccgagtgtggaaggtcaagcaggaggaaagtggatcgtcattgactctggtaaagtgatagttcatgcactcgatgaaaaggctagagcttactacaatttagagggtctttggacccctgggggaattcaaaatgaacgtgatgaggatttacaaaaagctttggtgaaggttcgtcggaaaaacaattcaaagaaacctgcacaaaagaatgcttaattggtgttctatgctataggggctaaagatacctgcacaaaagaatgcttaatttgtgtttctatgcaagagggctgcaaataaccttttaaaactgtggtttctgactctgcattagatgtaattttacttgttctgaattacaatttttgacaggttgtcttgctgcaatgccaaagttagaaaagaggtagagctgaagaagttttcatgttgtcctacaatcgttttttaactgaattggtcgtaaaattgatgaagagttaatttacggtttgtaagtttaattgtagttgcattggtaataataaaatatatacttttaatatt

SEQ ID NO: 22232 - DNA, 253 bp, Glycine max
  unsure (1)..(253): unsure at all n locations
  Clone ID: PAT_MRT3847_120078C.1
aagggtcattgttcaagaggcacagtgattatcacactgtggttgatgagattgggatgaagttggatttcatgtgggcaccttatgtaaccaatttgactagtttggttgctgggtttaagaggaatcgcgtttatcccgatcttttggtgatgggttctggattgtggcacatgctgcacttcaccaatgcttcggattatggtttctctttgggggttttgaggagttcantgaattcattgctgcctgt

SEQ ID NO: 22233 - DNA, 528 bp, Glycine max
  Clone ID: PAT_MRT3847_120079C.1
gaattttccatttatagaaatagatagactagaaacgacatctcttatctcaatgacaccaaagatagggatattaaacgaatggaattagtatatggatgtaatataatgaaatagagccacttttgggttccctatgaaatgaggcatggaacggagccactgtgaagaagttttacgagttacgaaggaaacttcgagctcatattggtcatgggttgagaacgggaattgaactctatgagctcgaatttcccgttgttcctcagtagctcagtggtagagcggtcggctgttaactgactggtcgtaggttcgaatcctacttggggagattttattgattccgaaatctgtaattcggaatgaatgggttcgctttgaccgttaagaagagtagataactcgtttttcccttgtctttgtttctattgcattctatctcatcgtatcccattctgttctgttctgcgatatttgagaatcgccgtcaatacctcggtgtaggttcgggatactcctttgttc

SEQ ID NO: 22234 - DNA, 838 bp, Glycine max
  Clone ID: PAT_MRT3847_12007C.1
gggtaatagtattaaattggcctttctattgagcctggataagaataacatataaatcttgatataaatcaaagcagcatacttctaatctcataattttatcatctaaacaacttgctttagaaaaaatatattgaaatttctgttaaaatatgcttgagctctaaagtctacatatttaaccaagcagtagagtttcacctccacatatctaaatcaaattaaatagctcagcaacaccaccacagacaaacacattcatccagtacaaaatattggatgaaggaatattaattctagcagcaagaatcaacaatatgcaaatccaataccaagtttagtgccattgataattctcttagttctcataatctgtacaaaagtttatgcattaatttctcaaggtcctcctggtgtctttggatcatgccggttgtttgctcctgtccctggataatcattactctccaaatcaatccttctctctaccatgaactcttctgccatatcaaacatttcttctccatttttcaattcctcaacaccctgaaaaccatagacacaaaaattgtatttagttggaccctttgcggcatgcagatagaggaactcttgaattttggaatatattgcaaggattatataagattaaattatgttcatgagggtctaaattataaccttatcagatgtaatctgggttgagagtttttctttgtttggcaaaagccttcctgcaaacaatgaaatttcaacatagaattaaatcaattttgaaaattaaaaaagaaagagagatgaaacaggtccatgttaatcataggaaaagtaatttaat

SEQ ID NO: 22235 - DNA, 525 bp, Glycine max
  Clone ID: PAT_MRT3847_120080C.1
ataaagttgtttctttcatagcaatacaagccggtaacaaacctttaccttctgttttgtgtcaagttactactccagtgcatgccaacatgtttcagactagctacattcaaacaaaaccttcagtctagaagattaaaagagggaatccaagttgcacctttttctgaattaattctccatttccaagtaaattaagcctcaattagctctctactagctatctgccactgcccactagtaaacagtctgttctattatgatctccacatgcaataaagtagtcactatgatgtcaatcaacctgaacaaatgttgaagccaattaaagatgatccagctgggtgatcaagccaaatactttttttagtgaacacagggtatctctcaaagtactgaaattcatgaggctaattttctcaacaatatttttccatgcacatagatttagagattatctatctaagtatcaactatgtcacaccatcttggttcaagtcaaatgtcaatataactgtagtattc

SEQ ID NO: 22236 - DNA, 374 bp, Glycine max
  Clone ID: PAT_MRT3847_120081C.1
acaaaacaacttaaccaaaactccaaattccaaaagcctattttggcttcaacataatttccttttattttccaatttccatttttcatcattggcatcatcaaccacattattatttatttattatcaattccgcctaagattgggcaactgaaaaaactgcccgggatcacgttcagaaaaccattatattaggaggggccaccaccggaacacccaaacacaggcttaaataaaaaaaacacttgagaccccaccctggggacggttgaactttgaccaacacaaaacgacgcccacaccccatggggccattggcgggcaattacccacctttcctgggcttaattttattaccgacctatatttttttt

SEQ ID NO: 22237 - DNA, 479 bp, Glycine max
  Clone ID: PAT_MRT3847_120082C.1
acaacatttctctcttcttctctcacttccttttctgattctctctctcaccctttgaaattctatcaattctattttagattctcaattctcattctcaatttgttgttgtttttggttcactgggttcaaattcaagcccaattttggttctcacttctaggttttccaattggagtgatttcaatttggaggggaattttttggtttcaggaaaattttgggttttcgattctcgggacgtcaagttgcagttgtaaaagtcttaaaccttgagattattattgctgttgttctcaaggtttgttttttcaaaattggattttgggaaatgggtgtgtgaaatttgatttttgatttctgggttttgtaattgaggcgaaaaagttgtcaacttggagagtaattcgggttttttttttttttttaaattctggggaccactgggtctacgagataggtattgggggaagagagag

SEQ ID NO: 22238 - DNA, 462 bp, Glycine max
  Clone ID: PAT_MRT3847_120083C.1
tacggataaatttctctataaacacttattgaagaagaaaataagatcaactaatgtagttaactttcatatttttctctcccaaacatctccaaaatttgaagttcatacctgtttcagacactgccaatctaatataccgatcttgtccagcttctggaatcagtcttatatctaacagatcaccgtaccaaatggtgcaatcactaccttctcccctgatgtctgaatttgcataagtcgtacaggaacaatctccgtacattttttcttgcattttgcaagtgtcacacttgtattaatccaagaccttgtagtttttggtggcttcacgttactgaattttttagaaccatccttgtttttttcctgcagctccaagtttggttgttcatgaacccttcattccagtaattttgggtccaattttgtactggttgcataaatcacttggcaacattg

SEQ ID NO: 22239 - DNA, 522 bp, Glycine max
  Clone ID: PAT_MRT3847_120084C.1
agtacaactgtgagaacaccattggatgtgcatacagggacgcagagcttttgtcaagttgctatgctcctccgggaaggaagaattttactggtcaaaaccggacttggatgcactcatcagattctccttttgtcacttgttgggagtcgcgagtggaggcaaggatgacctatggtccagatcgggacctcgcgaaaagccccactaaaacggattgagcgtgcccaactggtccaagtccttttcacatacaccaccacagcagaggcctagcgaggcatgaaagacgccgaattcatagccgcatcccacgagcgtgacctccccaatgcacgtatgtggtcctaataatgggtacaaaatactgggtccatagtgggcagaataaacaatatggcttttgattatcctcatggacaaaacctaacaggctacagactttggatatagtgtggggaatctcacgctaggggtaaattgctgaaagacttaccatgccagctcaccttgttccacaag

SEQ ID NO: 22240 - DNA, 252 bp, Glycine max
  Clone ID: PAT_MRT3847_120085C.1
aagctccacgcctggcgtaccgaaccaaaataattcctagtaccacagcatctattctcccccgcccttttttttaattaaaggttttcttttaaataccgggggtttccataaaaaatggttgtctacatttacataaacgagatatgttctagcaaaacaagctaacttcttaaatctgcacccacatcttaaatgatagtgaagcccacacctaagaaaaaccctcgtttatgctacacacccccccta

SEQ ID NO: 22241 - DNA, 339 bp, Glycine max
  Clone ID: PAT_MRT3847_120086C.1
ggttagtttgggcccccttaaaacccaatggcccctctgggaaaaacgttaatataaagccccaccaaaaccttatgttatatacacgggtgatcactttttgatccccaagggcacaaaaaaaaacaaaaacccactcttttaaaaacttttttttaaaaggtgtttggaaggcgctagggaaaacctgttcaaaactaaaaccatggggttttttggagaaaaaaaaatccccttttaaacttttggcccccaaaatatggtgggcccctatcaccaaagtttgtccctttaaaaaaaaaccgggggagccttcaccttcgtctgacattttaaaaa

SEQ ID NO: 22242 - DNA, 297 bp, Glycine max
  Clone ID: PAT_MRT3847_120087C.1
ccggcccggaattaccgaggcgtccgtttccaccgatcacacggagaccttgcaagactgagttaaaaggatgtcaaaggctattttgatggctatttcatgcctatgcttggctggcaaggaggagaagatgtgcccatcggggctagatgtgggaagggtgagcatgacgaagaccggcaccaaccagggacactgatgaagcccatgcttcggacgataccgggtccagccctgagtgacattccatggattacccccaatctaccataaccgggagatggcaggggattacgg

SEQ ID NO: 22243 - DNA, 375 bp, Glycine max
  Clone ID: PAT_MRT3847_120088C.1
atgcacccccgtcagctcggcggagtcatcaagagtgtagataagaacgaccccattggagctcaagggcaccaaggccgctgacaagaagaagtgagcggattagggcaatcatgctagcacatgtgagcatgatgagggctactcctttactgtacctgttatccacgcagagacggtacgcgttacagtattaagcttatactaatctaatgacctctgctcgactatcatgctacccgcgactttcaaaactaggacctcgatctgcagtggttaaatttaattgctccttgtcgctgaagagatccagcttctgatataatggaaaacagaatcccacgtattctgaatttctcgaccagctatcctaca

SEQ ID NO: 22244 - DNA, 714 bp, Glycine max
  unsure (1)..(714): unsure at all n locations
  Clone ID: PAT_MRT3847_120089C.1
aagatcaagtgtagtatctgttcttatcagtttaatatctgatatgtgggtcaggggaggattcttcacagtagcttgctgctggaatcatcatttagtgtcgctcaagtgttgcactacaccttcggcctgccacaccccaccatttcagttctaaccttagtaaggtaagatatttgtagaattttgctctgtatttgcagatctaatttgtattgaaaaatcagtatgttgctacaaatcttgaaacgcagtaaagaacaataataaatcttaccgaggaaagtggactgatcatgttacaacatgctggaacaagtcgtttctttttcaataaaattaaaataaagccaacgacaacaggtgtgcatatcagcaaaacataaaaggactttcaatactaattacactatgtttggggaaggtgagataggggagggggcgaagatgaattaattcattttagtttcgtgaaggtgagttcaaacaaaaataactcaagtgacaaaatgtgtgggggattcatgttaaacgaagtttcaatgtgttaacaaacatatactaataaaagattaataatcttaatagatcacatcttaattaccaatgaaagattcttcgaataagttttttctattttcaaagatcatattaatcacgagtaaaatattcataaactaacggtataatttttctttntacaatattcaatag

SEQ ID NO: 22245 - DNA, 499 bp, Glycine max
  Clone ID: PAT_MRT3847_12008C.1
gttgaaagtccattgctgttagagattattgaaggactacgaactaagaaaaaaaaaaggtaaattttgaagaaccttagaatgagctgagactatgcagcaaaataatgttgggaccaaattaattgggtaatgttggtgttggggctttagtggggcgggtgttacttggttgccgtctctgaggcataggaaattgcaatgcttcatccggcggcaggcagagtgacagtctgaacgggaattctgaggggcaaaggcaaagcgtttaataatggtggccaagcaaattaggagagagctttctcatatgcttccagttagggaagcgtatcaagttgcgcttaactcctgaggatgaccatgctttcctagctccacctcaccgcttcatattttcaggatgacaagagccaaaacatcaccaaatgaggatgaccatgattgcgatggtgaagatcctgaagaaggcatcatttatgtggactagatgcctccc

SEQ ID NO: 22246 - DNA, 1229 bp, Glycine max
  Clone ID: PAT_MRT3847_120090C.1
tgaggagcttgtggaagctcttgttcagagaggagaagctaaactcttaacagaagattgggagggagctgtggaggatctgagatcagctgctcaaaaattgcctcaggatatgaatatccgtgaagcagtaatgagggccgagaaagctttaaagataagcaaacgcaaggactactacaaaattttgggaatttcaaaaacagcttcggctgctgatataaaacgtgcctacaagaaactcgccttacaatggcatccagataagaacgtcgacaagagggaagaagcagaggctaaattccgagaaattgctgctgcttatgaggttctcatacgatgaagacaagcgtgtaagatatgacagaggggaggaccttgaagagatgggaacgggcggtggcggcggcggcggtggtttcaacccttttggtggtggggggtatacatatacttttgagggtggcttccctggtggtggctttggaggaggctttcccggtggtggatttggagggggctttcccggcggtggcggtggcggtggatttgagttccatttttgattgggaaagccgcatgcactccccatttttttaaaaaaattttctgaagggaccacaacaattatatttgactaatcacttgctaacggttgctgagataaatacgtaggccatcctcggatgcttgtaagataagaaacgtgctctagagaattttttgctttatgcataagtgatggggttggatgttagttcaggaggcacattttgatgtagcacatttccttttatgtggtggttgtcactatgtaacgactacttcaaattctaagcaaccataatacattttgatggattgaaatcaattgaattgcttcgcaactgacgccaattgtaatttgagttgctgcttgaagtctatttagctgcaatatctaataaaattttaaatttatttgctgtgaactagagaatttttgctttatgcagaagtgatggggttggatgttagttaaggaggcacattttgatgtagcacatttccttttgtggtggttgtcactatgtaacgattacttcaaattccaagcaaccatgatacattttgatggatctaaatctattgaattgcttcgcaattaacatcatggtaatttgagttgccgcttgaagtctatttagttgcaatatcgaataaaatttttaattcttttttctaaaaaa

SEQ ID NO: 22247 - DNA, 384 bp, Glycine max
  Clone ID: PAT_MRT3847_120091C.1
aaacaaaaaaaaataaggggaatccctttcgagcaaaaatcattgaacccccaatacctcacagggggcccaaaagggaccccaattttgaatatcccggtaaaaggggccgaaaataacctttttgatttataaaaaaaaatttagatttaaattttcagattttcctccaaaacttatttcaattcccaaaaaaataaaaatcatttccccattttttatatagggtagcaaaacctggactatttaaaaaggcaggggggggaaatgccttaaattttttaggggggggatttcccccagatttaaccccatttaaaaaaaagcggagctttggaaaacttataatagccctaaggcccgggggaaaattttctttgccaa

SEQ ID NO: 22248 - DNA, 318 bp, Glycine max
  Clone ID: PAT_MRT3847_120092C.1
acctacaaaccaagttaaaatgcccaaaaaaacaaccccgccaagggggcaaactttatttttttaaccccggggtttaaaaccaggggggtgaatttaccttcccccggagcggcccacaaggagggccgcaaaaacggggcctttatatgtaaaaacagaacgggttttttggggaaccacttttccaataaccggccaacaaaaacgggtaaatacaaaaaaacattggggtttaacaggtttccttggaaggcccaggtggggcaccccccccccagggcgcggggtgctttgttggaaaaaggctctcccccc

SEQ ID NO: 22249 - DNA, 1295 bp, Glycine max
  Clone ID: PAT_MRT3847_120093C.1
ccaagcgtccggtgcgccgtctttcactttgtgcttctcccttttctgccctcctactaaacattgatggagctcaatactcgtaactaagaaaatttggttggcgaacataatgacatcgactaggttcttctcgtatccccttctcctaattggtacatagattcactttaatctttcactatttgccattgagcaacgaaggagctggatcctctccaagacgaaaaccttgctgaaaaagacaatgacatccacaacattgtacactcatatcttgtacataattgttacaaagaatcggcagaatcattcattaggaagcacgggagtttagcatccgatagattatttggaggacatggataaaaggaaaagtcttgttaatgatgtgcaagagtgaaatgtgctcaagccaattgagctacttacgcaacagtgtcctaatatttggagaagcttgaaaagtttatgggctttctagcttattcggagccagtgaaatccctaatgtttcatgtccatatataagagtatcggtgacggcttgcagatagtttgaatcgagcaatacttgcacacttgaatcttcccagttacacagcaatggagaggctaatacagcaggctacagttgtaagacaatgcttaagtcaagaagctggcaaggatgggccaccattttccttaaaggattttctcaaaagttgatggaaaacagtaaaaaatggagagtcaattggggaatgaagctcgtttaccttgaacctttctcgtctcatattggattggtgtacggtttcatcatagtgtaaagttttttgaatgccttttcatctataaattctttgtttccaagctatcttcttctttttggtcttgctgcacttttgcgaggcatgagtaatctatgagtgatcatggccaaaaatgcaagattgagatgatcctcctgtccgaggcagttgacctcatctgggacctaatttccactgccataatttctactaatttaagttattttcaatccattgaaaggttggacagacaaaattaagtaccataatttcccttaatttagatgattttcaatccattgaggttgagctgccaaaattaaggatatatatttatattgtttaaatatttgatgtaaaatcttttggttacatgtatgtggatatgaaaggaagattgaagacttcaatctcttttgtcagtaagtttcaagttatcaatcaaaacgttgggtgtgtaaaaaggcaagtctgaattaattttctatttggtctttt

SEQ ID NO: 22250 - DNA, 662 bp, Glycine max
  Clone ID: PAT_MRT3847_120094C.1
ggctcgagtgaaaaaccaaaacccgcagcaaattaacaaacctaaacatctcatgtcgtgttttgccgagtaacgctgaagtaacttaccactcaagtgttcttctttctgttcgtagaaatgttcgtgaagctgcaactcttgtacccccatacacccctcctcgcaaacgcaaacgcaaacgcaaacgcgtttcttctgccagagaaaaccgaacaagtctcccccacacgcagaaaacaaagactccctcttcataacggcaccgttaagcaagagacccattcgaagaaacgccgtccggagaagaatcccgaagagggtgttcccagaaagagcaaaccggagaagtcgcacaccaagtgttcgacgaaacgcgtctcttatggtggatgcattccggcgattttagaagcattggacgcagttctcggtgtggacgaggctcttgggccgtgggaggagaggcttagcaacaaggagaggagcatcattttgaaggagcagctgaggtgggacagagctttggagattttcgagtggttcaacaaaaagggtcatgaattgacacgattcattacaacatcatgctgaggagccttggcagggcccgtcagtggaggcgcgtggagagtttgtggaatgagatgaatgctagaggc

SEQ ID NO: 22251 - DNA, 133 bp, Glycine max
  Clone ID: PAT_MRT3847_120095C.1
cttgtatctctatctcctactcgacgatccgatcttccatcacgcatcgatcgttaccgctatataaaccgtaacggacttccctccagcaaaaggtagggaccacgtcactcggctcatcccttcggtgggg

SEQ ID NO: 22252 - DNA, 320 bp, Glycine max
  Clone ID: PAT_MRT3847_120096C.1
gctaagtaaatcataagtcacaacatatggatagcaatggggatagcagaagtccttggtgacttttttggggacttgttacaagcattgaaatgctccccacaaagctcagatcatcaccttgatcacaagccccagaatgtgctcaaacttaatgacaagatggttggcaaccttgtcagtgcttttggcatggaaaccaacggaagaatcaagaaggaaaatgctaggcaagtggtggagaagctaggtttgatgtatgataagtcctcatcatcatcagggtttgagctaactaagggtggcttgctggatgatga

SEQ ID NO: 22253 - DNA, 343 bp, Glycine max
  Clone ID: PAT_MRT3847_120097C.1
gtaagattcttgaatatattaagataacatttagtctttaggttaaacataaacgaaaataaatcagtctaagactctagacttttgagcaaataaatacttaaaatatattaccatagaaaatatatcgatataagaaaacttaattaaaagaaaaaaaccaaaacaccgaaaacgattgatttgccactgaggagctatctgaaaaaccaattagaaatataaaactaactagacagaccaaccttattgattggttgctaacccaacacataaagatcaacttcattaaccatataaaaatcccaaccctttattaaacttttggtcaaggaattccaaa

SEQ ID NO: 22254 - DNA, 152 bp, Glycine max
  Clone ID: PAT_MRT3847_120098C.1
ctcgagcggtggtgtcagagaatccgaaaagaccgccttatctgcatttacgtcagggactcactctaaccctatgtcacactcagcgctgccaccaccgtcgtccaccatggactccgttccgagtcgcgagagcccatacacaccactat

SEQ ID NO: 22255 - DNA, 643 bp, Glycine max
  unsure (1)..(643): unsure at all n locations
  Clone ID: PAT_MRT3847_120099C.1
tggaccttagatcgaacaaatcattatgtagtgtcaaaaataaaatctttacagaggccagttagaattaattcttttaatggtttcacttaaaagtctttatctacttctatccctaataggtggattatcttccatcttatcaacacttcttactagcacttatattgctctttttctcaactgcccaaaactgaggagactgtgcccaaaaataaaagggcaaccaagttcacaaggctcccaagtcccaactattggggcctagggatggtaaatgcacatagccttacccttacaagtggaaaatctgtttctaggattgctacccatgaccctccagtgaggatactatacccaaaagaaaatagtaaaaatctatagctttttttgttgaaactatggagttgtggatttctccttcacatagctaggagcctccgagcaatggggtacggtagttnttttttatgaacttgtggatttctccgtcgagattctgtactgtgaattgcacataatcatttacattntatgaagtgattctgtactgtgaattgcacataatcatttacattntatgatcttcatttcatttaactatgattntaatcctctgcttcctataattagatttaacttg

SEQ ID NO: 22256 - DNA, 247 bp, Glycine max
  unsure (1)..(247): unsure at all n locations
  Clone ID: PAT_MRT3847_12009C.1
gngtttttnggcgacgtttctgngaagagagnnaagtgcgaacaaagtggtnatactcgatggcttngtgcagagattggaggaagagttgacaaaggtcgagctttcaaacgcgagcttcctncnctgcatnctcntgctaaacgatgctatagcgagattgaaggaggancaagtgaagtgttcgggaatgcaagatccgnctcttaaaaccagttcaggaggaaatgaaaatgaaaactctgag

SEQ ID NO: 22257 - DNA, 473 bp, Glycine max
  Clone ID: PAT_MRT3847_1200C.1
ctccaaccagaagcttgggtttgtcactctgtcttcaagattaaaaaactgaggagcaagaaatcaattgtggagatgaagttcaatgggaaagccaagggccagtggaatagagggcaaaagctgatgatgaatgggagcaagaaaacgtaacacgagatgaagaattagagagaagaaaactggtggctcaagggcaaaagacgaatagaggaaagcaacaaaaacttggagaaacccacaaaagcaaccagaagacagaagcaaaaatgaagtacttgagattaagaattacagtggaagagatgacatagatacgggctgttgcaaataggaggtgaaaattgagggaaactctatgttcgaccttaggggagaaccaagcactgaactgatggcaacaatggaggtttcaggtttgggtagtgccttcaacccaccacagaaggtcgcaaccatgtgtggtagttcag

SEQ ID NO: 22258 - DNA, 151 bp, Glycine max
  Clone ID: PAT_MRT3847_120100C.1
gacctcaagtcaggcggggctacccgcggggtttaagcataaaaaaaaaaaaaaaaaaaaaaaaaaaaatgcggtctttctagaagatccaatcttacgtacccctgcatgccacgtaataacttttttataaggtcaactaaattaaatt

SEQ ID NO: 22259 - DNA, 183 bp, Glycine max
  Clone ID: PAT_MRT3847_120101C.1
attggcccagcccttttcaccttaaccaggggaaaagaaggtaagaaaattttcccttcccaattcctaagaagaccccaaaccatttaccaattttcttcctttattaaccggtcttacctgaattccagttaacagcggctcttttttcatttggaaaccaattaacccagccttaaatta

SEQ ID NO: 22260 - DNA, 397 bp, Glycine max
  unsure (1)..(397): unsure at all n locations
  Clone ID: PAT_MRT3847_120102C.1
gtgggggggggctatctctactgctagatacgacgattccagannaacctttcttctactactacttcttcccggggaagcggatccaaaggcaaatccaaatccagttcaaagaagatgcaatacaagaacctggggcgatccggcctgaaggtgagccaactctcctaccgggcgtgggggagctctgggaaccaactggacccgaaagaagcgaaagccctcctacaatgctggcccgaccacagggtcaaactttttgacaacccccaggggtacaccaaccggcgcgcccagggaaacaaaggccaaggcaatccggagctcgggtggaaacgctcccacaacggcgtcttcaccaagaacctttggggcgggcaggggcccaacgacaaag

SEQ ID NO: 22261 - DNA, 687 bp, Glycine max
  Clone ID: PAT_MRT3847_120103C.1
acacaaaacaagagaatgatgtagggaatgatcacgatcgcgattcgggtagtgccttagctttgcttttcttccttcttcctcatctttctctctcttttttccaacttctaaaccttggaacccttaaagaccaccctaggacgcctatttataggaaaaaagccaccttggggcggttgaagctcacccaggtgagatgaaccttagccctaaagtaatgagctcgcccaggcgagctagttgcttcgccatgaagtcatttcatggccaacattcttttcaaactgatttacaaagttgtaatcgattaccataatcatgtgatcaattaccaatgttttaaaatgttagatttcaaatttcaagagtcaaaacttgtgataaaacattttcaaatcatttcaaacttctgtaatcgattacacaatacttgtaatcgattactacccttctgtcgtcttctcgcagccgtatttaaacatgaagagtcacatctattgatgtgtaattgcttacaccatgatggtaatcgattaccagttactgatttcaaaaaataaattatcaaaagtcacaattcttaaagtgacttgtttctgaagattttttcaaaagtcataacttttaagtgactagttttcaaaagagtcacaacttttaaaaggtgactagttttaaagaaat

SEQ ID NO: 22262 - DNA, 349 bp, Glycine max
  Clone ID: PAT_MRT3847_120104C.1
cacgcaacgacaggtgctaagagaccacaaacgagcaagatgaacgagaggactgggaactgtagaatggacgatagtgcgctgcatatgtaagtagacgctatctaggcagccttgatacataatgctgcaagccaacaccctgacccattcaaccatacgtacactcatctgaacgcgtatggctactgccaaggatgcaaagctcctacacaaggcactcaaagactagcatttagacccactaacttctgagcagcgaaggaccattatgtacagacatgttagatagaaaaggaacacatataggtacagcttgtacaaccaaactttcaagcatatcactaac

SEQ ID NO: 22263 - DNA, 364 bp, Glycine max
  Clone ID: PAT_MRT3847_120105C.1
actacaaattttatacggggcacaaaaggagactcaacactgcataccaccaaacatgataatcatacaaaacaagtgaccaacaggtcgaaaaacaaaagaaaagaatgtgtaaaaaaacttccagtaccaccacccaacagaggagcaatgcacaccgattctataaactgccaagcacgagcaggtctactaactccaaaaaatttcctgaacgataaaaaacaactggacctcagataacacatacaaagcgagcacgtaactttcacaacaactcctgaataaagattcagtctaataactcacacgtaaacaaggagggtccagaaaacgacggcgccacttgctgactcatataaaa

SEQ ID NO: 22264 - DNA, 538 bp, Glycine max
  Clone ID: PAT_MRT3847_120106C.1
tacttatatacctatgtgaacacttttatgcttagaaaataaaatctcttttatgtaattccgtattcccatgtattttactatatatttattacaaattaaaaatttaattatgtatattgcaagggaccatggaccatagtcacatagtagtcgtcgtgaatcatacaataaattatctcataatatttatattaattttcatgagttgtagaagcgtatataattacctgtggtaatagtccagctcttaacagagccaaaatcatgccaatcacgttcattatcttgcaacttgctatcgtgccttgtgtcaacgatgttttgcccattctgaagttcttttgcataagcattgaagaacttgactgtaggtgattggatctcaagttctgtaaccgctttcccttttcactactacaaaaagggttttctatgtcggttaaaatacacattctacgtcagttattaatcgtcgttgtaggagacatcgtagaaagttgcactttctacgacggttcaatagacaatcatttta

SEQ ID NO: 22265 - DNA, 506 bp, Glycine max
  Clone ID: PAT_MRT3847_120107C.1
tgcccacgcgtccgcccacgcgtccggggaccgatcaggtcaaagaatgagcttcagaatctgcctcctgttcctcccgtagatgcgattttggaaccacaccatcaaacggtgccagttggaattgttatgtcgactcttggtgctcaagtcatcgtggaaggagtggagaagcatgaccctcttaatgagggttctattctttggttgactgaaagccaaaaaccactaggtttaattgatgaaatttttggaccagtcaagaacccttattatgttgtgagatacaattctgaaagtgaagtccccacggggatccatgagggaaccttgatctcctttgttccagaatttgctgatcatgtgcttaataacaaggatctttataggaaagggtatgatgcatctggtgcagatgatgaagagttgtctgatgaaatggagttttcagatgatgagaaagaggctgaatacaagagaatgcaaaaaccgccaaagagaggcgc

SEQ ID NO: 22266 - DNA, 266 bp, Glycine max
  Clone ID: PAT_MRT3847_120108C.1
ctttcgtataagcagcacccttcaattttaattgggctttgttagcgctgcctcaaacctcatgcaaatagcactttggtttccgtgagtgtctttgagagagaatcttaaattctacaacggttcagttgtattattatatttaatactatttaatctccaacagtatatatagtagtatatactgacgattctgatgtgggagtgtgagaacagagtagcagagtgtttgtcaaacaaacaaggttgtctctgaagttgtggcg

SEQ ID NO: 22267 - DNA, 1068 bp, Glycine max
  Clone ID: PAT_MRT3847_120109C.1
cgccgcggacgtagcttggatcgagcgggcggccttcctttttttttctctttttaaggaagataaatataaatgtactggacattgcactattgagtaatccctacaacttatgtatgctgtcttacctggctacctacgtgtgccagttcgtccaagttaaatacaaactgtttacatcaaagaataatggagcaattcacaacttgttacaaaaagaatatggcaactaagtaggacggtaaccggtaatttatcctgcaagttgtaatgatgctccctccgcatcttccattacttaaggtatctccatcttgttacacatgggaggtaaactctgtaatgctattgcaaaattgaagagcagttaaatctaggtgctttcctctatctgaccttgtatacccttaattcaggttgcaaggttagagaaactctataaactttacggtgtatgaaggaaaactcctcatgcaaaattgtctagcagaagtttgccgtactatttccagatttttcatggtgtgtgaattttatggacttaattcccacaagaagaaaatcctttgggaagacgattaacccaagcagaaggaagaataccgctctgtgaaaccaaatatacaatgaacgcaatataggctgttgtgcaggagcaggctaaaagaccaagcaagatgccattcacctcagaaacgaagaaatctaacaagagatatccattaattattattatcagtccagcaacagtccatgctactctctcaagaacaggcccaaccctaaaggttcccatgatctgctctttggagaccaatgtgaggaggggaattagagcaaagggaatttgcattgactgaagcacattgagccattcattcaaaacatccaatgagccttcggatctattaaaaacaatagctacaattatagttggcacaattgcaaaacttcgagtgatcaatgccctcaaccatttctttaaacgaaggttgaggaaaccccccattatgaattgcccagcatatgtgccagtgatggtgctactctgcccagctgccaataacc

SEQ ID NO: 22268 - DNA, 291 bp, Glycine max
  Clone ID: PAT_MRT3847_12010C.1
gcaataaagttcctgcgtaaatcttccgtaggcttttaacaaatacagaagttcttattctttctctgaactttatataaatcctattgtttaaatggcattgtaatgcgactcttattttgttcctgatattgggggatattgtactcttaataacataatattcatatccattacttataaaagggaaataacagacccgtccgctcatatttaagcagtcgtggactaggtggcacgtactctaacctccttatttgcccttaattattggcacccaacacaacacaa

SEQ ID NO: 22269 - DNA, 313 bp, Glycine max
  unsure (1)..(313): unsure at all n locations
  Clone ID: PAT_MRT3847_120110C.1
ggnttgatgatttaaacattaatttgccaacatggaaatttttaaaccataaaattataaccctaagcccaaatacaattttgaaagatgttgctttggggcttccacttaaaaatgcttaggggtggaaataataaacaggtgtcgcttaaaaagaaaaaaaaaactcggggtttgttttaaacttttgggccaaagggacctcacattgcaaaattttggccgacaaagcctggttaaaaaaaaatattttgtgggcgagcttgttacaaatgaacgggcccattttcctcaattaacatttggcctttta

SEQ ID NO: 22270 - DNA, 548 bp, Glycine max
  Clone ID: PAT_MRT3847_120111C.1
gaattcggcaccagcaagcctccagtgtataaacccccaattgaaaaaccacccgtttataagccaccagtttacaagccaccagttgagaagccaccagtgtacaagcctccagtgtacaagccaccagtatacaaaccaccagtttataagcctccagttgagaaacctcctatttacaagccaccagtttacaagcctcctatagagaagccaccagtgtacaagccaccagtgtacaaaccaccagtgtacaaaccaccggtgtacaagccccctgttaagaaacctcctatttacaaaccaccttacccaaagtaccctccaggctccaactgaagacacccacctgattttgaattaagttaagggatgtattaagtatatgctaaataagaggtgtatctacaaccattgactttgtcatgctcaaaaatttagtttaatttacaaattatggcaagggttacacctggctagcttccgcgtttagatcatttgtttatagtgctatggccacgacaagagtgttatgggtgcatgaatgt

SEQ ID NO: 22271 - DNA, 578 bp, Glycine max
  unsure (1)..(578): unsure at all n locations
  Clone ID: PAT_MRT3847_120112C.1
acgagggcttccttaagctcctcattagtgctgctccttgcagctctaattctatcccctcaagttcttgctgactatgagaagcccccaatttacaagccacctgtttacacaccgccagtttataagcccccagttgaaaaaccaccagtgtacaaacctncagtttacaagcctccagttgaaaaaccacctgtttataagcctccagtttataagccacccatttacaagcctccagtgtataaacctccagttgaaaaaccaccggtttacaagcctccagtttataaaccacctgtttacaagcctccagtgtataaacccccaattgaaaaaccacccgtttataagccaccagtttacaagccaccagtgtacaagccaccagttgagaagccaccagtgtacaagcctccagtgtacaagccaccagtatacaaaccaccagtttataagcctccagttgagaaacctcctatgtacaagccaccagtttacaagcctcctatagagaagccaccagtgtacaagccaccagtgtacagaccaccagtgtacaaaccaccggtgtacaa

SEQ ID NO: 22272 - DNA, 1006 bp, Glycine max
  unsure (1)..(1006): unsure at all n locations
  Clone ID: PAT_MRT3847_120113C.1
ccacgcgtccggttttctggtttctttcgtcatgctctcagtattctcttgctttttaacttgatcttggttttcttcggactagtatttattgcttacgatttggaatagtgacaagtaaagacaaatcacaactgagggtcatccaattccaagaatagagtagaggggtcttctacaaacagggatcagatacaaattactgttatgactcctcctctttttggtgaactggttgaaataccaaacttagagaacttgaatttaatctccatgaacaagatccagaagatatggagcgaccaacccccgtcaaacttctgctttcaaaacttaataaaattagatgtgaatggttgtcataatttgaggtccgtgtgttcattgtccgtggccagcagcttgaggaaactgaaaggtctctttgtaagaaactgtaaaatgatggagaagattttcagcacagaaggaaatagtgcagacaaggtctacgtctttcctaagttggaggaaatccacctcaacaaaatggatgagttaacagacatatggcaagctgaagtgagtgctgattccttttctagtgtcacttctgtgaacattgatagttgcaataaactagacaaaatttttccgagtcacatggaaggatggtttgcgagtttgaacagcttgaaggtttattattgtcagtcagtgaaagtgatttttgaaatcaaagattctcagcaagcagatgcatctggtgggatagacacaaatttgcaggttgttgatgtaaggggactcccaaagttggagcaggtgtggagcagggatccaggaggaattcttaacttcaaaaaactgcagagtatagagatgatntcgttgttggaagactggaggaatgtatttccagctttctgtggccaaaagatgttccaaagcttgaaacattgtcggtcatagggtgtgatggaattgtgggaaattggtgcctgtgaagatggatccgaaacaaacg

SEQ ID NO: 22273 - DNA, 975 bp, Glycine max
  Clone ID: PAT_MRT3847_120114C.1
aaaaacatgaggaatatggcttccttaagctcctcattagtgctgctccttgcagctctaattctatcccctcaagttcttgctgactatgagaagcccccaatttacaagccacctgtttacacaccgccagtttataagcccccagttgaaaaaccaccagtgtacaaacctccagtttacaagcctccagttgaaaaaccacctgtttataagcctccagtttataagccacccatttacaagcctccagtgtataaacctccagttgaaaaaccaccggtttacaagcctccagtttataaaccacctgtttacaagcctccagtgtataaacccccaattgaaaaaccacccgtttataagccaccagtttacaagccaccagtgtacaagcctccagtgtataagccaccagtatacaaaccacccgtttataagccaccagtttacaagccaccagtatacaaaccacccgtttataagccaccagtttacaagccaccagtgtacaagccaccaccacaacaacaacgacgaccacgacatccaccaggcccgggcccgggccttccgggcctcaatttcgggcccggtctactggaccgaggcccgaagcggctccgccaccccctaccgctccaccagccgcccctcctccgggccactcgccggaaccgtaacgccgccggcgaaggatgacgtggacacaccttacttgagtcttagagaactcaacatggagcaacaacaacaactccagcagaggatgtctacctcggccatgcccatatacttggtcacttgaaaaaaaaaaaaaaaaatcaaaccaatcacttattagggtatcaccactttcaaattcatgtctcatattttgtgcaacaagaaaaaaatattggtggttgattggagtggagtagcttggttggttacatatttagatttattatatttttgggtgggtttattttt

SEQ ID NO: 22274 - DNA, 386 bp, Glycine max
  Clone ID: PAT_MRT3847_120115C.1
ctgcttgggagggggggggggggggggggcaatacacaaaacgcaatagggaggtatagagggtatgatagacactgcatgttagaaagcgaaagagacaggatagctgtaagaggctccacaccgattaatacatgaggatgggaagataccccgcgacttattgatccaggaaatgccttgaacatagcatatgaaaatgcagatctcaagcagataagactatggaatccggatactgcgtttagaccggaggagcagtaccgcaccatgagcattcacattagcccgaaagctggagcacaaaatatagcctatcaggaactggaatacactaggatggacattacatagcaattacattcacttgaggcatccgagacatt

SEQ ID NO: 22275 - DNA, 319 bp, Glycine max
  Clone ID: PAT_MRT3847_120116C.1
aagagtcaggccccctatctacaatgagccacctgagacccttaacaagaagctcgaatggggcaatggagggctcttcactggtgggcgggctgtttgtggcacacatttgtatactataggaaacattgttaagaaagctggagagaaaaaagatgcatgagaccatctgcgtgaaattgcctttaactagggtggtcacctcatgataaggaccgaatgcgagcaaactgatattctcgaaccatcgactgagttgagtatgccacgagctcatggactgaggaaggaagcacaggctaaaggaagtctctctcaa

SEQ ID NO: 22276 - DNA, 443 bp, Glycine max
  Clone ID: PAT_MRT3847_120117C.1
attcgagctcggtacccggggatcctctagagtcgacctgcagaagctccttctttgggagaagaaactctttaacgaagttaaggtatggatcttaaatcaccaatctcattcattccattgctttcagttttttccacttttaatttttaatctctgtgaggcaatttaatcctgctgcattcacatcagttcttgtatattctattgtaaccaacctgtgctgataatttgaaagaaaccaactgatcagaagtcttttatgccataagtaaaacattgttaaccagtgtttacaggtttccacattttttttttccaacgttcatttgtttgcaggcagaggaaaagatgcgtgttatgcatgataggaagtgtcgcaagctgaagcggttggatgattagggggtgctgatttttataaagttgattcaactcgaact

SEQ ID NO: 22277 - DNA, 233 bp, Glycine max
  Clone ID: PAT_MRT3847_120118C.1
gacataccagtttgagagcctcttcgcgaacgcaacttcgtcggtggcacatgcagtcggattctgggagtacagtactttcagcactgctgcagcactgtatcagtctcttggcttgggcacgactggaggttggaccagaggccaaaaggagcttagtccctgcagaagccatcgtagcagcaggagctctcgctgctatggggtgcctacaggttgtcacaagtcttcgg

SEQ ID NO: 22278 - DNA, 910 bp, Glycine max
  Clone ID: PAT_MRT3847_120119C.1
gaaactcaggagaaatacagaagtttgaataaacaaattttgagtctacatttccaatttttgcatcaacaccttgaccttgtctacataataatacataataaattaatattagcttcccatatctatccactccatacaaatgcaaccacgttcatggagttggtcagttgggtagggagagaagcataagagacgtgagattgaatcatgtttaacttgtgtgtatagtctgtcctttatctaactcagcccattactaaagcttgatacagcaattcaaaatttatatcaaccttgttaaacaagattaatttatttcgattatgggaagctagaagagaatattctatgaaaagacacatcagaaacaagggaggcctcagggggaaccaatcccctttttaatgagcatatcatacaccctgtcaattttcatggcatccatcttgaacaattgatgagcatcagattttgcagtgacagtgccggcaagtatttgcagagacagttgttcttgcatctttagatacatggctggaggcaaccttagctcacagcataaacgtttctccggttcagaaagtaaatctgccccatagtatcccgtcacatccatttcattgacagaactagaagtagcaggccctgcaggtcttccactcaaatccttgccagcagagtctggagacatcaatgcattaggaaccccttgattgcttgggccgccctgagcactttcttttgtcctacaaccactttcttcagcttcccttcttctcttttgcgccagatatctatcagcttcagctgaattgcggcaaccagcagcccgggcttccttaagctcttgaagtcttttacgggttctatgttcagagataacggttctaagcaactccctcgagcc

SEQ ID NO: 22279 - DNA, 261 bp, Glycine max
  Clone ID: PAT_MRT3847_12011C.1
ggctcgagcaatttgaaagctttgattttctcatggagaggtcacatatgatacgcttgccagatgaggacttgaaaagtaatgaacaatgttctgaccagggtcttgaggcctatgctgaggaccaatttaaaaacagtagttgtattgacacctaacagaatgctcgtaacaatgtactaggtgatgctgaccatcaggcgctggaagccttgcattgaaaaaaaagtctcccctggaattggaggatgcctggatcat

SEQ ID NO: 22280 - DNA, 252 bp, Glycine max
  unsure (1)..(252): unsure at all n locations
  Clone ID: PAT_MRT3847_120120C.1
cnntnannnntacgcnnagctcngaatncnnctcacncnngannttcannanatctancacctctcatttcncttacnctttatcatcanccanncnattcnntgcngccntnnactnntgcaaantnatgaatncntcancnntanatnatcaatctatncannatcnnnntcngttattagntnnacccncanntcaancntancctcttntcnacacatttncannagttatantgnttcntnctnaac

SEQ ID NO: 22281 - DNA, 247 bp, Glycine max
  Clone ID: PAT_MRT3847_120121C.1
ctctgaaaaagatttttggtagcccatgaaagttgtttctctacctctgaaacagatcaaacaccataaaacgtagtagcatacgattctatgaggtgaagtgtgattctgaaaaccttgaacatcgctcctctcctgccagtgtaagctagattgtttgattttctagtccgtggaagacatccctaatttgtttcgcaccgagcaaaatacaattcgaaagacaaaaaaaaaaaaaaaggggggg

SEQ ID NO: 22282 - DNA, 202 bp, Glycine max
  Clone ID: PAT_MRT3847_120122C.1
aaccgctaaaagaatcctaacgttacgggttatttgagggcttccactttctattccgggctttgtttaccacgaaataggaattcaattatggatcaaccaaccttgtttaatttggaaagcaaaacgcttaaaacttgcccttcggctcatgcttgttgaagccctcatgtaatgaaaaaaaccctcgctttgttgaaaa

SEQ ID NO: 22283 - DNA, 224 bp, Glycine max
  unsure (1)..(224): unsure at all n locations
  Clone ID: PAT_MRT3847_120123C.1
tgactggacccatctgtcttcaaaagaagtggacccgtctacaggtgaactccagtccctacagatgccagaatccgaagggccaagctctctggacccctcccaggagggacccacagggctgaaggaagctgccttgtacccacatctcccgcaanaggctgacccgcggctgattgagtccctctcccagatgctgtccatgggcttctctgatgaaggcg

SEQ ID NO: 22284 - DNA, 294 bp, Glycine max
  Clone ID: PAT_MRT3847_120124C.1
gtttcgtttaggtgtttgccaccaccattctgcgttaagcttaagccaccttccgtcggacggtgatagagcacttgatgctcgaatgacatcaaaagacacttgcgggccaatagatacaaggtgggtcaccgagaagagcatcgatatcacctacttgtcccgacgtgtcggattcactgtcgctctcgatctaacatcttggttcccgcaatcatgcatgtattcggaagacgctttctctcattaacgagaactgtccttactacataggccatggattctgcactcgca

SEQ ID NO: 22285 - DNA, 309 bp, Glycine max
  Clone ID: PAT_MRT3847_120125C.1
gacacctcaagtcaagctgggctacactctgcatttaacctaaagtttcaaacctaagaagttggaagtcatggcaccaacaatgatggcagcatacaataagttctgagtacacttaatgcatctcctttccttggacatagcattcggtgcaaatgccattgctcttaaggatgttgtctccataaaaactgggatttacaccatgagcagtgatttgtcatatgcaccatacacaatgtggtatttgggacacttctcagctcacaatccttcatacttgaaatgagaaatccctgaggattatgg

SEQ ID NO: 22286 - DNA, 748 bp, Glycine max
  Clone ID: PAT_MRT3847_120126C.1
ggctcgagaactaattcaataacatagaagaatatggaagatggaagcgtcaaccttcctcctgggtttttcttctctcctactgatgaagaacttgttcttcactttctctattgcaaggcttctctcattccatgccatcctaacatcatccccgatctccatccgtctcagcttgctccttgggaattaaatggtaaggcgttgttaagtggaaatcagtactatttctttaccaaagtgaatgaaaacagagccagagaaaatgggtattggaaggacacaggtgtcacggaacctatattgtcaacctttgataagaaagtgggaatgaagaagtacttggtgttccacataggtgaagctccacaaggtactgaaaccagttgggtaatgcaagaatattatatatgttcctctgggtttgacactgcctcatatcgaagtgctaggagaagaagaaaacatgatcaaagttggagcaagtgggttttgtgcaaagtctatgagaagatcaggtctcaacaaggtgtaaactgctatagcgatgatgatgacagtggatcagagctttcttggctagacgaagtttatctgtcgttggatgatgatctggaagaaattggcatgcctatttagattgaatgtatactacccaatgctaatatatatatatatatatatatatatatatatggacttgtatattaattactatgtctcaattaaatacgtgcattgtttgaac

SEQ ID NO: 22287 - DNA, 184 bp, Glycine max
  Clone ID: PAT_MRT3847_120127C.1
ggaaagaggaatgtacattttaacctgttgagagttatcctttccatcattaacatgcatgtctatcgcacaaataagaccattcatggagaatgaataagaaaaagtatggaaagctagtaagcccatgcctcattagatgaagatgggaggtccaagacgtagaggaggaagcaggccccaa

SEQ ID NO: 22288 - DNA, 391 bp, Glycine max
  Clone ID: PAT_MRT3847_120128C.1
ggggcaactaaattaaaattttttataaacattaagttcaccaaataaatttagcctagggccttatgtttccaattttgaaaggggagggggtctttgccaatttcaatattaatgcaatcaagggccattttttacaaaaaaaccccaacgaatttcaatttaacccttttacaaaaaacctttttaaccgcaaaggatttatcgggtgttattttccagccctcaatttttaaccaagcttaagtttaaaaggaacaatcttcatgtttcatttggaaatccacaatttttttacaaaattggttaaataatggggggcaccccacttttaaactttgttccaggattaaaattttgggaggccacctggttttttgtaagccatatt

SEQ ID NO: 22289 - DNA, 538 bp, Glycine max
  Clone ID: PAT_MRT3847_120129C.1
aaaaccaaatttggaccaaatatatgaggaaattaagggtttcgttggtataaggaagttcacaaaaaatcaacaaaaaaaaaaaaagatgctttactaaaaaggtataaacaaaaaaattggcaaccatccacgttaaacaggaaccggaaaaccctttttggccatgctatccaaaacatggtggagggcttgacataaccccacaatttgggggccccatcggtgcaacttttcaggggcatcggaaaaatgtatcacagcctcaacctgatcaataaagcccctcatcctatcctaaaaaataattcttgaggctatcttctcggccttgggaggggggatccccaacagggggcctagctcataaaagctgatattagtatagagtttgctagcactcaaaagattgggctcaatcatagcgcggcccaacacagtgaaattgtctggaaaaaaagcttgctgttcaaaaagtaaaagctgaagcatactgactattacttcaaaatatgtgaagatcccttataactaaaat

SEQ ID NO: 22290 - DNA, 129 bp, Glycine max
  Clone ID: PAT_MRT3847_12012C.1
tttgcctacccgacttctcaaaagtgcaaacttgcttatcactaagagaaccaattaatggagaaaatgagagtggtactaattactctatctccctgaaaataggtgcagcagttggaaaacaagctg

SEQ ID NO: 22291 - DNA, 464 bp, Glycine max
  Clone ID: PAT_MRT3847_120130C.1
gataataatatggaagcaaattcatcagaagctgaagtacaatcaagaagccaatgttattacattgtaatcgatatatgtaagcacatttttatcaacaaaggatgaatgaatgaattgtacggaaaattacaatcaaattgctttctttgcttgcttcctttcctcctcttcagctttaatccaggcagccttttctcgttcaagcttaaagagacaaggtttaatggagtttcctaagccctgtcctccccaagcttcttgcaactttttctcccttgcttcacggggagtcattgaaaaactaactgagttatttggctgctgagcaacaaccattttttcttgctcaagtctggatttatgtttaaccaacacttgatccagaccagcttcatttgtttccaaatgaatgtttcctaagctcagtcctccccaagttttttgcaactttttctcccttg

SEQ ID NO: 22292 - DNA, 345 bp, Glycine max
  Clone ID: PAT_MRT3847_120131C.1
actgcttctacacttcacaaacagccgttttacatggtcaccgatggcgtccttgcgctgggagggtttttaaacgaacacggggctgttcttataaagttacgagtgcaacgtgtggagattcgaaagccggagaaatttaacacaagaagttccgtcataatcactgttggagaaagccccactttggctaagcgcaaaacgaatcacaactagttaccggctttattatactttgttccaaagggaaagcctctttggacaacctctacagggcttatatacttggcaaataaatctatgggacagaagaatggaggacaatatttggcttgaggactccat

SEQ ID NO: 22293 - DNA, 2355 bp, Glycine max
  Clone ID: PAT_MRT3847_120132C.1
acgagtttaattattgacagtactagactcaaacttccaaatattactatttagacattttaatacacttaccaaacaattaacaccagcttaaaaaccaaaattatgcatatcacactaaattagtattatatcttctaaatacatccctcaatcctcattccttaataaaaaagttggtttattgggaacaggttttataaaagatattggtttcttcacctttgcgtggattgttgacaaaatgttaacatcaaatccattgagttgataatctggaataaactcagcttccaacctaagtactgctttgtctttatctctaaacaattcttcaaagtgctgcctcgtaccacttaaactccattcgtatctacctcaaaggcttaaagcctttatcatgcatcctccaacctcccattccctactccctactcttcaaatagtatttattcaaataacagcagcaaatagtaacagtttaacccaaaaccacataaaaattcagtgaactggactccaaataatctaaaaaagcaaaaacagataaattaaaataaataaacagaagaaagccttgttctttctttaaccaaagaaagagaaaaaatagaataaagaaaaaaatgtgtattccatgtcaaccaggtggtggaggaggatagccactggtatctgaccacgtcgaaggtggaagctccgaaaactctgacccactaccaccgtcttctccgccatgaccctgctctcccggcggccggaaaatccccatttgctggctggaagaaaacagaggatacgaagcagaggaaggcgaaaacgacggcggcggcggcgatggcaacaacgacgatgaagaagattgaaacgctgccatttgagaatcaaagaaccactggtcgagtccatggaagtcccctgtactcctcagcagctgagaatacccccaataatctctcagaaaagcagaggagccctgaaacggcgctccctgcatcagcgtcggcgaaaaacctgccaccactgaaccggaaccggaaatggaatcggaaccggctaccgcacttgccggtaaatcgggaaccggaggaggaggtggaaccggtacaacgttttcggggaaattaagttttgctctgttacctctgaacctcaatgcggcttcatcgtaggctctggccgcagcctcggcagtgtcgaatgtcccaagccacactctcgccgctttgtgaggatcgcgaatctctgccgcccatttcccccacggcctctgcctcactcccctgtatctcctcctcctgtcgccgccagcactttcaatctcttgtgtttgcgtttgtgaagaagctgctgcaatagcaacacctccactcgcaccagcgccagtgtcatcttcacgctctctcttgtggccaactcccaaatgaggatgcgaagaagacagaacgggagaaggcgcatgcataaaacgtgacatcatgggaaaaccacttccccgcggcacccactgattggtttgggccgaagctgcagaggctgacaccacatggctcggaacagaacctacctcagtactctcttccgcttcctcatcgccgccttgctccgccgcgaagaacttccccgaacctgaacctaaacccctctggtgcgccaccgttagaaagcaggtgttttatatactgattccttctgagaaagaaactgaaacacgttattataaatatttatatataagaagatgggtaagaataagagaaatcgaacatgatgagaagctggctatagcccccacagaaacagtgaccatgttgcgcctctattactctagcttccaccatgcatacacataattaacacacacacacacactccactaccactacctttaatttcttatacagttttttttaatattgtagattctacctttgattcttcgaaaaagaaatatatgttaatgaaaaatgaagaagaagaagaagaaaaaaacaatactgtaccaataaataaagaaatatgtggctgccgatgttggtgcctcggagatgattttggcacgtggaatttcacacctaaagaggttttgttttgttttgactgaaagttaatggagagaggatgaaaatggaactaagtagctgcactttctgcaaatcctttgtgttgtcggtttcctttttgattttgagattagagaacagtgatcatctttgagttgaatgactatgctcagtcgggaaacaaacaaaaaagagagagcagatatacatactttaatagttttgggcttcctgaattgtgattagcccatagttaactgacgaaggacggtctggttgaaaacctcgagcc

SEQ ID NO: 22294 - DNA, 1541 bp, Glycine max
  Clone ID: PAT_MRT3847_120133C.1
cctttaggtccttcgtcagttaactatgggctaatcacaattcaggaagcccaaaactattaaagtatgtatatctgctctctcttttttgtttgactgagcatagtattcaactcaaagatgatcactgtttctttctttctctatatctcaaaaaggaaaccgacaacacaaaggatttgcagaaagtgcagctacttagttccattttcatcctctctccattaactttcagtcaaaacaaaacaaaacctctttaggtgtgaaattccacgtgccaaaatcatctccgaggcaccaacatcggcagccacatatttctttatttattgaaggaatcagtatataaaacacctgctttctaacggtggcgcaccagaggggtttaggttcaggttcggggaagttcttcgcggcggagcaaggcggcgatgaggaagcggaagagagtactgaggtaggttctgttccgagccatgtggtgtcagcctctgcagcttcggcccaaaccaatcagtgggtgccgcggggaagtggttttcccatgatgtcacgttttatgtatgcgccttctcccgttctgtcttcttcgcatcctcatttgggagttggccacaagagagagcgtgaagatgacactggcgctggtgcgagtggaggtgttgctattgcagcagcttcttcacaaacgcaaacacaagagattgaaagtgctggcggcgacaggaggaggagatacaggggagtgaggcagaggccgtgggggaaatgggcggcagagattcgcgatcctcacaaagcggcgagagtgtggcttgggacattcgacactgccgaggctgcggccagagcctacgatgaagccgcattgaggttcagaggtaacagagcaaaacttaatttccccgaaaacgttgtaccggttccacctcctcctccggttcccgatttaccggcaagtgcggtagccggttccgattccatttccggttccggttcagtggtggcaggtttttcgccgacgctgatgcagggagcgccgtttcagggctcctctgcttttctgagagattattgggggtattctcagctgctgaggagtacaggggacttccatggactcgaccagtggttctttgattctcaaatggcagcgtttcaatcttcttcatcgtcgttgttgccatcgccgccgccgccgtcgttttcgccttcctctgcttcgtatcctctgttttcttccagccagcaaatggggattttccggccgccgggagagcagggtcatggcggagaagacggtggtagtgggtcagagttttcggagcttccaccttcgacgtggtcagataccagtggctatcctcctccaccacctggttgacatggaatacacatttttttctttattctattttttctctttctttggttaaagaaagaacaaggctttcttctgtttatttattttaatttatctgtttttgcttttttagattatttggagtccagttcactgaatttttatgtggttttgggtt

SEQ ID NO: 22295 - DNA, 110 bp, Glycine max
  Clone ID: PAT_MRT3847_120134C.1
agtggaggcggaagccaactcgagatcgacatagcagggcgcaccgatttccttatagaggaacaaagcgtcaacgagaggtgtggtgcagcacttacaaacctctagga

SEQ ID NO: 22296 - DNA, 203 bp, Glycine max
  Clone ID: PAT_MRT3847_120135C.1
gaatacacgcaatcaggacacatccatgaagtgcaggcacatgccatgtagcagcgttggtgggctaatatgcatcacgagcttcgcagatatgtcctcgtacgtactgtgtcgtctgcatctacgtgttcgctgtggatgatcgtccggtgttgtagcatcatgtggcacagctgctggagggtcatcgtcaaatcgattgt

SEQ ID NO: 22297 - DNA, 1003 bp, Glycine max
  Clone ID: PAT_MRT3847_120136C.1
gcacgaggaacctgtgagtcctattattcattctggtgtctccctctttgactctcttagaaaaccaaacacaatacaacacaccaacaaaaaggttagagtacccatcacttcatatcttccacacaaaaaactccctcaagcaatccctatctaacaagatcccaagatagtagactcatgtggctctcaattccttgcttaaatatgggatcacttgcataaccctcttcatccagacatatccaccttttttctctttctctttattgttatttacccgaagggtttttgttttgggtgatattttgtgatttgtgttccaatggaacagggtcaatgctggacaaagaggaagaagtactctttgagctctagtactggttcaccaacaaacccttcctatggtgactcatgggaagaacaagcctttgcagaagatgctgctaattctcttggtggctgcatatggcctccaagatcctactcttgtagcttttgcagaagagagttcaggtcagcacaggctctaggtggccacatgaacgttcatagaagggatagagcaagactaaagcaacaacccactagcccccacaatgaaattctatgccatgaccttgaaactcagcggcacaagccagttcaaagtccttttgcttctctaggtggttatctatatccttctcctctttgtggattggcttgtaaaaaaactaaccctaattgtgatcctgattttgttgcttcaccttcttcatcaccctcgccttccaaggccttattggctccatcagctaatattggtaccttcagagaggaaaccatgattccactttatgattcctctattctccacaagatttctcctgccagtaattcttctgaatcatggccaaattcagctgaagatcatagattatattcatgtaagttccaccctcaagctgatactacgaaaccctccaagggaataatggatttcagatgtaggggtaataag

SEQ ID NO: 22298 - DNA, 438 bp, Glycine max
  Clone ID: PAT_MRT3847_120137C.1
gggggaaccaatccattttttttgaagctttttaacttacaaaggggaagttttggaagtttataaaatttggggcagcaaaaggcccaactttttttccagggggcttttgcctttttggcaccccgaaaatcccccccttttggaaaggcccttcccttttccataatgcaaaaaaaagggcgggaagcattaaggggggggcaaaaagcaacagccccatacaaattaaaatttgccctgcatttttgacgggggttaaatcccgtttaaaactttccctcaggggggagcagtttctttttgttttataaccccatttaaaagggactggtgggaatttttggggctctgttatccatatttggaaagcagggggttaattttccactttttaaaaggataactagattcgatcagtttcctaaatcacccctt

SEQ ID NO: 22299 - DNA, 390 bp, Glycine max
  Clone ID: PAT_MRT3847_120138C.1
gacagaccctcctacttctgtgctgcttacctacgacccttctctctctgaccccttactgcgtggcctcgtcctaatggctgtacccgactctccatacagccgcatctccctgatcctcttcttcatctacttcactatctccatcactcttcctgaactccacacacttaacttcatctccgacatcgccacctaccatccaccggacaaccttcacgccccatctcacgtcctaatgatatccctctcccagctagtcactcatcatctagatgtactcctgcgcctactactactgctgaaccgaccaaggaatactcaattgtggcctgactcacatggtcggcactcctactgacctaggccattgtgatattcactaacgat

SEQ ID NO: 22300 - DNA, 529 bp, Glycine max
  Clone ID: PAT_MRT3847_120139C.1
ggctcgagcggccccccaaaatcttcccatagatctggattgacttcaacaaatactagtaacaagggcagacattcctctcctcttccgtctccaccagatcattttgctgcttcatcctctccaatgggagctgtaaatatgtctaagagctttgaggatgctgtgccagcacaaatgacaggcaaacaagatactaatgctgtttctgagaaagaaatccctaccaggacaaacaatgctatgaggaacacaccaggaggcaagggaaaaaatgggtctaaaccagtagatttgcagggcatgctaatttctcttttaaaggataaacctaatggaatgactttgaaggccttggagaaagctgctggagacccacttccaaattccatgaagaaaattgagccaattataaaaaaaattgcataataccaggctccaggatggtatatcttgaaaccaggatgggatttagaaagcttaataaacctcagactgaaagtggaagttctcctgatgactatcacag

SEQ ID NO: 22301 - DNA, 695 bp, Glycine max
  unsure (1)..(695): unsure at all n locations
  Clone ID: PAT_MRT3847_12013C.1
gaacagatctcgtatgctttattagcaagaaaactattttcgagacaagaatgtggtaaagatgtgaaaaggaaaaggtgcatgcaagacaagccccactaaaaacgactacaaataaaacaattatgcttcctgtgttaaattccaactggcatcgccaaaatcaatgttcaatgcattcctaagtctcatctcaccaatttggtgttctcccaaaaaatcttctggctattttcaacagaaagtgtccctttttctagcttttcacaaaatattaggtccccatctcatcgatccaagccgtatctaccttaatgccataaatctgaaagagaaaaaagtattcatcctgataatcggggatcctatgctcgcataacatgatcacaatgtagttttccttttacaataaatcaaactacttatagaagggaaactcgcaagttcccatacgatatctggtttgcagcaagcaccaagcagcagatgttaaaaccccacaatacacgttgcccttattacattcccttttgcatctcaacttcaccgtggggccgcctgtgagttttccccaagacccacttcagtagtggtgtgtttcctttggcctanaaaacgtagttaaccacaaggaagcccctttgctattaaagttataactgccagccagaatgcaactttttctgctcaaattc

SEQ ID NO: 22302 - DNA, 595 bp, Glycine max
  unsure (1)..(595): unsure at all n locations
  Clone ID: PAT_MRT3847_120140C.1
cggtccggaattcccgggtacgacccacgcgtccgggattaaaagccactttatccttcatatctttctgagatctcatcaaacaaagggaaggaggctgcaaggtttgcacaattgtggaaccaaataattactagtttcagggatgaagatcttattaatgatagggaaatgaaccttttgctggtaccttattgggctgatactcagttggaccttatacaatggcccccctttctacttgctagcaagattccaattgcactggatatggccaaagatagcaatggaaaggaccgagagctgaagaaaagaattgcggctgacaactacatgtcttgtgctgtccgtgagtgctatgcttcatttaagagcattattaagcacttggttcaaggggaacgagagataccggttatagagtacatgtttgatgaagtggataaaaatatagaaacagataaactgattagtgaattcagaatgagtgcacttnctagcctctatgcacagtttgtcgagctaacccatatttattngattatgatccgaaagatagggacaacgttgttattctattccaggacatgctgga

SEQ ID NO: 22303 - DNA, 4604 bp, Glycine max
  Clone ID: PAT_MRT3847_120141C.1
tactcctaacagtaatagcagagagagagagagagaggcttaagacagagcactgtctgagtgaaacatccattcttttcctccacctcgtgattcccgaacattctcttcttattcccagctccacgcgcgcgactccatattctcaccactcgcgctcttcttcttcttcttctccctccattagggttttctcacattgctgaatgtagcttccctcgccgcacattgacccttgacacaccacaatgtccggccctctcgaccgtttcgcaagaccctgttttgaaggtttctccgggagtgatgagaagaaagaaaggagatctgattttgagaactccgaagatgaaagaagaacgagaattggatctctgaagaagaaagcgctcaacgcgtcctccaagttcaagcattcgctcaagaaaaagagcagcagaagaaaaagcgatggccgtgttagctctgtttcgatcgaagatgttcggaatttcgaggagcagcaggccgttgatgcatttcgccaagccttgatcatggaagaattgcttcctgagaaacacgatgattaccacgtcatgttaaggttcctgaaagcgaggaagtttgatattgaaagagcaaagcatatgtgggctgatatgctacaatggaggaaggagtttggtactgacactattatggaggattttgagttcaaagaaatagatgaagtggtgaattattatccacatggccatcacggtgttgataaggagggaaggcctgtttacatcgagagactcgggaaagtggatccgaacaaacttatgcaggttacgaccatggatagatatgtaaaataccatgtacaggagtttgagaaagcttttaagataaagtttcctgcttgcacgattgccgtcaaaaggcacattgattcaagcaccacgatactagatgttcaaggcgtgggccttaataactttacaaagtctgcccgggacctcattatgcggttacaaaagattgatggtgataattaccctgaggctcgagctttcctgtcttgccgattatttatttattttaattattatcatctcatctcacccaattcaattcacgtaccttggaatcgattcttagggtttctgactcctttatgtgtttgtctcgcaattgatcatcgcaaccacaatgtccggtcccctcgatcgttttgccagaccttgctttgaggggttttcgggcagtgacgagaagaaggagaggagatctgacttcgagaactccgaggatgaaaggaggaccagaattggatctctcaaaaagaaggcacttaatgcatcctccaaattcaaacacactcttagaaagaagagtagcaggaggaaaagcgatggccgtgttagctccgtttcaattgaggacgttcgcgatttcgaggagctccaggctgtcgacgcctttcgccaatccttgatcatggacgaattgctccccgaagcctttgatgattaccatatgatgttaagatttttgaaagcgaggaagtttgatattgaaaaggcaaagcatatgtggactgacatgctacaatggaggaaggagtttggtgctgatactattgtgcaggattttgagttcaaggagttagatgaagtcgtgaagtattatccacatggccatcatggcgtcgacaaggagggaaggcctgtttatattgaaagacttggaaaggtcgatcctaacaaacttatgcaagttacaactttggatagatatgtgaagtaccatgtgcaggagtttgagaaagcttttgcaatcaagtttcctgcttgctctattgctgccaagaggcacattgattccagcaccacaatcttagatgttcacggagtgggccttaagaactttacaaagtctgcccgggaactcattacccgattgcagaagattgatggtgacaattaccctgagactctttgccaaatgtttattataaatgctgggcctggatttaggctgttgtggaacactgtcaagtcttttctcgatcccaaaacaacttctaagattcatgttcttggaaacaagtatcaaagcaaattgcttgaagttatagatgccagtgagttgccagaatttctgggaggtacctgcacttgtgaagatcagggaggttgccttagatctgataaagggccctggaaaaaccctgatatattcaagatggttctcaatggtggagcatggcggtcaaagcaagttgtaaaagttcttaacaatgaaagaaaggttattgtgtatgccaagccaggatacccaatggtaaaaggcagtgaaacatccactgctgaatcaaggtcagaagccgaagatatatcctctccaaaagcgatgaagagttattcacaccttacgttgacccctgttcatgaggaagctaagatagtaggaaaaacaagctatgccagcaacttgtctgggtatgatgaatatgttccaatggtagacatacctgttgatgctggttggaagaagcaagcatctctacagaggtcttacacctctaaaggagcacctcctcctgacactcagaaaactcctgaagggattcaagctcggatgtgggtagcactgtctatcttcttcttgactgtattaactctcttacgccaagttgcataccctgtgaccaagaaatttccagcattatcttccaatgatgataagagtacttcaaaaccacctcctgatacaacaaacatggaagttcttcctccttcatcaactccatcatgtacagaggaaaatctccttccctccatgctgaaaaggttaggtgagcttgaagagaaggttgacacactccaatctaagccatctgagatgccttatgagaaagaggaattgttgaatgctgctgtatgccgggtggatgctttggaagctgagttaattgctactaaaaaggctctatatgatgcattaatgaggcaagaagagctgcttgcttacattgacagacaagaagaagccaagttgcggaaaaagaagttttgctggtgagatttatgaatgggaaagagattctgcagaggatgtctcaaagtgcaggttgttcttaaggaatgttaaccttgcgcatgatgtaactctgaccactgattttcagtatacgagtaaacataatggagaattgtttcaacgtgtgtatattcagaatgctatctttgctggcttgtaaaacacgagcctttttgcttttgttatggtcataccttcatctatccttgttacaatttgtttgcctttgttagtcgaaaagctttttcccctcctgatgaagcaaaaacaaactatgaagactatcgtcctccttcaccaactccagcatatgtagaggcaaatctcctttcctcaatgatgaaaaggttaggtgagcttgaagtgaaggttgacacactccaatctaagccatcggagatgccttatgagaaagaggaattgctaaatgctgctgtatgtcgggtggatgctttggaagcagagctaattgcaactaaaaaggctctttatgaagcactaatgaggcaagaagagctgcttgcttacattgatagtcaagaaaaagctaggttacggaagaagttttgctggtgagttttggttgctgatagaaagggactctgggagagggtgttttcgaatcatggtgtttctagtgctgaccttgcacatgatgttaaactctgaatactgattcagtttaatgagtaaacttgagaattgtttcaaacttgtgtatagctaatggtggcctttttgccggacgtattaactcttttacgtcaagttgcataccctgtgaccaagaaatttcctgcattatcttctaatgatgataagagtacttcaaaaccacttcctgatacagcaaacatggatgttcttcctccttcatcaactcctacagaggaaaatctccttccctccatgctgaaaaggttaggtgagcttgaagagaaggttgacacactccaatctaagccatctgagatgccttatgagaaagaggaattgttgaatgctgctgtatgccgggtggatgctttggaagctgagttaattgctactaaaaaggctctgtatgacgcattgatgaggcaagaagagctgcttgcttacattgacagacaagaagaagccaagttgcggaaaaagaagttttgctggtgagattcattactgggaaagagattgtgcagaggatgtctcaaagtgcagttgttcttaatgaatgttaaccttgcacatgatgtaactctgaccactgattgaagtatacgagtaaaaacataatggagaattgtttcaacgtgtgtatattcagaatgctatcgttgctggcttgtaaaacacgagcctttttttgttatggttaccttcatttatcctgtttcgatttgtatgcctttgttagccgaaaagcgttttttcccccctccatctctcgtttacttgtgctgagtattttctcagtagtgctgaacttgattgatgccctcaaaaaaaaaaaaaaaaaaaaaaaaaaaaaagcggccgctctcgaggatcca

SEQ ID NO: 22304 - DNA, 459 bp, Glycine max
  unsure (1)..(459): unsure at all n locations
  Clone ID: PAT_MRT3847_120142C.1
aattcggctcgagcagattaatagtacgtgtgagtttgtgctttgctttcgacaattccaaagtcttagcaacctgcagccgctacaactaaaaaagccctttgctttcttttccactcctcacattggctcttttatcactatcagatttagggtcccttctgccatactgcacacgttgaagatggcagcaacatcattttctggcatgcaatttgcaatgtcaagatcatgcattcctgcatcacaaaagattgcagatgctggtgccgtggttcttggcggcaagtccaagattggatcgtggaataaacttgcaagtgcatgtcatattgcatcagtgcaacctttcaggcggggcttcacttcatcgtccataaaatctgttaaaagtgacacanaggccttgtttgagttcagtgcacanagtgcagactcangattgtcaattgatctgaa

SEQ ID NO: 22305 - DNA, 1679 bp, Glycine max
  Clone ID: PAT_MRT3847_120143C.1
gggttccccacacatttgacatactacaggactagcttgcgtatggtcgagggagagacttcactttctgcttcgattcggacaattccaaagtctccaactcaacccagctgcctacagccgctacaactaaaaaagccctttgctttctcttgcattgctcttttcaactcgtcacattggctcatttatcacccatcagatttagggtcccttctgccatactgcgcacattgaagatgacaacaacatcattttctggcttgcaatttgcaatgtcaagatcatgcattccttcatcacaaaagattgcagatgcaggggctgtggttcttggcggcaagtccaagattgggtcgtggaataaacttgcaagtgcatgtcatattgcatcagtgcaaccttttggggcggggcttcacttcatcgtccataaaatctgtcaaaagtgtcacaaaggctttgactgagtccagtgcacaaagtgcagtctcaggattgtcaattgatctgaaaggtaaaagggcttttattgctggtgttgctgatgacaatggatatggatgggcaattgcaaaatctcttgctgcagcaggagctgaaattcttgttggcacatgggtacctgctctgaatatttttgagtccagcctacggcgtggaaagtttgacatatcacgcgtattaccagatggttcgctgatggagattaccaaagtttatccattggatgcagtttttgacaatcttgatgatgtgcctgaagatataaaagcaaacaagcgctatgccggttcatctaaatggacagttcaggaagttgctgaatctgttaaagaagactttggcagcatagatatccttgtgcactcacttgccaatggaccagaggtgaccaaaccattgttggagacatctcggaaaggatatcttgctgcaatatctgcatctagttactcctatgtttctttactcaagcattttcttccaatcttgaacccaggtggatcttcaatctctctgacatacattgcttcagaaaggatcattcctggatatggtggtggtatgagttctgcaaaagctgctttagaaagtgatacaagagtgcttgcttttgaagctggtagaaagaaaagaatcagagtcaatactatatctgcaggtccattgggaagccgtgcagcaaaagcaattggcttcattgacatgatgattgactattcgtttaccaatgcaccactgcagaaagaactacatgctgaggaggttggcaacactgctgctttcttgtcatcacccttggcatcagctatcacaggtgctgttatatatgttgacaatggtctaaacgccatgggggttggagttgacagtccaatatttaaagaacttgacattccaaaagagcatcattgaagtgcatagtatatcattctaccccaactaaagatttatacggcctagtatgatgaaaaaaagctgaggaatttagtttttgcaatttcataaattagtaaacggttgtttgaactttgctaccattgattttcattaattactatccacttttcattaacctctacaaagtgtatcttaaccatttgaagagttatttataccttgaggttaaattattttagttcttttcccggccggaaataatatcccctagccgg

SEQ ID NO: 22306 - DNA, 1290 bp, Glycine max
  unsure (1)..(1290): unsure at all n locations
  Clone ID: PAT_MRT3847_120144C.1
acggctgcgagaagacgaagaagggggtagccgaatatggatttgatcaaggcttggaggttgagtccttctgtaagtgcaattccctcaccattctgtgctgctcccatttgtgtaagaactttctcttttcagttttcaacttctccctacactcgtccaaagcctctagttcctattccacgtggcaaaagtagagactctgattctgagccgcttctagaatcttccatcgtgcaagaagtttcattcgacgacgacgacgaagaagaattccttgacgaatttgaatacgatgaagcagcggatggcgatgaatactatgaggaagaagaggaatacgaagaggaggctggtgtgccttatgcaggtgatggcggcgcaggtggcggaatctccctcgccggaacttggtgggataaaaaagcactagccattgctaaagaggttactctctccttcgatggcgaattgcaaatttatgcttttagaacactggtcaactgcaccatccaagtgcacattgagaacctttccaaaaagtctggttcccccagcatggaagatattgaagccttctctacaacatatagagcaaagttggatgaagcagaaattgccaaagttgttcccgacaatatatgtttggaggtgtcttctcctggcgttgaaaggatagttcggattccagatgacctagatcgattcaaggaccgaccaatgtatgtgaaatatgccattaatgatgatctaaataatccagctgcagaaggtgatggtgtcttcaggcttgaatcctttgacatggaaacaaaatgttgtacctggggtttagcagatgtaaaagtcaacagacagaaagcagggaaaggaagaccactgaataaaaagcaaagagaatggcgtttaagcaccccctttgattccttacgttttgtacggttgcactctgatatttaaataatttattttcccccaaagtttatgattagatttccatttttcgtctgtatgtgcgtctgtatatgtacatgcatatagactgcatgaatagataattagaacaattagcacatatactgctcatgttctaactagttcgtgtgaaatgtaaagcagaaaacaaattaagagatgcgagtggatcaagagacattggattgtttcagcttaaccaatggtcttgaatttgagttctagacatgttgttcaatgagagttttgttatccataatgatgattctatccaattcaagttgcctnctatggaaaatacatttggttcaagca

SEQ ID NO: 22307 - DNA, 348 bp, Glycine max
  Clone ID: PAT_MRT3847_120145C.1
tctaatctataaattcacccacatattttaaaaattcattccaaggatttactagaggcactgtttatcataacaggtatactactaatctatactaaaactccatccaatgcacacaaatattctcacaaaacaacaccatagcatgctcaaaatttaacacttttatataacaacaccattacgatcacaactatatacttttgtataacatcaaggacaagatccattatgatatccatgacaagtgttacaaaaataacaacaaggacaagaataacatggatcatttacatcaccatcatcgtcatagcatcatcattgacattgattatatcttatatgtta

SEQ ID NO: 22308 - DNA, 439 bp, Glycine max
  Clone ID: PAT_MRT3847_120146C.1
agcctttgtgatttatacatgaacaaatgaacttcttattcgtaattgatttggtttgaggatcaggaatgttactaagaaactgtgttatgcaacttcctaaaggaattcaagataaccataacttactgtgattcctttgtctcatccttctcaatgttctcatcttgccatatattatttttaatcggcatgtcatgctgaagtttttcagtgattattttatgacatggagtagaaccttgtacctttgtagactagaaacgtcagctttacatttctaattggattgtgttttgtggtgattttaactctggaagaaacaaaattcactataatgatttttttttccatatatggggattggtgttctgttgtctggggtccttattggtctccatgttttgcttaagtagctgggatttgttcatatgaaatt

SEQ ID NO: 22309 - DNA, 198 bp, Glycine max
  Clone ID: PAT_MRT3847_120147C.1
ccaaggatgagaaactttcttgttgcaaaatttttgacaaaccttaaaactcgcatgtttacttttctccctatggagtttaattctttgtggacccgtcaaaaagcttcttcaattttagtttgggtcattattgaagaaaagggacacgcttagttgtcatgtttggaatcaaccccattcttacattggtattgg

SEQ ID NO: 22310 - DNA, 489 bp, Glycine max
  Clone ID: PAT_MRT3847_120148C.1
catatgagactacactgagcatcgtctagctatctcgatcgaactgtccaaggtcctgtcactaggggtggtcgacttaaatatgtgcaaaggtgtacggagcgtcgcctaactcgagcgccagcagtattgatgcgcgcaaagtcaaccgaattattgtatgtatcttgtgagtagtccttaccatccaactcgggccctgtacagtattaatggtttgtacggtaaattgcaccaaagaatgcttagtaagaagcatgggaagcacttgccagtatgcgtgttaatgccaggcgagagtccgccgtattaaagatagccgtagttacccgcacttccgctgcgtaggtcaccaacaacccgttccgccgcggatgcgcaacaacatctcgcccttggcagtagcctagggagcacaattggcatgttacgtaagctataccgacggcaaacatgccacaggagtgtagcagtcccgtggaagtggct

SEQ ID NO: 22311 - DNA, 456 bp, Glycine max
  unsure (1)..(456): unsure at all n locations
  Clone ID: PAT_MRT3847_120149C.1
ggcgttataaaaattcaaaattagtccaaaaaaatatgtacncgagataaccacgacattgaaaggagtttgcatatttgggttgggtgtcactgtgtcagtatgaacaagtgaacttgttaaaagagaaattcacaacaggaagacggccatccatcatggagtgttaatgagtgagacagctaacaaatgaataaagcctcatttacaaattttgacccatttcttttcttaataaattgattttcaagattcataacccatggggtgctttgaagagcattatcactcaaacattggggtggtctacaattcttacttcacctttttcattttggcttctcacataaaaaaaaatggtttcatatttgcaagtttgaaaccacctaactcaaaatacactatgtgggcacttggagtctcccccctatacacatggtgagaacaacaaacccc

SEQ ID NO: 22312 - DNA, 490 bp, Glycine max
  Clone ID: PAT_MRT3847_12014C.1
cggccgctatatatacagaaggggacattttatttccaatatattccattctctctgtgtatttccctacctctcccttgaggagcatatcttcgtcaagaccctaagcggcaagaccatcacccttagagaggaaacctctgacactgtgacattacgtacaaggcccattatccatgacaaggtaattgaattgcccgtggaccacacatcgtataattcacaccggaaagaaaatcgaggacggccgcacccttgctggctacaacattgattaacgagagtactcttcacctcgtgctgcgtcttccaggcggcatgcagatctcagctaaaacactcaccggctagaccatagccctacatgttgaaagctccaactccatctataacttgaaggccgagatccaggacaaggagggtatgcccccagaccaaccccgtataatcttcaccggaaagcagctcgaggacggacgaaccctccccg

SEQ ID NO: 22313 - DNA, 380 bp, Glycine max
  Clone ID: PAT_MRT3847_120150C.1
gggaaccttatttgacattattttcctttttctagataagctttgaattctaagcttcaaagcttcatgatcatccaaaaaataaaggttacccagttaccagagtttgtaaatggacaaagcttcatgatcatcatattcataataaagaggttacacgaggaatataaatttagaccagagccaacggagaaagagatacactggtgtttaacaaaaaatgtacatattttgctagctaaatgcctaaataagatagtgaatagttgagcaaccggaaaattcaagttgtgagagcatttgaacacattaacttaggttgcaactattggaaattagcaaatgacagaaaaacccccacttatttaaatcacaaattt

SEQ ID NO: 22314 - DNA, 592 bp, Glycine max
  Clone ID: PAT_MRT3847_120151C.1
aaaacaaaacaagttttattttcataaaaagccaattttacccaacgactaaggcttataattagaacaaaatacccccccacaaaactgatttggtcaaaaattaagccacaaagaaaagttttttttataaaaatagcccagcataacataagggttttttttaaggatttgcttttaggttcggacaggggctgctgggccaacaggacaaggtccttgaccgccgggctgaccaggcctaggggcattatccctgcgcctgatgaatttttgggggggctcacgtttcccccgggcagggggggatcgaaccctcacaacaaggggggggatagcacaagaaacacaggcctggattcttacaaagaggggcggaagaggatattggtcatggacacaagcttcctggacatttatgacgggggccggttcaaaaaggtgcctcaccagaaaccccgggaggggcttgtccctgggaccgcttttgccccactgggggccccggatgaattttacggggcccgggccggggttgaggaacccccatttccggccttgaaagaaagggcgggggggggcgaaaaatgga

SEQ ID NO: 22315 - DNA, 443 bp, Glycine max
  Clone ID: PAT_MRT3847_120152C.1
attcatccagaaaatcacagactaaaaaaaaactcaaggacaaacacattagcaggaaccgaagtgatgcaatttcttgaacacccaaattccgtactagctatcacaatcaaattatttactagaatagtaggaactaggaactattcggcaaagcaatttaaaaggaaaaaacaagtgcatcaattcaataatcggtttcatcgtttgattatctacattagtaatattactaacttggatgaactggaatactctgttcattcctgaagaagttttctggatcaacctcagtcttgatcttgaccaacctctcaaaattgtcattgaagtacttgactccataaacagctccttctgcatagctattcttcccaaaactgttggtaccaatatcaaggtccctgtagtttaagaatgcacttctaggactactagacaca

SEQ ID NO: 22316 - DNA, 270 bp, Glycine max
  Clone ID: PAT_MRT3847_120153C.1
cggaattcccgggtcgacccacgcgtccgcgcaccttcatttcttctcctccgctcatgggtccttagccctttcgtgaggctcacaatggcctagcctcgccctcaaaatgcacttgcttctaaacccgagccctccggatgtcacacttcctctcactacgcgcctccgctcttactagctcaagaattttgctatatcgtgctgacgccctctgtctgttcctgccgacacgctcttacccctactcgcaccagcatgctatcggcg

SEQ ID NO: 22317 - DNA, 402 bp, Glycine max
  Clone ID: PAT_MRT3847_120154C.1
gcgtccgcccaagcgttcggctgagctgcaggtcaaggttctcactactgggctgttggccacgttattgatatatggattctgcggtcacgcactcgtgacaagaaagggacccttagacaaccatgatgatcaccttgctgaccctatgaacaacaatgcctgggcctataccacaaactaagtatacggaaagtgatggaaaatgagaaaacctgaaacaatgataaactatgactctagtagaaatctcatggagccattgagtgtaatatatattcgaagcataccttacttgccaagggacagaactactggctgtcgatctataggatccactgttacgtacgcatgcatactaccacctaccccttctatagtgaaacctaaagtcaacttact

SEQ ID NO: 22318 - DNA, 287 bp, Glycine max
  unsure (1)..(287): unsure at all n locations
  Clone ID: PAT_MRT3847_120155C.1
taaaatcacgaggacgagcatggaaacatgatgccctatctaaactataagcaaccatgtttgnntgactttttacaaaatcattcttaacatatggcaaaaattgcgaaagggacttaacattgttgaacaatgcttccaaattaataaatcttcctgctattatttattgcaagagccagagncnnnnnngcttcaatctagttcaatctccaggcnntcccggtgtcctttaatcacttgattgcctcctataaagctaatgcttcactctcatgaggaaaagg

SEQ ID NO: 22319 - DNA, 372 bp, Glycine max
  Clone ID: PAT_MRT3847_120156C.1
cattcgaattcactttctctatccctaaatattatttccagatgagatagccagatgtcaaaagatactaattatgcgaatttggaagtggaattatcaagttattaaatgattgagccctctttgtttacctgatccctgtagtaaaagagggcccatctcttcttgagtagcaaccttaaacaggacttctgcttccccagtgaatgtcttgcgaaaagatatgatttctttgccttgcggtggattcgtgattaaggaggcacgtacctgaacatgaaactaccttacctgtgcaatttctagtgaatcaggaaccccatccgttcccgtataaataggtgttatctgcccttgcaccgcaagaggagc

SEQ ID NO: 22320 - DNA, 592 bp, Glycine max
  unsure (1)..(592): unsure at all n locations
  Clone ID: PAT_MRT3847_120157C.1
gttttggggtcttacattatatgatctgtatgttccaaaaaatcgttatgagtcagaaatagccaaattgcatgctaatcttaaatctttggaggagctttctgacaattcaagctcagcaatcgcgaagaggaagaaagaaaaggaaagaattcaagaatctcttgatcgnctgatcggcgcgcggcataaacatgaagagaatgttgcatctgttcgtagacggctttctcatgaaaaagacaaatggttaagttcctgtcctgacaccttaaagatcaacatggagtttcttcagcgttgtatatttccacgctgtacttttagtatgccagatgcagtttattgtgctatgttcgtacacacactccattcccttggaacccccttttttaacacagtcaatcacatagatgttcttatttgtaagaccctacagccaataatatgctgctgcactgaatacgaggcaggcaggcttggcaggtttctgtatgagactttgaagattgcatactattggaagagtgatgaatctatttatgaacgtgagtgtggaaacatgcctggntttgctggctactatagatat

SEQ ID NO: 22321 - DNA, 370 bp, Glycine max
  Clone ID: PAT_MRT3847_120158C.1
gtcttattgcttccaaaattttctccttgcgagttctcggactctgtatacattgacaaaagttcatgttctggcgtttactacccggtcggcggtcgatcaactgtttttccccgatagaaatctcttgcgtctttgagttttttttccttgatgtttccacgaattaccagtccccaatacgaacacaatacccttcaggaatctggctttttaccctttcctcctgaatctaggggtcctccatagcattgaaagctggcgttcttgtttgtctattttgcatggtcatccactccagcatacaaaaaatccgctggctgctttctctcccctcaggcacaaagcggtacgcctgttcttaccttac

SEQ ID NO: 22322 - DNA, 432 bp, Glycine max
  Clone ID: PAT_MRT3847_120159C.1
gccatctgtactcagaacacatagacccaccgacacaacagaccttcttgcactcctgcacatatcggcgcccaatggaccctatgccccctaaacaggagcaaggagtgccaggggactgcaaaaaagcacccggtgtaccacggtgttcggaaaaaaaactggggccaagggggtccgaaatccgggagccacactaagaaggcccgaatctggctcggaacattatcaactcccaaaatggcggtgcgagcccacgacgaggcggccctcaccataaagggccagacaacaatactcaacttccccaaaactgcacaccagatccctaggcccgtcacgtgctccccacgtgacatccaaaccgcgcacacggccgtggcctccatggttaagatcgacactgtaacacaatactcagactcagaaact

SEQ ID NO: 22323 - DNA, 279 bp, Glycine max
  Clone ID: PAT_MRT3847_12015C.1
cagcaggcaccggccggaagacccgggacgtcccacagcgaaagcctcacagctctggcaacagggaacagaacgacgacaaagggaagagggcagcacgagcaccacccccgaacaggcgaaagcaaaaggggcagcccacaggcagaaaccaaggaggaggaaagaaaggacagacccacccgagacacccccgcccggagaacagcggggaaaacgccgacccagaacaaacaaccaacaaaagaaaagcgcgaacaaaccgacaaccaaccgggg

SEQ ID NO: 22324 - DNA, 601 bp, Glycine max
  Clone ID: PAT_MRT3847_120160C.1
gagagagagagagaactagtctcgagttttttttttttttttttttttttttttttttttttttcccaaaaggggacaaatttcaagcgattaaaaatattgtcccgtacaaaagcgtttttaattttacttaaagtagtacttttaaggaaattttttgggatgcttaaatcccccttgatgaattatgcctccctttaaggggatgccaaatcaaaaaatcccaaggctcgagtaacaacaaaagggtgtcgtgtcgtaagtaacccgctaatagtaccccctactacttcacagttagccataatacctaaccctttttcgtacaaattttgcagcaaaacaatgcatatttcctgcgttgagctcccccttgtactgttaaggccaaccttaataaatgaaacacattctgctcacctggaattatgcaaatttaaagcattcaatgaataaagcttcataagatgctctagtcttggggtaaaagtgcaatctcgatttcttgaagggacttccctttggtttccaccacatttcttttttaaaaatttactgccatgatgcaaaaggtagccaacctaaagtaaaccagttgggg

SEQ ID NO: 22325 - DNA, 563 bp, Glycine max
  unsure (1)..(563): unsure at all n locations
  Clone ID: PAT_MRT3847_120161C.1
ccacgcgtccgagaaaaccccacggatccattatatgccagagtaccttcaataaatgatgaggctgaaattttggacaaagctaaggaaacgacattggtggatacacacttgcttacaatttggagacagcaatttctggatgcactgagggtatttcgttttatgttgcaagtgtatctttaaggttaaatgctgatatcatagattcaagaatagcatcaaccacaactaaatcttactccttatcaattgacattgttaagctcttcaaaatccaattttttttacaaaactagttggagcaagatcttgtcacagattcatgaacgttgctagtaatactgttactatgattcagttaatcaggtagttttagtggtattatggatttgaagacgtggatatgggcttcttctgttaaagtgtttttctagtgatagtgcaatggatcttctcatatatatacccacataaatgtcacatacacactntgtaggacatagttaagcacaacctttacgttttaatgtgttcttaaatgagttatatgattattaact

SEQ ID NO: 22326 - DNA, 253 bp, Glycine max
  Clone ID: PAT_MRT3847_120162C.1
ggtactcaagtcattttttacttctgattaatcagctgttatattatctgataaggctagggcatacttatgatgcttgctatgtcgtggcgggacatataatggctcaacacgatgctcagaatgtggggtagaacaatgtcgctggctgatgtgacaaatgtcgctctgaagacgaatgtcctcattgaatcttctaaagcgaatgacgctgctgtgagatacaacgactcattggtcttttacgacgaat

SEQ ID NO: 22327 - DNA, 2097 bp, Glycine max
  Clone ID: PAT_MRT3847_120163C.1
cccggggacgagctagtgtccggcattgtgaagttgagaagatagcagaagaagaagggaagagatccattccatggcgtcgtcgtcttcaaactgaagaccggagagagtcaccgtcgtcactttccggagaacagaacagaacaagtgcataagagaatcatcgaattttcattcctttgtatagaagatgaagcgcaagcgtgggcataagaaagggaaggcaaaaggcagcactaaccatggaagcagtggtgctgatgctaacaaggaagaaacctctggtttggaggttgacacaccttcttccacggggaccgggatggatcagcagcagcattacaatcttgctaacataaatcctgatggttctgttgataaggctattgggcgtgttaaggtgaagctcaagacacctaaaatcttagactcccaacccacctcatttgatgctcccagtcccacacaaagcgatactgagagaatggaagatagtgcaaattctttgcctgatatgaaactcagtactctgtttaagagagctgctagcattaaaattaagtcttcatcaaaccacacattgtcggcttccactgagatcaccctcccaaaagaaagaaagaataagcaggaattggatgcttccttagtggttttaaggaaggtaatgaaaatggatgcagctgaacccttcaatgttcctgtcaatcctgaagctctgggaattcctgactatttcgatatcataaacacaccaatggattttggaactatatgtaacaatcttgaaaagaatgaaaagtatatgaattccgaggatgtatttaaggatgttcaatacgtttgggacaactgttacaagtataacaataagggtgactatatcttggatcttatgaggcgagtaaagaagaactttatgaagtactggacagcagctgggctatacagtgaacaatcaaaagggaccaaggagaggacttcagcagaagatattgcactttctggtgatggaaaagcagggaagggtggtcaattgaagcagaagacaaaaaagcgtcatggaagacaccataaacatgattgtttatgtgctatttgtgttctaaagcgacgtaggaaggaacgggaagagaatgctcgaattgctagaagcaattttggatctggtggtgataagcatgctaatgagtttaagcacgaggaatcaatacaagtagagagtcctggtggtgaagattcatcatcaaatatagatgaatctatgggcactgatggagatgttgatgaagacaaaggagaggtggcaaagatggagattgctgagaaggagttgtagcccttctgagagaaagcatgtgagcattgatgttgataatgatgatgacaatgatgaccatggcctagaggaaggggaggaggaggagaatggagaggaagaagatgaggaagagattgaaatgaacagccagaagggagagatgaatgaaactttaaaacatggtggaaccttggaagagaaatcaaatgttggtgatgcaaccgctctacatgatgaatatagaacaaagcaacaagaaggacaatctgcggcagtccagcaacagaagaaacacaaggggtcacaagataaacagcagaaagctaagctccttgagagcttatatagtgaaaaccacaagctttcaagtttatgtggaattctcttcccccaaaatagtcagtctgtctggagtggaccacactcactaatacagaagagaaattctgctcgtactagttcaattcacgctgctattaggactttcatggggtagcttttatcttgatcagtttattacacttcccagcagcctatgtcattaatattttagttgacatcccttcgttacatgatgtgtgtattatagtcacaatttcttggtagcaacagcagattttgtaatttttctttctgttctttttattttctcgttatgctatggaatgacgtatatgaaagaatttgtgcttcaaacccgttttactttataaatcatgaaagtaaaagtaaactgccccttgcagtcatagctcaagtggtcaagtttcgttttg

SEQ ID NO: 22328 - DNA, 126 bp, Glycine max
  Clone ID: PAT_MRT3847_120164C.1
ggtcgatttgaccgtctccggagtgcaccgaccagctcgtcccttatggcggggatgcgctcctgtccttaactgaccagctcacgcctgcacagctgatgctttccaaacaacccaaacgcgtgg

SEQ ID NO: 22329 - DNA, 1417 bp, Glycine max
  Clone ID: PAT_MRT3847_120165C.1
gtctattacagtttgtaactacttccgtcaccttccctgtctctcgagttcgagccgatttgcctcgaggcgaattttacagttacatgcttatgaatggcgtggcgtgagcttggaaagaagagaatatatatgaattttactagagcgttgacaacaacaccatttaggtatgcagcaggatcaaattttgcatcaatctttactgtgcaatctgtttgtgcatcagcaagatgtgtgccggatttcaccaaccaatcatctcagggagtggctggttgtggcagggagactaaagaatgtgaaatacggtgcttccatgctagttcgcaagtctgggcaagaagtgatggaccattaggtttgcagaccccaaagagggtatatgtgaaaaggggtggtagaaaccagctacctgttggagctccttatgcctgtcgtaatgttccagctaccaaatctaatcctgataaaacaatagaaatatttgaaggcatgacccttgttgaactggcaaagcgcaccggaagatcagcatcttctttgcaggatatccttactaatgttggcgaaaaggttcaatcagagtttgagcttctcagcatggatattgctgaacttgtcacaatggaggctggcatcaatgtgaagaggctacattcagctgaaggtgcagaaattttaccacgtcctgcagttgtaacagtgatgggtcatgttgatcatggcaaaacttctcttcttgatgccttgcgtcaaacatcagtggcagccaaggaagccggtggcataactcaacatataggtgcttttgtggtggtcatgccgtcaggagcatcaatcacatttcttgatactcctggtcatgctgcatttagtgcaatgcgggcaagaggtgcagcagttacagatatagtggtgctggttgttgctgcagatgatggtgtgatgcctcaaacacttgaagccatgtcccatgcaaaagcagctaatgtaccaattgtagttgcaattaacaaatgtgataaaccaggtgcaaattctgaaaaagttaaaatgcagcttgcttcagagggcttgcttctggaggagatgggtggggatgttcaggttgtcgaggtttcagcaactgaaaaaattggactggataacctagaagaagctctactacttcaggctgatatgatggatcttaaagcacgaattgatgggcctgctcaagcatatgtggtggaagcaagactcgacaaaggaccgggtccattggtcactactatagtgaaggcagggactctacttcgtcgtcaccatgtggttgtcggctcacaatggcgaagaataagggctattaaacatatcggcagggaagttaactcgacgagcaacacctgctatgcctgttgagattgaagggctt

SEQ ID NO: 22330 - DNA, 1697 bp, Glycine max
  Clone ID: PAT_MRT3847_120166C.1
aattcggctcgaggctggttcctcaatcactgtggtggggacaccccattatgctcacaaggagtatgctcccatgcttgcaaggtcaaggaaaggtgatggattggcattggtttcggtttcacagtttgtggttgaattacaagggctaaagtcagtggaaggggaagatcctcctaagattcttcacttgaatcctaggttaagaggggattggagcaaacggccagttattgagcataatacctgttatcggatgcactggggaacagctcaaagatgtgatggtttgccatctgagattcggctgcgaaaagatgacagaagggataggcgatgtgaaaaatggatgcggaatgacattgtagactcaaaagaatccaagacaacatcatggttcaagcggtttataggacgtaagcagaagccagaagtgacctggccatttccttttgcagagggtagaatgtttgtccttactttacgtactggtgttgatggataccatattaatgttggggggcgccatatgacttcatttccatatcgaacaggctttacacttgaagatgctacaggattggtagtcaaaggggaccttgatgttcattcagtttttgctacttctctccctacttcacatccaagtttctctcctcaaagagtactggaaatgtcggagacctggaaagccagtgctctacctaaacatgctgttaaactttttattggagttctttctgcctcaaatcactttgcagaacgtatggcagttcgtaaaacatggatgcaagcagctgcagtcaagtcttcagatgtggtagtacgattctttgttgcattgaatccaaggaaggaagtaaatgtggtgctgaggaaggaagctgcttactttggtgacattgtcattttgccctttatgcaccgctatgagcttgttgtgcttaaaaccatggctatctgtcccacgcgtccgcccacgcgtccggctgcatatgtcttgaaatgtgatgatgacacttttatcagggttgataccgtcttaaaagaaattgaagctgtacccgagcaaaagcccctttatatgggcaatctcaatctcttgcatcggcctctaagaaacggaaaatgggcagttacttttgaggagtggcctgaatcagtatatcctccttacgcaaatggccctgcatacataatttccagagacattgttactttcatcatatctcaacacaaggagaggagactgcggctctttaaaatggaggatgtaagcatgggaatgtgggttgagagatttaacaacacggtggccgccgttcagtactctcacaactggaagttttgtcagtatggatgcatggagggctacttcactgcacattatcaatcaccaaggcaaatggtctgtctatgggacaagttgacaagaggtcgtgcaagatgttgcaacttcagatgatttgccattgtatcattgtcattcttgtacctacttcacatagattagtattggagaaagttacaaaatgcattacacattcaatttgaaagaaatagaatttagcattggctgttcatctggtctagtttggttttggaggtgaatttactgtccatgaattttgcatgccaaaccaaaatgtattttacgatcaatgaattttactaatcaaattaacccgtgagtctcc

SEQ ID NO: 22331 - DNA, 243 bp, Glycine max
  Clone ID: PAT_MRT3847_120167C.1
aattatcttctttttttttgaagcaagatgcttgttccattctcagaataagcaattacaagaaaatcttaataaggaccagggaaaaggacggcaccccttaagaataataataatgattcttcttatcatcacttagctgttggaaaatttaaaagggggaattagaaaaaccccatcctgggcacccttctgtgggaaaaaggggcaaaaggcgaggcttttcataacggggagtggatg

SEQ ID NO: 22332 - DNA, 633 bp, Glycine max
  Clone ID: PAT_MRT3847_120168C.1
aacgatttggtaatcttcagtcatactattgctttctaattatgtagtcgcagttcatacaagatattgacactggctgaccaatatagctgctgctattttacagcagctaacacaataatagcagcagcaaaaggcactacactatgacaagataatggtatgtagttggaagatactgtgcacaatacaacagaatgaatggtctcaaaaaagaggcattaactagctagaggctagagctgaagcacaagctccacaagaaagagctccccatcaaacctgagtccagaaggttcagcaggctgaagaaaaccatccaccattccaccaaatacatacagataacaccctgatcggtctgcacacgcccggtgaaacgatcgagaatttgccgcatgtccacttgatttccaccgtttccacattcttgtcaacactttctttgagctcactgtgatttgctgagtgatgctgcaaggagggtaagggatggcactgatatctaacacccaaaaatcatctttcctgtgtctgtatgagttttctcctccataaatcagcaacctccctcccaaaaccaatgtagctgtatgaccaactcttggaagggaaacaccatctggtatgctt

SEQ ID NO: 22333 - DNA, 492 bp, Glycine max
  Clone ID: PAT_MRT3847_120169C.1
gaaacactcgtgaggtgccaaaagtgccgctatggtgccgttggacacagcatgcctggctaatagcttgatcagccgctgccgtgagttcttgaaactctaggcctgattcgtatcatttgggaggacccctaggaaccttcttgttgaacacttgcgcccactaaataccaaagattttcagcagcttgatgcggccacctggtccatctctggcgcctgcagaggtcacaacgactgagttactgctggaccatattgctgaccttcatactatggagcatatgctgggagactctgacacatgttctgaccatgaagctgcaagaaagcacttgtagaagccactttaggcacacatgggaagctggtgatcaaagtatgttatttggaacacagaatgctcactgcgaacgctttttccagactttggagtgcgcctcacattgcagagggagctgactacaggtacaacccgtgaccctcagagca

SEQ ID NO: 22334 - DNA, 321 bp, Glycine max
  unsure (1)..(321): unsure at all n locations
  Clone ID: PAT_MRT3847_12016C.1
gggggggggtattttttgnngngagatcaacaagggagttcttatttttttaaagtccataaactaaattggaccccccttctttgtaggggcacaaattgctacctcaaactaggttttgagcacccaaattgtgcccaaggggtcccaaaacctgctggggttaaaccttatattcactaaatgtaactttaaaacagccccaattggtgggtcgggcccgggatccaatccccctgtcattaattgccgtaccacgatgttgtgcttagttaataccaaccgggttcgaggaggacaggggctgacaaaaactgattc

SEQ ID NO: 22335 - DNA, 568 bp, Glycine max
  unsure (1)..(568): unsure at all n locations
  Clone ID: PAT_MRT3847_120170C.1
tcccggaaaggagaagagantaaagaggattagtaagagaaaggatgggtttttnaaaggantnattgatnagnatngtaatggaaagnatngtgnnaataatatgatagatnatnttnttggtnaanagnaatnanaanntgaatattananngatnaaatnatnaaaggaattgnantggtaatggtanttggaggaatatttttatnagnagtaantttagaatgggnaatgtntaatttattaaannatnnagaaatattaaagaagggaaaaaatgaattagaaantnatatagganaagatngtntagtagatgagnntganattnnaaaantnnnttaanttnaaagnattgtttatgagaaanttngtttggatnntggtggtnnaatgttggtannnnatttgtntttagaagattggannataggagaatataatatnnnaaaaaaaanaattttgttggtgaatgtttggggnattnatagagatnnnaagttgtggagtgannnaanaaantttaagnttgagagggttgagaatgaaagtgaagaaaaaaaggta

SEQ ID NO: 22336 - DNA, 467 bp, Glycine max
  unsure (1)..(467): unsure at all n locations
  Clone ID: PAT_MRT3847_120171C.1
cgggggccggaaatttcccggggtcgcacccacgacgtcccgcggaactcttttgggcaatagcctacaaaattttgtcccatgtnctgctatgctctcttgtcctaaggagaatactatacattgatgattatactgcaagcctgaactgacaatcgctctaagaatatctccctctctaaactcttccattttgttactggaagaaaagaaatcaaaatccatgcaatgatataacacctaggaaaccatcaactccatataggcttattgaaattaaaatctatcaatctctgcaaaataatgttattggcgcatacaataaggactaaaaaaagaagcttgattcatatgctctgaagcaaaggaactatggatcttatattaggcagctatagcaggagcggagtggaagaattatcggattctgtctctggatcttccttctttttagcattgagttccct

SEQ ID NO: 22337 - DNA, 326 bp, Glycine max
  Clone ID: PAT_MRT3847_120172C.1
ccacgatttctcgcttcagccacccgactcattcatctggacagagaccctgacgctttgctagaaacgacaaactacagtttgctcgcagcaacacaacacccaacacccacatcttcatatatccatcaacaatatggtgtcaagagcagtttccatgggccttcgtgcctggcagttgatctgcgccatcctcgtcaccgcgttcatgggtaacaacattgcgcgcgcttactcgggtgtgcactccatcgacaactactcgctctatgtcggtgactggtggatgttcactttgctgtacttcctacctacatacgggatca

SEQ ID NO: 22338 - DNA, 1678 bp, Glycine max
  Clone ID: PAT_MRT3847_120173C.1
cccactcgtccgcccacgcgtccgcggacggctgcttttgctcttggcgcggtgctatgtggttgtattgatagtcttgccgcctcagttagggtgggcacttaaaaagtacgactcgggtgccctggcgggtgatctgctggtatcccgacctcatcatcctactggatctccgttgggcggccctggggtggctcgggggtcaggttttgcccccgctaggataaactacaggaggaaatgggttctgtcaagtgggaaacgcttattcagcaggcatacgcacaaccggtgaatttatcagcgtcttcattttatgtacccggtaacaattccattaggtacattaattatggtgctgcagtaagtgaggtggaaatagatcttctgactggagaaaccagatgtttgcagacagatattatctatgattgtggacagagtctcaacccagctgtggatttaggacagattgaaggatcttttatccaagggttgggttttttcatgcttgaagaatatgaaacaaatcttgacggtttgatcttggtagatggtacatggaactacaaaattcctacattggacactattcctcaaaagtttaatgttcaaatcctcaacagtgaacaccaccaacaacgtgttctctcttcaaaggcttccggtgaaccaccactacttctagcagcttctgttcactgtgcaacaagagcagctgcaaaagaagccaagaagcagcttctatcatggagcaacttagatggaccagattcaacatttcagttgaaggtccctgctaccatgcctgtggtcaaggaactctgcggactggacattgtacaaacttacttgaaatggaaaatgggcaacaggtaaaggaactcaactcactttgaatatagatcaatgatttcatttttttcttgggtgaaaaataacttgtgtttagatttcacgtagacacatattatttacgatgactgacagagtctattgcctgctgagactgttaggacattgaaagagcctttgttcagggttaattcatttcatgcttgaacaatacgaaacaaatcatataagcaagatggcacttggaactacaaaatcccaacgatacaaactatacctaaacagtttaatgttcaaatcctcaacagtgggcatcaccagaaacgtgttctctcttcaaaagcttctggtgagccaccattacttctagcagcctccattcactgtgccacaagagcagctgtaaaagaggcaaggaaacagcttctttcatggagcaaccaagatgaagaagattcaacatttcagttgggggtccctgcaaccatgcctgtggtcaaggaactctgtggactggacattgtagaaagatacttgaaatggaaaatggggaaggacataatggtgctcacttaaataatttaaaagagtattttaatacacatctctctgaagaagaaaaattataattttttcacaaatattttttataagacaatttttcatactgtaccaagcaatcttattctatacaaacacttctgccgacgaattttcatactgtattatgttattttcttattttatatggactaagattgtgtattagacccatattaatttgaatataatgccgccaaagaggtgtttttatctattctca

SEQ ID NO: 22339 - DNA, 488 bp, Glycine max
  Clone ID: PAT_MRT3847_120174C.1
ggcgagtcaccaggagagaaagtagcgattatccatcatcatctcggccgtcgagaaatgacagatgtgatcattgagggcgatgaagtccaacccaggtgagctaaaaactacagtggaagaaaggaagtcttcaaaagcctcccccactgcgcaaagaagtaaagatcacagtaaggaatgcataaacgctgccccagattctccgtccaaacagcttccagaccagatttcattcttcagtggaaatccatcagttgaaatagttcatggtattatgcacctatataagacaaataagatgacctccttaaaagaagatgtgcggcgcagtgccatgctgtgtattctcacagtccctgctgcaatgaccagtcatgaccttatgaagtttgttgccccatttaacgaagtaattgaacaaatgaaaaatatcagagactctactcccaaccaatatatggtgctgataaagttcgtgcacacgc

SEQ ID NO: 22340 - DNA, 343 bp, Glycine max
  Clone ID: PAT_MRT3847_120175C.1
tgctctttcccccgaatgatttcaagcctcctaggggggatctatctgaaaaacgtcttcattatttaccaaaacttgttgaagaatctcaaacttacgctggatcaattgctggataaattgcgtgagaagcaaaaccaagatgaggacatgctacaagaattagagggcttacaaagatctttaagagctgccaagcaaagtcttgctcaagctacaaatgaccgcgacaaacttaggccattatgtgatgaaaaagataaggcacttcatgctgtaatcctagagaaacgaaacatggaagcaaagatggcagagctgagtattctggctacagagaaca

SEQ ID NO: 22341 - DNA, 437 bp, Glycine max
  Clone ID: PAT_MRT3847_120176C.1
ttcttttttttttttttttttttttttttttttttttttttttttttttggggatgggcctattggttaatttttcaaaaaacattggagcaaggaacaactactggctgccacaggtttttaaaacaccctggaaattaccctgaaattttgaagaaaaacaaaaagattttttttttaagatacgggctattaaacaggggttggcaaaaaccgggggaattaaacttaaaccatgatcagcaggggcccgagtagcctaaacgggcgaaacatgaaggaacccctgatccctgggcaaacagagattggtcggctccttccctgggaggggtcataacaaaattaccaacaaggggattcatctatgatctatctatccttacaggtttaacagaatcattgggctaacatccaacatctactaaatttcctct

SEQ ID NO: 22342 - DNA, 491 bp, Glycine max
  Clone ID: PAT_MRT3847_120177C.1
gggtttgttgacacaaccacaatagtttgctcaattatccaatgggtgtagtttaattgataacacacactgagtttgtcaagaaagacctgagttcgattcctgcaaaatatatcattggggagaggcaaggaacaagtgactaagtccccgagaaaggattagtcccatattgtgagggttccattgaaaagtcaaaagccctaattataatagttacaaaaaaatggtctgcttaatttccattatctagtttcctcataaagacaaaaacatagaagtgcacatccatatcgccaaatgatgtaatagctgatctcatctcatctatctccctttttggtgatgcttttgcatgttgtgccttttaatagggctgaattttgtaggcagaaaatatgcaacttttaacgaataattagtttagttctaaatgttatgctgtaagtgatttattatttgtctgatgacctgttgactgcagttgttag

SEQ ID NO: 22343 - DNA, 1703 bp, Glycine max
  Clone ID: PAT_MRT3847_120178C.1
ggctggagcttctacactaagtttattaggtgcaatcagagccaagtcaagctctttaaattttgttctatcttggtatgcaaaagcacagtgcaaacttcctccttctaccttggggtgtttagtatccaaagtgattcttaggatcgagagacaaccagtaaatccaaacaatgaacttaaaatttagcagtttccttgttgatggtaccgtggaacagaattttgacaatcacaaagtggaaggacaaaactcagcacctagcaaccaacaatgagagacataagatcatgattaagagccccaaagaagcagattttccattaaaacaggagggtcattctcaatcaattactgatcctgaaaaggcaaaggcttcagcgagctcagtagcacaatggccaagattgaaagatccaaggattgtgcgagtatctagagcctttggaggaaaagacaggcacagcaaggttttcacaataagagggttaagagacagacgggtgaggctatcagtaccaactgccatccaactctatgatcttcaagataggctagggctcagtcaacctagcaaggttgttgattggttgctcgatgcagctaagcatgaaattgatgaacttccaccacttcctgttgttccttcagtgaataacttcacccttggtcatccatctgctgttacctctaatgaagctaccacctcaaattctcagcctaatgagcaacttcttaatatcaacagaagcattcagtgggaaggttcaaaccagaattctacatggaaattaaagcctaaagaagtttcacgagaaatgattagcactgataaaccaaattggataagtagaagtgaagaggataagcaaggaagcaataatgaaggtcctagcacacgtgttataccaaatattaatctcttaccaagagcaaatcttaatcatccttcattcttgggcttgctgaatactatgccacatggttaccaatgggaaccttctgctggtgatgtttctcatcagttgggaaacaatggatttgcaaaccaaacagatatgcacagcattaacgttgtacctttcccaacatcaacattgtcattatcaactgggaattctcaaattctgctatgtcctccaggaacagcacaaccatatttcccttcacatgttacaatggacatggatccgagacaaatcaaccactatcagatgttgagttcaggttctcaaaatccattggcgaattatctcaatcattctttcagcttggctatgatgactcataaacctcttcattcacccaacagcagcaaaagcccctcccacaaagaccaagatttcccttccaactgatacacaaaatacaaagtatgtctcaattctcctctcgcaatttgcatggatcatgaagactgtgagaaagattcttcagttacaagatattccacggttaccacgggtttgaataatcattttgtttgtgaatgcatgtttggatttccttttatttttttgaattatataggtaagccttaaattttcccttcagttttttgagtttatatatgtattccctgaatcgatctaacatgaatagctttctaagggtataatgtaagagctctcctttaagtgacaatgaatagcttaagaactataagggaatgtaaaaaaaaaaaaaaactgagactagttcc

SEQ ID NO: 22344 - DNA, 1018 bp, Glycine max
  Clone ID: PAT_MRT3847_120179C.1
ccacgcgtccgacaaaataaaaaaaaaaagaagaaaaagaaaaaatccagagaacaaaggaaagaaagagaaagaagatttagaaagaaaggtgtagtagaataatcgttagggtgggacattcatgtaatgcatcagaagaaatcagaggttcagatcggaaaagaaagcgtaggcgtctcttccgatttcaatccgcaattccaaaaacacccctaccaccgccaccagcaattctacccccaaatcgaaatcgatatatctccccaatccccaccgcagccaaccacacctcctcctcctcctcctcccccttcactctccaaacagaaacacatcttcaagccccagaacgccgccttcttctccgtatccgtcgccgcgaagagcgccgcgttccgcgcgctgcggcgcgtgaggcgccagcgcgcgttgctcctactcgcggtccccttcctctacctctacttcctcatctcgcgctccttcctcctcgacctcctctccgccatcgccttctccgccgcgctcgtgttttctcttaacctcgctttccctttgcctctccgttcggttcgcctcaaggcggcgaagaattccgcctcccgtcccgcgcccgctcttccggtgttctggacgatcgggtcgaggccgaagacggagaagcgcgccgcggcgtccgggtgctgggtgcaggtgtttggaaacggcgacgtttacgagggggagtttcatcgggggaagtgttcggggagcggggtgtattactatagcaggagtgggaggtacgaggggggattgggtggacgggaagtacgatgggtatggggtggagacgtgggcgcgtgggagccgctaccgtgggtgttactggcaggggctgaggcacgggtttggggtctataggttttacacccgggatgtctatgctggagagtggtctaatgggcagagccatgggtctggggttcacacttgccaggatgggagtcgctatggttggggaagtttagtgggg

SEQ ID NO: 22345 - DNA, 645 bp, Glycine max
  Clone ID: PAT_MRT3847_12017C.1
agtatgcatatgatgaaaagaaggtggcaaacgtacaatctcacctggattatctggataattcaggagaatttggtggtcaacaatttctatttgaacaagatggcaaaagaagcttatagatcatacatattagcatacaattctcattctatgaaggatatattcaacattcaccatcttgatttgcaggctgttgcttcttcgttctgtttttcaaaccccccaaatgtgagtctaaacataaacagcagtaagcaaaggaataaaatgcgtaaagttgatggaagtagacatggattcagtggcgacaatccttatggaaagagaaatgctgatgataagcggcagtttgtgaggtactagcaacatgcccttttatagagtgggtttctttgcatctgctacagtacacccacaaaaagttttgccccaatatccctaattttatagtcacagatgtattgtaaattagtcaaacattagattattcgagcaattagttctaaaactgaaaatttgtctgcgcattcttgaactgtaatattcttctttgatgtgatttctatttttaagtttcataataagtagattttgaagaatgatgcttaaaactgagtccaatcgatcttttttagttattgt

SEQ ID NO: 22346 - DNA, 282 bp, Glycine max
  unsure (1)..(282): unsure at all n locations
  Clone ID: PAT_MRT3847_120180C.1
gcggtggagtcatgtttactggtgagacactaccagtctgttttgtactatgattgaagagttgacagtcagtttggtattcttataaatttgagggtgaaaaattcaagaattactttgaatataatttttcatattaaaactcatctatgaatttttcaccctcattttctgtggcaatttcaactgagggggagcactaaatatggggtgcaactctgngcannacatagnnatacatgagcacaagggggggggagnnnaccggccccacactaccag

SEQ ID NO: 22347 - DNA, 2850 bp, Glycine max
  Clone ID: PAT_MRT3847_120181C.1
atcttgttcatctttcttcgcaatccttctatacctcccctcgggccccacctcctccctcatccaacggcccagatctccccgctggattgtgttagggtttacgccaccatcatcaattcctctctctttacctataaccctctctcactcttcttttccccattccttttctcagcgcagtgtccactgctctctctctcaatttcccttcactctcacgcgccgccgtggtttccgccggcggccactccctatccgccgcgcatccatcccgcttccctctcctcgcttttctctaaaaaaaattaaaaatttctctgaagaccgtgttatcattatcgttccctgagttaggttttctgttcttcctagggtgtttttattgtgtccaataacaagaggagggggaagagaaacaagcaataagaagaaaaaaaacaaggaaaaattagggatttttttttgcgaaaaaaagagaaatttaagttgttgttgttgttgtagctgttgttttggttgagatggctcaggttcaggttccgcctcagaatgcgattcccggccccaacggtggtggtgctgctggaaatcagttcgtgacgacgtcgctttacgtcggagatctcgacccgaacgtcacggacgcccagctgtatgatttgttcaaccaattggggcaagtcgtatccgttagggtttgcagggacttgaccagtaggagatcgctcggttatggttatgtcaactttagcaacccgcaagatgctgccagagctttggatgttctgaacttcactcctctcaataacaggcccatccgtatcatgtattcgcatcgtgatcccagtatccgtaaaagtgggcaaggaaatatatttattaagaatttggatagggcaattgaccacaaggcgttgcatgatactttttctacatttgggaatatcctttcgtgcaaggtagctacagattcatctgggcaatcaaaaggctatggctttgttcaatttgataatgaggaatctgcccaaaaggccattgagaagctgaatggaatgctgctgaatgataaacaagtgtatgtgggacccttccttcgcaagcaagagagagaaagtactgctgacaaggcaaagttcaacaatgtttttgtgaagaatctgtcagaatcaaccactgatgatgaattgaagaatgtttttggtgaatttggaactattactagtgctgtcgtaatgagggatggagatgggaaatcaaagtgttttggatttgtgaattttgagaatgctgatgatgctgctagggctgttgaggctctcaatggcaaaaagtttgatgacaaagaatggtatgttggaaaagctcaaaagaaatctgaaagggagaatgaattgaaacaacgatttgagcagagcatgaaagaagctgctgataaatatcaaggggcaaacttgtatgtcaaaaatttagatgatagcctcggtgatgataaacttaaggagctgttctccccttttggtaccataacttcttgcaaggttatgagagacccaaatggcataagtcgtggatcaggatttgttgcattctcaactcctgatgaggcatctagagcactcttggagatgaatggcaaaatggtggtaagcaaacctctgtatgtgactctagcccaacggaaagaagataggagagctagactgcaggctcagtttgctcaaatgcgacctgttggaatgccaccatctgtcggtcctcgtgtgccaatgtatcccccaggtggtccaggtattggtcaacaaatattttatgcccaaggccctcctgctatcattccttcccagcctggatttgggtatcaacaacaacttgttcctggtatgaggccaggtgcagctcccgtgccaaatttctttgtgccaatggttcagcagggacaacagggacagcgtcctggtggaaggcgtacaggtgcagtccagcagtcccagcagcccgttccaatgatgccacagcagatgctacctagggggcgtgtctatcgttatcctcctggtaggggtatgccagatgtttctatgcccggggttgctggaggtatgttttctgttccatatgatgtgggtgggatgccactgcgtgatgcatcaatctcccagcaaattcctgttggggctttagcaacagctctggctaatgcttctccagagcagcagaggacgatgctgggtgagaatctctacccccttgtggaacagttagagcctgacaatgctgccaaagtgacaggcatgcttcttgagatggaccagactgaagttctgcatttgctcgagtcgccagaagccctgaaagcaaaggtggcggaggcaatggacgtcctaagaaatgttgctcagcaacaggctggcggtactgcggatcagctggcttcattatctcttaatgacaaccttgtttcttaaggtttatattttggatttatttagtgacgatgggttgttattttcggcactggctctgatacagtttcaggttgagtttgtttcgttagattagacacttttggtttgttatggaccaccaccttcttttggttgaagggcacttcaacactgattttaattatgccttgcatttggtacatggaatcatttgttggtttatcttttgattacatgagtttgatttgcataagtaatgggttaccttatgacaagtgatccaacgttttgcgaggatgtgaatcctcgtctcatgtgtcagtccccgcctgagttgtgatactctatgatcagtttttgcccttgtcttgatggtgtgtgggcctagggcaagaactta

SEQ ID NO: 22348 - DNA, 272 bp, Glycine max
  Clone ID: PAT_MRT3847_120182C.1
tacggctgcgagaagaccacagaagggctatctaaacgctattagacaatattttcaaatcaaaagtgacgcattttattaaaatcaaatttaaaaaaaaaattggagagaataattttttaaaaaaggaaacagataccttcaacaaagaactccagacatgaaagatccctcttatctcttccataacataattccagactcgtgaacaggatttgaggctaactctaatattgttacataattttcaatcagcttgagaaccttagaat

SEQ ID NO: 22349 - DNA, 3141 bp, Glycine max
  Clone ID: PAT_MRT3847_120183C.1
gtgtaccagttttagaagttgtgcggtaaatcataactcatcatctctcatcactcctatgtagtatgcatctttctttcattctacctcactcgtagtaataagaattttcttcatctttattctgctttcgcaatcctctatccctcccctcgggccccacctcctccctcatccaacggctcagatctctccgctggattgtgctagggtttacccaaacccgccaccatcatcaatttcatcatctctcttacctattaatccctctcactcctcctttccccattccttttctcagcgcagtatctactgctctctctctccctctccctctccctccaaattttccttcattctcacgcgccgccgtggtttccgccggcggctactccctatccaccgcgcatccatcccgcttccctctcctcgcttttctcacaaaacaaaaaaaaattaaaaatttctccgaagactgtgtattatcgttatcgttcactgagttaggttttgctgttcttcctagggttttattgtgtccaataacaagaggagggggaagagaaacaaaacaaaaaaaaaaaagaataaaaggcaaaaattagggatttttttttgggaaaaaaaagagaaatttaagttatcgttgttgtagttgttgtttggttgagatggctcaggttcaggttccgcctcagaatgcgatgccaggtcccaacggtggtggtggtgccggtggtgctggaaaccagttcgtaacgacgtcgctttacgtcggagatctcgacccgaacgtcacggacgcgcagctctatgacttgttcaaccaattggggcaagtcgtgtccgttagggtttgcagggatttgaccagccggagatcgctcggttatggttatgtcaactttagcaacccgcaagacgctgctagagcattggatgttctgaacttcactcctctcaataacaggcccatccgtattatgtattcgcatcgtgatcccagtatccgtaaaagtggacaaggaaatatatttattaagaatttggatagggcaattgaccacaaggcattgcatgataccttttctacatttggaaatatcctttcgtgcaaggtagctacggattcatctgggcaatcaaaaggctatggctttgttcaatttgataatgaggaatctgcccaaaaagctatagagaagctgaatggtatgctgttgaatgataaacaagtgtacgtgggacccttccttcgcaagcaagagagagaaagtgctgctgacaaggcaaaattcaacaatgtttttgtgaagaatctatcagaatcaaccaccgatgatgagttgaagaacacttttggtgaatttggaactattactagtgctgtagtaatgagggatggggatgggaaatcaaagtgttttggatttgtgaattttgagaatgctgatgatgctgctagggctgttgaggctctcaatggcaaaaattttgatgacaaagaatggtatgttggaaaagctcagaagaaatctgaaagggagaatgaattgaaacaacgatttgagcagagcatgaaagaagctgctgataaatatcaaggcgcaaacttgtatgtaaaaaatttagatgatagcattggtgatgaaaaacttaaggagctgttctccccttttggtaccattacctcttgcaaggttatgagagacccaaatggcttaagtcgtggatcgggttttgttgcattctcgactcccgaggaggcatctagagcactcctggagatgaatggcaaaatggtggtaagcaaacctctgtatgtgactctagcccaaaggaaagaagataggagagctagactgcaggctcagtttgctcaaatgcgacctgttggaatgccaccatctgttggtcctcgtgtgccaatgtatcccccaggtggtccaggtattggtcaacaattattttatagccaaggccctcctgctatcattccttcccagcctggatttggctatcaacaacaacttatgcctggtatgaggccaggtgcagctcctgtgccgaattttttcgtgccaatggttcagcagggacaacagggacagcgtcccggtggaaggcgtccaggtgcagttcagcaatctcagcagccagttcctatgatgccacagcagatgcttcctaggggacgtgtctatcgttatcctcctggtaggggtattcctgatgttcctatacctggggttgctggaggtatgttttctgttccatatgatgtgggtgggatgccgctgcgtgatgcatcaatctcccagcaaataccctgttggggctctggcaacggctctggctaatgcttctccagagcagcaaaggacgatgctgggtgagaatctctacccccttgtggaacagttagagcctgataatgctgccaaagtgacaggcatgcttcttgagatggaccagactgaagttctgcatttgcttgagtcgccagaagccctgaaagcaaaggtggctgaggcaatggacgtcctaaggaatgttgctcagcagcaggctggcggtactgctgatcagctggcttccttatctcttaatgacaaccttgtttcttaaggtttatattttggagtttacttagtgatgatggattgttattttctgcactggctttgatacagatttcaggttgagtttgtttcgttatctcttaatgacaaccttgtttcttaaggtttatattttggagtttacgtagtgatgatggattgttattttctgcactggctttgatacagttttcaggttgagtttgtttcgttagattagacacctttggtatgttatggaccaccaccttttggttgaaggatacttcagcactgattttaattatgccttgcattttggtacatggaaatcatttgttgacttatctatgattacatgagtttgatttgcataaatatgggttacctatgataagtgatccagtgtttagcggggacgtgatcctcgtctcatgtacttgagtcgtgatggatatattgatcaatttttgccccttgtcttgataggccagggacaaattcttgtggcacttgttttgcttcctcttttaattaaaaa

SEQ ID NO: 22350 - DNA, 408 bp, Glycine max
  Clone ID: PAT_MRT3847_120184C.1
atcctccactaactgacgctggattgactccgatacaagctgactttctctttactataagcctaaggcctgttgtggagtgcatgactgtcaactacggcaggcctgcaataaatcatatcattaactctgcctcataatcaaactacatgtgttctggacaaatatctgtgcctattgtctttagcggacccactggagccgctgctgcagttgatgcttatccttctcaatgttaagcatctcgctatggatcatgccctgagttgacagacttgtaaccatattcatctgaagatgctcgcggttagcttaaagctgatataacggaccctgaacctgtcgactatcttgaaaatgaatcgatctatggtgagacattccctgtttatgccaaggtcttgattc

SEQ ID NO: 22351 - DNA, 340 bp, Glycine max
  Clone ID: PAT_MRT3847_120185C.1
cacgtggttattacaacatgtaatgcgaacgtgcatatactttcgttgctgagatgcataatggcttcttattaattgttgctgcattaggcatcttcttccgaagatgcaaaagaaacccgtcccctaatcatggggaatctgtggggcaatctatacatcgaatcattattggtgaaagttgaccactgatgtgcaaggacctatgtgttttctaaaactctaaccactgaaactgcttttgatggatgcactaggagaatctttttttgacccatcctttcttttgttaaaaatctcaaaaagctgggggacatgaaagttctcgaaacggcaatac

SEQ ID NO: 22352 - DNA, 382 bp, Glycine max
  Clone ID: PAT_MRT3847_120186C.1
aacattcatcaggtaagagtttacttttctaaattagttaaggtgactgtagatttagctcatatcacattttaagtcaatttgggatggttcaattctgcacgatttaagccacgcgtaaccatgcacggggtttcttatgacttttggcgtcaattttgtcttcaagcgtgcaaaatttcagacttctagcatggaaacaatttaatgcagtaatttgtgatgaagcaagacaagaaaatagtgtttttatgtgataattttatgatgataataatcatcataaaattatcaactcaaattgattaacataagtgataatactttaaatttcttattcagattattcaaatttaaaatcgggatacatattaaattagta

SEQ ID NO: 22353 - DNA, 226 bp, Glycine max
  unsure (1)..(226): unsure at all n locations
  Clone ID: PAT_MRT3847_120187C.1
ggaagagtttgtattcactaatatatttgaaaggcctattgctntgtcactctaaggacacgggggcccagttcttctacaatcctttctccctaatacagaccagacccctcagctcctctgcgccatcgacacgcactctcttcttctatgcaaccccttcattggcacggaaattgatgcttcacttactggatgatttgcaacataacaaaccattcgtttt

SEQ ID NO: 22354 - DNA, 348 bp, Glycine max
  Clone ID: PAT_MRT3847_120188C.1
ggaaaaagggctttttaattgaaaacgacattgatgtccactgcagggtttttatttttacatgaagaactgaaacaccataattgcccgtgttaacattgtcgttaatcccacctgtccaactttgattttttccaatctcatgccaatgatgattgcttccttttatgccaagactttccacagcttcccttaatgctacaagcttgggcttttctgtactctaagggtatcatcatcatcatcattattataaaacaacctatttccttcctatctttggtttttttgggggacggacttttttacaaccaatgtataatgggttgatgaaaagtggaacgattt

SEQ ID NO: 22355 - DNA, 907 bp, Glycine max
  unsure (1)..(907): unsure at all n locations
  Clone ID: PAT_MRT3847_120189C.1
ggatttggcattccaaggagtatctacccccgcctttttctttataaaaggagtatctactttttttttccaccatctccatgaaaattttgttatcagcagtttcctgtctttgtctactcttagattagatatacttgctgagttatcttgatttttagatcaaacaaagctggtaagttgctcgctgaagtattgttaaaaggattgcagggaaataggcccgtgacacttataggttactcacttggggcaagagttattttcaagtgtctacagtatttggctaaaactgaaaacggtgctgaacttgtagaaaaagttgtacttcttggagcacccatcccaatcatggatgagaactgggaagcaactagaaagatggtagcaggaagatttgtgaatgcttactcgaggactgactggatgcttggagttgccttccgtgccagtttactcacgaaaggattagctggaatccaacctgtcgatattcctgggatccaaaatgtcgatgtgacagaacacatcgaaggccattcgtcttatctgtgggctacacaaaagatcttagaccaacttcaattggatacatactatcctgtatataactacatttcttgcatacagatacagtgacctttaatggaggtgttctgtttctctgcttacgttcttctgccagccgttgaagtggttgaccctattcagaaattatgtatggaatatatttgtttattacactttttgtttcaaatataaaaatatatcaatatttgtcagcagtactatttgtcaagatagaaaataggacgaaaatgtatgaagccatgatgtgtatccatatatattttttaagtaaatctcaatttaaaatttaaaaggtataaaataagatttgnngggg

SEQ ID NO: 22356 - DNA, 419 bp, Glycine max
  Clone ID: PAT_MRT3847_12018C.1
gggaaaaatttggcaaggggggaatgcaaacatttcattgttacaacttaaaaccaggaataatgttggacctggcgggcttaaccctgctaatcaaatagggaacatggcgtcatcaacaaattaaaatggctcagggagaggcctaaaaacgcagggctttgggcttaaaaaccaccccttccaatgggcattaactggaagaccaattaatgatttggggaatccattattaagatccttaaaaaaagggactcattttcttaaaaaacggccattttaaaacaataaagcacctggatatggagggtcttcataaaaggccccttgtatatatgaggaaaatgactccccaaaaaaacattggcgctagatgggaaaaaagaggggcaccacgaaggcgcctccgtaagaaaaac

SEQ ID NO: 22357 - DNA, 625 bp, Glycine max
  Clone ID: PAT_MRT3847_120190C.1
ttggctaaaactgaaaacggtgttgaactagtagaaaaagttgtgcttcttggagcacccatcccaatcaaggatgagaactgggaagcagctagaaagatggtagcaggaagatttgttaatgcttattcaaggaatgactggatgcttggagttgccttccgtgccagtctactcacgaaaggattagctggaatccaacctgtcgatattcctgggatccaaaatgtaagatgtttcttcatcctctttgccaatgtataacactatttttccaagtcgcaatcttattttcaatgatatcattcataaattatgaatattaatgtttaataaaatgggtgtttgtttttgcattgcattgaaggccattcgtctaatccgtgggccacacaaaagatcttagaccagcttcaattggatacatactatcctgtatataacaacatttcttgcacacagtgaaccttttatggagccgctctgtttctctgtttacatttcttctgctttaaagtttgaccgtattctgatattatgtatgaaatatattgttataaaaataatgtaaaaaatatatatgttgtactacaacagacatgagtctagttaaatttagagcaga

SEQ ID NO: 22358 - DNA, 385 bp, Glycine max
  Clone ID: PAT_MRT3847_120191C.1
agtgccttaaattggatttaatatgctttacattccaaaatcctaaaagttggtccaagtgcttaacaaggacagaatattcgtacaatacaacactacttttcatactagttagggcttcactccaattaaaatggtttatggaagaaacctcccacccagcaaacaataagcaatatcaccctttaggtttccttcattctttgttacttctgctgctacactgatatcagtctctgtattactaaataagggcagatcgtattattcagcaagtcactgggtttagggatattttttggcgttacactagctagactctacaataagatctattctccactacgcccctgaagagttgaaatgcccaaagaaattttttgaa

SEQ ID NO: 22359 - DNA, 244 bp, Glycine max
  Clone ID: PAT_MRT3847_120192C.1
gcagactggacattggactcggagcactctatggtaacgctattcttcatgaataggataggaggcgaatgatctatcgtgacatgaaagcatatcttatactattagatgtggagtacgatgccaatcatgttgatcagagcactcgcagcagatggtcgctcgacgagaccacacagatgtatctacaagagatagttgaacatatcggtatactgctcctgaacatgagatgaatggacat

SEQ ID NO: 22360 - DNA, 538 bp, Glycine max
  Clone ID: PAT_MRT3847_120193C.1
ctttgtaggcactaattgttttattgaataagtgttctcgagatttaaatagatcctctgtttaattgttatatgttaaaacacttcaacttgcttttgtttgtgtttattttctgctaatggactattttgtaatgagttcttttacaccattacattgatgcatgtttttatgatgtcatgcatgtaagcacattacgactcatgtcttgtaagtttgaaattacttttggctatctgttttgcactttctccaactctcttcccctctctggtttggtggaggatgtgcagcatcagaagtcataactctttctttgttatgactgtagcacgtatagttttcatagaatgaagctaggagcttctctatgtcctttttggctatcctgtcaaaggtttggaataagtgctagcaaattttattgtggcttctctaaattctaatagggctgatgatacattttaagattttctttttctttcttgagaaatggtagtaaaatgttcatctcccccataacacatttccaatcga

SEQ ID NO: 22361 - DNA, 490 bp, Glycine max
  Clone ID: PAT_MRT3847_120194C.1
ggggaaaaaaaggggggaacattaaccccgaagggggggccaaaccccttgggggggggaaaaaaaaaaaaaaaagggccctttttaaaagggggggggttttaaaccatttccttttaacaaccttttggtggccccacaaccccttttttttttaaaaggaaaaaacaggggcccaactttgttaaaaaattccgggtccttttgggggattcccccctgttttccctaaacaccccacccgtttaaaaatttggggggaaaatggggttgggaacccccaaaaatgacggggttgggggaaaaattgcccccccctcatatttagggcccccctgtttttgaaaaaaggccaaacatataccgccccccccaaaaaggggaggaaaaaaaatttgggggttgagcccaaaccaaattggtttaagggggttgagcccaaaccaaattccaagtttacctacccggggatggaaagaaaaaatttttt

SEQ ID NO: 22362 - DNA, 281 bp, Glycine max
  Clone ID: PAT_MRT3847_120195C.1
ggatgacgtaagtgtaagtatcattcatataatactctgtttcacttcatttcgataatcatcgagatctattgatcacagtggcacccatctctgctgctatcacagttccatcgctctcacgcgcaactcttgtgcagaagcgggtctcatcgccagttcttggtttgccatcactgcttaatgtcgtcatagtccattgctccatcgaggaatcaccttattctgtgaatgaaagcagctctagcatcttgagctattatgcatctctgatggtacct

SEQ ID NO: 22363 - DNA, 398 bp, Glycine max
  Clone ID: PAT_MRT3847_120196C.1
gagaatcaaaagtgtttaattttgattctatttcgatgactgcacaacatcttttgaaatcccatatcaataatcctgatggattttcataaacaagacgttgaggctagccttttcaatccataccttattcaacttattctataccacactatccccacaacactgcattcttaacagttactaagcaagaactacatctacactatttattcaccttactcagatgacaacttttcacattaatatcttattccttcctccaatgaagaagcaactcctaacattacttaaactttatcatctatggtagaggaacaatctctcaatataacacaaacctaagaattagtttgagaatgatgagaccaatgactcattaattgtcagagcaaata

SEQ ID NO: 22364 - DNA, 144 bp, Glycine max
  unsure (1)..(144): unsure at all n locations
  Clone ID: PAT_MRT3847_120197C.1
tgatgataacttnattagtgntcatgcntatgtccaagccttcactntagtggttctaanttnaaaacgnttccaagccnggtgcataantatccgccantaaccggntgggnattnggcgaaaacccantgcnaaactnngcc

SEQ ID NO: 22365 - DNA, 767 bp, Glycine max
  unsure (1)..(767): unsure at all n locations
  Clone ID: PAT_MRT3847_120198C.1
cacgcgtccggatcttattggcccaatccaatgtagttttgttctagggagacaaaggcgggataatattattattattctaagaaaaaggaaaaaggtgataaaggatggatgactattaaaattgatttggagaaggcttaccaaaggatgagaagagagtttattaaggatacttcgattgatgtagggctaccaaattcttttgcgaacatggtgtggttttgtatctctactctatctataaaagtcctttggaatggtgaggttttggatgattcctttaggccgactagagggatttgtcaaggatggattgttcgtgagaagattagtgatgcttttccaacatacgaataagcttggcaaatatttgggagtgcaattacatcatgagagagtgtccagatctaccacaaggagtgtcattgagaaaatgaaaagaaggcttaggtcatggaaggttagaatgttatccttttctggtaggctaactcttaactagatttgtgcttactgtaatgcgctcctatgctatgcaatctgttttccttcctcaaagtgtatttgatgagattggtcaggtttgtaagaactttttgtggggtgatattgatcatagtaggagtatgcatttgggtgtcttggaaccaggtgtgtaaacccaaatatgttgggagggttggggaattagaaaggctcngtcgtgtaaatgatagtttcatgtataaaaattgtctagggatctttgtactaaaaactctcat

SEQ ID NO: 22366 - DNA, 592 bp, Glycine max
  unsure (1)..(592): unsure at all n locations
  Clone ID: PAT_MRT3847_120199C.1
aagacaagtaagaataatcaagcaagaagaaatggaagaagaaaaaagcttcacctatgcaatgcagctggtgaactctagcgtgctatccatggccatgcactcagccatagagcttggcatttttgacatcatagccaaagcaggtgaaggtgccaaattatctgccaaggacattgcagccaagcttccatgcaagaattcagaaggagccacaatgttggatcgtatcctaaggctcctagtatgtcactccatcattgactgcacagtggttgctgatcaacaacatggtcctcctccacatctgcaacggttctatgccatgaaccctgtggccaaatactttgcttccattgatggtgctggctcactaggccctttgatggtcttgactcaggacaaggccctccttcatagttggtaccaattgaaagatgcaattctagaaggaggtattcctttcaacagggttcatggaanacacgtgtttgaatattgcgacatgaactcnagcttcaatcagcttgtcatggcagctatgacaaaccgtgcaactttaatgatgaagaagatngttgaaggtatgaaa

SEQ ID NO: 22367 - DNA, 497 bp, Glycine max
  Clone ID: PAT_MRT3847_12019C.1
accagggaccacctcctttatattttgggtttgggagcatggtatggtaattgcatgtgaattacaagtcattttttatgaattgtctttgataatcagctttttttgtgaattcaacttcactatttggatttatggattgtactaccactacaagccttagtattgttactattgtagataatcattaaatccccaatcataaatcctaattccccatcagcgttactaatggcgggttccccaatcaaaattctgccatataaacacaccattgcgccttatggtgggtttcccttcacaaattgcctatggtggttggcaaaaaatctgccatagcgccgccatggccactatttaacaacactgttccccatttttcttgttgaatatttggtggattagttttgagattaattcatttggtgtgtatagaaaataagacactacttatgatgatcctgacctttctggactagttgatgcacagatgtgac

SEQ ID NO: 22368 - DNA, 973 bp, Glycine max
  unsure (1)..(973): unsure at all n locations
  Clone ID: PAT_MRT3847_1201C.1
tannnnncacactacagtaatcnaaaacnntgattgaacacgtgcataagtacagcaagagagacatcaataatgtaaaatatgctcgagtttttggtgtcattccatatggttcattcccataggcacgctacagatattccgaccaacaaggcaacaagtgcagtatagtaacatacatgttaaacatataaaataaacatgtgccgcaatcaagtagtatttgaagaatgaagtcattgaaactacttaaacggtacatcaagtacaaaagagctctaagaaccacaataaaatatcatgattgttatcctttataacaaactgtaagtggcattcagcatcaagattgcagagccttgcgtccatttacaaccccggtgaaatatgcttgcattcaaagaaatgcagatatttgataaaggaattgaaggacagcacaacaacggatcgtggaacccagatgtccacacaaagctcagggattaccattgacacataaaagcacacttcaaagttctcaagatttgatgttttgaagctttgcagtatatagcttggtgagttttctgtcatgattgagcatggcactaacactctcaactaccagaatgatctgcaagcacacataagcaattgcagtcgcaaagtaaaaatttgcatttccagtacccctccatatccatagattgtgcatcacagggctnaagaagtgaaaccccaatatagccagaaaacaggaagaatgaaaactgcatatcntttgagttcatatgcaaacaacccaagtaaacccaaatacagagctgaatcaccaactgaaggataagacttcaacatagaagatatcacaatatatacaaaagctagaaagcacggccgatgattaagccgtaggctaatggtgctatcatcaatagaatattcccatgaaatactatcaggaaggaaattttctgaaaaatcaaaaact

SEQ ID NO: 22369 - DNA, 475 bp, Glycine max
  Clone ID: PAT_MRT3847_120200C.1
ttttcctacgcgccgtggattatattttataatccttctccatcttttctcttgagccttccttcccacaccaatcttctccaccacttcacacaaccttaaatccaacccaaaaccaaaagaaacacacacactcagaaacaccaagagaaggtacttgtttttttttcttttcttttcttttctctgttctgttctgtcacaacttagtacttcacatcctttgctttgttatcttcttcacatgttgcttttgttgcttgtcttgtcctttgagctgagtgatgattgattccctttcagtagcagaaagatgggttgccgttagtttctatgactttcgatgttatgtatgtgtgagtgtgatagaaagttagaaactacaacaactcatgtttttcttttaaacctttttatttgggatgtttttcttcttcttcctagctagttaatttgatctcttcctgattctgag

SEQ ID NO: 22370 - DNA, 406 bp, Glycine max
  Clone ID: PAT_MRT3847_120201C.1
gaacaggataaagctcattgcccttttcatttaaaatcaggagcatgttgttttggcatacgctgtagcagagtccatttttaccctgataagtcgtccacttttcttatcaaaaatatgtataacggtcctggccttgcttgcgatcgggaccaagatgagggccttgagtataaagatgaagaggttgaacgctgttttgaagaattttacgaggatgttcacacagagttcctgaagtttggggaagttgtgaacttcaaggtgtgtaaaaatggttcatttcactggcgaggaaatgtctatgtacagtataaatctcttgattctggtctgcttgcttataactcggggaatggtcgctactttgctgggaaacaggtaagttggtaatttttaacttaac

SEQ ID NO: 22371 - DNA, 230 bp, Glycine max
  Clone ID: PAT_MRT3847_120202C.1
agcaacttctttaacaatctttaatcattttgtttatttttctgtccacatgcagttaatttaatcaattgatttatttattcctaggattttgtgttattattatatgatatgattaccaccaatgcattggcatgtaacttgttacttggaagcaagactaatttatggttgttctttttgataatgacccctttgccatggaaataatttctagatgcttttgatgg

SEQ ID NO: 22372 - DNA, 347 bp, Glycine max
  unsure (1)..(347): unsure at all n locations
  Clone ID: PAT_MRT3847_120203C.1
cattgactaacaacgccagtatcaaagctgtctcctctactcgctctactactcncttcaagagcnttttagcgtgtgcttttcaaaacctccgaactgaccgtgatactttcggtcatctccaacttccctcttaaagcttgttgggagcccaaacacagccatcattgcaaaacttctatatccttcgtccccgtgaacgtatgccttatcccttgattcgtgctttccgtgtctttaaaaaagaaaaccccttttttacccctttttttccttaaaacaatcaaaacccacatttcccaaaacccccccttttaaaattttttttcccccctcttttttttttt

SEQ ID NO: 22373 - DNA, 484 bp, Glycine max
  Clone ID: PAT_MRT3847_120204C.1
ggaaaggggccaaccctcaaaccagctttttatattttaacaatgcaaggggcctttttagtccaaaacccttcttaaaaagggcctaggttttcaaaaggattacataaatttttgcttgaagaccaattgaacaacccttctaaaattattaagggggggctcaaacaacaaaaaattttatgtcccctttttaatatcggggggaatttttatgaacatctactacttggctttaacttcatgcataaaaaataaactgctttgtcccacaaaaaaaaaaaaaaacaaaacggcccttttaacaaaaggggggaatttaaatctttggggggcaaggggcccccctctggggaattaactacaaatagggggggtttggcctttcaaaattaaacatacaaaaccttgctgcaaaaaatgggacttctcatgacaaaaggctttgttttgaattattttttccaaaaggggccaaattttt

SEQ ID NO: 22374 - DNA, 455 bp, Glycine max
  Clone ID: PAT_MRT3847_120205C.1
tctgattcttaccctcattttgcctagtaatacccaaataaacaccatcattacgtacttgcgtgtacgggtgcgacttactcttgcactgctgatgttgcgaggagcccgttatattactctctgacgccctgaagatgacagggacacagattttcccacactaattcccacccggatgacacactacaaagttgatacataagcatccccggggcttgttggcaacttctaataatctcatggccagagaaacaaatacacgggtgcaccgacattgtaacaaccaccaccttagtcttggcactaagcacactagacgatggctgcttggcatgcgactgtaacatgacccgcaatggctgtggtacacccgcggaacaatcttggctctgtaaccgacgaataccatcgcgaccagctttggttgaaaacatgtgctgcatgcgggaggc

SEQ ID NO: 22375 - DNA, 785 bp, Glycine max
  Clone ID: PAT_MRT3847_120206C.1
gttctgtttgaatatatggcttcctcggacaaagccaatgccatgagaaggttccaaagaaaacgaaacctcgaaagcatctttcagttgttcaaactctttgccgtaatcttgctattctcccacttattctctttcttccccaatatcaccctccaaacattcccccatctctaccatttttttataccacttttccgcaactctttctacgcatttcttctcctaaacgccatcatcctcttactcttcgcactctccaacaaacacaacaacaacgttggtgcctccgaagacgtctaccacgaattcctcaaccacaacaagtctcgcctcatcgtaaccgcatcgcaggaccaactatctcggaccgttgattcttccgacaaaaaaatcaccactactaactttgatccatcgtcgtcaccggtatttgaggaaactgtcagggcggttactgaaacggtttcggtgtcggagaagaggtgctaccggagagttcagtcggagcgttatgagcggcggatggtggtggctccgttgcaggggcaattgcggtccgtggaacagttgagtaaagacgagttcaaccgcgcggttgaggaattcatcgctatgcataagagaatgcagaaagaagagcacataggatcgctggaaacagggtatttggcgtgcactccgtcaaattaaaataaaagcaaaaggcataatagaaattattaggggatagaggaggatattatttttcatttttcctctactattgtatagcaatgatccca

SEQ ID NO: 22376 - DNA, 181 bp, Glycine max
  Clone ID: PAT_MRT3847_120207C.1
ctctagacctgcctccttcaagactgtggctcttttctccaaaaagaaggctgcacctccatcaaaaggtgcagctgttgctcctgttaatgatgagcttgcaaagaggtatggccctcacagaaggatctccctgtctgacggactcttggaaccgataaacattccacaccacttgcac

SEQ ID NO: 22377 - DNA, 930 bp, Glycine max
  Clone ID: PAT_MRT3847_120208C.1
tgggtcatgggttctccaacatatttggaatctattgcatcctctgcggtacgagcagctattaaggtgaaggcgtctgttattattgggttcactgcttctggaagggctgcaagattgatagcaaaatatagaccaaccatgccggttctctctgttgtgatcccccgactcaagtcaaatcagctgaaatggagcttcagtggagcttttgaggctaggcaatcacttattgttagaggtctctttcccatgcttgccgatccccgacatcctgccgagtcaacaagtgccacaaacgagtctattctaaaggttgcccttgatcatggaaaagcatcaggagttataaagtcacacgaccgagtagttgtttgccagaaagttggtgatgcgtctgtggttaagattatcgagcttgaagattaagtgcattgatctaactacagtttaggcttttttgttttttggcctgcaagtttttggcagttgcagatcattttgcttccacattttgaggttatctcccccgggtttggtgactagctatattttgtgattgaaaatgaatgctaggctaactattattacaggatgtcaaacttaaaaaataatagggaatatgtttgatgccaattttttggttaaagttttccacatggagagtgtaaaaggaagtgtatacgttttatattgtagcaatagccagttgtacgacgttatacggtttggtggtatacatctaggtctagttatgagcaatattgtggtgtgctatggtttccaatgcatacgggccaagcaattcgtaattgaacatccttttatattgatctgatttacttaccggagttgacttgtttacttaccacgtgacttttgctggatatgattatgattaacatttatcctcttattatttgttttctt

SEQ ID NO: 22378 - DNA, 428 bp, Glycine max
  Clone ID: PAT_MRT3847_120209C.1
caaagcccaggctggaataacacaacagcactactctattcctgttgacaatttgggtccgtctggttaccggtctagtggttcttattcaggacagactagctatggcctatacgactacagaaatggtgctccttcaacttatccacctccatactcagtagatgaaaccacctacaggggataagttttcgtcctacgtatcctttttcttcccgttgtttactttagatgctactttcatttagtttacttcctgttttgtgatgctaaaattggaaaatataataggttcctgggaatagtacttattcaaatacatagatatatgatgccaaccgcagacaaggcaaagttcgttctttttttttttttttgaagttttgactttttctttttgaatggaattaatttccccttttcttcgc

SEQ ID NO: 22379 - DNA, 419 bp, Glycine max
  Clone ID: PAT_MRT3847_12020C.1
gctagcaaaagtaacaaattagtactcagtcacaattttctgtgcctcctcttcttccatggtgtggcgattggcccttcattagggatgaaagtgaagttacagcctctccaactgtcatgaaaaggtaatcttctcgaacgaaatcataaacttcatctgctttttgcagcttttctataacatcagctagaggattcaccaacacaagctgtcacaactcattctagttagttgcagttgagagacttaattcttatctgtcaaggtgtgtaaataaatcaagtttggcagtgatcagtattcttgcctgaacacccttcattgtaaaaggtgatttcaagtccttgaaaagtgagactccacttgagcctatggcactcacagctgaaaatctcacagatcatatcattgatata

SEQ ID NO: 22380 - DNA, 1356 bp, Glycine max
  Clone ID: PAT_MRT3847_120210C.1
gatgaagaattaaaataataacaaaggaatcttctctttctctctctctctctctctttgagttgagtttcgagttgcgccattttcacctgtcctctctctctctctctctctctgtcaccgtgttgcaagtatgaaggactgttggttttttgacaacaatttcaatggtctgtcggatgagagtcttgatgatgtgatggacatggagcttttggatttgccccttgactttgaggatgtggaaactgatgctgtggaagaacaagattgggatgctcagctcaaactccttgaagacccaccaccaccacttggagttttcccactacaacaatcctctgcattctgtggacaaactcggaatgagaatgcgaaactcggcagcaagagtttctctgcttctctagcgaagactgtcagacctgcatatggcaaaactattcctgtccagaaagtctctttaaaaggaaaagatttgctccaattccaaaccaacagcccagtttctgtttttgaaagcagtagtagttctccctcggttgagaactccaactttgagttacctgtcatcccaacaaagcgtccccgtaccaaacgccggcgtctctcaaacatcagcctgctttactctattccttttatccttacttcaccggcttttcaaaaatttcagaggatggatttctccaaatcagatatacaaacacagccttctggggaattattatgcaagttcaaaaagaagcagaggaaaaaggatattcccctgccgactaacaaaattgagatgaagagatcctcatcacaggagtcagttgcacccagaaaatgcttgcattgtgaggtgacaaagacgccgcaatggagagaaggaccaatgggtcctaagaccctatgcaatgcctgtggggttcgataccggtctggccggctctttgctgaataccggcctgcatctagccccacttttgtagcatcactgcactcaaactctcacaagaaggtcttagaaattaggaacagagccacccaggtgactgttagataaaccttcgttgaaattctctagattagtattgttttagattttattgagtgcttgtgctaaacaggattgtccttgattattgttctccttttttatggactaatcttaatcttatattgcttagctagttagcatcaaaggcggtatgtaaattgaagctcgagttttctgccctcatttcatgcctcaatgaatggatgccttttggggggttgactattttgttccaccgtgttgtcccgttgcctaattaagaggggaaacctcggaattttacttcaatccttctgtctgttcttcgcagc

SEQ ID NO: 22381 - DNA, 349 bp, Glycine max
  Clone ID: PAT_MRT3847_120211C.1
gttatggttattacggcgattcatgcatactgcttggccctgcctcgtcccgtttgatgaagaccagttctgtttttgtgaagcagcttcaagtgtcaaacgaggacaataatcaagttattctccatgccttcaacgaggagcccgagttaagctcccaaactaattggacagtgtcaaatttcttccttgatgaagcgtataaaagcaaggtaatttctttgtggttaaattaaggctccaccatgcgtatgaggtgagaagcacacactactagtagtttggatcagctacatgagatggtgatcaaaggtagaaagaagtttgaactactacaagctaaacaaac

SEQ ID NO: 22382 - DNA, 378 bp, Glycine max
  Clone ID: PAT_MRT3847_120212C.1
ccggtcgaccacgcgtccaaggacgcgtgggaaaaaaaaaaaaaaataataaacataaaaaaaaaaaaataaaaaataaatcagcgatataaaaatacaaacatacaaaaaaaatttcaaaatccaataaacatttacaaaaaacttaaaaaaaaggggggcccccccaaaggttcaaactttacttaccctttaatccaaatttcatacccttcaaaattttcccctaaattcatttcactgcccttccttttaaaacttcttcatggaaaaaccttggttttacccaatttaaaccccttccaaaaaatccccctttctccaattggcttaataccaaaaaggccccacacattttcccttcccaacattttccca

SEQ ID NO: 22383 - DNA, 2635 bp, Glycine max
  unsure (1)..(2635): unsure at all n locations
  Clone ID: PAT_MRT3847_120213C.1
ccggtcgagcacgcgtgcggcacgcgtncgnccacgcgtnncgccacgcgtnncgccacgcgtncggctcgaggactgacccagtccatgtgacttaatatgtcaatacaacaacaattaataaatcatccttccattaaagttttgccttttactgtaccatatacatttcctatagccccttgcaaagctaaattcaattattgaagccaaagaaaaagagacaagaccaaaggcagtggctgccgtggaagaaagacgaaaggtttcatcgatctctgttgaacttcaaacactgaggaagaagagccacaaaattcttccttctgcagggtgcaaggtactgcttcaatgggaaattgctggggtcctccacctcacaaccccaccccaacaactaccggtaaccttagtagtagtacaggtacaacggggacatctcaggcgatcagcagcatcagctatactactactacgactactaattcctctggaagtgggagcagctccataaatagcaagttctcagtgtcaagcggtgatcagccttatccaaatggacagatcttacctacctctaatttgaggattttcacttttgccgagttgaaggctgcaactaggaatttcaaagctgatacagtgcttggggagggaggttttggaaaagtcttcaagggttggcttgaagaaaaggccacttcaaagggtggaagcggaacagtcattgccgtcaaaaaactcaactctgaaagcttacaaggacttgaggagtggcagtccgaagtaaattttctaggacgtctttctcataccaatcttgttaagctgttgggatactgtttggaggaatcggagcttcttctggtctatgaattcatgcaaaagggcagtttggaaaatcatctatttggaaggggttctgctggtcaaccacttccttgggacatcaggcttcagatagcaattggagcagctcgtggccgcgctgtcttccgtctttcgcgtggcaatactgggtccttcagctagtcaatcccatgtgacaacgagggtgatggccacacaccgctatgcagctcccgaatctggggcctcagcgcgtcaatcccatggacaacaagggggggggcgcatacgttttgcagcaaatgcttacgggcctccgggcctcgatatctaccggccatgtgtgcgacacaaacttactttgggggtgaaaccctacctgcatgacagaagaaaattgaagggcattatggattctcgattagaaggaaaatttccatccaaagctgcattccgtatagctcagctttctatgaaatgtcttgcatctgagcccaaacatcggccatcaatgaaggacgttttggagaatttggagcgaattcaagctgccaatcccaaacatcggccatcaatgaaggaggttttggagaatttggagcgcattcaagctgccaatgagaaacctgtggagcctaaattccgttctactcatgccgccagccgtcaaggtcaccaggctgtgcaccatcgttctccacgtcaggacggtagtaattagttagtttctcttaagaaaactaatcccgttggttcgttgtgttatttgtctctccgttgaagactttgcctattgttcattatttatgtatttcttggactcagatttgtacgggtaagtcatgtattagtattgtaaagtgtaaattattatttgtgttctgttaaacaaatagtgaggtctctagtacaacattatcaggaaagtgtttgcattaaatttgacgagtctatctagatacaatgtaactgtttacatatacatatgaacctgtgaaagaaagaaacaagagtccagaaaaaatgattagttacatcagtagcttcgggtatgcacaactagcctggtaacatattcatgattgtaactgagactgggagtctgattctctgtgtgcgcctgttgtgggaagtttatttttctcgtgtactgcataaggggcaaattgttggaggtaaaagtgctgggaatagaagactacatgtgacaacttcaaatatggcgttgtatcctttcaacaatagaattttgtggtggtgtgggaatgcaagaggtttaacgaatgattcccaacttggccaaagattcaggatcatttaattcattaccattgttagttcttacggtttcaaaacagtgatgtcaaaattatgtttgaatgaatgcaacaaaattatacattagttttcttgcttcagattttaatttcataagaaataaaaaagttcgtcgtgtataatcatcaacaacaataaggaaatacccgtgtccatgcaatgaagataatgcactagagcaaaagcatggctacagaaaatattaaggtactttcttgctagttaaagatatatatggatggattcaccttatatagataacaatatataaggggaatatcctacacatttcatttgatgtttttgagcctaaattaatcacaaaattatcatatattatccttacattgtaactgctcatgtcaccaactatcactattttgggctgtgaaacaaaattgtcccgccacaatcccacaaatgagtaagtgataaannnnnctactca

SEQ ID NO: 22384 - DNA, 1822 bp, Glycine max
  Clone ID: PAT_MRT3847_120214C.1
ccacgcgtccgcttttacgtccgcccacgcgtccgccatagcgtcctgcaaagctaaattcaattattgaagccaaagaaaaagagacaagaccaaaggcaggtgtggaaggaagaagaaagctctcatcgatcggtgttcaactttaaacactcaggaagagccacaaaattcttctttctgcagggtgcaaggtacagcttcgatgggaaattgctggggttctccacctcacaacccaaccccaacaactaccggtaaccttagtacaggtacgacggggacatctcaggcgatcagcagcggtagctatactactactactacgacgactactacttcttctggaagtgggagcagctccataaatagcaagttctcagtgtcaagcggtggtcagccttatccaaatggacagatcttacctacctctaatttgaggattttcacttttgccgagttgaaggctgcaactaggaatttcaaagctgatacagtgcttggggagggaggttttggaaaagtcttcaagggttggcttgaagaaaaggccacttcaaagggtggaagcggaacagtcattgccgtcaaaaaactcaactctgaaagcttacaaggacttgaggagtggcagtccgaagtaaattttctaggacgtctttctcataccaatcttgttaagctgttgggatactgtttggaggaatcggagcttcttctggtctatgaattcatgcaaaagggcagtttggaaaatcatctatttggaaggggttctgctgttcaaccacttccttgggacatcaggcttaagatagcaattggagcagctcgtggcctcgctttcttgcatacatccgagaaagtagtgtacagagacttcaaggcctcaaatatattgcttgatggatcctataatgcaaagatatcagattttggcttggcaaaactgggtccttcagctagtcaatcccatgtgacaacaagggtgatgggcacatacggctatgcagctcctgaatatgtagccaccgggcatctatatgtaaagagtgatgtatacgggtttggagttgttttggtggaaatactaacaggcctacgagcacttgatagcaaccgtccaagtgggctacatagactaacagagtgggtgaaaccctacctgcatgacagaagaaaattgaagggcattatggatcctcgattagaaggaaaatttccatccaaagctgcatttcgtatagctcagctttctttgaaatgtcttgcatctgagcccaaacatcggccatcaatgaaggacgttttggagaatttggagcgcattcaagctgccaatgagaaacctgtggagcctaaattccgttctactcatgccgccagccgtcaaggtcaccaggctgtgcaccatcgttctccacgtcaggacggtagttattagttagttctcttaagaaaactaatcccgttggttcgttgtgttatttgtctctccgttgaagactttgcctattgttcattatttatgtatttcttggactcagatttgtacgggtaagtcatgtattagtattgttaagtgtaaattattatttgtgttctgctaaacaaatggagaggtctctagtacaacattatcaggaaagtgattgcattaaatttgacgagtctatccagatacaatgtaaaagtcatacaaactttgatcaaatactttactagaaggatgcccaagccttaaatgctaagtgtcaaaaacggaattattacgttttgtatggataaaattaatgaaaggtttacaaggaattgaaggtgc

SEQ ID NO: 22385 - DNA, 428 bp, Glycine max
  Clone ID: PAT_MRT3847_120215C.1
caggaaacagaagccatgagaaggaaattgcaggctacgaagcataaaaagtttatgctggaagatgaagttaggtaatgtttttcatgcctcaaagtagtaggtggtttttcatagtttgcagtttattgttattcataaaatggttattgactgttcatagtttgcggtttgttgttatcctcaccactgtctctcttgtaagctgcagatttttgaggcaacgttacaattacttgctaaaacaccctattctaaagcctcaaccaaagcaacaagttgtaaagccacaaaagctcaaaatccaagctcccatcatctcaaagggaaagaattacaacaagaaggagcctaacctgcgaccccaccaccctgcatctcatttgaactcaaatggaaggatttccaatgtggctgatgtcccactg

SEQ ID NO: 22386 - DNA, 329 bp, Glycine max
  Clone ID: PAT_MRT3847_120216C.1
aattcccatccttccaatattatttctatctatcaaaccaaaaacagcctatacgagatgctttgtattgagtctgctcaagtacagtataatacacttggtttcctttttctgagaataattgtactttcctcatgcatgccccctaagatggcagataaggttgaggtgttggaagcaaaggctttgtgcattcgatgtggggacaactttcatcccttacacaagttttctgaaaagcatttgagccttttggttcttgaggatgatgatgacaacaagaatatgttgttggaatgcttgcaaaccatggaggaatgtggtgggat

SEQ ID NO: 22387 - DNA, 342 bp, Glycine max
  Clone ID: PAT_MRT3847_120217C.1
agaaagaacaacctatctttatgagtttgaatttgataaagcattgtcactgacattgtaccggcactaacacgccttcctgacctggtgaacaccatgaacgtgccctgctaccccactttgactctaattgaatagtgctacatatatattaccccccattgaactcaatgatgggcagcatttacatcgcgagataaagaaacataatcccctaattctcccattcccatgaacccgcacaggacttgggtcattgaacccccccatttaaaggaaaagaccttaattaggactggataatacgttgcagaatggatatctcgatcataaacaacggga

SEQ ID NO: 22388 - DNA, 331 bp, Glycine max
  Clone ID: PAT_MRT3847_120218C.1
cagggaactgttcctttaactgaagattttgcatatgggcatgtcttctacaagttaagacagacaagtgatttgttttgtatttgagaacgcaaagtaactgtttcgatgatgggaaaagcatatctgcctgtctgcccttagagaacaagtcttgaatagatttcggtaaattaaaaatgctcttgctgatcctcttttggaatgattaataaaacattacattattgtatcttctacttcgaccgccgttgtggacaaaatttgtaataattttactttgcgttagagtctctatagtaaataattgcttaaataaattgtttatctt

SEQ ID NO: 22389 - DNA, 449 bp, Glycine max
  Clone ID: PAT_MRT3847_120219C.1
cgtctaatgtctacacggttaagtatagacacgccattctgccatagacttgtattctgccaacatattcatagaaacagtatttcttcttcccatttctagctcaaaatctcaataaaaatcatgagaattccaaaattctcaaccctttttctgcttctcatcgttctgatgtcttcaatacaagattcagattcaacctctcgtttagagagccatgtcgaattggaaaggagattatcagaaagaaaagtttcttccatgtttattcagagctattctgctattctctcctctttgaactcaaggaagagtaagttcaagcaaattcatgccgtttctcaccggctagttcctagtggaccaaatcctcttcataattgatcacatatactcacaactctagatggcatgcatataaataaattaagagttggtggttgccgcta

SEQ ID NO: 22390 - DNA, 244 bp, Glycine max
  Clone ID: PAT_MRT3847_12021C.1
caacactgcagtattgagagtcatcaatgtggttaatagggactattaggaattggacttttggaccccaaaattcaagtttgctggatctgttgggggtgattatgctacaaataacttagccggcccagtggtttggccaggaagcctaatttctgctgatcctattggatggaaaatgcctaccggtacagaacctttaaaaggggcaattcccacaaaccctgcttttggtaattttttg

SEQ ID NO: 22391 - DNA, 389 bp, Glycine max
  Clone ID: PAT_MRT3847_120220C.1
tgaagtgtgaaatctccatctaacagtttaatttgaatgtgttttaagtttgattaattacaactaagtaatagttagaagttggaatttaggatataggtttttctttgtacactaacacatttgtttggtgaatataaagaaagcgaatgagaatctgtcaatggatttgtataattaatatagatctaacagatttgttttaacttctttgaggggaaaatttgtagtagcggtagagaaaggggcttgtggaatttgcaatgtaattttttttttataatgttcagtttgctgttggtggaattgctgaaaggaaatttgctataagaaagttgttattggcacttgtgttgttattgtcaaggcgtgtgtgattggaacttttt

SEQ ID NO: 22392 - DNA, 280 bp, Glycine max
  Clone ID: PAT_MRT3847_120221C.1
ggacatctttgaagattttgcaacaaaacctaacctctgtgtatagaacagaaatggaaacctctttccgttttattaacaaaactgggagtagaatttataggttgtactatataaagggcggaccccaagttcttgaagcaggtaatatggtacaacaaattcggaacctaagttttttaaggagatatttgggctaaaaaataaggcatagcccaagaaaccacccgtggagaaaaaattaagcgggaactaggtggtttctagcaaaaattatttc

SEQ ID NO: 22393 - DNA, 302 bp, Glycine max
  Clone ID: PAT_MRT3847_120222C.1
ggctcgaggagcaaaatgcgcgtggatcagaaccatactattagttaacacgattaagaagaagtagtataatgggtcaattagatccattttcatgcatgctgatagcctagattggtttttaaaggtttagggtgtctttggagccatgggtgatggcttcaccacccctatctcggtgtacatcatgagcggaatcgtgaacaatgttggaggtgttttaaaaatgacaccaaggactttcatccacaacgtcaataagtattcactggcgttgacatacttggcttgcgcatgctttt

SEQ ID NO: 22394 - DNA, 137 bp, Glycine max
  Clone ID: PAT_MRT3847_120223C.1
aatttctctctgtctcgtttacacatctctccaacctttcactttcgtttctcagttttattcgaatccctctctgaatctgctttccaaatggccagcgctgaggttgcacagtaagcacaaacaacagttccaga

SEQ ID NO: 22395 - DNA, 552 bp, Glycine max
  Clone ID: PAT_MRT3847_120224C.1
ggctcgaggaaaaaaccaacaaaaaagatctagtcctagaatccaacaggggcgacctcacctgcaagaacacatagccatgtcaagaaacttgcttcttgttctttttgcagtagccaccttcctccatggctcagaagcacaaaccagacacgtggtaggtgatgccacgggctggatcatccctcccggcggcgccgccacctacaccacctgggcttgcaacaaaacattcaccgtaggcgacactctcgtgtttaacttcaccaccggccaacacgacgtggccaaggtaacgaaatcagcctacgacgcgtgcaacggcgggaacgccgttttgaccctgacctgcggtccagccaccgtaaccctgaacgaaacaggggaacaatactacatttgctcctttggatcacactgttccggcggtcagaagctggcaattaacgttaacagagcttcttctagcactccttgccctgctcctgaagcacaagcaccagcaccagaagccactagccccatttctccaccaagggtctacaccagcac

SEQ ID NO: 22396 - DNA, 485 bp, Glycine max
  Clone ID: PAT_MRT3847_120225C.1
ggggagcattatcttttctttcaggcaccactaaattgatcacgggtgaaaccatcacatattaaaacattaccaacactattagaaaatatactttttacatcggttatttatgactttctatatcggtttttaactgatgttaaaagtattatcattaacatcggttttttaaaatcgatgttaacgtaaaattgacaacatcggttataaaataagaattatacaaaaaaaatgtatgaatgttgatagttcacatcgatttttatacaaagctgatgttaacttatacattaacatcggtttttataaaaaccgatattaacttatatgttaacatcggttctgtataaaaaccgatgttaacttccaaacatttgtggaagcaatgccttccaaggttattttgatgatgccaaagaatcaagagtcaagcaaattccaaagattcaagaatcaagttttcaagaatcaagtttcaagaa

SEQ ID NO: 22397 - DNA, 967 bp, Glycine max
  Clone ID: PAT_MRT3847_120226C.1
gcgatttgttaaaaccaacaaaaaagatctagtcctagaatccaacaggggcgacctcacctccaagaacacatagccatgtcaagaaacttgcttcttgttctttttgcagtagccaccttcctccatggctcagaagcacaactccttcccctgctcctgaagcacaagcaccagcaccaaaagccactagccccatttctccaccaaggtctacaccagcacctggcccttcctctggatcagttacttacactgttggagagactgcaggctggattgttcctggcaacgcttccttttacccagcttgggcctctgccaaaaacttcaaggttggagacatcctagttttcaactacccatcaaatgcacacaacgtagaggaggtgacaaaggccaactacgattcttgcagctcagcctctcctatcgccactttcaccactccaccggccagagtcccccttagcaaatccggtgaacattactacatctgtggaattccggggcactgtttgggaggacaaaagctttccatcaacgtcaccggcggcagcaccgccaccgcccccaccactccttctagcccttctccatcaggtgctgtcagtcctcccccacagaactctgctgctgcatctctcggtcttgttggagtatccgccacccttctttcagttgccgcggcttttttctattattctatttattaggattcttcgctctttgatttatctttagtgaattcagtttttctttttcttttgtttttgagggtgacaataaagttagcttctatttcatctcccttcatcggctacagttttctgtactgtattctagtacatacatttggaattgagatatatatttgtgtggtgaacaaattcgcaacgcctttcgcaatcaaaaaaaaattggagacctttgggtttgattatttaattattacggacgaggtttg

SEQ ID NO: 22398 - DNA, 1223 bp, Glycine max
  Clone ID: PAT_MRT3847_120227C.1
gtccaagttcttacccataaggagaacaagaagaaaaaaccaacaaaaaagatctagtcctagaatccaacaggggcgacctcacctccaagaacacatagccatgtcaagaaacttgcttcttgttctttttgcagtagccaccttcctccatggctcagaagcacaaaccagacacgtggtaggtgatgccacgggctggatcatccctcccggcggcgccgccacctacaccacctgggcttccaacaaaacattcaccgtaggcgacactctcggtaaacaaaaactttcactagtattctaactggaaaacttttttatgaattggcttaattaatcatggttatattttatgttgtattgcatgtgctgcctgtagacttaaaagttttggatttctttccttttttttttttttttttttttttgcagtgtttaacttcaccaccggccaacacgacgtggccaaggtaacgaaatcagcctacgacgcgtgcaacggcgggaacgccgttttgaccctgacctccggtccagccaccgtaaccctgaacgaaacaggggaacaatactacatttgctcctttggatcacactgttccggcggtcagaagctggcaattaacgttaacagagcttcttctagcactccttcccctgctcctgaagcacaagcaccagcaccaaaagccactagccccatttctccaccaaggtctacaccagcacctggcccttcctctggatcagttacttacactgttggagagactgcaggctggattgttcctggcaacgcttccttttacccagcttgggcctctgccaaaaacttcaaggttggagacatcctagttttcaactacccatcaaatgcacacaacgtagaggaggtgacaaaggccaactacgattcttgcagctcagcctctcctatcgccactttgaccactccaccggccagagtcccccttagcaaatccggtgaacattactacatctgtggaattccggggcactgtttgggaggacaaaagctttccatcaacgtcaccggcggcagcaccggcaccggccccaccactccttctagcccttcttcatcaggtgctgtcagtcctcccccacagaactctgctgctgcatctctcgggcttgttggagtatccgccacccttttttcagttgcccgcgcttttttctattattctatttattag

SEQ ID NO: 22399 - DNA, 277 bp, Glycine max
  unsure (1)..(277): unsure at all n locations
  Clone ID: PAT_MRT3847_120228C.1
tcatctncttntaacttcaaaaaattactcctcttctcaacacctcggtgtgttgcaatatctaaaacaccccactttttctctcaaccttcaaatcccaacaaagcttcttcaactcttcctcttcctattctttgacttaaaacaaaacaaattctccaaccatctcacaaactcacattttcaatttgtaaatcaaatactaaaaccaccctccatgctctcctctctgcttcatatcatcttttatcatcccccacttacattcaaaaattat

SEQ ID NO: 22400 - DNA, 373 bp, Glycine max
  unsure (1)..(373): unsure at all n locations
  Clone ID: PAT_MRT3847_120229C.1
ctaaccaatcctgacactacttcttttacactttctctatcatcatcatttaagaatgccgccgaaattataaccattccagatcgtatacagtcttcttacacttaaacaataggtagagtgtatatggcggcgagataattcgcccctaacatccgatacataggtctctgccccaaaaacatccgagaaaatatcgtcaaagaaaccgtcatagactggaacggactacctattaccgtcaagatcaccgtgcataaccgtcaggccaaagtcactgtggttctatccgacagcgngctcgttataaaggccctaaatgaacccgagcgtgaccgctagaaatctaaaaacatcaagcacatcggctaca

SEQ ID NO: 22401 - DNA, 595 bp, Glycine max
  Clone ID: PAT_MRT3847_12022C.1
cattaagtaagcgtatgaaatggtaatatttgatcaaagccatgagaggcagggtaggttaacgacaacacgttcagtggtccaagaaattgatgcaacaggccttgattctaaatgaaggaagaaaaaaaaggtagtaaattgcagaatggagtacaaagtgagactatgatattcactgctagtgctcagtaggtaaaagctctctctctatccttttactttgcgttggatctacgggacgagatagcaacatatatccgcacagattcatttctctcccgtcgtctgatttttcttattggtattttaccctagggtgcatgacaagttgacaacctctgttgagatggtataaaagaatgaggatcaacatgagtaaaagtatacaatttagcaaatggattggttttagtcttttagaccaatttttgttatcaagatgattggatgagtgttttccatatgttggatttcttgaagggttggaaaaatatcgggactagtttaatttgtatttaataaaaacaagaaatctttctctgtcgtttattaaatttgtatacaataagtgacgagtggggtatgcgtttga

SEQ ID NO: 22402 - DNA, 280 bp, Glycine max
  Clone ID: PAT_MRT3847_120230C.1
ccgcctgactagtcgtgggcgcccgtctctatcacgataggctgcgttgctttacataaaacctataagcttctcaccgtctcactacgaatcaatgcgggcatatacatatgcataacggtattgataacgacatgggttgcacattaaggtgtcaaggggaataaagatgctggagacgccccagaactgacctcacaagggggagcagccccggctagcaaggtgcacccgggctttgggcttgtgaactactgggcttatacacatattcctctta

SEQ ID NO: 22403 - DNA, 427 bp, Glycine max
  Clone ID: PAT_MRT3847_120231C.1
ccctcgagccgaatcggctcgagcactcccacctgacttattcaaaaactgtttttcttctatctcttgaggcattattgttataaactctatattgtcatggtcactgtagtcaatcagcctatcactgttacaattccttaactaatcttgctttgcagttttgggctctaactgttgcacctgttctaaaagcaatagcaccattgtatttgaaaaacatgaatttcaaaaatggtacaaccagatcataataccatgcttgcttccaatgctcaaatccaaaagatggattattattctcagcaagtgtaccacatttctttttaatctttgcctgtgtttatctttttttctaatagaagtaaagtactaatctctaattccttgatgctcgataaaccagtaagtggtaactctgttttaa

SEQ ID NO: 22404 - DNA, 252 bp, Glycine max
  Clone ID: PAT_MRT3847_120232C.1
ctggaaaatactgtggtttgtggtggcacttcttctatgacaggttttgacgagagatatcagaaggtatctagcttcggttcgtctgctgttcaacctaccctcgttatgcctccagcatacatgccagaaaatgtagtcctgtattctgcatgagttggaggtgtccatagttggcaaagtggtattccctcataatcagcatatgcccgacgcagactatgtggaaaccggagcttccattgttcatcg

SEQ ID NO: 22405 - DNA, 390 bp, Glycine max
  Clone ID: PAT_MRT3847_120233C.1
gaagattaaggccattatatataatattttgtttacagcttcctgaatcagtgacaagcatgctagttccctttatgctgtccaaaaacatgtcattttccccccccttggtctgacagaagatttttcggtgaatgagattctagcatggaaagaaggaattagaaaagcctcaagtgaagtgtacttgcatcttgttcttggaaaatttcagttgaatatggggactccaagaggaatagctcttctcagtttcacatccttcttgttttggagctcagcgaatgctttgctttctcctaagggagtgaactttgaagtgcaagctttaatgggcataaaatattctctagaggattcacatggtgttctagataattgggatgggga

SEQ ID NO: 22406 - DNA, 463 bp, Glycine max
  unsure (1)..(463): unsure at all n locations
  Clone ID: PAT_MRT3847_120234C.1
tcgacgcgtgcgaggacgcgtgggaattgattacttccaccaccacaccatcaccaaaacactaacctttatttaataatcgccccaccaattgtggctatagcaaaggaaacaacatcggtgccttggcaggccagagagcaggccccggtttgcggacatgttctctgacaaatactttttctctcaattctgagcagaaaacttatagccttgtctgaggataactctcttcatcggacacaacagacaagaaccagagcatgaagaacgagtgtttgtttgagcggctatatcaggtgccgaatatggataggagcgggcaaataccatcgtatgggaactgcgattacgcgaacgagtagtcaatcactcagtacttacagagtgcgagacnagctggcatagtttgctacagttactgctacggcgaaagtgacgcttacgtgcgtgcagatcgaga

SEQ ID NO: 22407 - DNA, 136 bp, Glycine max
  unsure (1)..(136): unsure at all n locations
  Clone ID: PAT_MRT3847_120235C.1
cagaaanatgcangcagcntagtaagctcggaattnngctcgaggagnttgatgatctaactgncggnggtntcattaanggntatngtatagcnggnagctnncnacaacatatggnntntnagacgataccgtg

SEQ ID NO: 22408 - DNA, 123 bp, Glycine max
  Clone ID: PAT_MRT3847_120236C.1
ctcagggaccttccaccccatcaaggttctctagtgatcttcgtctttggggaatctgttttcatctactttctctaattaagacaagcttcgcagtgaaacctactgctgcttcaccaattt

SEQ ID NO: 22409 - DNA, 330 bp, Glycine max
  Clone ID: PAT_MRT3847_120237C.1
ctcaccattatacactaagaacgctagattgtgatcagagattgtgaattaaatttgtgctattcttacaaggtgtgatacactagtgttgaggggggggcatgtactttatcttgcatttgtttaccaatctacaccgtaccttatgaacgtgtaaactaatatctgagtcactcatgttctggcatcttgtttgtctactgatcttgcttatgtacagaggaattctatccacatttatacaatatggcgttattttgaccaacaaacaaaaaaataagggcggatatccactactgtgctcgcttacctagaaattaattccggacc

SEQ ID NO: 22410 - DNA, 468 bp, Glycine max
  Clone ID: PAT_MRT3847_120238C.1
ggctcgaggcacctatgaggcaagtgcgtgtgctttctcattttgatgtctattatgcatgcaatgacaatcacaagcagatgggggaaacactttttctcaaaaagctcaccttcacaacggggactcttactttgcttactcgctttctcttgaaccatgtcatggctagtgctcacactgttggtgaccaagaagaatggagtagccgaacaaattatgctttatgggccgagagatacaatcatagccacagcgatgttcttggtttcatagtacgtgaaagggcaacatgaagtttatgaagtgacagaagacgcattcctatcgcttaatacagctaatgatggagagaaatttccacccatacagtggagaagatcaactggcactcaacgaggtgaaaagaaatttggtcatttgcaacatagcaaggccctctcttgcaggcatgaggttggtaattga

SEQ ID NO: 22411 - DNA, 292 bp, Glycine max
  unsure (1)..(292): unsure at all n locations
  Clone ID: PAT_MRT3847_120239C.1
cccacgcgtccgttttcatatagccgtttgtacntgacatacgaggntaacgttntggcagttggtgtcatgctctagaaagagatctggttcctaaatttcaggggtggcttgacttgggaattctaaaaacaagttccctcatctttcaaaatttaatcccaggtcttaattggtaaagggccttaactagtcaaatggggggctaaacccttttcaaaaaggttaccaaaagctttttccccctaaaaaaaaggaaagtggaaaaaaaatttgataccccctttgtttt

SEQ ID NO: 22412 - DNA, 422 bp, Glycine max
  Clone ID: PAT_MRT3847_12023C.1
gaaccagaacgaattcaccagagctaaacaggcaaaaaaacgggggggaaggggcaatttaaaacaagcggaaaaacgaattaaagagaaaggggaacaactaaaaaaggacacgaagcttaaataagaaaaagaagaaaataataaaaggacgcaggcaggggaaaactaggacaggaaacaagcccaaagataagggaaaagggaaggaaaaccccaagcagggataatgaagggccaggggagagaccagtaaaacaaaggcatttaaaacttaggaaacacggagacaccggtgccgtatgcaagattatcagaaccaaaggggggcccacaagaaaggggcgctggaaaaccccaagcaaaagggagcctgaacccgggcaaggcaccagaacctgcaaaaggacagggaaaaggga

SEQ ID NO: 22413 - DNA, 426 bp, Glycine max
  Clone ID: PAT_MRT3847_120240C.1
tttgcgaaccaacaatcgcggagatggtctgctgactgctatacgtaaagaatgtctaagagttatggattataaagagttgcttttaaacgattgtggcgatcgcgttgctcagttgttacatgttcagtcagctaccccctttgtacaaaacccaaaaggcagtgttcctcaagagtttctgattgtgaacacccacctgttatttcctcatgattcaagtctttgtgtagtgagattgaatcaggtttaccagatattgcaatatgtggaattgtatcagagagaaaacaggctcaaacccatgcctattatactctgtggtgactggaatggaagcaagcgtgggcatgtttacaagttcctaaggtcacaggggtttgtatcatcatatgacattgctaatcaatacagtgacagttatgc

SEQ ID NO: 22414 - DNA, 160 bp, Glycine max
  unsure (1)..(160): unsure at all n locations
  Clone ID: PAT_MRT3847_120241C.1
acacaaagtgtctcaaattcncnttaaancctccctccccgaaaagganntcgttcgangtggannaggaagaggatgcgttcgagcanacncctcttggtggtncgccaagtgtcggtgtacaagatcccgncgngnagcanctncggnggntanaaat

SEQ ID NO: 22415 - DNA, 2192 bp, Glycine max
  Clone ID: PAT_MRT3847_120242C.1
ggggcctagaactaaaagagttgcgagcgggttgaaacgaaacttatcttgggaagctgcaacgagcgaagagcagagaaatggtggttgggcagcttgttccttcgaatttgttcctgaatcgttctgctgcgaccagacacagacaccttctttgtgtttctgcaaatgacacaacctcaaccaataacacggataacggttctccattctcaagtttcggaagactcaaggcccagaaagtgaagactctcctggtccacagaagaggaaaggaccaaagccatagacgccccgttcaccttgaagatgatgatgattatgtagccacccctagaccccgacgctctcagtctcgtacacgaggaggagaaagatgggatatgattcccaattatactccaccggcacaaagcaaatcggtgagcgacaccaagtttttcagcctcaagtcctttaaagaaatagggtgcagtgagtatatgattgaatccctccaaaaactcttgtttagccggccttcccatgtacaggccatggcattcacacctgttattagtggaaagacttgtgtcattgctgaccagagtggttctggtaagacatttgcttatctggctcctatcattcagcgccttagacaacaagagcttgaaggacttattagtaaatcctcttcacaagctcctagtcctagagtccttgttcttgcaccaactgctgagttggcttctcaggtcttagataattgtcgctccttgtctaaatctggagttccattcaagtctatggttgtcaccggtggttttcgccaaaaaactcaattggaaaatttacagcagggagttgatgtcttaatagctacacctggccgtttcttgttcctcatccatgaaggcttcttgcagttaacaaatctaagatgtgctatcttggatgaggtagatatactctttggtgatgaggacttcgaagtggctcttcaatccttgatcaattcttcacctgtagacacacagtatttatttgtgactgcaactttaccaaaaaatgtttacaccaaattggaattggttgaagtttttcctgattgtgaaatgattatggggcctggcatgcaccgaataagttctcgccttcaagagattatagtagattgcagtggagaagatggacaagaaaaaactcctgatacagcatttttgaacaagaaaactgcacttctgcagcttgtggaggaaagtcctgtcccaagaactattgtgttctgcaacaaaattgaaacctgcagaaaagttgaaaatttattaaagcgttttgatagaaaaggaaattgcgtgcaagttctaccattccatgctgccatgacacaagaatcacggcttgctagtatggaagagtttacacgttctccatcaaaaggagtctcccagtttatggtttgcaccgacagagcatcacggggaatagattttgcaagagtggatcatgtcatactctttgacttcccacgtgatccaagtgaatatgtacgacgggttggaagaacagccagaggtgccaagggagtgggcaaggcatttatctttgtggttggcaagcaagtatcccttgcacgcaaaataatggaaagaaatcagaagggtcacccactacatgatgtgccttcggcttattagctggtgaagtagaaagttgagttagtacttggagaggttgctctcaactcgactgctgaaacatactgtattaatttgagtgagctagcagctgcttaactacttctctcatcccaaaccaccttattaagagcaacttgctgatccatagttggcttattagtaacattcgcagaaggtgatttgcactttgcaacacatgttgtagcaaaagcatgacttacattaattatctacttctttaaagtatgaaatggaagattgactgttaaaaaagctagttattaggtgcattttttactctaaacacgggtatctaaagatccactagtataccatcatcattttagttcttgaacggtacttattagccaacaaattgtagtattaataatctttttttatattagaagttagaaaacagaagcggttctcattctttccaccagatattattcatgttctctattttctctcatatgaatgtaccttttacaatttaaaaaaaaaaaa

SEQ ID NO: 22416 - DNA, 567 bp, Glycine max
  Clone ID: PAT_MRT3847_120243C.1
attccatgctgccatgacacaagaatcacggcttgctagtatggaagagtttacccgttctccatcaaaaggagtctcccagtttatggtttgcaccgacagagcatcacggggaatagacttcacaagagtggatcatgtcatactctttgacttcccacgtgatcccagtgaatatgtacggcgtgttggaagaacagccagaggtgccaagggagtaggcaaggcatttatctttgtggttggcaagcaagtatcccttgcacgcaaaataatggaaagaaatcagaagggtcacccactacatgatgtgccttcggcttattagccggtgaagtagaaagttgagtgagtgcttactctcaactcgaatgctgaaacatattgagtgagctagcagctgcttaaccacttctctcttcccaaaccaccttattcagatccatagttggcttattagtaacatacgcagaaggtggtttgcactttgcaacacttgtagcaaaagcatgacctacattaattatctactttcaagtatgaaatggaagattgacttaaaacccc

SEQ ID NO: 22417 - DNA, 256 bp, Glycine max
  Clone ID: PAT_MRT3847_120244C.1
aacccttcgcttcctactcctccaccttttccaagttcaattcagtcaatggtttgggcgaaatgggtcgctatgcagcagcagcggcagcttctctgatatggtcaacgacgttgctcttgttgttattgggcctagtagtagggaccaaagcgacgtcgtacaggaggaacgcgtactcgacgatgatgtacgttgggacgcccagggactacggattctacgttgccgttcgcgtccttctaaaatctctctc

SEQ ID NO: 22418 - DNA, 270 bp, Glycine max
  unsure (1)..(270): unsure at all n locations
  Clone ID: PAT_MRT3847_120245C.1
ataangtnttgannncgttnncanatcccatngaaaagcgttaccctgttgctanaagaagctcnaagcggaagcttcgaagcagatctaaccgaanncccagacacataccaaggcgtcaaanatctctgcaaagattctcaaacaggtttctctcctcaactccgctgctattccgttcactgcgttggantgtgctaccgtnaagagcgctgtccactccctctctgtactcgccgcaaatgagganttgtggatatatactgaatg

SEQ ID NO: 22419 - DNA, 252 bp, Glycine max
  Clone ID: PAT_MRT3847_120246C.1
ccatcttttaatatttctataattcaacttgaaactataaaagaaaaacacaacgaaatgagtatagatcctgatctgattacaaagatattaacaaacactgaatgagaggacacaataacacatatctggggaggaacaaatatcaaatagaaaaaaggaaataggggggatataaaacggatacctatacaaccacacagtcactcaaagaaaagctgaaagatagctcaaagataattatatcacttt

SEQ ID NO: 22420 - DNA, 195 bp, Glycine max
  unsure (1)..(195): unsure at all n locations
  Clone ID: PAT_MRT3847_120247C.1
cacaagttgaaaattgcggctctcgaggccgtcaacanataccatgcaccctacaattggtgcccctacggcggtccccttttagactgccaatgtgatgtctttaaaagctcctacctggaataccacaatttgaaacccagcttgctctccgtcctaaccatcctcgtcgccttcatacgcctctgcaagggc

SEQ ID NO: 22421 - DNA, 371 bp, Glycine max
  Clone ID: PAT_MRT3847_120248C.1
ggggagcgagaaaatactcaaaaactctttataatttttttcatcaccaaaaactaatcaccgcggtggtctttaataaatgccgaggattttttctctttcaactttaaacttttgacaaattaacagcaacaacaattactttagttacttcatacttcttcatacttcttaacttcctaatacccttaaaattacatcttgacactctcattatcacataaaccctactcccttttatcatataattttcacaatgtatcttttgaaaaattatttttttccctcaaatattttttaaccttcacataattcttaaaaaaaacatattttttaattccatattctatttacaaccccataaaacactt

SEQ ID NO: 22422 - DNA, 435 bp, Glycine max
  Clone ID: PAT_MRT3847_120249C.1
acgagcacaagtatctctcttaggttcttcttgttctttacattaccccagttttgcttaaaaatttgattttgatgttctaggaaggtttgttaatgaaaccaagtgattcccatttgcttggtagttaaacggttggttactttttacaaatcctgcattggaaatttattattagaaaagtggaagaattgatctgctgagtgaggaatttgggcttgtgatttttgagaaaccaagtttgtgtaggaatgaatttgcttccccccacgttgcggttttgactttgtctgtgaaaagaatccagctttaaactcaatgatgcataccaggaggactaaataacacttcgtctgtaggaattggttttccatcatacataattctggaaattatgaactttgataattgtatatcagtgtactggcttgatta

SEQ ID NO: 22423 - DNA, 320 bp, Glycine max
  Clone ID: PAT_MRT3847_12024C.1
gcgcagcctttttttttattgtaacccacactataccacaggacaggagacctatgaatcaccttaatttggccatcatgccacaccaactttgtcaagaggtttaattgcactagaatcacacaccgctggactaagacaatgcagatatttatcttacatatgatacattgcatggtaggtccgactcacaatgatcaatgatttcactggaggaccaccgaggacggaattcaaggaacatcctccacctggggcacacagaaccttggtagatgtgcgatcctgcacccaatacagagcatcagactatgaacaat

SEQ ID NO: 22424 - DNA, 322 bp, Glycine max
  unsure (1)..(322): unsure at all n locations
  Clone ID: PAT_MRT3847_120250C.1
tttttctttttaggtaccacctnttcattgattgataataaaaaagcaaattttactttaattttaaattcaacaaaacacactattgtaattcttaaatggtcctcattataagttgtatcttaaacccttctactaacataacatgtccactttattttttttcctttttcttatttgtctggaattcatacttaacttcgtattcttttttgttcaaaatttttggatactcatttttcaacttatacgcttcaacctcgttttttcttctagggtcatcaatcactctatcctcctcctccacagttaattccttcca

SEQ ID NO: 22425 - DNA, 817 bp, Glycine max
  Clone ID: PAT_MRT3847_120251C.1
tgccattgaatgtccacaatactatgtggtgtggaatatgaacatgaacacccacatctatccggaattcgttgttagctttaaagtctcgtctgacgctgaaggtcatttttgtggaagtgagggtaagaatgtttctggggttaatacagcctgtgacggtcctcatggcttgttaaattcagaatcttctactgtagataatggaaaagctcctagtatggtttctagcaccccaaaagttccaaaatccccttggatgccttttcctgtgcttcttgatgctatcagagatcaggttcctcccacgggtatggatgtaatcaaaacatattatgaacaattcaggtctaagcatatatcccgggatgattttgtgaagatgctgaggttaatagttggagatggtctgttgagaactacaataacaaatcttcagtataagataccttccggtggtgaattgaaagactcaatcaagaaagaagactgaggctgtatttctgtgaggaggtggagatctttatccttggagtcaattaatgtcaactgtttgctggataaatcaaaactatcttttttcatttccttttgtcatctatatttggacttgagacatacatgcaactagaactacattatagagtttagtttgaactgtttgtgattaggtgacctgtcaatcaaccctcttgtttatgttgggtttttatgataaaaaccagaatttggatattccattttttttttcactctaattttcaaaatgaaatcactttgtattgtaaatttgatatattgaacttcttgttgtggt

SEQ ID NO: 22426 - DNA, 237 bp, Glycine max
  Clone ID: PAT_MRT3847_120252C.1
agaagtcctcagtccatataactttttatacatgcacacactgctaggtacacgaatcactggtacaggagctactcaaacattttggaccccttcgggatatggcacttacacattcatgtgaaccaccttagacagtggcacggatatcatttaaatgatgcagtaacggaaacttacccagggcaaggattaccccggtttaggatggaacaagtccagcaagccgatttccct

SEQ ID NO: 22427 - DNA, 2834 bp, Glycine max
  Clone ID: PAT_MRT3847_120253C.1
aaaatatattatgaacaattcacgtcaaagcatatattttgattacatccatacccttgggaggaacgcggatgtgtgatagcatgagggggcaggggaaaaggccttccattttcactgttttttctgcggtgttattttgtcctgaccctccttcttctgtcctttttcaggcgtgttttttacctaaccctacaattcgccgatccttccagttagggttttttcgcaacgcctccattatcagtcctttttcaggcgtggtttttacctaaccctacaattcgccgatccttccagttggggtttttcgctttcagcgaaaagcggtgtatatagaaaccctattccccctatgcaccaggggaattgaatatataaataagaaaaaggcaaaaaaaaaagaggtggaaaaagttgtatgttaaataggtaattctgttgttttgcgtgtttctggactcaggagctgagctgttcccggggaaaagcatgtacagtatgaacactaaatgcagtgctggggattgccaattattctggatgtcatggtcttcaccattgccaccacagtttctttgaaactgctcaaggtctagggttctatttaacttctgcacctgagcttttatatttaagagtgtttatagatattgggctagttgatagaaatggaagcaaaaatcgcaaaggcattggatagggttgcactcaatctgaagcgcaagcgagcgacccgatatgctgcacatttaagtggagcttcacaaccaatgttagggcattggtcatcttttacgtcacaaacaagcagggctgtcaaacgcatgagattgggtggatatagaaacaggctgacaaatgctggtcctcatattggacggtccttagctaggcgttttttgaattataaaaagagtgggagactggagcgtttgatgttctatgagaatggggaatggttggactttccaaaggatgttgttgacttggttaagaaggatcttgaagtcaagaaggcagctgtggagatagaatcaaatgggtatcatcttttgtttgattttttacatctgcataaggtggaccttaaaactggcttgcaacaacctatagctttgattgatgaggcagggtgctgttttttccccgaaatctatgctgcttctgatgaaaaaccttataatttgagcaaacaggaatgtggaagaagtccggactcatatgcatctaatgaaataaaattacatttagaagttgaaataaatggtgtggatcaatccaggttgagtgagtgcagtggggagtccaatgctctagttaagggtattcaaattgatactaaacaaaactgctgtcaatatgatgtagaagttgaagatagcattaacaaaaaggactgtggaaatgttggtgaagacattcagcaacatcaagacataggtttagatgcttatactgaatcagtatatggaaaattggatctgaattctgtacaaaagatgtttcttaagggaatgtgtagttttggcagtactgattctgacatagttgagatttaccactgctcaggtgcgtcaatgcaagcacgatgggagctgttccagaagcaagctgaaattaccaaaaagaatcatggggaagctaacattcggtatgcttggcttgcttcttctaaaggagaactatctacaatgatgaactatggacttagtcattatggactatctggatcaaagtgcacatatggcattggtgttcatcttgctgctgttacttgccctgatgccagtgtgcgttattgtgatgttgacgaaaatggggttcgacacttggccctttgtcgcgtaataatggggaacatggagattctccagcctggcactgatcagtttcatcccagtagttgtgaatatgataatggggtagattccattgaatgtccacgatactatgtggtgtggaatatgaacatgaacacccacatctatccggaattcgttgttagcttcaaagtctcatctgatgctgaaggtcatttttgtggaagtgagggtaagaatgtttctggggttaattcagcctgtcagggtcctcatggcttgttacattcagaatcttctacagtagataatggaaaagctcctagtatggttgctagcaccccaaaagttccaaaatccccttggatgccttttcctttgcttcttgatgctatcagaaatcaggttcctcccaagggtatggatgtaatcaaaatatattatgaacaattcaggtcaaagcatatatcgcgggatgattttgtgaagatgctgaggttaatagttggagatggtctgttgagaactacaataacaaatcttcagttcaagataccttccggtggtgaattgaaaggctcaatcaagaaggaagtctgaggctgtatttctgtgaggtggagatctttctccttggagtcaattaatgtcaactttttgctggataaatcaaaatgaagttgtgatattgttatctcttaggcaaactatctttttcatttccttttgccatctttatttggacttgagacatacatgcaactagaactatattagagtttagtttgaactgttcgtgatcaggtgacctgtcaatcaatcctcttgtttatgttggattttatagtaaaaacctgaatttggatattccttttttttccactctaattttcaaaatgaaatcactttgtattgttattgattggtaaaaaaaaaaaaaaaaaaaaaaaaaaaaaaaaaaaaagaaaaaaaataaataactaaaaaaaaaaatatataaagaaaaataaa

SEQ ID NO: 22428 - DNA, 367 bp, Glycine max
  Clone ID: PAT_MRT3847_120254C.1
gtggcctcgcaagaagaacatgatcctatcgaagctgccctggctatcggggccctacgaacagatggtgtagttgatgcggatagtgtacccttgagaccacgactaggagctcaccatcgaggagaggatcctcctctccgttccgtacaataacgttatcagagcgcgccgcgcctcgtggcgcatcatcttctcgatctagcacaaggaggagagccgcggtcactaggaccacctcttcctcatcctctactaccgattcaagatctattcctatctctgcaacatatgccaccgtatgctcaaactccttcactgctttctgataccatccacttcctccggctacttcaaagtcttatac

SEQ ID NO: 22429 - DNA, 111 bp, Glycine max
  Clone ID: PAT_MRT3847_120255C.1
ctttcaaagtgattccaactcatactcaatgagtcaattcttaatattgactatggagttaatgctttacaagcaactgctgtttacaatgtctcatacattgcttataaa

SEQ ID NO: 22430 - DNA, 561 bp, Glycine max
  Clone ID: PAT_MRT3847_120256C.1
attaattataagctcaagttgcagaacaacttaatacatgtcatatttgaacttaaaaacaaattcacgaaataaaaatcccaatccacgattctttaacaaaataacataaaatggatgacacatgcaagaccatcataattgcttcttacaactttaggtgccacaaggtctactttctgttaagggataactccaaacggcttctaggggatctaacacggatatttgaacagagttataaatcctttggtgttataaaggatttttatagatgaaaagataccactttagccattccacaactgtacaattgactcaacaacaaactgttgaggggtaaaaacggattccacgctcttggcaaaggcgtagccggcgtgctattgaatcacgccagagccaccaacaaagggcaacttgcttattgagactccgtaggggattcctacaaagtatgctaaacgagcttccaccataagctgattctgtgaaagcgaaattggtgagcatgaacatcctaagggcctgaagagaggccaagccaaacagtccctgggc

SEQ ID NO: 22431 - DNA, 285 bp, Glycine max
  unsure (1)..(285): unsure at all n locations
  Clone ID: PAT_MRT3847_120257C.1
cnacaaacaaaccctttccttctcttcctctctccctgcatccatataaaataacatcacttggttgttctgttccaatccaagaagtatggaagagtctgaggggagtggaagtgggaataatcagagttacagccgcagctgcagcagctgtggatcagcaatcagcaacatggctcaagactacctctttactattctcctcctcctccccatagatgcaatcctctccctatccatgacttgcaagagattcagggctctcagttcctcacacacactatg

SEQ ID NO: 22432 - DNA, 292 bp, Glycine max
  Clone ID: PAT_MRT3847_120258C.1
ctcacaatgtcctgtctggtgacacataaagtactctcagaccagacttgcttgattactgcacataaactctcttctaaggacagaaccttgtactgtggttggcaatctacagatgtttcggtgaaaggagcgacaagggcctgatcactaagctataactctccttacaccaacatggacaaggactagaagaggcccctctggcgttcttgtcgtgccagacttcacttcccatttggtaaagaacaccggctctggaacttaaggacgacctataaagataaagacg

SEQ ID NO: 22433 - DNA, 299 bp, Glycine max
  Clone ID: PAT_MRT3847_120259C.1
tcctaatgtctaacacaaccatatctgtaaaacacctcgatctgatcacaaagcaattaacctacctgtgatgatatgactcagtcgcactctctgcggattacagagtatccactgcaaaaaggacaaacgggggatatgaagccggtacctatacagccacaccgacactggaaaaaaagctgatgtcagctccagagtaagtatcttcctttgactgacttattagccgatctctctctaaccttgaattacgaagactgtcaggcgcatacagattcctaacacgctgttctgac

SEQ ID NO: 22434 - DNA, 351 bp, Glycine max
  Clone ID: PAT_MRT3847_12025C.1
cgcgtccgtacggctgcgagaagacgacagaagggggtgacatatcccgcagggacttggagggaggggggtttttgactgtggggggaactgttggttttaggctgaacaagcccaacacttgtggaaacaggagccacaaaatgtatgaagcttggactgaacattgacgaggatgcatgtgaagtttgtgcttaaatgccccaactggaagaggccgaggctgatgctgtgggcatcaagatggaggaggtcgattaaaagtaaatatgatgcgtttcttgtttgttgcgtatttaatgccttttttgggttagtttttttctactttttttagtatggaatgatgac

SEQ ID NO: 22435 - DNA, 552 bp, Glycine max
  Clone ID: PAT_MRT3847_120260C.1
gctcaaaaggtcctaaaatatttgaagtctgctcctgcaaaagggttattcttttccgctacttccacacttaaaatatcagccttttctaactctgattgggcatcctgccttgatactaggcgatcagtatctgggtattgtgttctaattgtgtcatctctaatttcttggaaatcgaagaagcaatccactgtttctcgttcttcctcagaggcagagtatagggctttggctgctcttacctgtgaattacagtggctgtattttctatttaagaaccttcaagcagccattacagcacgtgctctagtatattgtgacaatagatttgcaatccacatagctcacaatcctatttttcatgaaagaaccaagcatatagcaaatgattgccatgttctgtgggaaaaattacaatctggattgatacatctgctgccaattccttcttcaaaacaaccagcagacatatttactaaagctcttcattcaagttcttttcacacaaacattcacaagttaggccttctcaacataatggctccaact

SEQ ID NO: 22436 - DNA, 897 bp, Glycine max
  Clone ID: PAT_MRT3847_120261C.1
ccacgcgtccgggaacagatgccactcaggttaagcaaaggacttaagggaattgattctgaattttggggcctgaagtctctggctggcaaaagtgtaaatcatgactcactgaaagtctcagaagatataagcagtatgggcaaggctatcatctcgaacaatgcacatcttattagcagtataactcagagtacttcatctgcatataattatcctcaattgattgtaaagcaaacaaggaagggaaaaggggttatttgtgaagatttaaacaaaagcttcagtattggaggagcacttaagagtcaagaggatgagaaacttggttttgccgctaagtttcaatccgagacactggtgagatcaaatgttgatgagaataataagcctttattggaaggaactttcatgtctggttgcaatggactcaacttaagagactggctgaagttcaaaggacataaaatgaattaaatcaggaaggattcatatatttaagcaagtattggaattggttgattttgaacactctcaaggactcgtcttgctagactttcgaccatcttgtttcactttattgccttcaagtaaaaataagtatattggttcatttggccaacaagagttagattatgaagtcatgacatgtaatgtgactaggaaaaggcctttggaacagaatacctgtgcttgccagagtttgagtacaaagcagaaaaagctctgtgaggagacaggatcttctaggcagcagcatcacggaccagtattcatggctgccggatgacagtaaatcaaactgactcagacacaaacgacctgtggaataaaggagtaaagaaagctatgccaaaataattctatttgtactgaagaaagcgttatgtctgctta

SEQ ID NO: 22437 - DNA, 280 bp, Glycine max
  unsure (1)..(280): unsure at all n locations
  Clone ID: PAT_MRT3847_120262C.1
agttaaaccagatggctattctttaccagattttgaaaatgaaaaccccgaacattgtcttgataatgattttnctgttgttgataagggcatagaactttcatcaaacgaatctgttaaactagaggaatccatcataaaggcctcctgacgatgcttctaacagttgatagtggccagtaacccttggtatatncnggnatacaantantcttcctgnaagatngtgttaaccatgttttcctgnatgatgcaaatgatagtcctaaggntcaagcng

SEQ ID NO: 22438 - DNA, 291 bp, Glycine max
  Clone ID: PAT_MRT3847_120263C.1
cgcattacatgggtaccttaatacctttgttataccttacaaccacctaatcacttacttatgatgcccttaagggagaacaccatttccaaccttaaaaaataccttggagggcggttttagaccttaaaagccattttgaaaaggcttcctaattaagggcccccttaccaattaagaactaagttaccctattggccaaacaaaaaaaggggcccttaaggaaaaatgtaacacattgaaccagctccagcttgggtttaaacctttggaaaaaccacagggttggaa

SEQ ID NO: 22439 - DNA, 506 bp, Glycine max
  Clone ID: PAT_MRT3847_120264C.1
tcagaattcggcccgaccggcttcgagctctgaaccgaatcggctcgagttctcttccgactctaccaaatctacggttagggattccattacccaacttcctctttctctcccgattctttttaactttttcttttccttcctgacaaaaaaaccctctatttttctctctcttgcaaattacgagaaccactcttcctccatctaccctttaacgaaagaaacatggttttattttcccgggaaaaaactcctcacagattggtgggccaaccttacttccttgatatcattccttgttaaattagccgtagaattccaatttcctaggttgtcgatcaatcatatggatccgccaattgcaatttggggcaattaaattgtatttttttcttgcggtaagactgaaaagttttttcttgtgattggaaaggtgggtgtaaataatggatagattcaccgacaggatgcgcgaggagttgtaaatcgtaaaacaatgcagtttg

SEQ ID NO: 22440 - DNA, 1279 bp, Glycine max
  Clone ID: PAT_MRT3847_120265C.1
attaaatgcaaacattaagcaagagatgaatagggaatcagtagatatcttgcaaagtgaaaccagaaatcccaagactgtttttggtcagattgaatctgaggattctatttcccacattcatattgtcactagagttaatgaaagttcagaaatttcacgtgttaaaggtgacatttctgaaactggtagttttgaaaatacagcactctgttctcattgtggttgttgttatgaggtcactaatcaagctgagaagaatattgggctttgtccagaatgcaagatcacattattgagagttgtcatccctgagacaactttggcagtatctgaaaactcttcattgattacaacaaacatgccaaaagaagaaaaatcattacctggaacaaatcaactaatgattgcatctgaactgcctcaagagactaacgtgggtaacttgaggtttccccatggtgaacaaaatgctgaggaaagtcaaacttcatgcagtattctaaatcccaatcactcactgaacctagagttaatgaatgcattgaaatttcaagtgccaaaggtgacatttctgaaactggtagtgttccagtcgcgggttgcttacaagaagcctgataatgaatttggggatcagcatcaccacaatgatctccctaatttgaacatggaccccatggaaggcactggcatttctgtattgctgaaaaggtctagcagcaataaaggaccggtagttcagggcaggacttttactgccactaccatatcttacgatgatttgtctcttgcaagagacagtgtaagcagttttagaagctcaactagacctggtagttattctgcctcatcatcaattgatctcagctcaagtaggcaaacagagtttcgtgtgcaaaggcagttgagtggaaggaaattggatgtggactgtggatatgactcaaggatcaagcctccaagcactgcttcatctttctctggagcttcaatccattctcgccaagagttaggtcttgcaactcgagagacttctggcagtacagaatgtggctctgtagaggaggtgccccgagttttgcaagaaatgcaagcttcggaaaatacagtggcggacgtaattgatgcttcttcaactgatttagttgttgaggaagataaatttgaacatgatgatagtagtagagtaaataatgcttgcagctcagaatttttgagtcaggctgctgatgttcagtctgatgacagtttagtcgcatcatttcaaaaccatgag

SEQ ID NO: 22441 - DNA, 281 bp, Glycine max
  Clone ID: PAT_MRT3847_120266C.1
cggaaggcccgggccgacccacgcgcccggcgtaataacagccagaacgggaacacagacaggggggggtaccaaaaaagcggaaaccaaagcaagcccgccaggcgcgaaagagaacgggaagaaggcgcagccaagcctgagaagcgaagcacgcgggagagaagaaaacacgcagggccaggcacagacggcgccaaggaacaaaatcaccacacacggacaacgagccggacaccccactcagagagagcgggctcacaggggcacacaagcaaaga

SEQ ID NO: 22442 - DNA, 1371 bp, Glycine max
  Clone ID: PAT_MRT3847_120267C.1
gattcccgtagttatttttgaagacgaaggttgaatgtgaaaaagcaaagaagcgttagagaactgaacagtgtaaaataaattaagaggaaccctcgatttgtgcttttcaattttcttccccttctcttgcgttgcgttgatttgattaatactatcaactaagcccttttctgtttgcaatctggagctatgagttcgtcttcggcagatgtttttccagcaattcaggaagttatgctggagttccgtgctggcaaaatgtttcttgaggaaaaaagggttgttcccgatacacggaaaggacttgttcgaattgctaggggtgaggagggattagtacattttcagtggcttgatcgcacacaaaatgttgttgaagatgatcagataatatttcccaatgaggctatttttgagaaggttaatcaaacatctggaagggtttacatactgaagtttaatagcgatgacaggaagttcttcttctggatgcaggaatcaaatgctgatggtgattcacaactgtgtagctcagtgaatgattacattaatagaccattagagttgcttggtgaagaggagcctgatggatcccttccacttcaaatttctgaagatatgacagaggatgacatctcgtccagagctgcaaacttaggtatcccaaacttgggtgtggaagcaactagtgatgtaacatcttctggtccggttaaattggaagatctccaaagaatattgagtaacattggacctgcagatagtattgttgatcctgatggaggcttgggacttggagatatattgaagcctgatctaataatgccattgatggatatgttacctttggagcagcgtttagctccctacttacctgagggtaaatggtctccagaagagatattggagttgttgcagagcccacctttccgtcagcaagtagattcgtttacttatgtacttcgaacgggacagatagacttgtctcagtttggaattgatccaagtaaatacaagttcacagttttgtcttttcttgaggctcttgaggattctgtttctaagtcggttgagtctgaagaggctaggcaagatgatcgggatttaagatctcaatcttgtaaccgtcatgacccaatggatgaatctcagtagcgtggttcattcagcttgttcttttttctatagatacaagaaaacatctcgtgtttttatttttattttttgagacattttcttcttgaaaaaggaaatttaaaatgcagtgagaaaaaaagtacaaatatcatttgagatcttttaaggctatatagtgagttattgattaataaagtcgaagcatttgtttcccctttcttcttgattaat

SEQ ID NO: 22443 - DNA, 764 bp, Glycine max
  Clone ID: PAT_MRT3847_120268C.1
ggcctgtctcatgatgaggtggaataagttagattttttttcatcttattttggggcaacatgttcataaaatataaatctacattgacaattttcttgtatttttttattaggcttgggactcggagatatattgaagcctgatctaataatgccattgatggacatgttacctttggagcagcgtttagctccctacttacctgaggtatatgtcaatgtggagattaagttttagtattctttcatttacagattcatgcaatattctttgatgtagggtaaatggtctccagaagagatattggagttgttgcagagcccacctttccgtcagcaagtagattcgtttacttatgtacttcgaacgggacagatagacttgtctcaatttggaattgatccaagtaaatacaagttcacagttttgtcttttcttgaggctcttgaggattctgtttccaagtcggttgagtctgaagaggctaggcaagatgatcaggatttgagatctcaatcttgtaaccgtcatgacccaatggatgaatctcagtagcgtggttcgttcagcattgttcttttttctatagatacaagaaacatctcatgtttttatttttatttttattttatccgacacattttctgcttgaaaaaggaaatttaaaatgcagtgagaaaaaagtacaaatattatttgagatcttttaaggttatacgttgaattattgatcaataaaggccaagccatttgtttccctttc

SEQ ID NO: 22444 - DNA, 385 bp, Glycine max
  Clone ID: PAT_MRT3847_120269C.1
atcacaaatccaagaccaccattgaattttggtcctgacacgcggagcttttgacaatttcctatcggcctactcgatggaggaattatagtggccaaaactggagattggattgcacttatccaagattctcctattcgtaacttggcgagagtcgcagattggaagaccggctgattaacgttcgatcttgggatgcctcggaatgcaactgtcaaaaggcgtgactgggccataacgggacaagtgtttttaacatacaggggctgtacagatgattttgatacatgaaagtggtcgaaatcagaaccacatgcctgggaattgatcttctctatcgaggtttgatgacctaataacggttttgaaatttcgagttctcagt

SEQ ID NO: 22445 - DNA, 499 bp, Glycine max
  unsure (1)..(499): unsure at all n locations
  Clone ID: PAT_MRT3847_12026C.1
gatgatgaacctgcagcaagagactgttgagtgacttacagatacaatgaaactattgccagtatataagccgcctcatatagatgatacanaatgcgagaacagaataatagcatctattcttgaaccacggctgccaacgggagggggaacaaacacttgctccaaagcaagaagcgacatggcacttactaaccctactgccaaagccgggcaacctcgcaaagcaaaaaacgcaatgcttcacaaccggatttcctcccatttgtgcagaccttgggcctactccaaatataactgccttagtgcagaggccctgatcaagagtgcgggcaagagcaatggctgcaccaacagtgaaaagcttaggcatgtcccttgcacctggcttgtcagaagaatcctgatttgcagtgtccaacaagtcactgaacgtgtatcccagagacctcacattatacatggacactttagggtcgatcctagcagcacgcgcaca

SEQ ID NO: 22446 - DNA, 191 bp, Glycine max
  Clone ID: PAT_MRT3847_120270C.1
catttgctttcaaacgagtagcttcagccatggcgtaagcaatgaaagcaccaatggtagtgcttggtattcgaggcccaagcaacctccgagaacaaagagggaaagagaaactagagctcaaggaagagaatggaagttctttcttgcattcatcaaggctagtgtgaacatttatagccactaagtgg

SEQ ID NO: 22447 - DNA, 603 bp, Glycine max
  Clone ID: PAT_MRT3847_120271C.1
gggtcagtccgttaagtttctcctcaattacgggaacggcggccgcaccatgaccgtggaggtcacttccgccgttagatctcgccgtacagggggcttccgcgtcggagtagggaggggaaaaggaggaggcctcggcggagggttcggtcgaagagcagcaggtcctgagtgttataattgtggaagaataggtcacttggcgagggattgttaccatggacagggtggtggtggtggtgttgatggtgatggtaggaatcggagacgcggcggcggtggcggtggaggaggacgagggtgttttaactgtggggaggaagggcattttgtgagggaatgtccggatgttggggaaaggaaatgagtgagaatgtgttatgttatgatttcttctgttgaattgtgagtatgttacagtcatcagttggggttggttacatggattctgttatttttgtttctagccattggcattaatttgcttccaaacatattttccacgctttgctaaattgttttatcttaatgcgcttcttttcaacaagtgatcgattatatatggtttgaatatgaatgtatgaagcaatggaacgcttaact

SEQ ID NO: 22448 - DNA, 433 bp, Glycine max
  Clone ID: PAT_MRT3847_120272C.1
aaatgatgttacgacgggtggtgttgacttgagataatctaatcaatgtgattcatggcctatgataactgtctgtctcttaccatggccttgtatctaaaaaggagatagaaccaaaagttattaaacaattatcagagtaagttgcatatgaaattactttaatcaaggttttaaaccctctttgtaacttaaaataatgaaaactgaaaataaagttatttaacagactaagaatttctttttcaaaattctaatgtcaatttaactgatatttgaaaattccttagttatagtgttttcctgtctagatttcactgtttgtagggatatatgtgagttcctccttgatatgttattattttgtttatatcttagtcttggagagagaactttgaggaatattagcagctgcccattagtttgatgaatg

SEQ ID NO: 22449 - DNA, 356 bp, Glycine max
  Clone ID: PAT_MRT3847_120273C.1
aaatcccaaaagcccccccccttgggcatggaaaaaccctttttaggggggggggggggtggcccccctaaaaaactcccacgctgttttaaaagggcgccccggttttttgggcttttgaaaaacggggccccctttctcccctagctaaaaggggaaacttctcaatattggggggaaaaaaaaaaaaaaaagggggcgaaacttccctccccaaaaaaaggggttccccagagggaaaaaaagggggggttttaacccttggtctcaaggaccccaaaggggggcgaatttttttttttctggggcttaactccccccataaaatgcccccaggcccaataggtgttttcccg

SEQ ID NO: 22450 - DNA, 418 bp, Glycine max
  Clone ID: PAT_MRT3847_120274C.1
tcgtccacgcgttcggccacgcgtccggccacgcgttcgaaaactggaaatgtgggtgaagggcatcaaaatagcaattggaatacaaccaaggcttctgaaggggagtcttctggttggaacaatatccaaaagtcaaatgaaacttcatcagctggatggggtggtggcaatgggtttaaaagtggatcagatgaaggaaacttgaattctacttggagtggctggaagtctggatcaagtggagtcaaacaagctgggaaccctgctggtacttcagatattgatgctaatcaggatgctgggtggaaaaacaaaccaaataaggatgggagtgagtcatctggttgggaaacaaaaaacaattggaatgctccagtctcttcatcaaatgataaagtggaaaaaggtaatgatc

SEQ ID NO: 22451 - DNA, 476 bp, Glycine max
  Clone ID: PAT_MRT3847_120275C.1
ttcggctcggcctataagcatcctcctatacgtcctttttatacgaaactctacatgactcttctcaacaggatttggagcgtgctgcataggagctagagaatctcctttacgcataaatggcgctgacctacaagccaaagaacattgttattaaaggatactccctttacattgcattcccatgtctgcggcaagattctgctaaactaccctgactacagaggtcatagaccttgacaagactttattactgctcaactgtgaataatatcattccctcccggtcatgttcgaatatcatgttcatcacgggagacattgaggagagctcatgtactaaactacatgcttctcacacagagcattgactccatcatgcactatacagcaccaacccctgtacaccaggcctttagccacagtggtgagataaccacgaactgcgcttatggcacacatgagctcctacaggc

SEQ ID NO: 22452 - DNA, 120 bp, Glycine max
  Clone ID: PAT_MRT3847_120276C.1
cgggcaggtttaatatttggcggggggggttttgatattggaccatttagtggggttgtctttcacccccgctatctcacactcatcttgctctctagatctgtgaaattattggaaatt

SEQ ID NO: 22453 - DNA, 804 bp, Glycine max
  unsure (1)..(804): unsure at all n locations
  Clone ID: PAT_MRT3847_120277C.1
gacccttttcttgcaatctaagttttttctccttttcttttttctttttttctttttttaacattctcaatttataccctgctccatggagggcttcctgctatcaccttttcaactgagaaactgagggaaaaaaaaaagatgagctcagtatgcatatcaaactgcatcaacgacgcacgtgacccacgtgttccggtgagggcttcctacgtgaacctctataagtggccggaatcggatgctgagttcgtgaggtctagaagttgcaacagagaaaagggttctcagatattgtacggtcaccccagggtggtggatagcatctcttgcagacaaatgttcctcagaagctacacgttttcaagggaagaagagaacgagcacgagaaaacccacaaatgttttggtagggcaaagatgaagaagaagaaagatattgggagcgagactttaaagcctaatgataaggctaagaaaaccaagtgctgcttggtttggagtaaggctaaggaggtctcgtgttctgctttgtctgggattctccgtagggtcttgtcctgttccgctagtgtagatgttgtcgacgaaaaatattgatttttaatcaaaggtttgaacttttttgttttattttatatatattttcttcctatttatgatccagagagaagaatttattagtgatatagctatctatcactttgggttctttttcttcacttatgtataagggtgtgtgaaaagtgaatgttnttttttcctgccgtggatgttaattctcgcatgctagatgtaaatatt

SEQ ID NO: 22454 - DNA, 273 bp, Glycine max
  Clone ID: PAT_MRT3847_120278C.1
tttttgtttatattgatattttgttgtttataaggggaaccccattattgtatttggcaaccaacgacacaaaaacattgttaaagaaaaagaatgcaagaacgcacccttagggcaaaaagcctacattctccgaacttttgccgagaaaagcaactgtagcgctcactataaacgaactctctactaaaacaagcagcctgagttaaacaagaagatgggaagtattcactgcaaaacgaactgaggaagaaagcttatttatacacgaca

SEQ ID NO: 22455 - DNA, 399 bp, Glycine max
  Clone ID: PAT_MRT3847_120279C.1
ttcgtcctttttttttttttttttttttttttttttttaatacaatttttttttttggcttgggtttttatattaattccttccttttttaataatcttttatttttctcgggcatttcgttttttttcttagcccccaaaacattgagaaccccaaaaatgtttaaagaacacccaataagaccttccaccacgggggtcgcacccaacaacacaatcaagccacttcctggcccttggggccccccccccttataaaaaaaggagcagggttcccatgcaagggggaccccccttcgggaaaaccaatgccccccccttcaccccttgtcacacaaagggactgcactgacagtatatgcttcccgaaccccccttttaccctccaacaaaaccttt

SEQ ID NO: 22456 - DNA, 246 bp, Glycine max
  Clone ID: PAT_MRT3847_12027C.1
gcacgcgcacgtacgctaggaaggagtttggcgggaggcacttgccatagagagaaacttctttaaatacttaatggatgctatgaacacactacaacttgctgctgagatgtatgcccacacatcaagaccttgttgtcacttctcagaaggtgttcactctttgcgaaatgggctattagaggcctaacttccgctttttccaaggtgctagaattcctcaaaaacccagctctcgttttctta

SEQ ID NO: 22457 - DNA, 966 bp, Glycine max
  Clone ID: PAT_MRT3847_120280C.1
tacggctgcgagagacgacagaaggggatgccaaatccttttcattcaagatgaagatgattcgcattcttttcatctttgctcttctatccttcacttcccatgcttctaatgtcaatgacttctgtgtggcagacctgaagggtccagatagccctactggctatcactgcaagccacctaaaacagtaacatcacatgactttgtgttccatttaggccctggaaacacttcaaacgtgttcaagtccgcaataacctctgcatttgtcaaagattttcctgctgtcaacggtcttagcctttctgtagcacgcattgacatagctcaaggtggagtggttccaatgcacacacatcctggtgccaatgaaatagtgatgatggtggcaggtgaaatcaacgctggctttataacaaccgatgcagtttatcagaacacactgaaaccaggagatgttatggttatcccacaagcacagatacattttcttgtaaattctggtaagggaaatgccatttttttacgctgcttatagtagcgcaaaccctcgagtgcaaccaattagtattctgttatttggcaacaacttgtcttctaacacggttgcacaaactaccatcattgatgattccgaagtgaggaaattgaaggccatttttggtggcagtggttaggattttctatgaatccactcctactacctagtatatataattattccaataaacttgatcctcagcataaatatgtttgtgtgtttcattgtcccatttatatgtccaatcccaaatattattgaaggtttgttgtttaacggtttgatcatcaatgcaagaagaggattatatatgattcttatcttacctctattggtttttacatcttcgctaatgtaatttaggataaataatcatttttatatgttaatgtgtacaagatgcgataaatatattttgtcatta

SEQ ID NO: 22458 - DNA, 648 bp, Glycine max
  Clone ID: PAT_MRT3847_120281C.1
cccacgcgtgcgagtgaacttgttgtgtagcttcacttcacttgcgtgaatatgcgaatgtgatttcgtgaagtactagtcctcgtcataagggaaactcttatagaccagacgatgctctagaatttaattttatatacataagtatgaatataattatattatagtgtaggagggacaaactgaactaaagaagccgaaccataaaaagccaaaaaaaaagaaagaaaaaaaaaaaaaaaaaaaaaaaaaaaaaaaaaaaaaaaaaaaaaaaaaaaagaaaaaaatgggggggggcccttttaaaggaccaaattttaagcccgggggtggggaaggtaatatttttttttgggggccccaaaattaaatttcggggcgggggttttaaaaaggggggggggggaaaaccccgggggtccccaattttaatcgtttgggaacaaccccctttttcgcaagggggggaaaaaaaaaaaaaggcccccacaaaatccctttttcaaaatttggccccccttaaggggaaatgggacccccccttttaggggcccttaaaccggggggggggggggggttccccccaaggggccctttttttttggcgggcccttaggccccccttttttggttttttccccttttttt

SEQ ID NO: 22459 - DNA, 544 bp, Glycine max
  Clone ID: PAT_MRT3847_120282C.1
gcgactggaattgatcgaggattgctgaagcatgataagacgggcaagattgtgctggttcctcagccatcggattcaccgaacgatccgtacaattggccaagatggaagaaggagatgttcacggttgtgatcgcctatggatgcggttgcgttggagccattggtcctcttccgggttcagcattcgtgcctctcgctgagcaattcggcgttccgctgcagcgattcgtactgggttgcaacggctcatgtatcgctgctatcgccgtgggctcactcacctggaattctcttgctgtaaaattcggcaagcggccggtatatatcgtgaccacgcttggtttggccgtgtcatgcttctgggccgccgaagccaaaagctttggatctttggcagcagcgagaacgatccaaggactctgcatggctccatttgaagcgcttatccctgcttctgttgcggatatttggcacgtccatgaacgtgggtttaggatggccatgttcaatcttggtgtgcttggtggaattaatctggctg

SEQ ID NO: 22460 - DNA, 337 bp, Glycine max
  unsure (1)..(337): unsure at all n locations
  Clone ID: PAT_MRT3847_120283C.1
ggctcgagggacacgcctaccttgacagcgaaacctgaaacctgttctgggtgctgtgctgtgggatggatgcaatatacattgaccaagctaggcatagtgatctatactgtcatgcaattattgcccaccagcatggtgatactcgtagctgcttagtgatattaggtcatttaccacttcttgagtgcgggtgcgcatgcatacatgggcgtcccaagcctgatacactcacgtagcatncgtgccctctttgacactctatgattgctagctgactccagtgaactatacccacttgctgaactgctcctcgctgatgtcacttacctattct

SEQ ID NO: 22461 - DNA, 589 bp, Glycine max
  Clone ID: PAT_MRT3847_120284C.1
ccatccgaatccattttatttatatattaatattatttccaaaggaaataaaaagattttaaaagatcctaattataaaaattggaaggggaaattttaactcggtaaaaggataaaacaatttttttctccctgtcccgggagaaaaaaaagttacccccccttgaatagcttccttaaaaaggacttctgcttccccagggaatgtctgggaaaaaaatatgatttctttgaatggaggtttattcgggttaaagtaaccccgtacctcaacaaaaaattcccttacctgcccaatttctaaggaatcaagatacccattcgtcccagaaaaaaaagttattatctgttcttccacggaaagaggacctgattggaattgttaaaccaactcgcccaatcgtggacctcttgctaattgattttgaggagctttatcgaaaccaaaaccaaattgggcaaaaccttctaattctgcgaatggggctaattccaattttaatttaccagctcactggttccagggcttaaattggacccgccgacccaactctggaaacggaaatccctacattaatagcgggtctga

SEQ ID NO: 22462 - DNA, 464 bp, Glycine max
  Clone ID: PAT_MRT3847_120285C.1
ggggataagaaagagcttacagtgatttattcaggaacaccattaccctgttactttagagtacaatcacttatgtactaattattaaaggaagtcagtgaagagaaacataacatcagtgcccgttttgctgcaccaaaagcctaataaaaacacagagatacagttattcatgaacactagcgacgtgagcttgcagcaggtaagatcaaagttacggcttataaaaatgcagagtctaagatcagctgatagcaatgggactagtaaccttatgttgcccattcgaccatttcacataagcacagttgtttgatgcataacgttttgacgaagacgggaacgttactgcgtaattctgcttctaattaagacccccgacactaagtgtgagcggctgaaccatagactgcaccgtgggagactgaaacaccgaaactttatacgatggctacgcacccacg

SEQ ID NO: 22463 - DNA, 368 bp, Glycine max
  Clone ID: PAT_MRT3847_120286C.1
aatctcgttattattcacgtggctgtcgctttcgtattatagcgattgttgatacgttcaatgtcacagaaacaccgttgccgacaaaataagataccagtgaaagattttatgaaaatgtctcaccatgttgctatcaatttgaaaagaagaaaaaaattgcaggcctattgtacataacttcaaaacacgctctatgctcaacactagcaatgccacatggcagtgtttgcagttcactctacagcatcctgagagaaatgctcatcacaaatttttattagcaatcttaatatataccattcaccattgacttttttggggagatcgcaatctaattccttaaacttcattccaattcctataat

SEQ ID NO: 22464 - DNA, 365 bp, Glycine max
  Clone ID: PAT_MRT3847_120287C.1
acattgaatagactactcaaattcatcatatcattcttgagtttgcaaaactatgcctcacaactatctcctgaaaggtaaagtacagtaaaagggaaaaaaaatagatggcaatgtatacataaaatccacaacagcatgggggagggaggaaatttatcctttcctacgaacccaggtggctctagggaagagaatacttctagcgaaccttgtgctattacaactctgacaagaaaggataaccttctttctccaagaaccggaatactcagcaggaaatcaccagacaagaccaaaaattctcaaacgtttgatgctttgctggcaatggtcttacaaagcctgtccaaaccctcatagag

SEQ ID NO: 22465 - DNA, 314 bp, Glycine max
  Clone ID: PAT_MRT3847_120288C.1
atcgggtaggccaccgaatatgatgcccccgaggagcaggggatagacgaaggcagagccatctctaagacgggccaaagaacaggagcggtggatgcccaaaagaaacgcatgttacccctgggaggggataagccggaaagcgagaagaacgagcagtcagatcgcaagagaaaacgggttgctggttctacgaggactgctgcagcgcaacaggctctggatgataggctcacctcatacgataatgacctgcaacgtatgcgagaggaagatgagaacagtagtctgaagaagacagaggatgctctgat

SEQ ID NO: 22466 - DNA, 557 bp, Glycine max
  Clone ID: PAT_MRT3847_120289C.1
agctctctgatagaaaataaggcttagcgagccatggtcgcttagccattatgttgttcaagctaagcgagtgtgtctcgcttagccagaatgtgtttttgtgttgtcacgctaagcatgctctgtgcactaagtgagtgctgttattttcataaggtgcgctaagcgagtgagtctcgttaagcacccagtctgtttttcagttttatttttctgctttcggttgaaataaaaacctgtttaacttgaatcatgtgactttttttttatgcagatggcctccaggaagaggaaagccaccgcctctagaccccgggagccctatgacaccactcaatttatatcagagggcgcctgggagagatattcacagaacgttcactcccggaacatccttccagagaggaacgtcgttctttatgttaatgagtatgatgagttccgcagagaactcgagaggcgctgctggcacaaggccttgaccaggcagttggatgggcatattgatgtggccctagtcaaggtattctacgctaatctctatgatccggaggaca

SEQ ID NO: 22467 - DNA, 735 bp, Glycine max
  Clone ID: PAT_MRT3847_12028C.1
acgagggcgattgatatcctgcgttcacctgtctccgccgtccgattctttaacggtgccgccactcgcagtcgttgctggcgatcctgccatttccgcagcaaaacgcaaagcattacaaagagcttgaagccgctgttgacgtagttcgcagggcttgccgtctctgtcttaatgtgaaatcatccttgttctcaactgatgagaaggttcttgaaaaaaatgaccagactccagtgaccgtggcagattttggagttcaagctctcataagtttggagttaaataagctgttcccttctatacctttggtggccgaggaggactctgctgtcttgctatcaagaaacttggcagatactggtcttaatgaaggaactgacacacttaggtccacttgtaaaccattgacacaagatgatgtactcgaagcaattgatagagggggcaaggatgcttttgtatttggatcaaagccggccacatattgggtgggcatatctaagcagttcaattaaatgctgtaaagtgatgcagtatagcttcttaaaaatttgattcatgacttccttttctatgttgttgtatgagatgtttgttcacattgcattcctggagatgagaaaatgttggtaattatttttgctgttttatgaaagctacatacttttacaagtgaatttctattagccattgggacattatctatttaaaggttaatattggatatttata

SEQ ID NO: 22468 - DNA, 539 bp, Glycine max
  Clone ID: PAT_MRT3847_120290C.1
gtaagctcggaattcggctcgagcttgttttggggtttcgccacgccaaaggtgttgtttctgtggggatgttttccctttcaattagggctgaatgctatcccaacattgacccatttggctcctttgagcatttttgctgattttgttgacattgtagccaagagtgtggtgatggtggatgatgtctttgtgttcatgaagaataggcctcctttgaaagcctttgggggctggtccgtgtttctctatggtttaggtgtggctgtgtatgcatttgaggggattggattggttttgcccttggaagcagaggccaaggataaggagaagtttggtggggttttgggtgtaaggatgttccttatttctttgttgtatgcatcatttgctgctttgggttaccttgcttttggtgaagggactcaagagattatcactaccaatcttggacaaggagtggtaagtgctttggtgcagttgggtctttgcataaacttgttctttactttcccactaatgatgaatcctgtgtatga

SEQ ID NO: 22469 - DNA, 353 bp, Glycine max
  Clone ID: PAT_MRT3847_120291C.1
ggctcgaggttgtaaagacctacctagtaatatgatgctcttctcctagtttatatgatgattatttcgggacaattgaagatgggcggtttatttttttaatcctgaaaatattttcttctgataatataacatggtaatattattttcaaatatttttaaaaaatgttatatatctgggaataattattttatcaccttgtaagttgtaataaatatgagaataaagtttttcaacctcctgggaataaaacaaatctgaaacaaatgcatcctaattagtttagacaagcatattaaaataaacttaaacaaagggatactatatcagcactcagttagttacttttggc

SEQ ID NO: 22470 - DNA, 213 bp, Glycine max
  Clone ID: PAT_MRT3847_120292C.1
aagtaactcaacgcccatcttcccataccatctatcacagacaagcttcccccacaggcatccttcaaacattcggaggtcggaagatattttcttagtcgtaacaacaataacactaacgccaccgacctttactataagcaaaacacatacttttttcaatgatgcttctctcactattcccaatttagattctctataattatagaattt

SEQ ID NO: 22471 - DNA, 366 bp, Glycine max
  Clone ID: PAT_MRT3847_120293C.1
ggaaacagtttaagaatggacattatgcatcctgcttttcataccttgtcatgatctttattgcaaccatcagttttagacataagtttattttaattatacatttccactcagttatggatgaattttattgaggtggcatgctatccttagacaatccacttgttcatttttggatctgttagatttaccatatgttaaacatgtaatggttagttgtcaactgttatagttagcaaaataatatctctaattgaaggatgtattatcctgtaggtactctcttaatgtattgtaactctatgtatctctatgtatcaagttttatgtgtgtagtaaaacacaattctctccaatgctcgagta

SEQ ID NO: 22472 - DNA, 396 bp, Glycine max
  Clone ID: PAT_MRT3847_120294C.1
ggaatgcgatttttgtgtgttgaactatcaagctacatcatcggatctatctgaatggggaaagcactatcgcgaattcaccgtgtcagtgtcagatacattcaattcacactctttattgctttcgtctccattagtttcgcattgcattgcttccttatcttttccgccacttcactctttctgttcttttccccgcttccgtttattatatttatataatatataattttttgaagtcgatgcattctgagaatgtaaaacctcgttttagtttttggaaaatcaaatcccctccattcttcttcttattaattaaacctgaaaaactgtttaactgagtggctaggaatacttgaaagtggagtgtaactcattttacacttcacaattttg

SEQ ID NO: 22473 - DNA, 122 bp, Glycine max
  unsure (1)..(122): unsure at all n locations
  Clone ID: PAT_MRT3847_120295C.1
aantttaatccactctttctatgttgttaaacttcttatagaagcatatgatctgactgagagccctttttgaacagcatgagaaggatacatgtgcggcacaggcatgaatagaggatgag

SEQ ID NO: 22474 - DNA, 520 bp, Glycine max
  unsure (1)..(520): unsure at all n locations
  Clone ID: PAT_MRT3847_120296C.1
gtaagctcggaatncggctcgaggcaacaacaaaacaaaagagatgttgaatctgttaagagaagaggtactattggtagtgcagaagtattattacgacctaagcatggtcgcattattcactataggagtaacatatttggcttcaaaagcttggaaaagagccacaacaaacaatagagaagaaatccctggcaggttgggattgccttttattggggaaactttttcttttctttcagccactaatagtacaagaggatgctatgattttgtcagacttaggcgattgtggaatgggagatggttcaagacaaggctatttgggaagatccacatatttattcctagtcctgaaggtgcaaggaccatatttgctaatgactttgttctattcaacaagggttatgtaaaatcaatggcagatgccgtgggacagaaaagcttgttatgtgtacccgttgagagtcacaaaagaataaggggtcttctatctgaaccattttccatgacttcccta

SEQ ID NO: 22475 - DNA, 478 bp, Glycine max
  Clone ID: PAT_MRT3847_120297C.1
cagagatgtacaaatggaaccagagatgacagatcttgggaaaaaaattgtggccaaatgtgggggtctgccatcgcaaatattagacctgagcaaatttttttcagataaagatgtaacaaaagaggagtggttaagattgcaagagcagtggttaagagatcaaggtcaaggtcaaggtcaaaacccttggtctgaaacacttaacgcaatcgtcagtgacttcaacttaccttcatatgaatcacatctgaaatgcttatcttattttaagctatttcctgctaattttgggattcccgcaagaagattggttgctctgtgggttgcaggagatgtagtgcctcacagggaagaagagcaagagccacctgagcaagttgcagaaaggtatttagaagagttgatagatctgaacttggttcaaattgccaagagaaagcccaatggcaaggtgaaaacatgccgtctccctaat

SEQ ID NO: 22476 - DNA, 284 bp, Glycine max
  Clone ID: PAT_MRT3847_120298C.1
tgcgttttgtgtctgatggagtgatggatcatttgcgacgctttgcgcgccgccgagttctagggagatgctcgtcgtccgttatgcatagttgcgtagacatgagccgtgtagatacgacaggagccgggcagtgaagcaccaggtagaggatcagactgcgccgcgccgctcctgctcgggcgtggagatggctcggtatggagatcgtcggagtagaccgtcggtgtactcactcgagcttcggggtagacggtgcatacagtcgcggcgcactcagttgg

SEQ ID NO: 22477 - DNA, 554 bp, Glycine max
  Clone ID: PAT_MRT3847_120299C.1
ctgcttggggggggggggggggggggggggaggggggggggggacatcatgaaaagcgcgagggaggaggcatgtagggtgcgagtaggcggcgtaggcttggcggtacacgtgggagaacaatataagagggggaaagataagggggcaacgaggataggctgggccaggcggtttggaaatggccgtaggttggggataggtagaaaggttggtgcgaacgctatcgggcaattggcagagtggtcagccctaaatgggtggtgcccaaccgatagcttttaagtggtgtggtgtttgccgtgcctaatacattataaccactaccacgtatagtatggcaaaggttactaagagtacgctaacgttagccaatgggtggacttggtgggcttacggcaagccggataggccagagctacaggttacgcaaacccgtattacagagatttgctaattggctgcttagacgcataggtgtactaattagagtatcagaaggaagcggtgcaagtataccaacgctaggaacagtagacggcgtagtactagca

SEQ ID NO: 22478 - DNA, 2445 bp, Glycine max
  Clone ID: PAT_MRT3847_12029C.1
gggaatttagaatgcttagaataaatgaatgaataaagttgagttccctctaacagttattttagagtttagttgagttatcatgaataatcatcagtgacactgtaggagcatggatcctctatgtgagttttgtcgggtggtgagagctgtggtttactgtaagtcagattctgctcgtctctgcttgcattgcgatggctgtgtacactctgcaaattctttgtctcgcaggcattcgcgttccctcctatgcgataagtgcaattcccagccggcaatgatccgctgcatgaatcataagttgtcattatgtcaaggttgtgactggaatccaaatgactgttctgcattgggacataggcgccttgcattgaattgctacactggttgcccctctttggctgagttttctaggctctggtcttttgtgtttgatgctaattcctcacttggtggttgggaatcggttggtactttgccaaaaagtgagagctgcactagccagtgtttggagcaaactgatcataatggtggttattttggtttggtgagtgacaagttggatgaaattgaatcttgtgtcagatatcaacctcggatggatcagtctcaaatcattccatcaaatccaaattacacaccgtactgcaaagacgaagcatttttctttcctcaagactcaaaccagccaaagctgcaggaatgtcctaatctaggaattcatgatgggaatgaactttgtgaaggtttcaatgtggataacgttcaattaaactttgaaattgctgatgaaatattttactgttcacaagttgccacaagataccaccttgaagatggaggaatggactgtttattgatggataaaaacatagcagttacagaatctagttcacttattgagagtgccatggaggcatcatcatctatccaacaagattgtgtggcttttcaatcatcgagggctggtgggtcagctagtgtgatgcaggttatcaacagcaataccaattgtgcacttatgaatcctagctgcactaaaaacatcagtctgggatttcctcagggcctagttcattcaaacatgccacttcaatttcccaacatagttggtgaaaataattctactgaatatcaagactgcgggttatcgcgagtgggtgaatccccctgggaatcaaatttggagggtacatgcccacaagcaagggataaagctaaaatgagatacaatgagaaaaagaaaactcgaacctttggtaagcaaataagatatgcttctcgcaaagcaagggccgatacaagaaaacgtgtgaaaggtagatttgttaaagcaggtgaagcatatgattatgaccctcttgggacaagggacatctaagcatattatctacaataactatcttttccatgaaagatatgtttcttcggactggtaaggtggtccctggaccttgtgagtacattgctttcttgccaattcttcatcaacagaagttttgtttatcttgtgaaagtgggagagttttaatgcagctagatatttattcaaaacttgactgcttaggtgattgatacagatctattagagattttaacatatttagaagataacaaagatatgaaggtgttgcaattgggaattgcagaggaagggattggatgtatgccaagataatgcgtttaattatacataggaagtgtgagaggtaacaggcatgggacatagaggagcagaacatttgaacagatttcaaacagcatcacagtcattgtcaattcagacaaaaacagagggcctggatattcctccttgcatttagaggagatgtgcagagtgatccatcctgaatttcaaatgtgatattgtgagtctctgagcctatgtgttctatataaataaacactgcctagtgtaatgaataaaagagaaactggtgtttggcaagcaacaatagccaacctcacactttctgctttcagtttggtccttccgtcctcatggggatccttcacacgaccttattctgtcatcttaagccattgttcaaggacagcaacaccatattttggaacctcttcatttattccattttcatcagattagtgagcacgatcgactgttgattgagatactattgttcttgacttgctggaagccagttttacctgccgcaactattggcatctttgacattgcctcaactatttcatttgttgtattcctctatatttgctttgaggatggcacctatttcttcaataattgtacaaacattgtgtacaaactttcctgatttcaagggacgtttgtttctcctatgaaataggagatattaatgactgttttattgttttgtaatttgcacaaatctgttattattcattaaatttctgtagaatgttgataagaaagaaactacagtctttactgttccgagt

SEQ ID NO: 22479 - DNA, 458 bp, Glycine max
  Clone ID: PAT_MRT3847_1202C.1
gttggcaaaaacagtgagaaattttcttcttcttattttttaataataaaataatatgaaaaatgagagacattgttgttgtatccaaatccaaaaaaacctttttctgaatcagtcgtgaaccaaaagaggaagatggagctgtggaacagagcccgaagctttgcggaagaagcagcgaaacgatcccaggaactgtcgttgggagctagagctacccaattcaccaacatcatagcagaaaccaccaaagaaatcgcagcgcaagcttccaagcacttgccccgaccttatgccataaacgacgtcgatctccaccgttttggcatcaccgaagagttgagggactttgtcaaaggaatcaccatcactacctttgaggattttccccttcaagatgatacggaattgtctgatgttcctgcagtttcaaatgttaggcaggacctaaccgagtg

SEQ ID NO: 22480 - DNA, 535 bp, Glycine max
  Clone ID: PAT_MRT3847_120300C.1
gcacgaggtgatgacctaaaagatattgccgccacttcttaacgacattagtgatagctgcaagctcgtgtacatatgttgaggaccgcactagcttggggcaaaactctttgctgaagaaagcaattggatgcccttcctgagataacactgcacccatgtcggaacctgatgcatctgtttccacggtgaacggttttgtgaagtccgggagtgctaacaccagagtgttggtgacaacatttttgagagcttgaaaggcaacatctgcttctggtgaccacacaaaactatccttagttaacaggtgagaaagaggagctgccatagctgcatatcctttgatgaacctgcgatagaagcctgtgagtctaagaaacccacgaaggctgcgagcagtgcgcggcggcggccattgttgaacaacttgtattttgtcaggcactggttgtacccctttgtcagaaacaatgtgaccaagatactcaatttgttgttgcgtgaataaacactttggtaacttgagagtaaattt

SEQ ID NO: 22481 - DNA, 478 bp, Glycine max
  Clone ID: PAT_MRT3847_120301C.1
ttgcaccgtcctagctcggattcggctcggggattgctctaggcttccagtttctctgaccctgtgtttcagacttcttggcggactctcacgcggcaaaagagggctcaagagaaaaagcatgcatcagcagcatcgcctgttccttctagttgacaatcttcactgtactaaacctaccatgttgtggactcacatgcttccaatgaggttggagaagagagtcgttatgacacagggggatatgctgatggcatgatgatggctccaactggtggcgacaagggctactccatctatgactgctgcagagatcttatcgtcacatgtagagatcaccattgataataataatcttcagctctgtctatgaagggcataccatacagggatgctgcttctattgtccaccaccaccaatgattatgcctccttcacgatcctggtatcagtgcaacattcattctcaacccttatg

SEQ ID NO: 22482 - DNA, 252 bp, Glycine max
  Clone ID: PAT_MRT3847_120302C.1
gtcgggtgcgaaaggacaacagaaggggacctcaaccataacaagcgtaaacggttgattaagaaagcaattgtcattgaaatgctaacaccaacaatgcgttctagcatatcatcattcattctagtacatgtgcctgttacctattgatacatgaacattgaattaagggacgctgacgcacgttacctttcataatcaaactcattgacttgccacgttgatataactactgctggccccattccactg

SEQ ID NO: 22483 - DNA, 444 bp, Glycine max
  Clone ID: PAT_MRT3847_120303C.1
agtggctcgaccgagagtatgtctggtgcgcacagggcatctaaggattgaacgggatctaggacatcgggaaggacagatccagctccagcgggacctgcaagcccgtaggaatttgcaactgcggacaactctgttagacgacaaggacccgcggatttaaacactgaatctgagacagttctttcagcggcgaagaagactatcttttgtgtaggtgaatttctcgcatctgaaactaggacgattgcgtggctaaagatatgattctaaaaccctcacaataatgcttctgaatgataaatatactatgggagggtggttgaagaataatgaaacagtgatatgaggctgttatagaggcataaaaaaaacgtggtgtactacctcttataacgatagggcatctataataacgctcattaatcgtcaggctaattggat

SEQ ID NO: 22484 - DNA, 170 bp, Glycine max
  Clone ID: PAT_MRT3847_120304C.1
tttctttttctttttctttattaatttccttcattcgccaaccttttctaacccagaaacgtgaaaaggaaacccttttttaaaaacttaaaaccacaggttccaaaaaaaaccatcccgccaacattttttagaaggccttttattcataaccttaaaaacctttcccc

SEQ ID NO: 22485 - DNA, 433 bp, Glycine max
  unsure (1)..(433): unsure at all n locations
  Clone ID: PAT_MRT3847_120305C.1
catcactgtatgacgtcctccttctttgggggggggggggggtaataaaacacaaggttgtaaaagaaatggtagggaggaatactaaggaagggaggataacgtaaggtggtctaagagattatacaaatagaacttgaaatgactaacttaaatagtggtagaaagaggcaagaatgcgcggggcacgttacccgaggtaatgcaatacacgtgaggtgcgaggaacaaaggtantgcgtcctgcacggaaatgccgaacacgtagaacacacatgctttaaggtaagatgcgtgcgccagaacgggccttgggctagtggtattagtcgtattaagcgtaatggctactccagaaacgcgagttcgttaccgagcacttgggggcatacgcncgtgggtcgtgtagaagcagggatagtggtagagtggt

SEQ ID NO: 22486 - DNA, 290 bp, Glycine max
  Clone ID: PAT_MRT3847_120306C.1
gggtttggttttttttcggcaaaaccaaaaagggggtatatgtaacaggagtaataccgtacaagggtgtggcatcatggaactatggcagccacaaccaaacaactgaaggcctgctctggcattgctcacaccctgccgatatttggactgaagggaaaagggttaaaaaaacaccacttccgacaccatggggggcaggggaccattttgaccgctaatggactggcgccccaactaaaagatgggaattgggacctggtacctggtgaccccttggtcttaccaat

SEQ ID NO: 22487 - DNA, 421 bp, Glycine max
  Clone ID: PAT_MRT3847_120307C.1
ctggggccaggaaaacatttttttaattaattttgggggccggtatctggttaaaaaaactttttggaaacggtggtctaaatgggaggttttaacaaaaaaatttctttgggaaacccaaaagggaaaaccctcatttttgagggcctttgattttcaaataaagattcctacttaaaaattttttatccggactttaatcctacaataaactttcaaactttacatttttttatcgggaccctgtttattttcacagaaatttagggtttcttcacccccggcaaattgaaggggctttctgcaagccaatcaaaaacatttaagaaaatttttaaagtctttgacagtttgatcaacggcataaactattattttttttatctccagcttattttttttagccttggggttctgggga

SEQ ID NO: 22488 - DNA, 164 bp, Glycine max
  unsure (1)..(164): unsure at all n locations
  Clone ID: PAT_MRT3847_120308C.1
angccanggcgggaanttcacgtggatcggncncggctacgngcaagttgagangcngnacggtgctatngacgccaaggacccgaacttcnaggatcctgtggagatcnccaccgtgtgatcncggtggtttccggtngncaagtctntnnatantagtaatt

SEQ ID NO: 22489 - DNA, 383 bp, Glycine max
  unsure (1)..(383): unsure at all n locations
  Clone ID: PAT_MRT3847_120309C.1
cccatgcgtccgatnattttttttttttttttttttgtttcttttttttttttttttttctggtgaagaattttacttcttgaacattcattttaagagtgaaacatctttaagggttgacaaaaagctccaggtaggctgaacttgataggaaacaccatattttagctcaattaactagacatgttttcgtgcccatataaaaaacggtattaagtactaattcactgcatgtacattccaaaaaaaaaaagccctacctgtttaaggtgcagttgatatggtgtttgagtaaggacgcctatagaggggagtcagacaaagtttaaaaaagtggggggagtaaagttttggagccagggactattcaactgagcccaaaa

SEQ ID NO: 22490 - DNA, 349 bp, Glycine max
  Clone ID: PAT_MRT3847_12030C.1
gggggggagggctgatcattgacctacttaactgaaagtttagagtattgcttttatacgatggtagtaataggatcacatccaatttgacgcaaaagatagactcgaacttattatataccatctactttcgcttctaatacagtatactactcctatttatattactttctatattttcttactgtcaaattatacatttattaaataactggatcttaatactcgttaataagatcacaaaggacattgattactctaatactagatgtactaaatttcttaaaatctgctaccctctaaattggtatcatcttgcctttcctcttataggaagcatgttatgata

SEQ ID NO: 22491 - DNA, 478 bp, Glycine max
  Clone ID: PAT_MRT3847_120310C.1
ttttgttttttccacgttgacttttttttttaaaaaccaaaccttttggaattttttcaaagaccccccttaacaaaagcttggcccacttaaggggggaaaaaacctacttctttctgggggtgccctaatgtgcaaccacaaaacacttccatttgttaataaaaattggaacccggaaaaaaatccaacatttcctttccattaacaaaattattctttggggggtccaaaaaacttttgcttctgcgggggggggaggaacccaccatcccccaaattttaaaaggtggcgggaaacttgagcttgattttctccagggctacccaaaaaatgggttttacgtgggattccccccatgttataaccctttttttgggaccaacgcccaatccctggaccatgatttatttgttctttacaacccccttgggggggaaaccccctttggggggaacggcttttccggtcctatcc

SEQ ID NO: 22492 - DNA, 140 bp, Glycine max
  Clone ID: PAT_MRT3847_120311C.1
gaaaacgttatctatacatccattctttttttgtttttttcagggggaaaccttggggaaaacatacattgactacccaaaagcgtttttcgttaaaaacaaggcgccccattattgtaattttattcaacttttccaaa

SEQ ID NO: 22493 - DNA, 298 bp, Glycine max
  Clone ID: PAT_MRT3847_120312C.1
acctcgaattcgtctcgagcccaactcattaacctctacacacaatcactaacaggggggatttttataactcatgggctcctacatatttaccatatcactgaccaaaaaatcttcaacattcttaaacacatgctgaatcaaattcacctttatccaaaccaaaatgttcacatactctcagtcacaaacaaatataaccttactgcaaataaatattgttcctctcatacacacaattcatttccttatcaaaattcaattcctttcatataaactatctctaaatatcccacca

SEQ ID NO: 22494 - DNA, 236 bp, Glycine max
  Clone ID: PAT_MRT3847_120313C.1
tttttaagtaaacactctctaatggtaaaaatggtctagaggaaaagaaaagaaaaaagttatacactataatgaatcctactaaacatccctcattcatttttaaaaacctcaatgaaacattaaaaaccttaccccaatactctccctttccttaccacaagaaatgcagcacattagaaacaacacttccaaataaaaatattaaaaatttaatacataattgcccctaaact

SEQ ID NO: 22495 - DNA, 992 bp, Glycine max
  unsure (1)..(992): unsure at all n locations
  Clone ID: PAT_MRT3847_120314C.1
ggaattcggcacgaggcaacactacaacacagtctgcaagtttggttgcaccttcatttgatctaactggtcttggagttccggaggatggacagaaaatgattagtgaccttatgacaatctatgatacgaatgttgtaggaaacaagaacttaagttcctccaactgtgtagctgtagaaaatcataacctttctcaggccagcttacaacaacaattacttctacaacggcaaggatgcttttggtaagcagaatgaattgagtgacacaaagtacactgaagtaggatacaacaatatggaaaatcagaacagcaacagcaactacttctacaacggcaaggatgcttttggtaagcagaatgaattgagtgacacaaagcacactgaagggggatacaacaacatggaaaatcagaacaacaacaacaactacttctacaacagcaaggatgctttcggtaagcaaaatgaattgagtgacacaaagtacactgaaggtggattcaacacggaaaatcagaacagcatcaacaactacttctacaacggcaaggatgcttttggtaagcagaacgaattgagtgacacaaagtacactgaagaaggatacaactccatggagaatcagaacaacaacaacaactactacaacaacaaactcgcaaaccacgaccccgcagagccaaaacgcttctcatggaagcatggttcaacctagtagtaccgttacctatgtgatggtgatggctttggccattgttctggttgcagttccaaccgaaactgtgagcatttatacatgatgcggcattatgcactgttgaagacagttggggttgtcgttttgtttcctgcttttgttatgccataggacttcgcagctttgaattaatgaattagtttgcatttgtggcctgtgatggtttctcgaattttgagacctcgctgtaatgtttgcctttattgtggacttgnnnnttttctgct

SEQ ID NO: 22496 - DNA, 387 bp, Glycine max
  Clone ID: PAT_MRT3847_120315C.1
catccaccaccaccactatcaattcctctggtgttgctccaaactacatcactcaccaccaacaccagcatttccaaggactcgttgaaagccaggaccatcagcaaaaccctgtgcctgcagtgtgtggattctcagggttaccactttttccatctcaaagccaaagaaaccgagacagcaacaacacccccaccaccaacaacataagaaacagtggtggaaatattgttgacgtggttgcttcttcttcttcttcttcttccatggatgacacttcagcagcagcagcaacaagtggttggatcgatggtatattgaaggatctcattcacagttccaacagtgtttcgattcctcaactaatcagcaacgtgagggagatca

SEQ ID NO: 22497 - DNA, 509 bp, Glycine max
  Clone ID: PAT_MRT3847_120316C.1
aaaaatggagaagatctgcgtcgccgttcgttttcgcccactggtttcccaagactcttcttcttcctccgtcggaactttctggaaggtcgaagataaccgcatctctctccacaagatccatggcactccactctctgcttcttcttacgctttcgatcacatatttgacgaaagaagcaccaatgctagcgtctacgagcttctcgccaaggacatcattcacgccgcgctcgacggcttcaacggaactgcatttgcgtatgggcagaccagtagtggcaagactttcaccatgaatggttctgaaactgacgcaggagtgattcctcgcgcagttggagacatatttgcgacaatggagatgatgtctgatcgagagtttctgatacgagtttcctacatggagatctacaacgaagaaattaatgaccttcttgttgttgaaaatcagaaattgcaaattcatgagagcttggagcgtggagtatttgttgagggctgaaaga

SEQ ID NO: 22498 - DNA, 354 bp, Glycine max
  Clone ID: PAT_MRT3847_120317C.1
gtcacaacacagaccctccgccggtggcgaacggttacggttacgcttccggtgaggaaactaatgacaacaacaataacctgttttctcccacttccgtgcttcacagttgttccttgtccgaggaagctgagtccgtaaggggaaaagacgatgagtactcctccgtgtcgatgagtagggtcaaggctgagtcaccatttccggttccgagcgaaatagaatttgactttcgaagtatttcgccggtgcctgagagtgtgttgttctacgatgatgattggtctagtgagtttctcactgcttgtgaggattttggtttcaacagaaattggggactttttccaagatatc

SEQ ID NO: 22499 - DNA, 121 bp, Glycine max
  Clone ID: PAT_MRT3847_120318C.1
aatggtaggttgtcgaaccccgacctactttttttgtagtgcagctggggttttaacccaacatcttaaaaatataaagaacatgggctaggaaaagcgcctacataagacttgtgagtct

SEQ ID NO: 22500 - DNA, 319 bp, Glycine max
  Clone ID: PAT_MRT3847_120319C.1
acttaaaaaacaacaccctcttctttacaatttatccactatacaccctcttattattatcattctctatttcaccatcaacacttcttccttcaaaacatgtctcacacattattacttattcattctatcttttttcccattttctactactattcttataaaatcacttaataaatcatatttcataatttacatttaattcatatttttcttccattctttctcttaaggatgagaaggcattgctcaaaacataatccaacaatttggtttatttcactttcttaacttttttccttaacatgctaacaaaaac

SEQ ID NO: 22501 - DNA, 560 bp, Glycine max
  unsure (1)..(560): unsure at all n locations
  Clone ID: PAT_MRT3847_12031C.1
ccacgcgtccgcctacctctcctccctgttgtttctttcttcagcaacacaatagcgttggtactaccagaagacactatgtttcttcatcgaggacattgctgcttatgaagcctcagaagaaatcgcgcctgttgctaaggatgtaggagttgatcttttcattggagggaggggatcttattggtactgtgggtctaaagcatatcacctcacacgcgaggactatgctcatgcacttgcaaatagagaaaccttatctgagtatatttgatgctatgaatagactgaacctaccagcagtgatgttcctttgatgcattaccccgaacctgtgtctttcagcaagcacgagtgcgctcggattcctgtgcggctctttgccatattcgtccaatcagagatctggctgtgggtagggacgagacccttttgaatagccatagtaacgtgaggctccaacgcggagattttttcagttggagaaccaagagcanacgttgctaccactgngcagactctgaacgctatctacaacctggactgtctcactagtgctt

SEQ ID NO: 22502 - DNA, 532 bp, Glycine max
  Clone ID: PAT_MRT3847_120320C.1
gacaaaattccttactagcgttttattcgagacgactataaagcgccactagaattgggggccaaaaacgaattacctgctgtccataatacgaacaccagcacaggtccctgactttaaaccacacacacacttgaccttaatttaagggcgcctattgatcttacataatttacggggtcaacggcctaatttgtacagtttgccttgtttaccccgctcttccccatcgtaaaagaagggagaattaccatcactttcgtgaacaccggatttaccatcatccaatgctttaacagctgccttgagatcccggatggaagcaggactggacctcaactgtacccaccccattttatcgtttccttttataaattcttaccgggtacaacagcgttaacaatgcccattctctctgcttcaacagcatcatagaaccttgggagaaaccacttttcagctgctttgtttgggcctaccaagcgggtcatgatacactttccataccccatatctaagcttccaaccttgg

SEQ ID NO: 22503 - DNA, 3334 bp, Glycine max
  Clone ID: PAT_MRT3847_120321C.1
gggtaggcttgtgcgtgggtttctctctctctctcacactatctctctctacagtcccacacacaaacccttcctcttcatagcccctttttcctccctctcactctctttctcccgcctcgaaatctaacaaattctaaggccttcgatttcttcctctttccatttcactcccttttctcttcttttttaccttctacactgagactccctcgccccactgggtgctgacgtgggtgcaccctcgccgcttctcgttccatggaggcccaggctgccgttgtcactgccgccgccgtgcgcggtgcctcgctccagatgccgcttccttcgcgcaaagagtggcgcgctgtcgccgagcaccatcattctgcccgaaaccccgacgacgaggagttagacaatgccaaactagggcaatcagacgagagaaccatatatgaggtgcagcaaggaagagagcctcttgatgttgatttttgttcaataacagtggatggagctctagacaatgatattttgcagcaacagctacataatgttgttagacaaagacaagatctactgcaaatggagattgaactaaaggctcaaatgattgctagaactgagataatggaaatgcgaaacacctttgatgctcaactcaaggaccatgttagtaatgccaacaagtttcaggagcaactttgtgaaagggagcagacaattcatgagcttgaaaggaaaatagaagagaaagacagagagctgcattctattaaattagacaatgaagcagcatgggcaaaacaggaccttctccgtgagcaaaacaaagaacttgcaacattcagaatggaacgtgatcattcagaagctgaaagagctcagcatataaaacaaatacacgatcagcaagaacatattcaagaaaaagataggcaacttaatgagttgcaggaacaacatagggttgctcaggagaccattatgtttaaagatgagcagttcagagaagcccaagcatggatagctcgtgttcgtgagatggatgtttttcaatcaacaacaaatcaaacattacaagctgaattgagagagcgcacagagcaatataatcagctctggatgggttttcagagacagtttgcagaaatggaaagagttcatttgcatgctattcagcaactacagcttgaactggctgatgcaagagagcggagtggaactttcaatgatgattcaagaatgtcccaaattaattcaaaaaataatgtaactcagtttggacaggaaaatggaagccaatttgacttgaatggaagcaatgcttcgggtggaaataatggtctccttccaagtgaaagcactgctaatgatggaccatttgtatctacaggcaatgcatcaatccagactgaacatgttgctggtgttcctattgctccatcatctctaattgtcccaccttcatacctcccacacagccaagtaactgcattgcatccatttgttatgcatcaacaaggagttcccaattcagttgcatcacatgttcctcaatcacatgttgggcattttcacccagtgccgtcaatgtcacctgtgcagcagtggcaaaatcatcagtctgtgtcagagggttcacaggtacctgtacaggaacattcttcaccatctcaaactgatcaacatttgatgagatcagatgctaagtttagctatgaaatgtctgttaatgggaaaactcttcatagagactatctggatgctcacatccagcaaggtgaggaggcacaaaccatgattttttcagctaccagtgaaacacagtcagtggataagggtcaacttgttgcttcccatcaagatcaaagcatgcaacaaatttcttcacagttctctgatgctttacaattgaactcttttgaaccaaatggtgaaatcaaggagcagaattctgtgacattatctaataatggacctgacgaccaagttttattggctgagcaagcgagttctgctgcaattgcatcatctgtcacaagccattcagttaatcataatgaaatgattcagaacaattctactgattctgttttgtctgaagtgttcacctcttctgcgttgacagcttcaacaattgcaaagacatcagagattactctcctcgatggaaaatcattattagcttgtattgttcgcactattccagctggtggccgaattcgaattagttcaacgctccctaataggctgggcaagatgcttgcacctctacattggcacgattacaaaaggaagtatgggaagctggatgattttgtggctagccatcctgaattattcttgattgagggtgactatattcagctccgtgaaggtgcacagaaaatggttgctgcaactgcagcagttgccaaagttgctgctgctgctgctgctgcatcaactccttattcttcatacatgtccactgtggctgttacaccaatggctcaatctcatcgcatgaaaaaggctccttcaaatctgggggatgatcctttaaaaatgtcagttatgcagcgtcagcaaactaatggtgcactcagtgttgctggtggtctttcaaatgtcaaaattttgagtaaatctaaggtttctcgggaaatggacggccctgaaagtagggttgtgcagtcttctgtacaattacctgttggcaatggtggaagcattgacaaatcaagtatgagcagtgcccaaatctcaggctcagcaaatggaaggctagtctcaagctttgcttctaaacagcagaccagggcaactggtgctgtgtacccttctcaaagataggaagatggaagggcgtgttagattatcctgtctcaccaggatgcggatgaaaacatacaagattatttatcgggtttgtgggagaatgttttttgaagcattgacggagtaatcttgtgccctgggcaaaatgtgattttaagttgccggtgctatctccatctccagtttctgtagtagtttatttctcccagctgttacaattcagtgtgctttcattaatgtgggcctcttgctgtggtattcttgctgcatacattgcatctgataaactgcgatttttttatgaatgcttgaaagattaatcagcatggttaaccttttcagtttgcaatgtgggcctcatgctgtggtattcttgcatacattgcatctgataaactgcgaattttttggtgaatgcttgaaaaatgtatcaacatagtctaacgtctctgttggcttaacgttgaagtatttgtacgtaggttaagttcttgtcattattatcttgccaccatatttggttgag

SEQ ID NO: 22504 - DNA, 798 bp, Glycine max
  unsure (1)..(798): unsure at all n locations
  Clone ID: PAT_MRT3847_120322C.1
tgaagagagagatgacatccacggaggagtgagaacgccttataaatcgtgttcacgccgtgccggtcgccctttgtcccggccaatcatcatctctctctctctctctctctctctctcaatccaacaacaccaaaacccttcttcctcttctcaatccccttctctccctctcccaattcccctaatcgcgcctcgaaacatcttcaattttagggttagggatttcttcctctttacatttcacctctttttttcttcttctacaccgagactccctctcctcactgggtgctgacgtgggcgcaccctcgccgcttctctttccatggaggccacggccgccgttgccgctgccgccactgccgccgccgtgcgcggcgcctctctccagatgccgcctccgtcccgcaaagagtggcgtgctgtcgctgagcatcatcattctgcgcgaaaccccgacgacgaggagttagacaatgccaaactagggcaatcagacgagagaacaatatatgaggtgcagcaaggaagagagcctcttgatgttgatttttgttcaataacagtggatggagcagtcgacaatgatattttgcagcaacagctacataatgttgtcagacaaagacaagaactactgcaaatggagattgaactaaaggctcaaatgattgctagaactgagataatggaaatgcaaagcacctttgatgctcaactcagggaccatgttaataatgccagncagcttcaggagcaactttgtgaaagggagcacacaattcatgagctttg

SEQ ID NO: 22505 - DNA, 407 bp, Glycine max
  Clone ID: PAT_MRT3847_120323C.1
cacgcgtgcgaaagcgctcgatgagaagtcgatgctgtgtctatataacagatacaccacacacaattctatcgatggcagtgaaaggaagcttaagattcgtgtacgctcattttccgatcaaagctagcattggcaacaacaacaagtccatcaagatcagaaatttcctcggcgagaagaagagacatgtaggtgctcgatcatattttgaaaaaagggaagcttcacttgtatggagttacagacatgcaggtattgatttgtttttagggagactattatttgttttgcctgcttgagtttggaagattgcaagcgagggacatgctgcagcatctctggacgggtccaatttctaatgctactcaattgaaaggatttaaatcaaagcttgcgccatgtta

SEQ ID NO: 22506 - DNA, 373 bp, Glycine max
  Clone ID: PAT_MRT3847_120324C.1
gaattaaaaaattcccgtttgaattactttttggaacggggaacttgctaaggggatgcccgtcgggggattgctgcctttcacatccggtgttcgaacttaccccttttccaaacacacttttaaacttacattcaaacgaaacaaagccctcgggaggggggggctttcatgggctggatcccggttgactcgaagctttcgctggaggggatttggtcgggtcccgttcgactcttttaagggctggccattaagccaggcttcaacccgcaaaactgtgacggagctttgcaaaggcttgcaccatgtgtccaggcttctagggctgggccccgggatccggcttgttatccctgggcacgctgggctg

SEQ ID NO: 22507 - DNA, 270 bp, Glycine max
  Clone ID: PAT_MRT3847_120325C.1
gattacacacacacaaattacatatccccagtactctgagacagaagcattcaccctgactgtttccattgccaagttccactcccttcccctaagtattttccttctcttggccttcaacataaaacccctcctaacagcagtcacagaaccagtggttgaaacccatgggaaccctttggatccaatagtaaggtaccacatgtggccactttggactgatcaacgacgcctcacactacgccaacctaggaacattacatgccctct

SEQ ID NO: 22508 - DNA, 2009 bp, Glycine max
  unsure (1)..(2009): unsure at all n locations
  Clone ID: PAT_MRT3847_120326C.1
cagcatataaacaaaatacatgatctgcaagaacatattcaagaaaaagataggcnacttattgagttgcagnaacaaaatagggttgctcaggagaccattatgtttaaagatgagcagttcagagagccccaagcatggatagctcgtgttcgtgagatggatgttttccaatcaacaacaaatcaaacactacaagctgaattgcgagagcgcacagagcaatataatcagctctggatgggttttcagagacagtttgcagagatggaaagagttcatttgcatgctattcagcaactacagcttgaactagctgatgcaagagagaggagtggaactttcaatgatgattcaagaatgtcccaaattaattcaaaaaacaatgtgactcagtttggacaggaaaatggaagtcaatttgacttaaatggaagcaatgcttcaggtggaaataatggtctccttccaaatgaaagcactgataatggtccaccatttgcatctacaggcaatgcatcaatccagactgaacatgttgctggtgttcctattgctccatcatctctaattgtcccaccttcatacctcccacatggccaagtaactgcactgcatccatttgttatgcatcaacaaggagttcccaattcagttgcatcacatgttgggcattttcacccagtgcagtcaatgtcacctgtgcaccagtggcaaaaccaacagtctgtgtcagagggttcacaggtacccgtacaggaacatccttcaccatctcaaactgatcaaaatttgatgagatcagatgctaagtttagctatgaaatgtctgttaatggacaaactcttcatagagactatctggatgctcacatccagcaaggcgaggaggcacaaactgtgatttcttcaggaacaagtgaaacacagtcagtcgataagactcaatttgttgcttcccaacaagatcaaagcatgcaacaaatttcttcacagttctctgaggctttacgattgaactcttttgaaccaaatggtgaacataaggagcagaattctgtgccattatctaataatgaaccagagcgtccggttttattggctgagcaagcaacttctgctgtaaatgcatcatctgtcacaagccattcagttaatcataatgaaatgatccagagcaattccactgattctgttttgtctgaagtgttcacctcttctgggtcgacagcttctacaattgccaagacatcagagactgctctccttgatgaaaaatcattattagcttgtattgtacgcactattccagctggtggccgaattcgaattagttcaacgctccctaacaggctgggcaagatgcttgcacctctacattggcatgattacaaaaggaagtatgggaagctggatgactttgtagctagccatcctgaattatttttgattgagggtgactatattcagctccgtgaaggtgcacagaaaatggttgctgcaactgcagctgttgccaaagttgctgcagcagctgctgcatcaactccttattcttcatatatgtccactgtggcagttacaccaatggctcaaactcatcgcatgaaaaaggctccttcaattgattccaaaaatattaaaagtgaatatgcagtcatctcttcaaatccgggggatgatcctttaaaaatgtcagttatgcagcatcaacaaactagtgcatttaatgttgccggaggtctttcaaatgtcaaaattttgagtaaatctaaggatcctcgggaaatggatggccctgaaagtagggttgtgcagtctcctgtacaattacctgttggcaatgggggaagcattgacagatcaagtatgagcagtgcccaaatttcaggctcagcaaatgggaggctagtctcaagctttgcttctaaacagcagaccagggcaactggtgctgtgtacccttctcgaagtaggaagaggaagggcgtgttagattatcctgtctc

SEQ ID NO: 22509 - DNA, 469 bp, Glycine max
  unsure (1)..(469): unsure at all n locations
  Clone ID: PAT_MRT3847_120327C.1
nanaggttaggttttgttattttattttgctcttaattctggagtgggattgagagctttacatggttgtttgtttgccnncnaaaggacaaaaaaaaaaccccccttgaaaaaacaaccgccgaaatttaacagggttttcggggggggggcctttttgggggggggggggaaaaacggggggagcaaggaaaaaattttacaaaaaaaaaatttgaaaggaaatttttggcgaaaaaaaaacaaaaaggcgatttgcggggggttggcccccttatacaaaaattacaccaaaattgtgtctgaattgttttttaacccgggggccctttaaaaaccggccgaaaaaaggaggaaaccgggttaaccccgggaaaaccaccgaaaatttttttttagggccccttggggggcccctttttttagggggccaaaaaggggcctccccaaaatttgttccccaaataaa

SEQ ID NO: 22510 - DNA, 173 bp, Glycine max
  Clone ID: PAT_MRT3847_120328C.1
gctttttctcctccaaagccaagatagaggcaaattttggaatgtaattaataattatctactagtaactcgtggaacacaagtgttccttaaaagacaagttaaagtctagaatgaggagcggaaaacaatttggaaaagtggatatttctgtatgaagcgaacattgtgag

SEQ ID NO: 22511 - DNA, 1079 bp, Glycine max
  unsure (1)..(1079): unsure at all n locations
  Clone ID: PAT_MRT3847_120329C.1
gctcacttcgcagnnaggctttgaaatttcataatgtcgggggttgaggttgtcgcccctcttgttggagaggtgggagcgcttggggttggagaattacatactacaattgcatctaaaattgcatcttccagaaaccttgatgacaactacaacattttgctcaaagacatggagaagctacttgctttttttaaggataaagagaggagattcaaagaaacaaccacaaagacaccactaatgcttacaagctttggacaaacagggtatcagatgccgcagaagaagtgcagaagctgaaagttaaatacaaagaaaaaatgctaccctggtggcgtattcgtcgacgttcacgtctgagtgaaaatatggtgaagaagagcaactgtgttcgtgaacttgtgaaggatgaatgtttaagagattttcttgttgataaaccaccagagcctgtcttaaaggagttagttctcccacggataagtggatatccaacccttcaagatgccttggaaaagactctgggtttgctaagaaataataagattaaagtcattggagtgtgtggaactaaaggggtggggaaaacaacaataatgcggaacctaaacaacaatgaagaggttgctaaactgtttgaaattgtcatttttgtgaaagccacaactgatgatcatatgcttcaagagaaaattgctaatcggttgatgctggacataggaaccaacaaggagcatagtgatgatgttgcaagaagaatacacaaagagctagaaaagaagaagtatttattgattttggatgaggttgaggatgccatcaatttggagcagttgggaattccaactggcatcaatggcagtaaggttgtaattgccactcgattccctcgagtttataagttgaatagggtgcagaggctcgtcaaagtcgaggagctaactcctgacgaagcatggaagatgttcagagatactgttcatgcctttaatcctaagattgattcccttgacattcaacctatagcccaacttgtatgccaaaggtgctcttgtcttccacttctaatttacaac

SEQ ID NO: 22512 - DNA, 537 bp, Glycine max
  Clone ID: PAT_MRT3847_120330C.1
ctcaccctcaccaagtttagctgttcagtaaaagtctaaaaccttgagtggttaaagaagcttgatttcatttctggatcctgtcaatagtgttaacattctgttattgaaccaaatatgagaggggaaatgtttcacaaaattaagctaagcatttgttctattatctttcataggcttaaataaagaccaaccaaatcatccaaatctataacttgtgttcatcttaaatttgataagttggctgctggtttgcacactgattaccagctcttctggtctttccactcattgctgtatgggattttggacattcatacttacgcctgaatattgcttatgtatattcatataccgagtaatgagtatcgtctccataattaaaagtaacatttcttatttaattatcaataaacttcttttcttccttggttttcttcttccttttttttacttttttattttaacctttcttcatttcatctgtcacatttatgttagcattgaagcaatggtcttgatcgtatcttctaacaa

SEQ ID NO: 22513 - DNA, 256 bp, Glycine max
  unsure (1)..(256): unsure at all n locations
  Clone ID: PAT_MRT3847_120331C.1
ccctccaattgggtttctgcttccttatttttcctaatgcttcaacaggggacttggagcccaccctttcctggatcttaggtgaatcaaccctcataaagggattggtctccaacccatccccacaggttgagggaattggtggttggccaccttgtcnttgattcccaacccagggtaaattttgtgggatcctcaaagtgggtggctcaagggtcaaaaccaattgcaagtgtgtcactgagatctcggggcc

SEQ ID NO: 22514 - DNA, 1047 bp, Glycine max
  unsure (1)..(1047): unsure at all n locations
  Clone ID: PAT_MRT3847_120332C.1
cccacgcgtccgtttttacttatgatttttaggtaagttggggaaaagataagtattatatactatatatgagatatttgatagagtgtaaccaagttttctggataactacatacataaggtgtggtgtaattaatctgagcacatatatggtgaaacagttactgaaatgggagaatccaagtttgtgtccttggcatttctactggtttgtttagtggtccaaagggtgtggtcacatggatatcatcctctttcaaaagttgctgttcataaggcaacagtatcacttcttgaccttgcttacatcaaagcatctccagcagttcttggactacaagagcaaactgctgaatgggtaactctggagtacagttctccaattccatcaattgatgattggattggagtattctctcctgcaaactttagtgcttccacatgtccaaaagaaaaccgtagagtctacccaccactattgtgttctgcacccattaagtatcaatatgcaaattactcaagtcccctctacaaagaaactggaaaagggtttctgaagcttctgctgattaaccagagatcagatttctcatttgcactattttctggtggcttgtcaaacccaaagctagtagcagtatcagataaaatagcttttgccaatccaaatgcaccgctttaccctcgcctggcactaggaaagtcatggaatgagatgactgtaacatggacaagtggatatgggatcaatgatgctgaaccttttgttaatggggtccaaaaaaggggatcgtatgcattcacctgctgagacactgactttcactcgtgatnagcatgtgtggtgcaccagcaagaacagtgggaatggcgtgaccctggatacatacacaccagtcatctgaaagaactgtggcccaacaaaatatatgagtacaggataggacacaaattaaacaatgttacatatatcctggagtggaaactatcagttcaccgcacctccttttcctggacaaaagtcttacaacgtgtagtcatatttgg

SEQ ID NO: 22515 - DNA, 1616 bp, Glycine max
  Clone ID: PAT_MRT3847_120333C.1
gtttactgatatgaagcccaaacgaattaaggtccgtagcatacgaaaccctaagaattctgacgacactatatattcatcgcatcatgaaagtccatcacttaatccaaccccaaaaaccctaggtagagagctcttcctccctttctcacagcaatggccgccgcagcacgccctctcgtcaccgtgcaggccctcgacggtgacatggcaaccgatgcctccgccaccgttcccatccctgacgtcatgaaggcctctatccgccccgacatcgtcaatttcgtacactcgaacatctccaagaacagccgccagccatacgccgtcagtcgtcgcgctggtcaccagacctccgccgaatcctggggtaccggccgagccgtctcccgtatcccccgtgttcccggcggcggaacccaccgcgccggccaaggagcctttggaaacatgtgccgcggcggacgcatgttcgccccgaccaagatctggcgccgctggcataggaagatcaacgtgaaccagaagcgctacgccgtcgtctccgccattgctgcctccgccattccttccctcgtcctcgcccgcggccaccgcatcgagtctgtcccggagctcccccttgtcgtcagcgactccgccgaaggagtcgagaagacaaaagaagcgatcaaagtcctcaagcagatcggagcattcccggacgccgaaaaggctaaagacagccgcagcattcgtcccggcaagggaaaaatgcgtaaccgccgctacatctctcgccggggaccacttgtggtgtacggaaccgaaggtgcgaaggccgttaaggccttccgtaacgtccccggcgtcgaggtcgccaacgtcgagaggctgaaccttctgaagctggcccccggtgggcacctcgggaggtttgtaatttggaccaagagcgctttcgagaagttggattcaatttacgggtcttttgataagccctctgagaagaagaagggatacctgcttcccaggtccaagatggtgaattcggacctctccaggattattaattctgatgaggtgcaatctgttgtgaggcccattaagaaggatgtgaagagggccactctcaagaagaaccctcttaagaatctcaactcgatgctgaagctgaatccttatgccaagactgctaagaggatggcccttctcgctgaggcacagcgggttaaggtcaagaaggagaagctcgacaagaagaggaagactgtctctaaggaggaagcgtctgccatcaaggctgctgggaaagcatggtatcacactatggtgtcagattctgattatacagaattcgacaacttttctaagtggttgggtgtttcacagtaaacttcatgatttattttttcgtattagaattttgttttttatgctcatcagaactaaatatccttatctttggtttttttgttttgcgggttaaggttgtcatcataattatgcagacaatgtggaaattttgtttgttggattttagtgcaaattctggttcttatattaaaaacagcatctcttttattaaaaaaaaaaaaaaaaaaaaaaactcgagactagttctctctctctctctc

SEQ ID NO: 22516 - DNA, 194 bp, Glycine max
  Clone ID: PAT_MRT3847_120334C.1
gagggccaatttatatttctccttcattattggtttgttgaatcgatctcaagtcatggcatgatgacctcaagggggccgaaaaattggttccaacagaaaaattacgggcgtaagagtgaacccaaaacgggctgccttctcttatgaaccttttaacaaaaaagtatctggttagaaaaacttaattaaag

SEQ ID NO: 22517 - DNA, 634 bp, Glycine max
  Clone ID: PAT_MRT3847_120335C.1
cgtctgggcacgatgtcacagaacaacaaaaggatgttggaaggaaaagctatggtgaaagaaacagacatgtcacccaagatgcagatccatgccatggcctctgcttctcaggctcttgatctctacgatgtttatgattgcatctctattgctgcccatatcaagaaggaatttgatagtgtgtatgggaatgggtggcaatgtgtggtgggatccaattttgggtgctatttcacccattcatcagggactttcatctattttgctctggagacccttaattttcttatctttaagggaacatcttcttgatttatcttatgtacaatctgaggtagaatacagggtttggttatcagagaagcatccatatgcagtgcaggacaagtttttaattgatccctcttgatatctgatttttcttccatgcatcatcaaaatattttagatgttacagatggaagaactatgtatgatggctgttgaagtgtctccatcaccttgtctctcagatggaactttccgacgactctggattctcctatgtgaatatgtgtatcaatagaactataattaagatgctgtctctgctttatgtgaaaaaagaataataataaaataaaattgtctg

SEQ ID NO: 22518 - DNA, 956 bp, Glycine max
  Clone ID: PAT_MRT3847_120336C.1
gcgcctgccacaggtgggtttggaacttggaactggagtagaggggcttctttggtgccacaatctcaaccttagataacagattattattcactgcaaaaaccttgtaacacagaacaacaaaaggatgttggaaggaaaagctatggtgaaagaaacagacatgtcacccaagatgcagatccatgacatgtccctctgcttctgaggcgtcttgagaactaggaactggaggggcttcaggtgccataatctcaaccttagataacagattattgcacagcaaaaaccttgtaaaaggagaattagaatcacctctctctaaggatgttggaaggaaaggctatggtgaaagaaacagacatgtcaaccaagatgcagatccatgccatggcctctgcttctcaggcccttgatctctacgatgtttatgattgcatctctattgctgcccatatcaagaaggaatttgatagtgtgtacgggaatgggtggcaatgtgtggtaggatccaattttgggtgctatttcacccattcatcagggactttcatctattttgctctggcgactcttaattttcttatcttcaagggaacatcttcttgatttatgttaaaagtgcaatctgagatagaatacagggtttggttattagagaatagagaagcatccatatgcaggataagtttttaattgatccctcttgatctgattttgcttccatgcaccatcagaatattttagatgttacagctttgaatggaagaactatgtatgatggctgttgaagtgttttcatcatcttgtctctcaaatggaacttttcgacgactctggattcacctatgcgaatacgtgtatcaatcgaactgtagttaagatactgtctctgcttcatgtgaaaaaagaataataataaaataaaattgtccgaaaaaaaaaaaaaaaaaaaa

SEQ ID NO: 22519 - DNA, 346 bp, Glycine max
  Clone ID: PAT_MRT3847_120337C.1
catcttgcatactagatcctcctgctcctctctctagcgtaacccttgtatggctccctgctaacataatctgtagagaaaaccttgacaccagataaagttctctccaaaacaaaacccaacgacccaaacggtcattgagcgtttcctggtgctagttactgaatagaatcggataggaatctgacggtgtagatctgttgatcacggtcatgggagctggcggctccaaacttgagaaggcgtattgtggaccaatttcttgatagagatcgtcactttggccccaagaatttccagaacactttgttactgcaacaagtgtcttgcagggcaactatacctt

SEQ ID NO: 22520 - DNA, 145 bp, Glycine max
  Clone ID: PAT_MRT3847_120338C.1
agtaggtggattcctctcacattcacctacctaagcccacatacggtaactctcactcacaccatcacagacagttaagacttacatgaacctatgatggtcacaactctggttgctcaaatagaaactcactaagcggacacac

SEQ ID NO: 22521 - DNA, 128 bp, Glycine max
  Clone ID: PAT_MRT3847_120339C.1
atgtaagcaaagatggctttcacggaatcgtctctcctggttccttcggtttcaggaaccaacaagggcaagaagacacggtccccgaagacaaatggtatttacgccacattctgtattttaccctg

SEQ ID NO: 22522 - DNA, 285 bp, Glycine max
  unsure (1)..(285): unsure at all n locations
  Clone ID: PAT_MRT3847_12033C.1
cggtccagctttccaacaatgcagctcactaccttcatttccgtcgcctcggccgtngtcgcaaaccgcttctgctgacagcttgaggagcgccgtcaccctgaacaaggactgcgacacgaaccagccccacgctcgcatcgtcaaccgttgcgactacgatgtcaatctttggtccgtctacaagggcgacggttgcccttcatccggcatggtcactttgaagaccggcgagagctacgccgagaactacgctaccgctgaggacggcaagactggngtgtt

SEQ ID NO: 22523 - DNA, 288 bp, Glycine max
  unsure (1)..(288): unsure at all n locations
  Clone ID: PAT_MRT3847_120340C.1
tcttagtcccaattttctagggttttatntcattttccgatggcttctgcagatgttgagtnacggtgttngtcngtgggctcnanttggncantgaaggancatgcnctganagnnnccttcncccangaacggcgaattcgttgaacncaggattatcaacgatcgtnaaantggccagatcccaggggttttggatttntgaccttcgcctcggagcagtccatgancnatgcgntcggagcgatgaatggacanaattggacggccngtaatatccnntgtcat

SEQ ID NO: 22524 - DNA, 709 bp, Glycine max
  unsure (1)..(709): unsure at all n locations
  Clone ID: PAT_MRT3847_120341C.1
cgaattcgagctcgttacccggggatcctctagagtcgacctgcagactcttcgaggactctgttacctcctttccaattcacgctcaaaccttcttccattctctctacaatctgctttctgctccccacctgcctcgtgtgcaggatcttacaatgcaattccccaggatgattattgatcgcattcccttcattgttgacaggagcctccaatccccactaccctttcccttctttttgttccacatcttagtgaccagtggctgcctaacatacttggtaactaactatgaaatgtgcttcttactgatgttggactaaatgtgaaatttcagtttagaacttgtaacccatatacttcatcagttgggtgtgcataagtcaatttgtgtcagatatcatctcgtggtatctgatattgtaattcccatgttctataatggcaataatttgatatgatggtggaccattaaagattaactagtctttgaaccttttcgttttgtgttatctgccaattgcttttcttattgtcacanatttttgcttgnaccaagaattgataaaaaattaagtttacaccgttgaagataactaactataacttatgcctttgtttttagttagcagggacagcgaagtctaggttttctgctaaagaatacagtgatcatatggctctttgttcgagcatatgaaaggatgga

SEQ ID NO: 22525 - DNA, 1250 bp, Glycine max
  Clone ID: PAT_MRT3847_120342C.1
tcgacagcaacggcgacagcaacggaattccgcttcaacaagttgaatcaaacagtgaaagtaaaacattgtgcaattaatcatcaactgcaagtagccagtgcataagatcaatggcgtcaagacagcaattcaaggaagacagagccgaggcagctgcaaaactcgcagcgaaagacatcggcgacatcaacagaacaaacgagcgcgacgaggggtacgacttgcacgacgaagccaacttcaagcaagcacgagctgaagcagctgcaaagctggcggccaaggatctggaggacgctaacagattaagagacaacactttcaacacatggaaagagcaacatcagcatgatgagaacaaacccggtgtgatagggtccatgtttagagccgccaaggaagccgtggttgggaagcctcaccacgaggaagtttatgcaaaggaaacaaagatgggtgaatattcagattatgcgactcagaaggcgagggaaacgaagcagaaggctggggagtatacagactatgcggctcagaaagcaaaagaaaccaaagactatgctgctgagaaggctaagaatgctaaagataccactgtgcagaaagctggagagtacaaggattataccgctgagaaggctaagaatgctaaagataccactgtgcagaaagctggagaatacaaggattataccgctgagaaggcaattgaagggaaggacagtgcagtggggaagcttggggagctaaaggaatctgctgctgatgctgctaaaagggctatgggtttcttcaccggtggcaacaaagaccaaactagagaggaggaggaggaaacgaggcggagtatgcaggaggtgagggtgcaagataaggagtatggaacgggacgtggtactggagagaagttggtgataaaaatggaagagtcgcggccaggagcggtggcggatgcgctcaaagcagcgaatagggccatggacggcgatatggaggaggaaggcgtgcttcatgtggagcgtcgtagggagaaaatgtgattctccttctcatccatcatcataataataataatcacatcttgtgttttgtaataataatgtagggttacctttttacttagtggatcctctttagctttcatcctcctaaaccttgtctttctttcatgccattttaatgtacgtgttactttttaatttttagaatgtattatgaaaaccggttttggtaaaaaataatgcaat

SEQ ID NO: 22526 - DNA, 476 bp, Glycine max
  Clone ID: PAT_MRT3847_120343C.1
tttttttttttttttttttttttttttttttttttttttttttttttttattacctttaaaccggtttttcgaggaccccaaaaaccgggttttgttttcctttaccccccttttttatggttacaaaaaaaaattttttttttttcaacccatgattaaaataaaaaaacacccttaattaacctcgaaaaaaaagcttaattaaagtcgaaaaatatgttttttaaaccttggtggtttttttttagtgggacaaccccaaaggggggggggctcctcctgttgggaaaatgtaccttcaccaataaacaacagggaaccccccctctgggaaaaaaccaaccaagcctttgatgtagggaaagaaaaatccttgggggggggccaaaaaatccaaaatccttggaaggtttttttcaaatcccccccaaagttggtatttttttaaaaacaatcttaaaaacctttaaggccc

SEQ ID NO: 22527 - DNA, 868 bp, Glycine max
  Clone ID: PAT_MRT3847_120344C.1
gggattgtttcaaaaacataccaagcacggaagtaaaacaagatttccagtcatatagaatgttgtttcatcttctaattctaaaggtaacaaacaataatgtaaaaaaaaaatgttgaaacaatccatagttattataccaagaattaatctcatgcatacccactgcgactaactgtccccttaaacacatagagacagtctccatcttcaactccatgccacctgaggctacagctatcacgcatgatcctctgcttgtgtatgaacaaatagtcatcaactggcagaatttttctgcttatcagtaactgcttcaagtcactgactgtgcttgcatctctcatctccagtggaatggtggcaccattaagcaaactagaggaagtttgtactaccaagcttaacttccttgtgggaggttcttctctcgatcgattcaagggcttgaggaacacaacaatctcagaaaattcacgtatgccatactcactcaagtttctaaaatcttcatccaattctctccctgaaaagtataatgtcattcttttgatgggtgtgctatcaatgatgtgaattttttccttcaagctgcgaacagtgtcggttctgtccacctcaatgttaaactttctagctgaaaattttactgtgatttgcattttgctagggtgtggctccactggtttgatggtgaggtcaatttttgtaccttcagtcactattgggtaatcttccatgtctaatccatccaatagttcccacccagaaactgttaggatttgtgagggcactggaatccccaggatttgttctattttcctcttgattgctgcaactgtttcttgggtacctacttcaatgaaaa

SEQ ID NO: 22528 - DNA, 552 bp, Glycine max
  Clone ID: PAT_MRT3847_120345C.1
ccgacatcaacataagttgttttttactgatgttgatcgaggttttttcagttagaatttttttgtatgatgtcaaccaaagctactttttgtcgatatcgactaagattttttttagatgatgttagttagggttattttctcactgacgtcagttatgggaaatttttgctaacgtcaaccaaggattttttcgtccgttgtcatctaggtttttccaattgatgttgaccaatgatttcttttgtcgacgttagttagattttttctattaacatcgatcatgactaacttttgagtaggcacctgctagggttttttagtcgacgtcagttagatttttccagcgaacatcagccaaagttactttttagccaatatcggctagggttattttttagccgatgttagctaggttgttttggctgatgtcaactagattttcttagccgacgtcagttaggatttttttgttgggttttctggctgacattagttagagctatttcttaaccacattagctaggtttttttgggtgatggtggttaggg

SEQ ID NO: 22529 - DNA, 206 bp, Glycine max
  unsure (1)..(206): unsure at all n locations
  Clone ID: PAT_MRT3847_120346C.1
atcaaattgacacttgaatttngnaaaaggggggttatattaagttggattccgatacacaaaataatttacattatctgaagtacttcaccaaacacaaatctaaaaactctcaaaagtcatttcgttctttgacgctcacttttccgggacaaaattggtggcatatgcccaagccttgttttttacaaggtcatcaaagttat

SEQ ID NO: 22530 - DNA, 1324 bp, Glycine max
  Clone ID: PAT_MRT3847_120347C.1
cgaggcgtccaggcgtttggttgaatggaagcgcgtgggcgggtggttcgtgtttccgtttcgcacagtgtcaatgtcctcctcccttcttttcccttttaagtcatagctttccccttcccttcaaattctcctcaaaccctacctccctttccccccccctcttcgcgtcttttcgcaaccgactgcatcttggatactggaatagtgtgccaatatgagctctcgggcaggcaagggacctgccgtcagaagttatcggaggagaaagacagcgttggaccttgaccttaaccgtgtaccagctggtgagaatcgtgagcaggagggaccttcgactcagtcggtgcctcgagaagttcaagttgaacagcagcagcaggctactcaacctccgatgattgacgtggaagccattgatgatgatgttgttgaatgtaccccaagggcttttgctgaggctaaaaacaattcaagaagagttcgtaggaggactatagttgatgttgatctagaagatcagactaggcgcaacaaacgccgaagagaattgccaaatctgattattaattgtgataagtatataaatttggaaggcggtagcagttccatggagcaaagttttaaaaagccacctgaacctccaaaggagcttgtcttcaactgtccaatatgtatgggccctatggtacatgaaatgtcgacaagatgtggtcatattttttgcaaggattgcatcaaagctgctataagtgctcagggtaaatgccctacctgtagaaaaaaggttgttgcgaaagatcttataagggtgtatctcccatcgactagttagaggctttccgtggaagctgtaaagaggagaacagggattggaagaaacgtcattgtactttggacaatactgaatggctgtgttgtttctaatatgttccctcatagctgatgcttagtctgttgttgggtagctgtttctcttaatttatcatattaatacatgatgacatttggtatatagatataattccttgatcaggttttttttagctttcatgttgtgaaaacttggtcttttctttttggtgataatatagggcagagaggccagtcatgacccattcttgagtggggattttttttatgtaatccttcacaagttccctgataggatttcttttgcttcgttattagtggcttagggcagcaggttgccagtatgaatagctatctgatttggcaaactgttttgcagtactagtccagcgtgtttagttttggtttacatgatatattcatttgctggttaaatactgtttttttttcc

SEQ ID NO: 22531 - DNA, 376 bp, Glycine max
  Clone ID: PAT_MRT3847_120348C.1
ctttatttttatacacatttgaaagcataagagttacaagaatgtgataaattgtaacgacttatgaatttgccgttattgtcattgtcatgtattactcacacattggaataagtcaaatccctcataacaaggggactcaggaggtgcacgatgactgatcccatcatccatccgagacaacagattggtaatcatcctaattggttttggttgagtaagagagatctcctaatgtaaatcattttaattgggcgagagtaagaaagatgtcttaggatcattatgaaaggattacgaagagaagagaagagaataacccgatcattgagcatgtggaagaagtggaagaaggggaataagcaattggtgtcat

SEQ ID NO: 22532 - DNA, 330 bp, Glycine max
  Clone ID: PAT_MRT3847_120349C.1
ccttagtatcacttcccttagtccaatatggggaaggggttcttaactctatctctatcatcactatgcttgctactcttgtacaatgcatgctttgctattacctcacacaagtctaacgagtgacaactaatacaacctcaacacgttgcaaccctaccaccattcttgagtccgaacgtggctcttatctaaacatggaactatcaccgcaataccagatctgcattgcacctggtcactgctaacaatcccacccttaaccgcaacggactacacttgccatctcactcaccttatccgtaactgatcattctcgctcaagggaaa

SEQ ID NO: 22533 - DNA, 720 bp, Glycine max
  unsure (1)..(720): unsure at all n locations
  Clone ID: PAT_MRT3847_12034C.1
gagggacaaccgattttttttttttattgcaaaaataaaaaccgagtaattgcggaaaatgcaagaagcgacccatgccaagcttccgagttcctatcacaatcaataatcattttctacaaagaaattaaagaaacttttttttaagaatatacacctgtaacttatttacgtacaatgtagatttcaatatggacaaaggcgaatttgaatccccattacccagtatgatgccctagttcagtttgttcagtcatcagcaaaatatcggcaagggcctcgtcattatctattttagtgtaatcaagatgttcgggatctttccctaatagaaacttctgctgcataatgtaggtgaactgattcatccggtcctccagttcttctgcagataaagttgattctcctcactcactctgcctggatcaccctcattcaggtgtctctctacagggttgtccattgctactatttcttctcctgtcttcatccacttccacctcctcttgagtttcctcttctttgtcttcctcctcctcctcttcttattcttgaagtccctcattaccaacccagtccctntacggcacgcccatcctctgctgctccccctctaatcttcacaaccagctccgtctcatcacacctcctcatcagtgtctcggaccaccgctcccccggcctcgccatgcgtctgcaactctggtcctgaaacctcgt

SEQ ID NO: 22534 - DNA, 373 bp, Glycine max
  Clone ID: PAT_MRT3847_120350C.1
ttcttgtcctagacaaaaagcaatgttggtatcaagggaacaagcactggctaaatctgtgccagcagccacaatccaattgttgtctgaatcacgtaacaatatttggaggatagactttgtattcaattccaacttttatgttgtaggtgtcaaagaagctcccagtgccccatgtgttggcagcctatcagtctcaaagatccaacaagccaagaattacttgaggcagtggaaagagagcgaaactttaggttcaatccatctagaaatgccacaatatttcatcatccaacactgggggattttgagttacaacatttgccagttggagctagtgacgctgatcttgaagagcgtataatccaacact

SEQ ID NO: 22535 - DNA, 2026 bp, Glycine max
  Clone ID: PAT_MRT3847_120351C.1
atacagtcttctagtctgtgtttgatgagttaaagttgcactttttttactgttgaatattgatactctgattttgaagtctgtagatatggacatttatttgctaacatgctcctgttggggttcacaaatattttatatacatattttcatatttcttccttgtcttgtggtttattctttaatttcatgaacttcttgtcctggagaaaaaaaaatgttggtatcaagggaaaaagcattggctaaatctgtgctcgtcgacacaatccaattgttgtctgaatcacttaacaatatttggaggatagactttgtattcaattctaactcttatgttgtacccactccgcgcccgcgagacttctctctcacactcactttctctctctataactctttctcacccgctagggtttccttttcatcgcatcttgagtttgcaacctcgtcttgtgatttccatggagggtgctgggatggaagagaataatattattaatgatgatgataataataacaagtctgaggcgcatttgacttctgccgctgcttttgtggagggtggaattcaggacgcttgtgatgatgcttgcagtatatgccttgaagctttctgtgatagtgatccttccacggtgacgagctgcaagcatgagtttcatcttcagtgcattctcgaatggtgtcaaagaagctcccagtgccccatgtgttggcagcctatcagtctcaaagatccaacaagccaagaattacttgaggcagtggaaagagagcgaaactttaggttcaatccatctagaaatgccacaatatttcatcatccaacactgggggattttgagttacaacatttgccagttggagctagtgacgctgatcttgaagagcgtataatccaacacttagcggctgcagcagcgatgggaagagcacgccacattgctagaagagaaggccagagaaacaggtcatcagctcaaggtcgcccacattttttggttttttcaactaatcctaattcacctcccatggctcctgcttcttcctctccatctcagaggggggatgatgaaccaattcctacaattgctgttgccaatctgtctccaactcctgcaactggagaagaatcatcacagctgactttagttccgcctattcaagcagaacaggtgtctgcttcaggatctggatctactgctcttgctacagatcatcagggatcatcttacaacaataggagatctcctaatcagtcatctccaagtagtcaagacagagcagggccatcagaattacaatcattttcagaatctctgaaatctaaactgaatgctgtatcaacaagatacaaggagtcaatttccaagagcacaagagggtggaaggagagatggttctctcggaacaacactatgtctgaccttggatctgaagttaggcgagaagttaatgcagggattgcaactgtgtcacgcatgatggaacgcctggagaccagcgacaataatagaagcaatagcaattctgcccccagtaatatagaggatggttcagttcaggaatataatggtcaaactttaacaccaggcaatgaaggggacggtcttttgagagacaataacacaaaagcttcttgtgctgcaggctctagttcgaactaggcatgtagaaggaattgcttgaactctgaatttgttttgtccaaaaggtagaaatagaattgcccattggggatgtgaaattccatggatgtgatgcattgcctattggctggcgcagaccaggcaagtgataatccattggcctgcagaagaagaccaacaattgtgatattggaaataaaaaaacttaaaaaaggaagcagtggtctctttcgtttgaaacctaggaacctatatatgattgtatattcacattgtaaacttatttatggatattcctcagataatctttgcataaagtactgtgtttctttcttctacttccagagataaatcactgtttttggcttaacgtt

SEQ ID NO: 22536 - DNA, 269 bp, Glycine max
  Clone ID: PAT_MRT3847_120352C.1
ctcgagccgaatcggctcgaggagaagacgacataatgggatgcacaagttagttgagatagctacaaacaataagatgaatatgaaagtgcttggtttgggttgtgctacaagtttgggagcatatgaatgccatggctcagactagcagaagttctttcttcaaatgaaaactggttttggtgggcaatacatcagtgaggtggcctgcgccacatggaagcttggcatggaatctatacaaccgagtcaagtggctaactgtttct

SEQ ID NO: 22537 - DNA, 233 bp, Glycine max
  Clone ID: PAT_MRT3847_120353C.1
ctcgggtgggctctaatcatggatgcagacaggttttcttacagttatgatatccccgccttctgccaaggactgatatgagcagggagaaaatactatatagttaatgctggccagtaatggaagtcttggtgtatgtcaaaagactcttacacgcacagtctacaaaggagtgatatttctttaaatgataacaagaatgaagaagattcatgttacctaatgactactgt

SEQ ID NO: 22538 - DNA, 520 bp, Glycine max
  Clone ID: PAT_MRT3847_120354C.1
ttttattataatcgaaagttcgtatttttgacgacgattttttttggaaccattgttaattgaaattcacttttaacaacattgactataacgacgattgagaatcgttgttaaaaacccaatttaaccgttgttaaaaaactttattgtagtagtgaaaattgtgtgtacattgtgtttgtacttatgttgtctatatggtgaaaattctaaaaggacttaaaacaattgagtgtaggttcgaattggactgaactaatataaactattgtgtatttctcttattttctataactctaaattttgtaataattttggttgtggaattgatcttatgggtgatcctaatagtttttttatttctaaagatctttgaagaaactttgattgatttaaaggggtatttttaatcagtgttaagaataaattcctaaagattttgaaataatctatttacccccacccccctagtagacttttggcctgatcttctatccctttgcctctaacttgaacgtta

SEQ ID NO: 22539 - DNA, 422 bp, Glycine max
  Clone ID: PAT_MRT3847_120355C.1
ccggtccttaattcccgggtcgacgcacgcgtccgcccacgcgtacgcccacgcgtccgatctctgtcaattctctctcatactctatatatacttcgcgtaggattttaagcaatatctatgtggatactcatatactatggtccgccaattctcatgaactacaactatattatgtagcacatgacgactattagacctctaactgttactagtacagttattctcatgatactcatatctcttcctcttcgcaattatttccacttacacataacatcatatacctcatatgatcacatatcattatagcctttatctcttatacatcaagttgaatacaatgctaatcagtaattcataatcttttatgcccagctaccataaccgaccctatgtgcaattctgataagtgctacatc

SEQ ID NO: 22540 - DNA, 144 bp, Glycine max
  unsure (1)..(144): unsure at all n locations
  Clone ID: PAT_MRT3847_120356C.1
cttgaatcagaaaacatgatgctaagaagctcttcaanagcagnnctngganccctcntgctacatccttcncagatagtcntaanaagaanattcantcagaaanctgtcatgnacttaaanacttnccacgaagnagtgncc

SEQ ID NO: 22541 - DNA, 863 bp, Glycine max
  Clone ID: PAT_MRT3847_120357C.1
ctacgaccaaaccataggattgtgacacagacatggaacttctctctgtgtctgtctcacttagcaaatgccaaacattatcctttccgaaaccaaaggcaccccaaattcacgaacttccattaaacattagattacccaacaaaacaaatcatttcagtctttcatcatcttcttctccttgttgtaattggtccattactagggtagcagcagcaacaacatacccttccttcaatccttccaccactcagaaccctcactggatggtgctcatggacacgcctcctcaaggggtcaattccaagccacacgtcgctcggaattcggctcgagctctgcaaaccgttcttggcagtgagaaagatgctcaaatgtgtatatatgatgcttcatggaacactcacttcggtttttgttgtgacattgatgaagaaatatcctcccagctggccagtttacctgaggtcttgttggttaggcctgacctggatttcaactctttgaaaaaagactatagtttatcaagtggcgaggcaggccacctatcaggattacgaactagaactaatatgttgttccctgctggaaattcaaagcattggcttgtcaaaatggataagcccggggttgaggctgttaccaaggctcagattgttgattattatgctcaaattttgaccaaggtcatgggaaatgagaaggatgcacagatgtgtatatatcatgtttcctggaaaaccaacttcggtttttgctgtgaacttgatgaggattgtgcacaagagcttgctggtgtgctaggtgtcttgtcagtccagccagataacaattttgagtctgaaaataaggattatgcaagc

SEQ ID NO: 22542 - DNA, 155 bp, Glycine max
  Clone ID: PAT_MRT3847_120358C.1
ttgaggcaatttttttcttcttccgtggcaatccttttatttcatgggttgcaaggcttttaaattcaatgggggtgttcttgagccactttaaaatgggactgtggaaattgagggtggttctttccccggttccttaagtggtggttcttctt

SEQ ID NO: 22543 - DNA, 422 bp, Glycine max
  Clone ID: PAT_MRT3847_120359C.1
ttacagtatccttccgataataaaggtggttgcgcgaatcgctggtgagcgtttgggggggttcctactaaggtggacattgccaaacgggctgatcccaaagctaaggccttgaacaaagctaatgctggcaaatcaagtggacaagtgtttaggacgaaagctaaaacgatcacgacataggtgacatttcacatgccaaggaccttgatagatgaaaggaaccgtacgtaccctcgcgttaaggctacacccagaaacacgttggaccattatcagatacttaaattcactatcactactgagtgtgatatgaagaaaactgaggataacaacacgctggattatattgatgaccttcatgcaaacacgataacgattgaggatgctgtgaagaatatggacgacattcatgcaaagaa

SEQ ID NO: 22544 - DNA, 472 bp, Glycine max
  Clone ID: PAT_MRT3847_12035C.1
gggaacaaaagcgggcccaaaaaaaaaaaaaaaaaagcccccctttttaccagggggaacaaaaaattggccccccaaaaaaacggggaccgggccccctatccaaaggggggaaaaataaaaattctttaacaataaattgggggggggggggtttaaccccagggggagggttaggggtgggcccccaaaaaaggggggggggaatcaatcaaaaaaaaaggccccttggcaccgggggcaatgggaaaataaccgccttttttgggccccaaagggggggggggggggccaaaaccccaaaagcaaaaggggaaaaggggcccccccacccccggcccaaaatattcccccccttatgggcttggttttgggaaacaagccgggcccaaacttagggcaaatcaaaagttccacaaggcaaagggcaaaaaaaagccaacaataggccccgacctttttaacgggtttt

SEQ ID NO: 22545 - DNA, 244 bp, Glycine max
  Clone ID: PAT_MRT3847_120360C.1
gaacactccgtcagactctgactctcctgtcgcgggtgtcgaattatcctatggctgataggaagatgctggtgtcagacatgaagatccacaccatgcacccgctgctctaacctgctgagctccaaatgtacacatcatggggctgggtgacgctgacatattcgacaccgtcgtcactcaatactacgggagcgcgagcgagaattgactccaagtgactgaaggctctccggatctgcca

SEQ ID NO: 22546 - DNA, 1226 bp, Glycine max
  Clone ID: PAT_MRT3847_120361C.1
tttttcagccaattgcaattatattacagactactttattacatacactgaaactagaaatgctgcatatataagagggaagaataaaaataaaaataaaaataaaatgtcgaagaaaagcctcgtttgtcactataacagcctcttaaggatgaacttgagtaaaagtagacaatttgaatcatatttacctcattatgatatgattaatttgacataattctaacttattgtatttttttatttttttatgcaagtattattgtactgtctaagatttataaatgcgtgtagcattcaaaaatcgaatgccaaaattgacaaaacgataaaaaaattttttgaggtaaattcacaattttgccattaattataagtggaagattcaagaataaatatatgggaattattaaatatatctttggagccttttctatccgttggtaaaccaatggttcatatgtgacgaaccagataaatcggttggtaaccaagcgtggacctagtagataaaaccttatcccttgaagcttcgaatttgtggctctgcatctaaatactgccactgttgtatctgttgggcttatatatacacatacataagctttaaatagtatagtatggactcacatgcatccattaatttttctgtcatattctgcaagcattactaaataattttcattatactggaaagggcaacaaaacattcaagtgcttgcttggaatgaatatgttaatgtagatcaagtattcttttatcacatttaataattaatatacgcaaaatttattttaaaaaacttctgatgaacacaaatcagttacgtcgaaatacaaaagcaacacatgttataaatcctaattaatctgatgcaatttccacaaaattttcttatttaattaaatttcttaaaacactagctaaagaatagtttcattgaaaatgttattaatgcattgtcattgtgatttttaatacattcctaatgaatttttttaaaaaatgttattttattactgattccttaagtagtgcatgtgtttaaagtaatgataaataagcccttctaccaaatttaaaaacaccttagcatggtggtgtgtaagtaattaatattgtctatgccaatattaatcgtgaatgtgcctataataatatatgtgaaattgatgagatttgagagagggagggagaaagaaagaaacactcgagctgaattcgt

SEQ ID NO: 22547 - DNA, 301 bp, Glycine max
  Clone ID: PAT_MRT3847_120362C.1
ctcttgaacccacatacacttgccatgagaaaacactgggaatgggatcgatcactctagctggcatattgcagatcaatcatggagtcattgtgaatttgtgatagctatcttatcgtttagcccagaagcatcatagctgctctggcttgataaggaaagtggcctgcatgcattatgcctaaatcagcttctagggccactgaaaattttgacatccatatcagttatgatatctacgatatgattctgacaagaaccataggtcttgaggtactttacctgcgaaaataaaaaataa

SEQ ID NO: 22548 - DNA, 489 bp, Glycine max
  Clone ID: PAT_MRT3847_120363C.1
gtaccggtgccggcaattcccgggtgcgtacccacgccgtccgaggacgcgtgggctgtcgcttgggggtctgccaaatggcttctactccttccacatatctgaataccatgaggtaggcatccttgccgtcactggatacttggagattgtgtacacttagaagagcctgcctgataagcgatcttgattgactgctgatgccccatctgttcctccatggcaaaagaagaataatgaagaagctgcttacttggacgatatgaatgaccacatcgcatgaaccattaatgcttctatggatgaacacaaaacttgttctaagaaaacaattcaaaaaatgattggtatatccaaggctgttgcaaaaggtaattccaatgcttccaaagaagttgaacgctctctgcctcttcagactactgtacaagactacatctcttgctttcgaaccactaggcttcaaccgaggcgtgtggttataccacc

SEQ ID NO: 22549 - DNA, 327 bp, Glycine max
  Clone ID: PAT_MRT3847_120364C.1
taggtgatcatgtgggcacataatccatgtgggaaagagagaactgatacagaggttgaggctctggccaaaggagatggattccaaggtttccgagccctgtgctgagctttcaatacctacgccatggagactcctcaaagaggtttaagctctttgccttgcatacatagagtgcattggagttctgactttcagactctgcctggggtgctaccttacataggctcccccggcaaaacgtccagcactcttacttcatcagaaaaagaataatctactacgcccagtgtatactgacttctatataataacaagcctccttag

SEQ ID NO: 22550 - DNA, 273 bp, Glycine max
  unsure (1)..(273): unsure at all n locations
  Clone ID: PAT_MRT3847_120365C.1
gcagacatattaatgagtaatgatgaacgaactaagagtagatctttgtggaatttttccattagaacacgaccaaaggagttgcagtcaaattggggagtgcgcatagccgaattggaaacccgaacttcaaggtttgaacgtcaggcgttggatntgaaagaacaaaaggtggatatnagttttcanagttttgggtgtctgangccacagccacaataataaangngcgagcttnganttgaaaananaganaggagagtgatgggtcnc

SEQ ID NO: 22551 - DNA, 485 bp, Glycine max
  Clone ID: PAT_MRT3847_120366C.1
tacggctgcgagaagacgacagaagggacatctcataattgttgtgggccaataaaacccagcagtatatcctcaagtactaagagatagagcttcggccatagcttgtaagaaacgggctacttttactgaattatgtttttttttctttttctaaccaccgaattatgttatgtagccaatggaaataaagcagcagaacccttttaattactgcgtcactgaattagcttattattattattattgttattattattattaagcttactgagttaacttttaaaaaggaaaacgattatttacttaaaaataagctgaaacagaccagcccttattttgtttgaataaaaaataggattatagtgcgaaaattagagtaagtaccttttcaattacgtaaactttcttaactaaactaagcagtggtgaactatcaccattgtttgctgatctaggagagataaatttccagtaaatggaat

SEQ ID NO: 22552 - DNA, 476 bp, Glycine max
  Clone ID: PAT_MRT3847_120367C.1
aagaaattagagggattcctccaaacttgaaaactttctctgcaatggattccccagccttgacctcctcgagcataagcatgttgctgaatcaggaactgcatgaggctggagacaccgactttagtttgccaagagtacagattccacagtggtttgagcacaagaatccgggacggccaattcgtttctggttccgtaacgatttcccagccataggtgcttgcattgctaagtcagattttcagggagttttcgattatccagatctcaacgtgttcattaatggaagggaacataaacattacggtcgtacccctgtccttgaaaaaccttgtacagttctttttcatcttctaatagaagatgatttagatgtatcactgttagagaacgaatggaaccgtgcagagattgtatgttatggttcatgggacgaatgctgaatccatgtattgaaagagctaaatagcatg

SEQ ID NO: 22553 - DNA, 227 bp, Glycine max
  unsure (1)..(227): unsure at all n locations
  Clone ID: PAT_MRT3847_120368C.1
cacgaaacgacgganactaaatctntaaaacgcttgaaannctaaaactctgtgtctccgcngttcactcattgtcgaagttcgttcagttgcttcacactctcancagagaatagaatngantgngaggacaganctatagtccatcggnntcctcntccacgttacagcnagnagnagnngangggccggttccnancnctagggggcnnggccatnctnccgcg

SEQ ID NO: 22554 - DNA, 346 bp, Glycine max
  Clone ID: PAT_MRT3847_120369C.1
ggctcgagacggctgcaagaagactacagaaggggagattcaaatcttcgttatggcgatcgttgcatttcaggcgagcctgagccaacatctgctgggtctggctctcccacagcctattcaagtacagtctccacctgttcctcttcgttgaccgctactccaggaagttgcattgctttcaccgctactacttcactcatatttacaaatctatgctcatgctttttctattgctgttgccatgctacattcttaatacatatctacaaatcattcacattatctatctacaacatcattcctgatggctctctcttactattttatcaccttttattttatc

SEQ ID NO: 22555 - DNA, 2170 bp, Glycine max
  Clone ID: PAT_MRT3847_12036C.1
cccagtgtgtgtgtgagagatggttatggcttcgtggaagaagctggtgttgttgttgttgatctttctctgcacttgtaaagcacaggaggaacagagctccaccccggtgtacctgtaccataactgttccggcggcaacaccaccgccaacagtgcctaccaactcaacctgaggaccctcctcacttccctgtcttccaacgccaccaccaccgaattctccaacaacaccgtgggactgggaacatccccgtccgacagggtgtacggcctgttcatgtgcaggggtgacgtgccctctgctctgtgccaacagtgcgtggtgaacgcaacggggcgtctccgctcccagtgctccctggccaaacaggccgtcatttggtacgacgagtgcaccgtgcggtactcgaaccgctccttcttctccacagtggacacgcggccacgtgtcggcctcctgaacaccgccaacatctccaaccaggattccttcatgcgcctgcttttccaaaccataaacagaaccgctgacgaggctgcaaacttttccgtgggtttgaagaaatacgcagtgaatcaagccaacatttctgggtttcagtctctatactgtttggctcagtgcacgccggatctgtcccaggaaaactgtagaagttgtctgagtggtgtgattggagaccttccttggtgctgtcagggaaagcagggaggaagggttctctatcctagctgtaatgtcaggtacgagctctaccctttctaccgcgtcactgcttcccctccttcatcttcaccttcaccgccaacacttcttcctcctccaacttcaccaatttccccaggaagcagtgggatctcagctggaacgattgttgcaattgtggttccaattacggtcgctgtgcttatatttatagtcggaatttgtttcttgagtagaagagcaaggaagaagcagcagggttctgtaaaggaaggaaaaactgcgtatgacatccccaccgtggactccttgcaattcgatttcagcacaattgaagcggccacaaacaagttctctgccgataacaagttgggggaaggtggatttggtgaggtttacaagggcactctttcaagtggacaagtagtagctgtcaagagactctccaaaagctctggacaaggtggagaagaatttaagaatgaagtggtggtggttgccaagcttcaacatagaaatttagtcaggcttcttgggttttgcttgcaaggagaagagaagatacttgtttatgaatatgtgcccaacaaaagtctcgactatattctctttgatcctgaaaagcaaagggagttggattgggggagacgttacaagattattggagggattgctcgaggcattcaataccttcatgaagattctaggcttagaattatacatcgtgatcttaaagctagtaacatattgttggatggagatatgaatccgaaaatctcagattttggcatggcaagaatatttggagtcgatcaaactcaaggaaacaccagcagaatagtagggacttatggttacatggctccagagtatgccatgcatggagagttctctgttaagtctgacgtgtacagttttggagtcctgctcatggagattttaagtggcaagaagaatagctctttctatcaaacggatggtgctgaggatctattgagctatgcttggcaactttggaaggatggaacacctttggaactgatggaccccatattaagagaatcctataatcagaatgaagtcatcagaagcatccatattggtttgttgtgtgtccaagaagatccagctgacagacccacaatggcaacaatagttcttatgctagacagtaacactgttactctaccaactcctacgcagcctgcatttttcgtccacagtggaactgatccaaacatgccaaaggagctgccattcgatcaatcaataccaatgtctgtgaatgacatgtcgattagcgaaatggatcctcgataagcttgatcgcttggaggttctaatatgtattattatccatgtacttatttctcctagttttaaatgacgaaaccttggaacactttgtattatagttgcttatttttcaactaaataaaatatatgtattatgcaggtaaa

SEQ ID NO: 22556 - DNA, 419 bp, Glycine max
  Clone ID: PAT_MRT3847_120370C.1
ggctcgaggaaccgaacctaattttttttgtagaaggagtcttttgaaggttcattgggcgaggatgtgaatatatgagacgacagctgaggggagcacaggtaagccgaggagcctatgaaggaccaagagaagaaggaggagagaaaaactgtggaatcaaaaaatgacatagaatctgcggagaaagtcgcgccggcagaaaccctgcttaaagtgatcatgcattgggaagggtgtgatagcagggtgggaatgttcagtcatgggattcccaggggtggaagatctatataccgattgaaagcctcacatggcggttgtgaaaggagaaatagcggatccgctgaaggttgtagagcgactacagatgatgggacttccactggttgatcttctctgtcggattccaaaagcac

SEQ ID NO: 22557 - DNA, 192 bp, Glycine max
  Clone ID: PAT_MRT3847_120371C.1
accaaagaaagattaaagcatcaatctttaatatgcaaaacattactgttttttactcactctcctccacaacttggacaacgtggactaccttgcgggcggccatgattcctcatgtccatatatcgcaaatatcccatcactttccacaaaacatacatatctgcactcacacctgacacgctccctttt

SEQ ID NO: 22558 - DNA, 377 bp, Glycine max
  Clone ID: PAT_MRT3847_120372C.1
ctcccctcaatatctcatggcaaactcttttgaagtttctgctctcaatcgcataagagtgcttcttgtaggagagctctatcccctttcactcacaaccttctttcaaataacctacatctgatcccaatctttatgttcttactcacccgccacacttgacccaactcttctccgaattcctttatttcccaacttatttcttataaaaccactgtcctttcttggagtctgaggcaaaaccctagatcatttacgctgaaaccgccaacctataattgggattcacgtgcttaaccacacacgacatttggaaacctcaatacaatacaaagccgttgttgcacatctatcttccccagagaacacagtggatc

SEQ ID NO: 22559 - DNA, 222 bp, Glycine max
  Clone ID: PAT_MRT3847_120373C.1
ggaaatggtacctctgcaatcgcttgcaatgtccactcgaatcgccaagtcacctcaaaaaccaggctcatgtacagtcccatccacaattgttcatgagcgtgtaaccctttaatccatggtcaatgattaaaagggtcctgttgaacgttacctgtgctaagaaaacatactcccatgcacatgtctgttatcaagaggggcaaaccatccatagagttc

SEQ ID NO: 22560 - DNA, 429 bp, Glycine max
  unsure (1)..(429): unsure at all n locations
  Clone ID: PAT_MRT3847_120374C.1
ggtagagaagagttaatggctggagcgtgaacagatcagaggcatacaggtggcaagtaagggaaattaatgcgagttacaggtgcatacatgtataccatgcttgtgatggcacagctatgaatgctggtgtcagtttcaatatggctttcttcgtgtttacattttccataaggaaatttgtcaaaggataattctcaaatttaatttccatgagtaatatcttcatactgtattaaatggagaaagtattgacttttttatatttttaatattgtttttattagaaaaaatcacaaacaaataataggaaatttataagttaaaaatatatcttatttaatcaattgagtttagactcttttatttttttaatatattaatatattttaatttttatntaatatttatatttaattacaactcatt

SEQ ID NO: 22561 - DNA, 937 bp, Glycine max
  Clone ID: PAT_MRT3847_120375C.1
gaaaataactgttggcagttatgtattagggtataattggtagtgcatgtaattaagcagagtgttaggacccaattgtaaggtatgagacgtgtgttccaccttggaagtaccggtttctatgtggagtttataaggccttggatgctaactatagcaactagcttttgtagtgtgatgctcccaaggttcttatcaactgctatcaaagctttccatcacatctcagttgcaaactagcagcttggatggtgacaccaacattgcagtgtttacttgggactagtcaaagggtcagtgcacagctaacattgtggagtgggtgctgctggggttgcagagcataatgggatgtgagagtccaattgtaagggctgggaattgagtccttcattggaagtatgagatttttgtggggagtttataaggccctaggctctcccactacaatgactagattttgtggcgtaattctactcaaggttcttatcacaaagggtgttggtatttgcagtctacggatagagagtaatctctgtaagggacttgtgtgtctgggacagcaagtatattgctgtagtgtgggtggtttctgttttcaatgttatattttgctggtttatcaattgctattctatcatattctatgttaatgaagcatgggttaccatatgacatgctgagtttcttttgcagccattctggaaggttgtaaactatacaaatactaggggtagaggagttgttggtaagcatcaagtgcattttacttgacaatatctacttctaattgatttctacaggataattatctcttgtgtcaggaatcttgcaagcagattatcttgagcccactcattataagcaagattttgtgagaacttcccttgttcaaatgctggaactacgcctcgaacacatgacatggaagtactgg

SEQ ID NO: 22562 - DNA, 387 bp, Glycine max
  Clone ID: PAT_MRT3847_120376C.1
aaaaaaaaaaaaaaaaaaaattttattttaaaaaaaaaaaaaaaaaaaaaaaagggcggccgaacaaaaaggaaccaagctaacaaacgcgagcaggggccggcccacctgcgggaccacggcaaacaaaagccaataagcggggcgacggttaaccaagaggggaccggaaaaaccacggcgggccccaagtaaaaacccttgcaacagaaacaacattggccagccggagcataatcgaagaggcccgaaccgatcgaccttcccggcggttacacacccagaaggccgaaaggaacgcgccctgaaccggttaataaaccggggggggaacggggactcaccccagagggaccgataaaatagccagggcccgagggccccccc

SEQ ID NO: 22563 - DNA, 212 bp, Glycine max
  unsure (1)..(212): unsure at all n locations
  Clone ID: PAT_MRT3847_120377C.1
gccatggctaattcagttgtattcatcagggagtgaacgttgtgctcaattttccaagtcatggaataagattgcttctttattggatgtntttgccaacattggtatggtggnacttggtgagaaggagctcgccatataccttgctgatagaagatcaacaggaaaaccattttttagaaatggaattccatctcttgttgccattcccg

SEQ ID NO: 22564 - DNA, 211 bp, Glycine max
  Clone ID: PAT_MRT3847_120378C.1
tcgggggttgctgtaatcactgccccgattttggttcacgagttgatgaagctcgaagggggcattgatgaagatcctagcgacgctcatgctgacatgactaatgcggaggacgcagatacaaatgcagaggttaacaagatgaaagatttgaactaaaggtgacttaataatctgtatcgaggtaagaaacaggactaagctaaacatg

SEQ ID NO: 22565 - DNA, 328 bp, Glycine max
  Clone ID: PAT_MRT3847_120379C.1
caaaaatcatggagtacccttcatacatcctaattgatgtctcggaagactaatctgaatctaattgctgcatttagcaccattttcttgtacgccaagctgcgtcggccactccatcgcgattactgagcggtaaattatgaggatctgctacgtttttcaacattgactaaggtgcgtgtatcagacacgcatttgccagactcacatagtggattctctgctaacgattgcattcgttcatcttcggtactgaaaggagctccatgattcctagctgtgcaagttagtttcaattgatccatcctcctataatatgttatgcgct

SEQ ID NO: 22566 - DNA, 426 bp, Glycine max
  Clone ID: PAT_MRT3847_12037C.1
accgcccctgccattgacacagcccttgccagtgaacgagccatagcttgagcgaaagcgctgtcatttctgatagcatggaacatagggtgaaccaaaggctcaaccttcagggatctgagcgagggaccgagcgtgtgagcgagcatgagtatcggcgccattatttccgacttcactgccgcgggtccccaccgcgggacccaccgcgtgatcggcgccattctgtggacgcatttgtggaagccgctgttgaacgatctgttggacgatgatttcaaagcatgggtcaatgacttcgaagatgactctgaaatcgaggatgacgatgatgaggacgatgaataggaggaggagaagccctttaagaactcttgttgcaacatcaaggccaacaacaaggctgtttctaaggctgtatctact

SEQ ID NO: 22567 - DNA, 906 bp, Glycine max
  Clone ID: PAT_MRT3847_120380C.1
atggattgtagagtcagtgttctatacacattacacgctggatcaaattagaattaaccaagcttttaacatagggaacattatacagtaaaccgaagcacaataaagtggtcaattctaatttgatccagcgtgtaatgtgtatagaactatggattgtagagtcagtgttgcttctggatcgtttctatgcttttctaattgaatttttaagagaaataacaaccatgtaatttgtgtttaaactttcaacttctgtgctcttttgaggctcactattcatctttatgtgtgacattaatccttttatggccaactcaaacctttcttgagtctatgaagcagaagaatggcaacagtgaatccattttgttattgcaagagagccttcatgcaaattgcaacttaaaggttgtggtttctgaaaatttagaatgagtggttcctcctgtttgaaaatgcgtacataatttagttgctcaaaatctaattattagaaaaggcttgtgactaatgatgtcaaatgaaagttgcttatgttttacaaagaatgaatccatttcgagttcaaggatgattcagaactggtcagattttgttgtcttaaagagtaatttgattcaaattcttgagttttcagcacactgcactttaccaatcaacatgtcttttagagattggcatgttatattacttacaggaatgctaccatagtagtgtgcttgtgaaatagtgttcatttcaacacttactaaatcataaatcatgttgcaatttttaggttccatatggaagatctttcttgtgaataaaaacttaaattttttagcctattttgccagattaagctattgaatacatgttctgtactgaatactagtcttcatatccacaactggtaaatca

SEQ ID NO: 22568 - DNA, 1418 bp, Glycine max
  Clone ID: PAT_MRT3847_120381C.1
ggcggacaaagaaaatcaaaatactgattcgagaaaaaaaattaaaaggggcgtgggtgtgtgtgtgcgtgtgtgagagagagagagaaagagagagtgaaacagcgcaaagaagatacaaaattgagacgaggctgaacaaaaataagagtgtttagtttcccttctgatggtcgtgagtggttcctccccactaacttcgaagaggagaagggtcaccaacttttgttccaccgacatggacgctgaaactgctaaggccaagcttgctgctgtgaaagaaagatttggacgagagatccatgtttttgaaacatcagttctttcttcatcttcaaaggctgcgttatccaatgaaggagaggagacggatgacttctatgagtttactgctgaagattattacagacttttggctactaaaaaagaagataaattcttgaagactcgaaaactacgagaagcagaagaggcagctcgtagggtcaagaataaccaaagctgtaatcagaattcgcttccctgataatcacactttggaggttacattccacccatccgaaacaattcaaagtttaattgatctcaagaaggtgatcaatgcacagccagagcaaccattctatatatacactactccgcctaagaaggtgatcaatgacatgtctcgggatttttacactgctggcttttgtcctggtgccattgtgtacttctcatacaatgtcccaaaaggtgatagcactgtgggtgaccatactagtccttatctccaagaagatatcttgtctttaaaggatttgcacattgcaattgatcaaggccagcaatctgagcctgtagtacagtcagaaccagaacctaccgtagcagcacacccccctcctgttgaagaacgcaaacccaccgagaaaaaggttgttaaaccaaagtggctaaaaatgtgatttcactttcttataggcccagtgatcatattgttgcagaaaaggagcttcacttgggctctatctagatacatacatataaatgacttattgaggtcactattcttgtggattaagacattaaatcttagttcaatgtatcatgaagggtccacaagaacacaacatagttacttttctcttcagcctttcttccttttctaccttctgcttttcctgaatttgtagataatgtgtgcaaatgttggataaaattcttttggtgaatgcaactgtctcggcacaggtgtatgtgttgtttcaatgttacatcatagctgtagaatttttctttgctgctgtatggagaatgcaagcatccgggtagtgttttttgctaattaatatttacaccatggtagagagtggatcagagagaaacaactagagaaaacataaagttgtttattgtgtgaatgaaaattttactcc

SEQ ID NO: 22569 - DNA, 369 bp, Glycine max
  Clone ID: PAT_MRT3847_120382C.1
ctcggaatacggcttttggcggaaacttaggcgctgataccttactcccctcccttctcgctcgttctgtgctttaatccatcaactatcctactaactcataactcttcactgattcaagatacgagcaagttcccttaccatctgctactaattacgataaccctatacacacttttccagttattcaccaaaatcaacaaataccaaatctcaggctgttggagaaattgctcagatggggggatatgatgttaatggacgacgaagccttaagctccacacctacgcgcaaattgtcgtgcactgcattgcttcgacgctgcctattcctgctactcgccgcgtcattaaatcgttgcaacattt

SEQ ID NO: 22570 - DNA, 332 bp, Glycine max
  Clone ID: PAT_MRT3847_120383C.1
cgagaagacgacagaagggggtgggcttttttaggaatagacgcgatgcttcacaccgcgactcatttttacctgtattcagacaatagcggacaacgttgaagtcatatcattacgacgcacgtcaatgaagaacacaccatggcttgctcagacccatttttacagaggagccagtggcagaagctctgattctctgttacctacaggtggcttcgctcattcttttggggtcgacgcagccgtctagcgccacttagaggctgatttcaatgaccttaacacactggttatccatataaggtagaatacacagatgccttactcgttgc

SEQ ID NO: 22571 - DNA, 355 bp, Glycine max
  Clone ID: PAT_MRT3847_120384C.1
ttcactcgtccgggcatcagcagatccctagtccgagcccattgctgctgtttaccatgctaccaacgcaccaacgtagggtcgaacggtcaagcggcatctccataagcacacttatggagatagtctccagcatgagttcctctagacagctctaaaaaaattcccagccctgtccccacttatgaccgacgatctggataacgaccacatggacttccccgaacgcgtcctcgagcgtgcgctcttcctcgcgccggtacgtgcggaggctggcgaggctttctacggtgcgatgactgagggggagaaaaaggagttggcaaatgatgcgcgcgaacatgggcgtggattc

SEQ ID NO: 22572 - DNA, 362 bp, Glycine max
  Clone ID: PAT_MRT3847_120385C.1
cgcgccgtccggttcggtcgacccactcagcagccatttatggggcactacccaccattccatgaattcctgttttcttgggagcaccaaagagcatgggaagcctgaagaaaaataccctgggggctttgatccttggatcttaagccctaaaacattacgatcaagcaagaataaaggcgctgttgtgctttgggactggtcaacatactatccgcactgacttgaactgctgtactgctgcccatggacacacatggacgtatattcacatgattgctgaaaaaaataattgtcaaagctaccgatactcggtaacattgaagatcgcgactgtactgtatgtggctgataacttgatc

SEQ ID NO: 22573 - DNA, 344 bp, Glycine max
  Clone ID: PAT_MRT3847_120386C.1
taaaaaaaaaaaaaaaaaaaaatttaaattaaaaaaaaaaaaaaaaaaataaaaagaagggataaaaaaaaaaaaaaaaaaaaaaaaaaaaaaaaaaaaaacaaaaataaaaaaaaaaaaggggttgtcattttaaaggtccaaattttacttactattgcttgtcaataaataaattttttttaggttcatctaaatctaattaatggacctaattttaaaaacagtttaaattgttaaaaaccttggtcttaccaaatttaatagttttaaagaaaatcctttttttacaagttgggataaattcaaaaagcccattactaatcgccttttcaaaaattttt

SEQ ID NO: 22574 - DNA, 359 bp, Glycine max
  Clone ID: PAT_MRT3847_120387C.1
ctagatttgacagaagatggattagatggaagtgattagaaatagaggggttcctgctgatgttcttgcaaagcgagctcatgaaatttgaaaaacatgttgctgggcggccgcctcatagttcgctttcctacccgggacttaattccgtaccgctccctccaggctgaccgatttcccttttaggcagagactttatgctttgggcaatcaagggcaatctccttttgctgcgtaaaatgtttatccgcttataattccacacaaaatttcgtgcgggaggcataaatgtaaaagcctggggggcctaaggagtgggctaacttactttatttggttcgcgctaattgcccgctttc

SEQ ID NO: 22575 - DNA, 343 bp, Glycine max
  Clone ID: PAT_MRT3847_120388C.1
gaaagtgagtcttcagagtctctgtcttctttatactttcctcatcaccaaccttctcaaacagttctgaaggatctaataatggttcacatgcttggccttgtttgtacttctaaaggaacatttgctgactgtttgccacatgtggtaacagagctgtgcaatttaggtatcatttctgactcatcacgcgatatggcatctgaaccaccttgcatattcaacaaaaccttcaatcgtgttttccagaaacacctggctttatctataatatgtcatttttggaaacctgatattggacgcttaaacacaacttttcatggttctccatatttcaatgatt

SEQ ID NO: 22576 - DNA, 356 bp, Glycine max
  Clone ID: PAT_MRT3847_120389C.1
aagggtaacatttattgttaaaaataccattgcaagatgtaaaccaaatgttttgccgggccgttttttaaactgggtagcaaaacaattgcgtaataaacaaatactactttaccttgctatgaacttatttagggatagggctcaatcttatacactttgacattggtataaatttaatggggggccaccaccactggacgggtgttggggataaccaccttttctcatcatggggttataatttccaggcttgttggacccaggcggaaatccaaaagggggggggtggatttgaaccatacccataggcgcgttaatgccttcatagcctcccatacccatatgtgccatac

SEQ ID NO: 22577 - DNA, 242 bp, Glycine max
  Clone ID: PAT_MRT3847_12038C.1
tgatattttatttaccgttcatgtgttggtggttgtctattttatggtgtggtgcggacttctccacatagaaacaatggacccaaaaggaggggaatgcgccagttgctctgtcgcgaactacacacgaacagccaacagaatccgcggtgctgacaagcaccctggggaactcacacaccggaaggaccgggggccccaaaatgcacggaaacagacagcctaaaaaatgcacccgcgct

SEQ ID NO: 22578 - DNA, 319 bp, Glycine max
  Clone ID: PAT_MRT3847_120390C.1
tcacctcacaaatcctattattctagggtcatttgccatggatcaaacattagtagtgccccaaaaggaaaaaaatcatgcctatgaagatccaaggattttcactcgacatagcttcattaaaccaacagtacaacgccaccttcatggtgtcgtggaaaatttggaaaatctggacaactctaatatataatctaccaacaaatatcatgtgcaggattcttaaaatttaaaaatacatgtcgctagagagtgactgatgaaccacaccctgaagcaccaatcctggtggttattgcccaggaggggggattaagac

SEQ ID NO: 22579 - DNA, 865 bp, Glycine max
  Clone ID: PAT_MRT3847_120391C.1
aaaatatcgttcggtaatcattgaaactgaaaaatgacgggttgttttctgtgtacattttgcttgatcgactcccaacctgaaatagatgtccccacaaacatattttgccaaatcatttagaaggtcatgcatgacaaatccttcttcatattggcttgcttgttgaaagaaagaccttgatagtagatcattgaagtactgttggccaacttcctctggactcctactgcattgatggcagtttaggaaattttcagccatccacaactgaattaaacactccctgtcaaacacataatccttggggaataaagcacagtaagcaaaacatgtcttgagatggggaggaagttggtgatagctcaatgctaaagcaggaacaatatcactgtcctttaattcccatatttcgctttgcaacacgccttcccattcccaggcaaatggtttgctgtgtaatagacttcccattgacttcaaggccagaggaagccctttacattttttaacaatcttcataccaatctctgggcatcctggatctcgtggaagattatcatctctgaatgcgtgttttgcgaacaatttccagcaataatcttcttgtaatagcctcagcttgtgttcttttgaccccatggtagaagaaactttcccactgcgtgttgtgacaaggatcctacttccctgagctccacaaacaagagcattctgcacagcttcccatttaggcctgctttcgttccaaacgtcatccaaaacgaggagaaattttttatctgccaatttttctttaagtcttctctgaactatttctagctctctaccatgatcagtcgaatcagtaatcgcggacgcgtgg

SEQ ID NO: 22580 - DNA, 365 bp, Glycine max
  Clone ID: PAT_MRT3847_120392C.1
gacgaggatgacagtgcggggcttcaaactactatgagcaaaagattgagcatctagagctgaaggtgcatgatgaaatacagaatctggcgtgtctgcaagcgcaacgtaatgagctcaattcaagaggtctaaatatcatctttttaacaagattacagatgattcttgtttgagctgatgtgtttcttattaaatataaagttctcttgctgcatgaagagctgcagatgatacaggagctttgttcgtatgtaggcgaagtaacaaagcaaatcgacaagtctaaggtgcttaaggtaaaccaccccgaggaaaaatatgtcgtcgacgtggacattaccaaatgcacgcctattgcacgt

SEQ ID NO: 22581 - DNA, 254 bp, Glycine max
  unsure (1)..(254): unsure at all n locations
  Clone ID: PAT_MRT3847_120393C.1
cttgggcgacagaagtctgtggaatgcattcaagaacacaggaatcacttactttaatactagttccttctcaattgacagcacatctgtggcatactgtccttgctctcaggaagttaaattgttaggcttgtaaaccgaccataatatatgttggtctgtctcagacatgctatgctgacttcactattctttatatgatttacttactanaaaaaaaaaaaaaaaaaaaaaaaaaaaaaaaaaaaaaaaaa

SEQ ID NO: 22582 - DNA, 588 bp, Glycine max
  Clone ID: PAT_MRT3847_120394C.1
cggtccggattcgaactccagtcgaataggcagcgcctggatacaagttatgccttggaatggaagagaattccgaatcagctttgtctacgaacaaggaagctataagtaatgcaactaggaatctcatggagagttcgatcctggctcaggatgaacgctggcggcatgccttacacatgcaagtcggacgggaagtggtgtttccagtggcggacgggtgagtaacgcgtaagaacctacccttgggaggggaacaacagctggaaacggctgctaataccccgtaggctgaggagcaaaaggaggaatccgcccgaggaggggctcgcatctgattagctagttggtgaggcaatagcttaccaaggcgatgatcagtagctggtccgagaggatgatcagccacactgggactgagacacggcccagactcctacgggaggcagcagtggggaattttccgcaatgggcgaaagcctgacggagcaatgccgcgtgaaggtagaaggcctacgggtcatgaacttcttttcccggagaagaagcaatgacggtatgcggggaataagcatcggctaactctgt

SEQ ID NO: 22583 - DNA, 513 bp, Glycine max
  Clone ID: PAT_MRT3847_120395C.1
cgatcataaaagcacggactacctatatgaattaaaaatgcatgtgctcattaccattgagaacggttataatctgtctaaaccatcataatccatatgctataggcaactgtagactctttctttatctccaacctaccacccacaactctaggcgtgctgcaacacttcctcaagtggctgaaacatgctgcagaacaacattatatgcttgatgtacgtcccagaaatccttgaccaccacagctgatcaacctgttgccttccgagcacttttgctctgacctactcttacacaaacaaggccattgttcgcgggactttgcactaggaactgacacaagactagcattgggctgtgcgcactgagctttcaccaggctcgcataatcaggatgcacacactcttctgctagaacacacagatgcgcgagatgctgctgcgatcactttggcgcctttgtgaccaccttgcgctagaccaccatacgccaaagatattgtgagcacaag

SEQ ID NO: 22584 - DNA, 370 bp, Glycine max
  Clone ID: PAT_MRT3847_120396C.1
aaaacattaaacccaatttcaatttggcgaatttattaaaaaaaaccaattaacttttaggacaccgggggacttaaatacccgggaaaatttaatccactaccaaatttcccatacccatttaattcctcccccctatagattccaaatatcaaggaaacagccaaatattagggggcaatctttacaaactccaaaaaagggccctttcactggaatttgccacgaaaaattcaatggcgccctggggcttaaaccttcttttgaaatgttctggaagaacctgaaaagcccattaacaggcctgttctgcaaaaatggggaaaattggatctaacaaattcttggaaaagggatcaaagccccttgg

SEQ ID NO: 22585 - DNA, 703 bp, Glycine max
  unsure (1)..(703): unsure at all n locations
  Clone ID: PAT_MRT3847_120397C.1
ccacgcgtccgctccttaaaactttcagcttttcattgatatcctccggcaaatatgatttctttaaggctaagccttcttttacacttatctgctgtctgattattaatcagacatattccaagaatgatcggaagacttacattgtctacatgggcgaccaccctaagggcatggactctgcttccttaccttcccttcatataaccatggcgcaaaaagtccttggcagcgactttgaaccagaagctatacttcacagctacaaaaaaagctttaatggtttcgtcatcaagttaacagaagaggaagcacaaagaatggcagaaatggacaatgttgtctctgttttcccaaataggaaaagtcgtctgcagacgactagatcgtgggacttcataggcgtttcacagcaaatccaaagaacaagtttagagagagacataattgttggagtaatagactcaggactttggcctgagtctaagagcttcagtgatgaaggatttggtcctccaccaagcaaatggaagggatcatgccacaactttacctgtaacaaaaaaataattggagcaaaatactttaacatcgaaggtgactatgccaaagaagatagcatatcacctagagatgtacaaagtcacgggtcacacactgcatcaacaattgctggaaatttggntaagtcttcaagtctact

SEQ ID NO: 22586 - DNA, 860 bp, Glycine max
  Clone ID: PAT_MRT3847_120398C.1
tccacgcgtccgcccacgagtcccacatcccatcggaatttctcccacgacaacgtatcacaagctcccaatatagcaagcagcaaacatgatttcttccgtgtcctttccagcgtctcttcccgccgttaacttctccggcaacgccatggcttcgccgtcgtgccgcgtcaaatcccggccaatagtcgccttcgccaccgccactgccaccgctgaagctcgctcttcctggacggagcaaccgagaccttcctatctgaactcctcttgctcttcgctttacgatatcctcggcatccccgctggcgcctctaaccaagaaatcaaggccgcgtaccggcgactagccagagtctgccaccccgacgtggcggccatcgaccggaaaaattcgtccgctgacgaattcatgaagatccacgccgcgtactctactctttctgatcccgacaagcgcgctaactacgatcggagcctattccggcgacaacggccgttgtcgacggcggcggtgttctccggttacacgcgtcggaactgggaaacggatcagtgctggtagtgagtcactgagtcgactcgctcgagtgaatgagagaagacgcggttattgaagcgcctttctttgcatataagtaattaatcactagttagttagtcgttagagtttgtatgatactacgtatatgtatagctacatacatacatatacgcgtagagtagaatagactgccacttgtactgagtactcttgtaatataaacttttcatcaaaaattttatggatgaaaaagaaaaaaaaaaaaacagaaaagaaaattgactttggtgaaaaaaaaaaaaaaaaaggccctagg

SEQ ID NO: 22587 - DNA, 220 bp, Glycine max
  Clone ID: PAT_MRT3847_120399C.1
tcgctcccgcgtccgacaaaatcacaaaccaaccggggcctaatgaaaatgaacatggttgtcagcaagctctccagtgaactcaaggaatacactcactctgtgggaatgcaaactaagacacacttaagaaatggctatatccccataattaatttgaaagaagacggaagtggtggtacatagtccctgtcgtacacacattgatacttacaatgcc

SEQ ID NO: 22588 - DNA, 245 bp, Glycine max
  Clone ID: PAT_MRT3847_12039C.1
ggctcgagggaacattccgcggtcttcaactttgggtttgatacatgtccactccgatacccctgagacagatttgattttctggcatgtggacattctctctaatccagattcgctctctgctccttatccgtgatgctcaagaactttttcgtcgtagacagcacgagattgggggacacatacaccccgcgtgtcattcagctaaaagagcctgaacccagaacaattgctgtgagtgcact

SEQ ID NO: 22589 - DNA, 1315 bp, Glycine max
  Clone ID: PAT_MRT3847_1203C.1
gggaggaattttcttcttcttattttttaatgctaaaatattatgattattgatatacattgtggttgtatgcctttgacgagaaacccgttggcaaaaacatcgtgaaccaaaagaggaagatggagctgtggaacagagcccgaagctttgcggaagaagcagcgaaacgatcccaggaactgtcgttgggagctagagctacccaattcaccaacatcatagcataaaccaccaaagaaatcgcagcgcaagcttccaagcacttgccccgaccttatgccataaacgacgtcgatctccaccgttttggcatcaccgaagagttgagggactttgtcaaaggaatcaccatcactacctttgaggattttccccttcaagatgatacggaattgtctgatgttcctgcagtttcaaatgttaggcaggacctaaccgagtggcaggaaaaacatgccagtcttgttctttctacagtcaaggagatttcaggattgaggtatgaactgtgtccacgagtcatgaaagagaggaagttttggagaatatattttatacttgtgaataatcacactgcaccctatgagaataagtacatggaagacgataaactaaaatcatgtgaacaagtaaaagatcacaaagtgatgatggaatccttaaacactgaattgatctccaatcaagaggtgcaagaagtgaaaaaggaggccaaaccttcgaattcatcaacagagcaagacttggatgtatttcttctgggagaaggaaacagtgatgatgagcctgatgatggcgatgggggatatgatgatgatttggaaaaactgatggataattcggatgatgagaaagggaaatcatagatggtgcttgaaattattggctgacattaaataaggggttgcaacatgcctgagaatatacatgatgaaatgaggcttaatttattgatgcgacacatacggtggctgatctgttccgtgatgcctacatttattctttcaaccctttcctgcccctttatttatgtagttgcttccccatgttgagggatgaaattcctgcccctttatttatgtagttgcttccccatgttgagggatgaaaaagttgggtttgtgattataaaaaagttaattatttggtgtctagttttgttagttttttatgtaaaaaatacacattaaatgtactgaaaggaaaaggaaaaatcattcagatattgcttgccccccgatgtgtatacttagatcctattgtattgcattgagaagcagagggaaatgtgtggatttgataacgtttaggg

SEQ ID NO: 22590 - DNA, 536 bp, Glycine max
  Clone ID: PAT_MRT3847_120400C.1
tgtgtttttatcagataatgagtgctgctcttcactctggacagttgctgtcctgcttatgatttgcatatatgacagtttctggctatctatcatcactgtggctacctaatgactagtttattagctgcaattccaaagctctttttccctgtcttgaaataatctatttgtagaaggttttgccgaggaacttctgaagattgcaatggcattttgttgaaacttgtcccaaatgttcttgatacgatcaacctttctgagaaattactatgccagggaatctacatatcttctataacttctacaaaggaagttttgatgtgacatttattcatagaaaatatttattttttattctaaaaaaaaaacccttacaacaaaatgaacaacctaaatggaaaatggaacccgccctgtaaacggaacattaaacgcagggggagtggaggttacccacaaaaaggggcggcccttttgaaggacccaagtttccccccccgttcaggcaacttaattccctttttatgggggcc

SEQ ID NO: 22591 - DNA, 691 bp, Glycine max
  Clone ID: PAT_MRT3847_120401C.1
tccaggaaggtttcccgtcatcactgtatgacgtcctccttctttgggggggggggggggccggggggggtgaagagctatggggttaggttactgagtaggcagcaaatagctctcacaatagggggggggggggggagataaatacaagggtggtaggaatatggaatactaaatatcacaataggtaagtattttaaagatagaatggaattagatagaccgacagcaaccaagtagaggttggtgaggtatggggaggcaaaattacccaaacgatgctaataattagacacttttgacagccacagatgcggcccaaggttgtgcaaacgtaagtttgttgtatgacaaccagacactaaacgcgaacctaggggacttcctttatgctccgggtgtaatcgtgtcgttggcggtggtgcgagaactggggcggtaagtgtggcaactggtgggttaaattgtggcaaccttgtgacgccattactagtacaacgttaagacgtattattagtgtgtgttttaaccgacaatgtagtacagcgcgcttggcataacagggtgagaaggcgaaccgtaagcaaccgtgttggtggcttacgaagacgtggtaaaaatgttggtgtacccggtggacttaaactgctggatgtactacatttgggtgtaactagcaagtggtgctgaa

SEQ ID NO: 22592 - DNA, 372 bp, Glycine max
  Clone ID: PAT_MRT3847_120402C.1
agccgtccgaacacctccgaaaggacttctcaaagctctttacagacacatggccgggtttaataatataaacacctgatattatttccaactatacacacatcacacccttcactatctacatatctttataccaccattccatacctatctgtatctcttttatcaccttactttcgtacatacctttgcaacctcacttttgacattgatctttgctctgctaacacattcgcattcatataatcacatatgtatcatgacaactcacccttacctctgattctttaatgacttattctatggatactccacaactacttaccacacatatttctctgacatctaattgaaaatgttcaacttacaaac

SEQ ID NO: 22593 - DNA, 290 bp, Glycine max
  Clone ID: PAT_MRT3847_120403C.1
ttggggtattataaaaacatgttgaagcaacggggtgctcgtgaggtgtcgttgctaacttgccaggcttttaaatgcacgtgcgacgccctggcaggagtgagaatgacttccgacggagcaacgtcggcggcgtcgcatctgaggaaaccatctgggaaggagaaactgaacaacgcgttgagacagaggatagggagatccatcgtacccaagatatactacggtcttagggcgcatgggaactactatttgcccaaacactgctacaacaatgatgtcttgaatgc

SEQ ID NO: 22594 - DNA, 496 bp, Glycine max
  Clone ID: PAT_MRT3847_120404C.1
aaacttctcttatccaaaaaacctagcatctgtgacccaagtaagtttaacattgctaaagctggcacgacatcatgaacagaaccacatccccacaagcatgaatgactcagtagacaaactggtaatcttcctagcaaagagagatggcatagacaagctggtgaagacgttccagtacgtgtcaaagctcgtaaactggcacgtggaagccacgcaccccgacacatccaagaggttcaagcaatgggaagtggcctccggcctcagcagaaaagccttcagaaccggaaggttcctcaccggcttcaacgttcttcgcagaaacccaggctccaccctttctctgaggctactagcagtgctctctaatgctggcgagatggtgtatttcttcttcgaccactttctttggttggccagaatcggtaccatagacgcgagcttggcgaagaagatgagcttcatatccgcctttggtgagtctgttgggtat

SEQ ID NO: 22595 - DNA, 1072 bp, Glycine max
  Clone ID: PAT_MRT3847_120405C.1
ctcgagccgaatcggctcgaggaagctgtccataaatcaactagaacagaaaggatgaggacccttaggtctacaagttctaccagaaaggtcaacactgccagccttcaggaacacttacctgtgctgtatccagaagttgttctatctgtagaggtttaccataatgttcgaaagggtaccaagatccaagagttgttagttcttggaggtcagaccttaactgctctgagggacaagattttttgctcaacggaccaggtgatgcacaaagctgggcagcatgatccttctggttattttctcatcgaagatgtattctgtcccgatttgagggatccgtctgctattgatctcacaagacctatactggattggctcagagactccaaggaggaggcccaaaagaaatgggaatatattataactggggaactgcagaagaaacaaaaggcaatcatggggtgactgcacccataccttagtgatacgagatatgaggttaattcaccctgaagacgttcataatcgagctgtttatccaataatcacgtttcagttgaagttgcgttttcagaaatgcaatgtttgcaaaatattcagagctacaaaggtcacggtggatgacaaatggacaccagaaaacccttgttatttctgtgatgaatgtttttccctacttcaccaagcagatgatggcactctattatatactgactttgtagagtatgattacaaccatgattaattgctgttagccttggaagaacacccacaggcaactaaagttctttacaataatcttatagaaaattgttttttcattgtgtattgaattctgtatctttggaaattaaaatctataatgaggtccacagggtaggagataaattgtgtcaaccatggagatgtattgtatatgtacaaatgtttatgatcatgtttttcagatctactgcaagtagaactatagaaaagaataggttcagatcatgttttgtatcataccaaaaaacattaaaatactattcagtttctacctctaagtataaagttaatatattttcaactc

SEQ ID NO: 22596 - DNA, 868 bp, Glycine max
  Clone ID: PAT_MRT3847_120406C.1
ggaaattttatattcttaaaattttctattactaacaaaattcttcatttttttttctagttttttcgttttttgttacaatatttgacttgctttcatcatgcgtgactagatctgtcaaatagctgaattgtacccaaatgcaacctttctgaaagtcaattacgaggaactgaaaacaatgtgtcacggtttacgaattcacgtgttacccttcttcaggttctatagaggttcggagggtcgagtttgtagcttcagctgtaccaatgccactgtaagaatttgattgatacagttctcattttttttgtctttttttcaaaatttaattttatgtatatgaatatgttgtttcacagatcaagaaatttaaggacgctttggcaaagcatgggagtgaacggtgtagttttggtccaacaaaaggtttggaagaatccgagttaaaaattttggcttctattggtgaaattaattcttctccgttactatgtcctaagctagggaaattggaagatttggttatggagagccatgatttttctggggtttggagcatggaaagtaatagcaggggaattatgctggatgctatatattgatttattttcaaactagctagtagggcatttattttgccatcttacagaatgaagattataatggagtaaagcacttccatatcatttgttttcctaaaataaaaaaaggtttttattttttctgtaaattattattttattattttttttggaggggcttgtaacattattttggttggatttgagccctacaatttagcaagtgctgctgggatactatcttctgtatctgaaccctctcagattatttttaatagttctct

SEQ ID NO: 22597 - DNA, 753 bp, Glycine max
  Clone ID: PAT_MRT3847_120407C.1
cacgcgtccggaccaggtgatgcacaaagctgggcagcatgatccttctggttattttctcatcgaagatgtattctgtcccgatttgagggatccgtctgctattgatctcacaagacctatactggattggctcagagactccaaggaggaggcccaaaagaaatgggaatatattataactggggaactgcagaagaaacaaaaggcaatcatgggtgagaaatctgcatcacaattgcctcattttagatccattgagatgcataagatacgtttttgtgacttaagctttcaacttggtgctggatacctctattgtcatcagggtgactgcacccataccttagtgatacgagatatgaggttaattcaccctgaagacgttcataatcgagctgtttatccaataatcacgtttcagttgaagttgcgttttcagaaatgcaatgtttgcaaaatattcagagctacaaaggtcacggtggatgacaaatggacaccagaaaacccttgttatttctgtgatgaatgtttttccctacttcaccaagcagatgatggcactctattatatactgactttgtagagtatgattacaaccatgattaattgctgttagccttggaagaacacccacaggcaactaaagttctttacaataatcttatagaaaattgttttttcattgtgtattgaattctgtatctttggaaattaaaatctataatgaggtccacagggtaggagat

SEQ ID NO: 22598 - DNA, 654 bp, Glycine max
  Clone ID: PAT_MRT3847_120408C.1
aattcggcaccagccaagacggcgacctcagtctgcacaaaaaattgcaattcggctcgacaaggctcctaagcatttacaagcagacctagttgctctggtgcccaaattggttgagcagtcagaacacccactggctgcctgtgcacttcttgagcgacttcaaaacccagaggcggaacctgctttacgaatacctgtttatggggctcttagtcaattggagtgtggtagtgaagtgtgggaacgcattctgtttcagtcatttgagcttttgacagactcaaatgatgaacccctaactgcaacaataaattttatattcaaagcggcatctcaatgtcaacacctccctgaagcagttagatctgttcgtgtcaggctgaaaaatctaggtcttgaggtgtcaccttgcgtccttgactttttgagtaagactataaatagttggggggatgttgctgaaaccatacttagggacattgattgtgacgatgattgtggtgacagttgctcggctttgccatgtgggattttcttatttggtgaacatggcactgctcccagtggattgcatgtgattgatgagcaggcttatcatgctagtcgtcacttttctgatatttatatactggttgaaatgttatctattcc

SEQ ID NO: 22599 - DNA, 494 bp, Glycine max
  Clone ID: PAT_MRT3847_120409C.1
caaacagtctgatttaattaggaagttaaataagttgaggtggggtggagtgggatcatcagaaggctgacatgggaccgctggagttggcaatcatagcagtgtgaggttggcaaggggagcaacccccttcaagacaaggcacaaactatttggcaaggagagatgaggggtgggacctcactgtcaatggacatgctcagggaggccagtgggttacatgcaacaggaggatcattcaggcaacttcagctatgaggctgggcatctgtgagggctgaaggctcaggctgttctcaaaggcttgtgattcacctgggagatgctcacgcctgtgagtctttccacactctctggcaggcgagttagaatgtccagtacttccccagtcactttggctgcccccatggtcccactgccgctggacaccagtgtgatcttattggctgaagtcaagggaccactgatctcctctgccacctggggcagcttct

SEQ ID NO: 22600 - DNA, 477 bp, Glycine max
  Clone ID: PAT_MRT3847_12040C.1
tttctcttttttttccacctacccttaactccctaacccctagttagacgcactcaacactgaacacaaactaaaccatgacaagagatgaatgagattacctaccctctttgcccacgtaatacccgcgtgcacccaaacgtgttataccccaaagtcgccactgttggacttcctcttcccatttttcactattcacagtccaaacaacacacctaaaccagtcaaccagtcacgcacactaactcttacccaacacatagaaaaaaataacagtaacaacgtaacaatttcaaaacccaagaaaatggtccccattcacgttcacaaataaataccctctaccattttcatttcatactcaaaaccatatcagagcctctgcttccgacacaaatcaatctttctgatcatatattattcttttggttttttaatttattctccatacacatgcagacaataagttcgaacaag

SEQ ID NO: 22601 - DNA, 169 bp, Glycine max
  Clone ID: PAT_MRT3847_120410C.1
ggtaaacaacccatatcataaccgtactcactttcctccggttcgggctttttcagcccgtaaccttgcactgaatatcagtgttggcttggcatcctgccatgggaacaaacacaacgctcctttcccttgctgccccaccctcattcctttctctttccacccttta

SEQ ID NO: 22602 - DNA, 323 bp, Glycine max
  unsure (1)..(323): unsure at all n locations
  Clone ID: PAT_MRT3847_120411C.1
ggaaccaaaaaaatattaaggtttttgaatgcggtggggcgatcctaacaactctttctgcaactttcgccgacagcttcattcaccatggcttgaacaaccgaaaaagcttttttgaaacaaccaaaaggtgttctcagctcgaagaaaactgggaaaggaaagaaacccggaaagggtgggaacccgtttttgaaatccaattgngcttggatntaagaactccagggaaagccatcgaaagaacctacattgacaagaagtgccccttcactggcaatgtttncatccgtggccgtatcttggctggaacatgtcacagt

SEQ ID NO: 22603 - DNA, 502 bp, Glycine max
  unsure (1)..(502): unsure at all n locations
  Clone ID: PAT_MRT3847_120412C.1
actggtgtgagactcgtgagtgtgaagagacaaaggtgcagttctagggtttggtggtgaagaacagagaacacaggatggggaagaaaagaagtacaaattatcagaagaaagataccaaaagctctaaaagtaaaacaagttctcgtcatgctgcttattccagtgacgacatggacgacgaagggggtgcctttcattcgcctgcgatattgncccccttgacattaatgatgatgctgaagaatcggaagacgaggagctccctatttttgatgttcaggatgttgatgaagatgaggatgaggatgaggatgacgaagatgatgatgatgatgatggggatgacgatgtggcgaagatgattaggcaaaggaaatatttacgggcaaagtttggtggaggagatgatgaaatgcatgatgttgatgatgaggaagatgaggaagatcataaacttacattaggggggaaaaaattctcacccggcgctgagaatcga

SEQ ID NO: 22604 - DNA, 388 bp, Glycine max
  Clone ID: PAT_MRT3847_120413C.1
ctcgagctctacgaaccccgcggactacaagcttctagaagaagttggttatggagccaccggcaccgtctacagagcgatctatctccccttcaaccaactggtggccatcaagtcctttaatctcgatcgctgcaacgtcaatctcgacgacctgcgcagggaggcccaaaccatgagcctcatcgaccaccccaacgtggtgagggcgctctgctccttcgccgtggaccggagcctctgggtggtcatgcccttcatggaccagggctcctgcctccacctcatcaagatagcttactcccacggcttccatgaagacgttatcggatccatcctcaaggagactctcaagggcctccactacctccaccgccacgggcacatt

SEQ ID NO: 22605 - DNA, 353 bp, Glycine max
  unsure (1)..(353): unsure at all n locations
  Clone ID: PAT_MRT3847_120414C.1
tcctccctcaaatccttaaccatcaaaaacctttcttcacaaatgtgcttggctctttacagccctgaccctcccacgctattnatcctacaccctcctttcttaccctagcacctatccccaaaccctcctcctccaattcccctatcttcccacctgcctgcaccactcgccgaccccgttcgtcttctccacgtttaggctcctgagaaaatcaccaagctcgtcgactaaattgccagactcactctcgatgaggccaaaaaccttgtctactttctacatgacaagctcttcatcttcgcatccgctttcgccccttattcattcttcgtgtttgcctaccactcttt

SEQ ID NO: 22606 - DNA, 274 bp, Glycine max
  Clone ID: PAT_MRT3847_120415C.1
aacaaaactcccaaactaaattcgggtacaagttgaaataacacagaattccaatcaaactttttgctaggacaatcacaatcatatacttatttgatgacattaacagcaaaaacagagaaaattccctgttcatctaactatattgtctaacaaccttaaaatacatgacaatataaactgactttaatttgcttgaataaacatctaccacaagattcttcaattgggactcaagtaaactcttggcattttattagcgccaacccaatga

SEQ ID NO: 22607 - DNA, 809 bp, Glycine max
  Clone ID: PAT_MRT3847_120416C.1
cagcaacacatgcttcttcctctgctcacacttcacttccccaacacattcttcttttttttttttttacacactcttcactcacttcaatcaccatcaattcatgtacacggcggaggttttccgcgtcttcgccgtgcgcggcggcgacgcttcgccagcagtggcccccgccaccaccaccaattgcttaaaaatagtagctttcaacacacccactttccgtaacggcttgaatgcgaggtgggcgaaggcgttgacgctctgtcgctgcagcgttgactcaaagtccgtcggcgacgaagttttctcggtgactcagtcgaacaagtccgatgtggactacctcggggagagcaccaaaggtgatttgaacgtcaagttggagcatcttgaggcttttggaattgatggtcatgcttcattagatggtccaattgaggaagttgccagatcagaagcaagagacgctgaagacttgctacaagacttgggcattccgagcccttcttcatccagaaattcgcctcgtggaatattctgcagccgtacattgaatttgcggtccattagtgccattggatatgacatggactataccttgatccattataatgtgatggcttgggaagggagggcttatgactactgtatggaaaaccttaagaatatgggtttccctgttgatggacttgcctttgatcctgacctggtaattagaggccttgtcatagacaaagagaaaggcaatttggttaaagctgatcgatttggttacataaaaagagctatgcatggcaccaaaatgt

SEQ ID NO: 22608 - DNA, 651 bp, Glycine max
  unsure (1)..(651): unsure at all n locations
  Clone ID: PAT_MRT3847_120417C.1
cgaattcgagctcggtacccggggatcctctagagtcgacctgcagattttttgtccaaaaaattaacaggaaattagcaaatttctaatagtaagtgctaagaaaattctttcattaaaagtatttattatattaaaaacattaaaaaaaccataattgttgttatgtaatgtaaaacatttaatcgactatatttaagaaatcacctcgtgtgcccgtatatacacgcaatagacaacctctttttatattgtttccttaaaaaaaaactttttatattttttaaggtattcatcaattaaaaaaatcagtatacttttttaacttaactgtaaacaaaataataaaaatgatccccagaaatatatatatatatatatatatatanatggattcaattcctctaaattgaactactcattttagagaataaagtaagttgcgcactttacagtttacaagagccaaattgaactaaaatagattttgaagcacggaaaattcaattntgcatgggagacattactcctaccttcctaaggaaaattactcatttatgttgggcaataaaattattatattgaaaaaaaaagtgttaacatatacatttttaacaaaattaacattattattattaataataaaatata

SEQ ID NO: 22609 - DNA, 458 bp, Glycine max
  Clone ID: PAT_MRT3847_120418C.1
gggcatgacagtagaactctggaatgcactcatcaggggtccattgatagagcctctgcattgtggaaggatattcattaggctcatacactgaacgaacagccattcggagaacactcaaagggagtcttcttgctttataactacagacagccaattcagacaaacattcatctgaaacatgatgagggatttcagacgttgaataggtgaaatccaattgttcatcaccttttgccaagcgccatttgctcttgctcaagtctcgccaccctgcgtcacaactgtcatcaggttttgagctaaaatcaattacccaaggcattactggatgaaatgtatggtccccccaccttcttcctgctaatctgtttaagatgagtaaatattcaaaattacttaattctcctctccaccatttatgaaaacaagattgccaatctattgttggagaaagc

SEQ ID NO: 22610 - DNA, 515 bp, Glycine max
  Clone ID: PAT_MRT3847_120419C.1
tacggctgcgagaagactacagaagggggaagttaagtagtactctagtgatactgagtctcaagatgaagcctatagaaaatggcaataccgttagcatcaactatcaaaatagctggttaggcttctccctctccccacaaatgaatataggtgttccttcacaccttcatcagacacagccttcatcagcagctgttgaagcagttccaccaaacttttaccatcatacacctctccataattatggcctttactatgaactggaaggtgaacacgttggaatgagttcatccttgcctatcatgccccttaagtccaatgcttctctctctggaatagaagctctgagtagatcacaagcacaagcttagttccaactcaaatttctgctatcatattttttttctgttttggaaagtatttattatgtgactactctaaacactccaaacaacttaaatcacattcaagagaatatcagccagcaacaattctcgtattactctacctta

SEQ ID NO: 22611 - DNA, 279 bp, Glycine max
  unsure (1)..(279): unsure at all n locations
  Clone ID: PAT_MRT3847_12041C.1
gcaacttgggaatggagntaanantgaacannttgatgaggnaggccangaggtcagangtggatatggaagganctggtctggaatgatgactaagcantnnattggaaaatgnttncggcggaaattaaggagttagtncatgtgcgtgccgggaagaatgtggttnactgagaagcctgnaggtgnaagaaggcacgagagntcgaaattgganccgccagnganaattggccgaagnaagnggccgggnactgnaaattcccaagggcccntatt

SEQ ID NO: 22612 - DNA, 531 bp, Glycine max
  unsure (1)..(531): unsure at all n locations
  Clone ID: PAT_MRT3847_120420C.1
gattcctccacagataatgacaatggcttcagctctcaacccnctttctcccaactccaccctactctcaaacctaaactccataacttccccactctctccctcttcaccaacaaacccctctccaaacctccaaaactcaccgtcaactccgtcgacgtctccaaagaagacacgcccgcgtcccttaccgcccggctaccagttcgagaagcttccggatgattggcgctgccccacgtgtggggccgcccagagtttcttccagagcaagagcgtccagactccagatcgctgggtttgcgcagaaccagcaatatgggcttggtggcaattctctcacttcggcccagaagactctttttatatacggcacttgttcttcttttccctctttttgggtggctacttcctacaatagtttttgtataatgcaacctttttgaacaagggttatgttttatttgatgattgtatattcttctctatctggaacttgtatttcaatgcttaaggtaatttgttgctatg

SEQ ID NO: 22613 - DNA, 275 bp, Glycine max
  Clone ID: PAT_MRT3847_120421C.1
caaaaccattgttcgcaatcaaaaagtgacagttaatattctctaaccaaccgaaattaatttccatacactaaacaactatccaaattgattaacggagaaaagaaaatggagaaagaaggtgttgggcttgaaatcactactgagcttcggttgggccttcccggtggggaataaccctgacaagaacgagaagatgaagaagagggtgttctcggagattaatcaaggtgatgaaaacagctcctccgaagaagatcgcaaaatccaaacca

SEQ ID NO: 22614 - DNA, 383 bp, Glycine max
  Clone ID: PAT_MRT3847_120422C.1
cgtccgcccacgcgtccgccgacgcgtgggctgtttttggggggccccgcggtgtttttcccaaacggcaggcttagcattggcctgtggaataaatagtactcatagggagctgcccagtcctggtgcctacaccatgagccatcatgactggagactgtgaagggctgccaagcgcattacccatagctatgtacctggagcgcaccccttgacatgagacatactggtagaggccacaagatgcgttcgagtcattcaaagagctatgataagggggctgggtgacctggcaccccagagcacggcgggaagggcgcaattggtcggtgtagtggctgtcagaaaacagctcccagagactagcgcagttcatgaacgca

SEQ ID NO: 22615 - DNA, 250 bp, Glycine max
  Clone ID: PAT_MRT3847_120423C.1
gctaaaagattttccattattaatcaaagttactggttccatgaacttttttcatccacctgacagcttaaaaccctcattttacaaaagttccaacaaacctaagttcccgagaaactttaaaaattccttttccaccattctacaacacttactctagacctttgtgatacctcttatctacttatgtccgtcctgatcaatctttctcttctcataaaatgcttttatctaggatcgattacatata

SEQ ID NO: 22616 - DNA, 395 bp, Glycine max
  Clone ID: PAT_MRT3847_120424C.1
agggaacaagggccccttttttttttaagcccccaaagagaaaaccaccttggggagtcttttacatgacttgggggcccacaggtggaacaacataaagggaagcttgggcccctttttggacccctttttttacatttagatagaaagggcccagctttattgttggggggggaaggaacttctgaatgtttttccggggatttggaagcttaaagggcctgctttcccctttggggccctccaggggaaccctccattgggctccaaagaacccaacaaggggggatccctgccttatcaggttttctttccctggtggtttggaagaaaccgcatttgggggggaaggatcttggggatccttgaaaaataatttttcccatggggggggg

SEQ ID NO: 22617 - DNA, 364 bp, Glycine max
  Clone ID: PAT_MRT3847_120425C.1
gccagagcagggtcgctcctcaatggggctcttcattggtttgtcttctcggagagcagggaggatcatgtgattatcgcctttgatctcgtggaaaggactctatcggagattcctcttcctctcgctgatcgttctactgtgcacaaagatgcagcttatggtctgagaataatgggagggtgtctcagtgtgtgttgctccagctgtggaatgactgagatatgggtgacgaaggcatatacagtgcggtcatctcggactatgacctttcttatgcatacttctaatcggatttccccatatgcacaatcaaagatggtgagattataagatcaaattgcgcaggaactggaagatacag

SEQ ID NO: 22618 - DNA, 240 bp, Glycine max
  unsure (1)..(240): unsure at all n locations
  Clone ID: PAT_MRT3847_120426C.1
aaaagggcaaagccggcgccgnccnccggggagacnccaacgnnaagggaaccgncaccnnngagcaggagaacgagacnacnccaacaaangtctgggacancacgggccacgacgccaacgccgagcgaggcaagcacgaccacgcnnncggcgacaacaccaacggaagcaccagcgccggaccccacgacaaaccccacaacaagacccanggggcncccgaaaacgacaagcgcc

SEQ ID NO: 22619 - DNA, 668 bp, Glycine max
  unsure (1)..(668): unsure at all n locations
  Clone ID: PAT_MRT3847_120427C.1
acgaggctatattcgcctccactgcctcctcatttcttttctcttccaaaattgaccttacttacacacaactcatcgtaaaccccgttgccgacaccgtcgtcaccgacaatccacaaccgtctgatgagtatttcataaacttaacctcaatcaaaatcaacggtaagcctctttatatcaactcctccatcctcaccgttgatcagaccggcttcggtgggaccaagataagcactgcggaaccctacactgttttagaaacttctatttacagactatttgttcagcgttttgtgaacgagtcctctgcttttaacttgacggtgacggaagcagttgagccgtttggcgtgtgctaccctgcgggggatctcacggagacacgagttggacccgcggtgcccaccgttgatctggtgatgcacagcgaggacgtgttctggagaatctttggcgggaattcgatggtgagggttgcgaagggaggagtggatgtgtggtgtttgggttttgtggacggtgggacccgcgggagaactcccattgtaatcggagggcatcagttggaggataatttaatgcagtttgatcttgactcaaatagattcggtttcacttcgactctcttgcttcaggatnnnaaatgttctaatctcaaggtcaat

SEQ ID NO: 22620 - DNA, 342 bp, Glycine max
  Clone ID: PAT_MRT3847_120428C.1
aggacttttagtttttctcagtccgctttctctctactcaaaatgttgggtatctctctatggttccaacagtgttggggtccatgctctaaacacacacacactcctaccaactccaacactgagctgtgctgaccgatagaaaacggtacgattcaaagaactgtgtcctttcccagctcaaggaaattgcttcttcgggctggttgttctaaatccgcttcgtccaggatcggaacttacaattgctttggttctcagaccttcccctctccagaaccacaacccctatttgccagataataccaagtatactcgatggtgggcctgggggacagccct

SEQ ID NO: 22621 - DNA, 383 bp, Glycine max
  Clone ID: PAT_MRT3847_120429C.1
gcgtaggctgcgagaagacgacagaaggggtagcgccaggcaccacaatccaaccacatcaatagccatgaaaaccacactctcactctctcctttacttctcttcctactcttctccctagtccaaggactcacccccaaatgtgacacccaagaccatggctcaacccttgaagttttccatgagttcagcccatgttccccatttaggccatcaaagccactctcatgggcagagagtgtcctccagctgcaggccaaggacccagccaggctacagttcctggctagcatggtggctgggaggtcaattgtgcccattgcctccggaagggcaattattcaaagcccaacttacattgtgagggcccaaatagggaccc

SEQ ID NO: 22622 - DNA, 235 bp, Glycine max
  Clone ID: PAT_MRT3847_12042C.1
gatggttctcaagtcactggttcttcgcggcgagtcactagttctccggtctggatttgtgggtgttgggtgggtgggttaagattgttgtgatggagttggtttggtaagtgaaggatggagttggagcgccagtgttggggcctgggtggtggcgtggcggcgcaatggtggcacggggtttggggaatgggtccgggtagacagtggtggtggcgcgcactgttatggcttg

SEQ ID NO: 22623 - DNA, 501 bp, Glycine max
  Clone ID: PAT_MRT3847_120430C.1
tttctcttttttatacttttcttttcttgtcttttttaataccaacatactgctcttgtctctctaactcaaataaacactgcgtgccatatacaccttttttaaaaggacaacatggggcaccatgatggcctctgaacattagcccttaccactagttgtggcaagcgcatcgccaactcgacgggacacggtgggtcaaatcgctacttttactagccgaaccttggctaaaaactgagcctgtgccaccttcctgctgttgatgtgtttaccgccaatcattgagagatctatccgggtggcccatctccctggtgaagaggattcctactattctcccaacgtgattgggaccattatgacccttattaaaaccccatgagagggggggccattacatagagatgcttcaaaatgctgccgttgtaacatttgttgtccaaagaagacactgttgtcccaaccctgggaaactatctaccctattggaaaagaaga

SEQ ID NO: 22624 - DNA, 996 bp, Glycine max
  Clone ID: PAT_MRT3847_120431C.1
atgcagttcggattaagatccccagaagtaccagatgagaacacaatctcgcgtggaagcatcactatacagtttagcttccatctgagtgcactgagcatgatggagtatgagaaccatcggagagtgagaacactgagcacaggtcccttcacactgaaaatgataatgcaaataaactgtcccattcttgctcatatctgttgtgtagataaatttaagtggcctctaacaaaggacactgttgttctccgagtcaccactcgcacctatgtcattgccctccctggcctcttatatgccctccagttcccaagactttgctctcgagaacgtcttcgaatcctctcaaatgtctttaggaaatatggtcacttccaggatcttagaccccaaaagctaggtgggtgctcaatgcagttcgatgacccagaaatgttggaagtgttacgtcctgattttgagcccatagcacatgaaacccttttggagttagggaatatcccagggatttcccgtttctgcatggaagagcagaactcgagcttcctaagggcgtgtcgcatgtcggcgatgacaaagatgataatggaaagcatgcgtgtgaagacaatgacaagtagtcttgtggagatcaaaggcaccaacccacctgaggcacaccaaggaagagcctatgctgtgatgagtacctacactcgccttgttgattctgctgaatacgcttccctcgtttcctgtggcttagttgaggaattggagaatgttgtgtctcctcttcgctttggttcggttgatgttgggtaccaggtttggaatctcaatcacttgggccttttgtctttcatgtctctcttgggaccccatgttgaagaggaagtgaaatatgtgagtgctagagaagagttgtggaatgccatggctgaaactgaacaggaagaagaagctgatgaggcctctgatcatgatgaagataagggcgaggaaacaaattaa

SEQ ID NO: 22625 - DNA, 650 bp, Glycine max
  Clone ID: PAT_MRT3847_120432C.1
gttccaattggcccagagatggattctgtgagaagaaataaacatatgtttggaaacaagttagatgacatacagctctcaagtttgtcttattctaccagtagcactccttcaaattctggttccatgcctgatgcttcaaattctgatgcaactaattcttcattgcttgtggatatgtcaaattctgtttcagaaccatacgacttgaccctcattgacttggatgtatccagttaccctgaagaagttcctgcggctgataaagctggtggtaggtgacaatgaggaatgttcagagctatttttaatgggaaaaatgttatcgcttgaggagattagagggagaggggcatcaaacatactttctgtgcttggaatgaactatgattgtggtttcttaaatcctggtaaaggaattaagcagatcatgtggaaacatacgtttgtgtaaattaccttaagcatctagttggccactccaaagcaaaatagtccttgatattggtctctgtcttcataccgtaattgtgtccaatggttgtgtcctgtgtgtaaattgtagatactaaaaagattgatttagaatttattctaattatttttaacattattttggtaaagaattttttttaatattaatgtatatt

SEQ ID NO: 22626 - DNA, 767 bp, Glycine max
  unsure (1)..(767): unsure at all n locations
  Clone ID: PAT_MRT3847_120433C.1
tgaatatgttctctataatcacagcgaaantgaggagggaactaagaagtacaggtcacgaacttctgttccaattggcccagagatggattctgtaagaaataaacatatgtcggagacaagttagatgacatacagctctcaagtttgtcttctaccagtagcactccttcaaattctggttccattcctgatgcttcaaattctgatgcaacgaattcttccttgcttgtggatatgtccaattctgtttcggaaccatacgacttgaccttcattgacttggatgtatccagttaccctgaagaggttcctgcggctgataaagctggtggtaggtgaccatgaggaatattcagagctaggtttgatgggaaaaatgttatcgcttgaggagattagaggggcgtcagacatatcttctgtgcttggaaagaacgaactatgattgtggtttcttaaatcctggtaaaggaattaagcagatcatgtgggaacatacgtttgtgcaaactaccttaagcgtctagtcggcctcactgccaagcaaaatagttcttgatattggtctctgtctccaatttttgtgtgtcctgtgtgtaaattgtagatacagaacttgttgacatgcctcaaagttcaaccatggaagatactaaaaaaaaagatttagaattaattgatttttttctcccatgcacctttttgatacccctcttgtcggtttcaatgtttatagcaatgccattgtcgttatttacactaac

SEQ ID NO: 22627 - DNA, 329 bp, Glycine max
  Clone ID: PAT_MRT3847_120434C.1
aaaccagtacaaactcaagttcttccaactttaaatagaaacttcccaggggggggactagatcaatatcataggggctcaatcaacgattaattaaaaaatagccctagttggtcccccttggttgtggggcctctttcaagggttaattaaaaaatattactattagggcttcttctaataggaagggttattttcctacaaatcatactactaaaataaacgcctttgacgtcttgaaaatattaaatacattccgatacttcccctataaaaaagtgggaaaaccagtttgaggattttggataaggagttaaaaatattttttt

SEQ ID NO: 22628 - DNA, 456 bp, Glycine max
  Clone ID: PAT_MRT3847_120435C.1
ggaatatctatatggatcacaggcagagatatattttgcattttatttcactattggtggttgcatgagtagcattatgcaatttctacatcaaagaaccactttgttgtgaaactaagaatgaaatacaaggttttgtaagaatttttgtcaggcttcaacccatattcacattctaccctctgtagaaaaaccaaaaggagttttcagtgagaaagaaacagaagctgtccatggctgctgagaggaacaagaatttgattcatcaacatgattaagctgggacaaaatttcacttcccattttctagctctcatactctggacttgaatctcccaagatagacggcgctgcatccaaccttcgttaaacttcaggaatccggccgtgtttcttattatttagaggaacttttagcccactagcaacaggatcgcgtataggggcaggaagttg

SEQ ID NO: 22629 - DNA, 1800 bp, Glycine max
  Clone ID: PAT_MRT3847_120436C.1
cgaaaaatgggtaaaagcaaccccaaaattcttgcgtgtccgaaacctctgaaagaaattgcaatctaatcaaagccagagtgaatgctgttgaacgctgtctgaattttttgagctaaataaaagaagaaaaacagggtgagagagaaacagagtgagagagaaacagaggatcttcatatgaagagtgaagtgagttggagaataaagattcaacaacctgggaaagccgggagagtttttcttggagggaattttggactccatccatgaaatcacaacagctcttgcttttgctgataggatgagcgattctgcatacagagtccaaaccacaccaaaccttgctcaatggagaatcgaaaacttggcttcttgcacttaccgcaaatcaaaatccgatcctttcaagatcggaaactggaattggtatttctctctccatatctatctatatatctatctatctatcttatttggaatgttatttttcaatgcagggaggagaatgatagcataaaaaacttttacactattaatttatttctatgaagttaatctatttacattttgagagcatactgcatggggtcatggtcatagtccccttgtatcatgactgttcctatttaatatctgattgaattggtgcattgcactcagaatacaaataccttaccttacttggaaatcttacgagagacttcccagaatgctaacagatggtattcacacagacatctccatcagtgcttctgatggaagtataggagctcatagagctgttcttgctgccagatcacctgtcttccgcagcatgttctcacataatcttcaggagtaagagttatcaaccataaacatctcagacatgtcatttgaatcattccatgcatggcggagaaccttgttccatttgggcagaaggatttactcagcaaagatcaaatgcaaaagccatagagtctcttggtagaatgctaacagaaggcatccacacggacatcaccatcaatgcttctgatggaagtataggagctcatagagctgttcttgctgccagatcacccgtcttccgcagcatgttctcacataatcttcaggagaaagaattgtcaaccataaacatctcagacatgtcacttgaatcatgccaggcttttctcaattatctttatgggatcatcaaacatgaagagtttctgactcataggctggcccttctgcacgcggccgacaagtatgacatatctgatttgagagatgtatgccatgagagtcttctagaagatattgacacaaagaatgtacttgataggctccaaaatgcatctctatatcagttgatgaaactgaagatgagttgcatccgatatcttgtgaagtttggtaaaatatatgaaattcgtgaagatttcaataccttcctgcaaaatgcagatagggatctgattgctgaggtcttccatgaagttcttgatgcttggaaaggattctgaagatcttgcaacttcaaagaaagataggaaggcttgttgttattcaacatacctaagaataggttgtttcaatttgttgtgcaggatttgttttgatgaacctaattctttcgctcagatgaattttttatgattttatgtacatacttatgttgtgctcttcaaatgtaaaccataaggtattattgtttacagaaaatgtatatcatataaaaagaaaagtaacatatattcaggagtgcaaaaggtcctcctgaattctgatgatacaagaaaaagaaagtgaccatgtttcctttgg

SEQ ID NO: 22630 - DNA, 1561 bp, Glycine max
  Clone ID: PAT_MRT3847_120437C.1
ttccattcgtgttgtttctcagcattttactaatttttttttcaactcacaattcatgagtgatgacaaattgaagaagcacttccgtgagtcttaattaaagagattaaagagacacaccattcattcgctcactcatttcatttcaaacaatgtcaatcgctgcttcagcttcttcacatgcttgtatttcctcaatccccacatgcatcccctcttcctcttccaaattctcttcttcgctgacactttcttcgccccaaagagttggctcaaataagagatggggatgcagagccatggttcagcaagccgttcagggtgctcctgctgcgtatgccaaagaaatggaacgactttccgccaaagaatcgcttcttctcgcttttaaagatgcagggggtttcgaggccttggtctctgggaagactactgaatggcaaaagattgatgtgaatgaaaggataactggtcttgagcggctcaatccaacacctcgccccacaacgtcacccttcttggaggggcgatggaactttgagtggtttggttctggaagtccaggcttgtttgctgctaggtttatatttgaaatctttccttcaactttggctaatttgtcaaaaatggattttgttattaaggatggaaatgcgaagattactgcgaacatgagattattaaactcgatagaaaacaaagtcattctctcaaccaaattatctgtggaggggccacttagaatgaaagaagagtatgttgaaggggttttcgtgacaccaacaattattgaagagagagtaccagaacagcttaaaggggcacttgggcaggcagctaatgctttacaacaacttcctgcccctatacgcgatcctgttgctagtgggctgaaagttcctctaagtggaagctttcagagactcttcatgatttcttatctcgatgaggagatacttataataaggaacacggccgggattcctgaagttttaacgaggttggatgcagcaccgtctatcttgggagattcaagtccagagtatgagagctaggaaatgggaagtgaaattttgtcccagcttaatcatgttgatgaatcaaattcttgttcctctcagcagccatggacagcttctgtttctttctcactgaaaactccttttggtttttctacagagggtagaaatgtgaatatgggttgaagcctgacaaaaattcttacaaaaccttgtatttcattcttagtttcacaacaaagtggttctttgatgtagaaattgcataatgctactcatgcaacccccaatagtgaaataaaatgcaaaatatatctctgcctgtgaaaaaaaaaaaaaaaaaaaaaaaaaaaaaaaaaaaaaaaaaaaaaaaaaaaaaaaaaaaaaaaaaaaaaaaaaaaaaaaaaaaaaggcccaaaaacccccaaaaaaaaaaaaaaaagggggcccctaacccccaatttttgttccctttagggggggtaaattgcccccttggggaaaacaggggaaaaggggttcccgggggaaaatgttttccc

SEQ ID NO: 22631 - DNA, 254 bp, Glycine max
  unsure (1)..(254): unsure at all n locations
  Clone ID: PAT_MRT3847_120438C.1
gattagatcgtccaacactagtctaacagctacaaaatcatcttccattggtaactttgattaaattccataaggaaagaacttggccattgtttgagttacattnctcttgatgaatattcagatctttgcactgttttgacttcatagganattatcacattaatttcgaccgctttagtctgcgcgttggtatatgtncaatgaaaccacaattttattggccatgaatgaaatgctttgttatataaccc

SEQ ID NO: 22632 - DNA, 2493 bp, Glycine max
  Clone ID: PAT_MRT3847_120439C.1
gctgcgagaagacgacagaaggggaatacaacaagaggtcacatacacataccttcctctctctctttctgtctctctccattgcaccttcccttcttccccttcttcttcttttctgtcatttgtgagattccttcacttgttttatctattccattggattgtacagattcctagctaaaacacccagatgtcaatctctgtaattctatttgatttgtgggtgtttctgtgaaaaaaagaattttttttaaggactgtcaaacccaaaactttttttttgggtcttttggtttctgcttcttttatttttgcaaactggcttctgggtttgctgcagaataaagccttcaatacccactaatacacaaggcttcaaaaacaaactgtttatattttcagcaaagttccaatcttttttccttctttttgtcaataaattattttatttttgcccccttttttctgcaattttggttttcttcttcttccctttactagaggaaaagattgagtcatgggcaagcaagggccttgctatcactgtggagttacaagcacaccactttggcgtaatgggccacctgagaagccagtactatgcaatgcatgtggatctcgatggaggacaaagggaacacttgcaaattatacccctttgcacgcccgggcagaaaatattgattatgaggatcaaaaggtttccagggtaaagagcatatcattaaataagaacacagaagtgaaattggtcaaacgaaagcaaaactatgataatgctgcatctggagggtttgttcctgattatagtcaaggataccaaaaagttgtggatgaagatacaagcaatagatcaagctcagggtcagctgtctctaactcagagagctgtgctcaatttggtggccctgatgctagtgatttgacaggtcctgctcagtcagtggtctgggatgccatggtgccttccaaaaagaggacatgtgcaggtcgtccgaagccctcatctgttgagaagctcacaagagacctgtgcactattcttcatgaacaacagtcttatttttctgcatcttctgaagaggatcttctttttgaaagtgatacaccaatggtctctgttgagataggacatggaagcattctcatcaggcatcctagctctatagctcgtgatgaagagtctgaggctagctctctctcagttgataataaacaatgcctaatgaatgaagcatattcattttctagtaccattcctatgtacagtgatcgcagtggcatgaacttctcatctcacggagttgaaaagatcaaaaactcagctggccaaatcatgcaacaagagaagcttgaaagggacaagtctcagcttgaaaaactacaagttcatggaaatcatgattcaccattgtgctcaatagatttaaatgatgtagtcaactacgaggagtttatgagaaacttgacaaatgaacagcagcagcaattactgaagtatctcccagtggttgatactgctaaatttcctgatagccttagaaacatgttcaatagcttccaattcaaggagaacttaatctattttcagcaacttctcggggaaggagtctttaacatctctttgttgggggcaaaacctgaagaatggaagacattagaaaggcttgcattatctaatctgtcaaagtcgaaatgggtagaacactataattttcttaagaaatgtgaaaacaaatctggaaaatctattggtttgggttctactgctatggaatcaagtaatgttacaactggcaaaagaatgcgtgagcatgacagccgaaatcaaaatattccagaattgaagacaacgatgaggagccccaaaagggtgatcataaagcctcctagctgtgaggtcaaagaagttgtagaagaaggctctagcttcagtccaaaaagcttatttgctttaccccatggtgttggtggcttgcacatgctggattctttcaactttgttggtgagagttctgaggatctgcttttagaggtgccttctaacagttcttttccacaggctgagctcctgcacccatctttaagctatggtgctcgtcaggtcagcaccactagtagctcagtacactcacctgttactcatccttaactaatctttactaggttacttggatgggtatggacacaatattttgtcataatagggtccacatgttttgcatctgaaacaccaaagttcatgtacaagagatatgatgatgattgtgtttttgtttccttgcaaccttgagcttggattgccaaaggatggaagttgaatgggcttttttttttttttcttgtatagattggtaatagattgtaacatatagcatgaaattcggagtgatcatctccggagtttttgtatgcaattgtagtttatgttttgtgaatgattcacacccttttatttcccaataggtttaaatcataactctccaaactctt

SEQ ID NO: 22633 - DNA, 210 bp, Glycine max
  Clone ID: PAT_MRT3847_12043C.1
atttcttgtccaactctacgtcactttgtgttttggctgtggacctcaaataatgggacattcctttgattgtgggctcttgtctacttcttcctcttcgtcttcattatgtattctccatccatcagaaattcacactttcatgaatacgacatatgcttcctctgatttgcacatgacccctaccaatctcaatacctttagatccat

SEQ ID NO: 22634 - DNA, 917 bp, Glycine max
  Clone ID: PAT_MRT3847_120440C.1
tcgggcatagtctatgtcatcttctgcccaggagcattcgactgaaaaagtatgccattagtaagactctctagaagccttaggagctatggagtctggtgaggtagctcttgtctcttggtcagctgtttccgctcgagtgaaaatgcttgatggggcgagatttgccttgggttcgctttccgggtgaggtttaataaaaaaagtcaagtaggacagcggtgaccgcgaatggctatagttcgtcacttgcggtataaaaagaaaagtcaggagctttgaagatcagccctaagctaaagcgctttctttctagtttgagagatggaaatgcctaatcaagtagccaagaatcatcgatttcggaggggaaatgaatttaggaaggatccgatcccaagtgacattgaatcagttgggggtataagcgctgctatttcagcagttggtgttggaggactgaatgccagtcgaaaggcgcatctatgacttaatacctaatttgccatagaagggctcgatcccagacctcggcgcagggaagactgttgaaggggggctcaagctttatttcacgtagctgactttaccgtcagctcaattggaatagtttttcgctatgttcgcaggcaagtgagacgatccatcaatgcccttatctgcttcgaaagaaccggtgtcatccaaacatggtgaagaggtggcaactggatcaataatagctgaaacttctactgtacagggttcggcttgcccaactgtccaagcttgagatctattttagaatatgcttaacacaacacatgcaattcgaacgttgttttcttggaaagatttgaaagtaactccgttgggttcaatgcccgctagtcccatgcatcctttctgttggtcaacaaccaaccacaagtcaatcg

SEQ ID NO: 22635 - DNA, 347 bp, Glycine max
  Clone ID: PAT_MRT3847_120441C.1
aaaaaaaaaaaaatgaaaaaacaagaaatatatgaagaaaaaaaaaaaagaaaaataaaagagggatggctcagtaccatgggcatgaccattgctctctcctgcctaattttccctctgtttttgttaactggccatggtggccactactttccggaggtgtcatgccaaagcttggaggcttggtggggattctcacccctttcatttactggaaaaccgttcctcaagattgccagggatatatttggaactacatgcttggcgaacattctttatcagactccgaaatagttaaccaacatgttgatttctatgctggaaccctcaatatcactgctcaaacc

SEQ ID NO: 22636 - DNA, 338 bp, Glycine max
  Clone ID: PAT_MRT3847_120442C.1
agaggggcgaattggggaggcttctataaatgatttccaaaagcacgacaataacaaataatcctcttcccaacccccacctcctttacattttagcttaaacgacaaatctctctatacatggacctttaccccaactctctcaacccttttcagagaaacccggtggaaatttacaaaagtttctgagagagcgctacccaataaattaacaaatatgctttttaagagactccacaagacatgtcatttattgagaaccttaatatcacctctatgttacgcttaccgaaccagacctacacatattcacctttttcaccatgggccctttcttc

SEQ ID NO: 22637 - DNA, 191 bp, Glycine max
  unsure (1)..(191): unsure at all n locations
  Clone ID: PAT_MRT3847_120443C.1
tttaaacgcagggncaagagnncnggacggggggtgtataaaagaggacacacctgtaaaccacactnggcaataaaaaaatgcttgcccacatcgccataggttcatgatcataatgaagaaaatgtcgatgtacagatggaagcccttgcataaggccccaaaatgcaatttggcctgcatagggccat

SEQ ID NO: 22638 - DNA, 1506 bp, Glycine max
  Clone ID: PAT_MRT3847_120444C.1
ctccctcaccacacccacaagtataacaagagatgatgatgatgatgttgtcgtcgtcatatgtttggcaatcaatgaacaacgccaattctgaaacttcttctccttcttcttcttcttttgtttctcttgtgtacttctacttcttctgaacatggaactgttgtctctgagactcaccccttcaccttcgacttcgacttcatcgcttcctgcagcacttgctcactgctccaagctatgtgaatttcagccgaggaagaagaagaaggcgtgtttcgacgcgcctaggcttgcggtgcggtgtgtgaaggcctcggcggagcgaaccggtgatacgatcgatgatggggaggctcgtagcgggttcaccacacctgccatggaagtcaccacattcaatcgaagcactttcagcgatgctgctgactttcccgtttgggaaaagattggtgctgtcgtcagactcagttatggtatcgggatttatggtgccatggctgttgcggggagttttatatgttcaatcacgggaattgactctctgggtggtttccatctatcgttagatgccattttggaagggcttggatatgcagctcctccaattatggcacttttgtttatactcgatgatgaagttgtgaagctatcaccccatgcccgtgccatcagagatgtagaggatgaagaactgtggagctttttctatgggatgtccccttggcagtttatactgatggttgcagcaagttcagttggagaggagctcttctacagggctgctgttcagggggcattggctgatatatttttacgaggcagtaatcttataacagatgttcaaggaatggcatcattgaccggtgtgctgcctccatttgttccatttgctcaagcatttgcggctgttcttactgctgtccttactggttctctctattacatggctgcctctcctaaagatcctacttatgttgttgcacctgttttacaatctcgctctggtcgccaagatttgaaaaagctatttgaagcctggtatgaaaaacggcaaatgaaaaaaatctattccccacttctggaaggactgctggcactatacctaggtttcgagtggatccaaaatggttacgtgacagactgataatattcttgctcccattatcacacatggcatatattccactgtgatattgggacatggcctttggaagataaatgaccaccggcgtagactacgtcaaagaatccaacagcttaagtcagaagaaaaaaactccaactagattttgaaatatcctccatgtccatgactgattttggtttaaaaaaaagtgtatattagagttgttgtataaaaagaatatatgtatactcatgttagttttggtctcatacatacagaatatgcaggttttgattgcagaaatttcgaaataagagttgtaactcttttttcccttaataaaatggaataatccaaaagtggatttttttgtccaa

SEQ ID NO: 22639 - DNA, 516 bp, Glycine max
  Clone ID: PAT_MRT3847_120445C.1
ccacacccacaaatataacaagagatgatgatgatgatgttgtcgtcgtcatatgttacatgttccaattacctcggtggcaatcagtgaacaacgccaaatcttaaacttgttcttttgtttctcttttgtactactagttctgaacatggagctgttgtctctgagactcaccccttcaccttctgcttcgacttcatcgcttcctgcagcacttgctcactgctccaagctatgtgagtttcaaccgcggaagaagaagaaggtgtgtttcgacgcgcctaggcttgcggtgcggtgtgtgaaagcctcggcgcagcgaaccggtgatactatcgacgatggagagactcggactgggttcaccacacctgccatggaagtcaccacattcaatcgaaccactttcaccgatgctgctgactttcccgtttgggaaaagattggtgctgtcgtcagactcagttatggcctcgggatttatggtgccatggcagttgcggggagttttatatg

SEQ ID NO: 22640 - DNA, 466 bp, Glycine max
  Clone ID: PAT_MRT3847_120446C.1
taggtatctgaaaatgcagctacacatgctacaggtcaacgagttccctgtggagaagacatgtaaaacattgaagaatactgttggcaggttgagaggcaaactaagcagtttgattcaatccatattgccaatgctttctgctagtgttagttgataatcgtttcaatttgattaccctcgctaccccttttatccatttcagcaaattgtatgttttagggtagcatttgtatcaattaggatccaagggtttttgttgattacatttacatggatattttataaattgcttggtcaaaggaaaggctagttagagattttaaaaatcattcatatatgtatgtatatgtatattcggagatgtggccgagacttgtgtacctgactacttaacaaagaacaggaaacttgtgtattggttaataataattaattaaatgtcttccgagctgactttgagaac

SEQ ID NO: 22641 - DNA, 305 bp, Glycine max
  Clone ID: PAT_MRT3847_120447C.1
acttcattctttcccaaatgagggtcctggttgccattattagagttacaaggataaattttaagaatgctcggtgctcttcacaaatgttttaatctttactccttgtttgattcaattgttaaagatacatagatgattagtgtctaggaagctccaacacctttgtagaatgatgtataggtgtgtcaaacaccttttatctatcattttttctgacatgttttcgacacatgtcagacacctttcaactgtatgctaattaatgatatttttttagtttaaaaaaaaaaaaaaaaaaaaaa

SEQ ID NO: 22642 - DNA, 527 bp, Glycine max
  Clone ID: PAT_MRT3847_120448C.1
aaagcttgtagaatttggtataggagggatctgcaattcttgtgttgatccggccaattctgcaattgtaactacgtttggtgggatacctcttataatccaatgtttatcaagcccagttaggaacactgtaaattatgcacttggggcactttattatatctgtaacgaatctaacaaggaggagattttaaggcccgaagttgttgatgtcattaggaggtatgcagccgctgaagaagttagtgtgagcttcagtaatctggctaaagcttttctgagtaaacatctggccgagaactactgagagacacagcttacctttccatactcattataagaccatatgtcttgagtaaggcaacaagtaattagaaagaactattattattgttattattattcttgtttgatcaaatattattattcttgttattgttatcacactattcatgtctagaaagaattagcccatacaagatactatttgacattgagaatggtttcacccaaaaaaaggttttgat

SEQ ID NO: 22643 - DNA, 503 bp, Glycine max
  Clone ID: PAT_MRT3847_120449C.1
caccgaattcaccgtgcccttcttcgtgtcattctcagtctcctctacttcgatctcatcgggcactgatagcaacatctttggtttctctatcacttcattgggcgtcaacactgacggcaacctcgccttgactatggccaccaacactttcatcgccggatccagcttgtctgccccccaccgtgattactcaaccttccttgatcggtttggcttcgatcaacaccccagctcctgctaccaagcaaacttggaatttcgtgacctcatctcctagccctaactactccggcccttactcgattcaattcactcgcactgatggtgccaagagatccactgtcactgtcgccgctcaattcactttgaacttggctgtcaacagcggttacggcaatgcaaacaacgtcctcccgaccagcttgtcattctttggctctgactccgactccttcagcggcagcaccaagaccactttcacttcactcgacaccatcttc

SEQ ID NO: 22644 - DNA, 151 bp, Glycine max
  Clone ID: PAT_MRT3847_12044C.1
cctacgggatgggccacctctgagggagttcatatttggaaacacaaacactgctttcatgtcactgaccaacactcgttgctggggactgattctttccattttgcaaacagggtagagaggacttctttgtacagtcaaccagcatgtg

SEQ ID NO: 22645 - DNA, 417 bp, Glycine max
  Clone ID: PAT_MRT3847_120450C.1
tttgtcccgtgggtggaaatgcaatacgcttatcttgtcaatctcgcaaacgtgttacgagaattgtatttgcacagtccagaagatgctcgccaaccgagaaggatagctctctctcgcattgaatggctgcacaaagctgatgcgcctaccatagcacaaatcgaagagttgcattctatgcaaatgatgatgcatgctgctgattcaaatgataatattgatctactggcgacgcattgatttgttgggtttacaaggagcaggtaaagcttttccaaacacgatagtttctgatgataagcttgcgtgggctatacacacaagacttctgtgagggaaactttccagaggattctaggttaccaatttttgagaattgactttatcctgctagtcactcaccatcagaagctg

SEQ ID NO: 22646 - DNA, 302 bp, Glycine max
  Clone ID: PAT_MRT3847_120451C.1
ggttcatatctctctgttctctgctacgtttcaagtttaggaagtgtagagatcgcatagacattcctatttacctcatagtcagtgaactagggacaccctgacaagctctgtgaccaaatctctgatgctgtcctctacgcttgcctctaacaggacccatacagcaaggttgcctgctaaacatgcaccaaaaccaacttggtcattgtcttttgagaaattacgaccaaagccaatgttgactactataagatagttcgtgacaccttcatgaacattttcttttgtctcaaaccatg

SEQ ID NO: 22647 - DNA, 442 bp, Glycine max
  Clone ID: PAT_MRT3847_120452C.1
aattcggctcgagctcgagccgaatcggctcgagctctaagtgtgtaatacaattagtcatctctgtccaattgtgttctgttttgagaacctaacactaattcttaagcagagaacatacaagatagagtaatcagtcatgccatttggtttggtctcactctcagcctggaacaagcgtcgtagaagcaaatcacaagatcatacagatccctgggtttacaaacctgcacagctttggcaacttgaagatcaaatgccacgacctacaaaaaggctacatggatcatctgtttacacactcaaggagatggaggaggcaacatgttcattcagtgatgagaatctgcttggtaaggaggatttggcaagtctaccggggaactttgcggtcaggagaggttgtagcaatcaagaaaatggagttgccagcaattaaagc

SEQ ID NO: 22648 - DNA, 540 bp, Glycine max
  Clone ID: PAT_MRT3847_120453C.1
gttccaaggaaggtttcccgtcatcactgtatgacgtcctccttctttgggggggggggggggtgataagcgtgatataggggatcggtccataagcggaaaggaccagggatagcaccaggcagagtacatggagggcggttgtgcgagcaacaccgggctcaagatggcgtagacaccaaggaatggggaaaagggaaaaacgtaaagcaacgcttagcgatggtaggtgacgccattggtatgagacgtgagatatagagggggacatagcaacaaagagccaaaatatagggtagtccaccgtagcgtgtagcggtaggagaatccaacgggggcgagagcaacgcacgtgaattattcgcatagcgtaaagcagcgtatgcgtgaacgtaattaggcaagggtgggggcttatgcataggcgattacgtggtagcatcgtaataagtttaaggcaactaatacagaggagtgctactaggatggtaattgtaggcacgtgtggagactacaaggctaatgtgcgtaaggtattat

SEQ ID NO: 22649 - DNA, 512 bp, Glycine max
  Clone ID: PAT_MRT3847_120454C.1
gcgaccagctgactaggactgcggccgccctgcaaataaagaaagaaagaatatttggatagggccatataccgccacagacgcccttgccagacacagactctgtaccggggggtgcttcttcctaaaaaggcaatagacaacgggtcttacaatcacattaaactttcccataactcaggctcttacttccactcgcgaaggaataacttgcccttcccgacaaccatgactttagaagtggatgaggaggaggcgttcaaccgctctcttctggtggtgcgcgacgagtcagtgtacaaaatcccaccgcgtaatacgctcaggcggctatatgtgccgagagtggcgtcccccacaccaagatctgggcaggacccatacgcggctggtgccggaacattcttttctagattcgactcaaggatccgagctccggtgagatgtttcacccctgcttagtctcctccgggcacccgcgagaccaccggtgagcccctcctcaactccgc

SEQ ID NO: 22650 - DNA, 392 bp, Glycine max
  Clone ID: PAT_MRT3847_120455C.1
aggatatgcgaagcattactttaggggctctaaatcgaaaagctggctagctaggcacaacatgaacataactgatggcattgacataactagtgcaactttgcaatctataaagctagcagattgacgactctctaatgagaaactcgatgcataaacttgaggcctcgcgggtgagggctgatgacaaggcgagttgatggacacaacttgatgctgaatagagtaataagctggaaaggcaagacgcttatgttggcaacctggtgaaaggggtacgagaattgcctttgctcagtgcagtggacgctcgtcatttcagctagtaagctctctctcaaggcgtatagcttcagctagctgaggtgcccaccatagcacatatcgaagag

SEQ ID NO: 22651 - DNA, 309 bp, Glycine max
  Clone ID: PAT_MRT3847_120456C.1
agatttaagaccgttaaacaattagaatgtattgggatggttaacaaatatttctagtatcaaaattctaaagatggaaagaataatgtgaggttcatcggaaaccaaacttttacacgacctgtttttgtacacattcagcgctatactcaattgcttaggactatttcaccaaactgatacactctgtatccttattcataatcatggctcaaacgttatctagcatactaaatagattgcatatcatctttgtcgccccctcattcagactaacccttacaatgatttaataacctttgacattat

SEQ ID NO: 22652 - DNA, 254 bp, Glycine max
  unsure (1)..(254): unsure at all n locations
  Clone ID: PAT_MRT3847_120457C.1
ttttattactaactgcttctgattgtnttttgtactaggctacgtttgagtattattaaatacttttttgataaaaattcgctcatggatgaatgtaacattcctattataggagttgatgaaaccttagaagtgtaatttattgtcaatgtgcaacatgttattaacttgtcaccgtttattcagtaaaanagaaatacacttgttaccgtttatagtccctcaagactggtgtgtaagtgaagccttttatt

SEQ ID NO: 22653 - DNA, 285 bp, Glycine max
  Clone ID: PAT_MRT3847_120458C.1
cttgaaaaatgagcaagttcaattttgtaccaacaatattgaacttgaaaaatgagcaagcttgtgcctggatttgagcatggggtcaccgaacatcttattgatggatgcaattgaccttgactggattactgaactttatagacgggttatggtctagttgttgagactagagaatcattatattcatcaccaaccacaatgagaggctagacccattactgtttgatgccatgattaatggacatgcacattcacatgttctattgtttctaccaaggcttt

SEQ ID NO: 22654 - DNA, 308 bp, Glycine max
  unsure (1)..(308): unsure at all n locations
  Clone ID: PAT_MRT3847_120459C.1
gactaaacacccaacccaaaaccgcgnccagagggagggagtaaggaacccgggaagcgcaccggaccccacagcgacaccaggagggccaccggatggacggccaccccaaagcaagacgaccaggcgacaaccgaccggccaagaaacccacacgaaggacgacccaggaccaaaagcgcccaaaacccacaaaacccaaaagggcaaaacaggcggacggggaaaccgacgcccccccagggcactacccgaagagcaaacaagaacgcccccccccaaagggggaggagcaggggcaaagaacg

SEQ ID NO: 22655 - DNA, 171 bp, Glycine max
  Clone ID: PAT_MRT3847_12045C.1
gaatagtagataaaagttctatcgagcatttgggatcttaaaagatactgaaagactagataaccaatctattacgaagtgatcttgggtaatgagcacgctggtcttcttacttcacgagagtgccatacgatgggcataggcaaggtatggcactaacaagggtcttgc

SEQ ID NO: 22656 - DNA, 514 bp, Glycine max
  Clone ID: PAT_MRT3847_120460C.1
ccacgcgtccgcccacgcgtccgaacgccatggcctctcagaaccttgacttcgcaccctcccggagacgggtccgtgcagctttcaccgaggtgcaccagcagctcgaccatttcttgttcaagactgctcctcctgggatcagaaccgaagaagggtatgaaaggaattccaggggattggaaattttctgcaaaagctggatgcctgaatcgggcgtcccactcaaggctgctttgtgtttctgccatggttatggcagcacttgcactttcttctttgaaggtattgccaaaagaatagctgcttctgggtatggtgtttatgctatggactatccaggttttggtctatctgaaggtttacatggttacataccaaattttgatgatttggttgatgacgttatagaacattttacaaaaatcaaagcaaggcctgaggtgagagggttgccacgattcatattggggcagtcaatgggtggagcaattgctcttaaggctcatttgaa

SEQ ID NO: 22657 - DNA, 479 bp, Glycine max
  Clone ID: PAT_MRT3847_120461C.1
atgacttatttaattccgattcttcagattcctttgtctccgcagattcttaatctattcctgacaaaggattgccaacctgaatgtgaataattttgcatgaaatgggttggtttaccaagttgcttaagggctctgatcataaaattttacgaggacaataccatggcaaatatggagaggacagaatttgggataatcatcatagttcaatggatgatttgactgatattgagaaagaagacattgaccgtgcaattgcactttctctgtcagaggaggatcataaagggaaaaaagttgttgatgaggaactttgtaaaattgatgatgatgaggaggatgaacatcttgttaaagttcatctagatgaagatgaacgtcttgctaaaattcagcaagaagaagaagaacgtcttgctaaaattcaacaagaagatgagcatcttgctaaaattcaacaagaagaagaagacgtc

SEQ ID NO: 22658 - DNA, 518 bp, Glycine max
  Clone ID: PAT_MRT3847_120462C.1
gtccccggcctgttggtcgctggagtgactggtacccagtactttggcgaggcccagtactcatcttgaagctcccttcaaggaagaccttgaccgattccctgcactacctctaccagcactgcatggagaccaacggctagaccatcacctctgatggatcttttgacgcgttcacaacatggccccattctctgcggtgagccttgctccaacgctcagcactccttcttccagcgcgtccaccaatgcaccaagcgaatccgcaacgacttcatcctaccctacaagtcccacaatcctgtcagcgataacctccaccatagaatgctgggctccggctactacgaccaggatgaagctctcatgggcggcaagacagacgatcatgctcgtgccaaagggacatgcgacgagcttgatgatcacaagcgctaccgtggaaaccgacccacgacctacatccttggacgaggagccattggacccgccgagctgggtgcccagatcgtgtacta

SEQ ID NO: 22659 - DNA, 1844 bp, Glycine max
  Clone ID: PAT_MRT3847_120463C.1
attctagcgatgttgtaaccgctggaaaacatggaaaacgtactctagttaaaattctggctgcgtcttctgctgccctggctcttctgctagttgttgtgacagttgttttctttacaaggaagaatgtggtgacaaggagaagagaaagaagacagtttggcgctcttctagccacagtgaataagtccaagctaaatatgccttacgaggttcttgaaaaagcaacaaattacttcaatgaggccaacaagcttggacaagggggatcaggttctgtttataaaggagttatgccagatggaaatactgttgccataaaaaggcttagctataacacaacacaatgggcagagcatttcttcactgaggtcaatttgatcagtggcattcatcacaaaaatctagtgaaacttttagggtgcagcattacaggacctgaaagccttcttgtttatgaatatgtgcctaaccagagcctccatgatcacttttctgttagaaggacttctcaaccgctgacttgggaaatgaggcagaaaattatattaggaattgcagagggcatggcctaccttcatgaggaatctcatgtgagaatcattcatagagacataaaattaagcaacattctgcttgaggaggacttcacacccaagattgctgattttggacttgctagattatttccagaagacaagtctcacattagcacagccattgctggcacactggggtatatggctccggagtatattgttcgtgggaagttgactgagaaagcagatgtttacagttttggagttcttgttattgaaatagtttctggcaagaaaatcagttcctatattatgaattcatcctctctcctacaaacggtttggagcctctatggatcaaataggctatatgaagtcgttgatccgaccctagagggtgcttttcctgcagaggaagcatgccaactgcttcagatagggttgctttgtgcacaagcatctgcagagttgagaccatcaatgtcagtagtagttaaaatggttaataacaatcacgaaattcctcagccagcacaaccgcctttcatcaattccagtagttcagaattcagcaaatctggtttacctggatataattttcagcctggatccaacactcagtcttcagggaacaccataagtgaaagtcagattgagcctagataagttacactgcacaacctttctcctggaccatttttatgtgctcacaatccccaattacccttgtaaaagctgttggcattcttgctttcttgtaaaagtgtggtttcagttatcagcatggcattgcccttgtacatctctgaattgaaaggggagtggcataaccccatatgaacctctgccaacagctaccacccattgctttgtgtatagattacagtttcacaaaaagctgcaaggtaaaaaagttaaattttgccgaaaacttgtacattacattatcacacaggtcacctagaaaagaatcaataagcggattatactatatgctttttaacagtttgagttctctactaacacctgattgagttttctaccaggcacctagaacgaaaggtgcaaggattccaagaattttacttgtaaccaccagtgattattcatttacattttattcttttatgtaacattaatttattttaagttccttattttattgttaacccctgcttttgtctaaagaaaactttctaactcctacaacattgtcgttgtactatcatttattatgatatgctaaacactgtagactttatcaaaatttgctataaaatacatacaccctttggtttcagtaat

SEQ ID NO: 22660 - DNA, 1345 bp, Glycine max
  Clone ID: PAT_MRT3847_120464C.1
ctgtgcggcgctcaggccgcgcgtcaacccccgcggccgtacggctgcgagaagacgacagaaggggagggttttgcgctgttgttgctgctcatcctccgtaacctccgagctctgcaccgaagaacgaagccatggggaagacacatggaatgggatctgctcgcaagctcaagtcccaccgcaggaggcaaaggtgggctgacaagtcatacaagaaatcacatcttggaaatgaatggaagaaaccttttgctggttcatcccatgccaagggaattgtccttgaaaagataggtattgaggctaagcagcccaactctgccattcgtaagtgtgccagggttcaacttatcaagaatgggaagaagattgccgctttttgtccctaatgacggttgcttgaactacattgaagagaatgatcgaagtcttgattgctggatttggacgaaaaggtcatgctgtgggagatattcctggtgtcaggtttaaggtcgtgggtttctctggtgtctctctttctgggttctctttcaaggagaagaaggagaagccaataggtcatttgtcttgcgtgccctgttctctatagtttctccaaatattattatgaattttgctttgaggtgaatgggttctatgaacaattttgtatctctctgtagtaatttttctgaactaaatttggtttcatatctccttacttgggctccatttttatagagaatgctttgtgtgaagttcggtcaaaaagcaattcaaaagtatctgcttaaaaggaaccttgaagatagaaatttggctggatgttagccatatttaagcttgaaaagttgattaagatgattgtctgatctatagtatggtgattgctactgctgccttgcaaaccaacttacaaccaaggattaaaagtcatccaggtttagctaagggccataccgtaataaatgttttgcctcattatggtcgctatgttttaaaataatttattttggattgaatgaagaattttacaaaagtaagttttccatattgagaattgaaaatttgaaagaagatataattttctgacttatacattgaccattaccgcagcttggtcaataaactatatagttcaaagtttccaagatcatatagtttaattctagacaaaataaggaataaaattgctcctctttcgttgtagttccataatttcgtatcaaatgtggcaccgcatactctatatgtataattaaatactactcaggaactgaagcaatgaaagtatagaattaatgttgtacgaaaaaaaaaaaaaaaaaaaaaaaaaaaaggccgctctagaggatccagc

SEQ ID NO: 22661 - DNA, 491 bp, Glycine max
  Clone ID: PAT_MRT3847_120465C.1
tggctccggagtatattgttcgtgggaagttgactgagaaagcagatgtttacagttttggagttcttgttattgaaatagtttctggcaagaaaatcagttcctatattatgaattcatcctctctcctacaaacggtaactgttttcatttggaatgttgctactacatactaattcatttgacgtttttaacaagacaagcattctcataattctaagaactgtccttagttgataatcatttttgtgttcttttatacaaggtttggagcctctatggatcaaataggctatatgaagtcgttgatccgaccctagagggtgcttttcctgcagaggaagcatgccaactgcttcagatagggttgctttgtgcacaagcatctgcagagttgagaccatcaatgtcagtagtagttaaaatggttaataacaatcacgaaattcctcagccagcacaaccgcctttcatcaattccagtagttcag

SEQ ID NO: 22662 - DNA, 694 bp, Glycine max
  unsure (1)..(694): unsure at all n locations
  Clone ID: PAT_MRT3847_120466C.1
ccacgcgtccggtctctgcagatttttctgcagattctgattttgatgcaggttaaaagtttctagaggatggtcatgctgcagttgaattttgaagtttggactcaatgcatagcctttgtttttttaacaagctcttattagtctgccatttttccttctatgtaaattatggaatatattttccttacctactcctggggcatattttcagacaagggtttgccaacctgaaggtaaataattttgcatgaaatgggttggtttaccaagttgcttaagggctctgattataaaattttacgagggcaataccatggcaaatatggagaggacagaatttgggataatcatcatagttcgatggatgatttgacagatattgagaaagaagacattgaccgtgcaattgcactttctctgtcagaggaggatcataaaggaaaaaaagttgttggtaagatttaatgcttttgttgntaccttggtagttaaagttcatttccaggnntagtttggctcacatttaatactgttgtgattctggatactgcatatgaggtacctaaactcgaagatcttaatctaaccaaaatgctcgttgatttattacaagctctcacacctcttctatatttcctgtctttctatgcctatttcagnggcttcttcattcttgntncannactttatg

SEQ ID NO: 22663 - DNA, 634 bp, Glycine max
  Clone ID: PAT_MRT3847_120467C.1
agcgtatagcaatttggttgtaggccttaatgacaccatggagaatctcttggctgctgtggacagaaatgaggctgagatttctccttccaccttgtatgccattgcctgtgtgatggaaaatgttcctttcattaatggaagccctcagaacacttttgtaccagggctgattgatcttgccatcgcgaggaacactttgattggtggagatgacttcaagagtggtcagaccaaaatgaaatctgtgttggttgattttcttgtgggggctggtatcaagccaacatctatagttagttacaaccatctgtgaaacaatgatggtatgaatctctcggctccacaaaccttcctctccaaagaaatctccaaaagcaacattattaacaatatagtcaacatcaataccatcctctataagcctaatgaacatcccaaccatattattattattaaatatataccttacataagggatagcaagaaaaccatagataattacacttcagaaatattcatagatagaaaaaacaccattattttacacaacacatataaagattcccttttatctactcctattatcttagacttaatgcttcttactgatctaatcactagaatccaggtt

SEQ ID NO: 22664 - DNA, 963 bp, Glycine max
  unsure (1)..(963): unsure at all n locations
  Clone ID: PAT_MRT3847_120468C.1
atccacacttttctctcatccctttatgatcgttttttttatgacttatttaattccgattcttcagattcctttgtctccgcagattcttaatctattcctgcacctctctacacacaaatacacaaatgttggacatatttaatgagagcgtgagagcgtgagaggtgagacaaaggattgccaacctgaatgtgaataattttgcatgaaatgggttggtttaccaagttgcttaagggctctgatcataaaattttacgaggacaataccatggcaaatatggagaggacagaatttgggataatcatcatagttcaatggatgatttgactgatattgagaaagaagacattgaccgtgcaattgcactttctctgtcagaggaggatcataaagggaaaaaagttgttgatgaggaactttgtaaaattgatgatgatgaggaggatgaacatcttgttaaagttcatctagatgaagatgaacgtcttgctaaaattcagcaagaagaagaagaacgtcttgctaaaattcaacaagaagatgagcatcttgctaaaattcaacaagaagaagaagaacgtcttgctaaaattcaacaagaagatgaatgtcttgctaaaattcaacaagaggatgaacgtcttgctaaagctcaacttgaggaagacgagcaacttgctagggcaattcaagaaagcttgaaaattggttctcctcctcaatatgacaatggttcttcaattctatcttttcctcaccttttcccccctggatacagaatctgtgctggatgcaagactgagattggccaaggaagatttttaagttgcatgggaggtgtctggcatccagaatgcttctgctgccatgcatgccatcttccaatcactgattatgagttttgcatgtgtaggaatgggacttaccatgngtggtgctgtggggagaagggtggg

SEQ ID NO: 22665 - DNA, 2140 bp, Glycine max
  Clone ID: PAT_MRT3847_120469C.1
tagctacttggtacctgggcatatccattactttactctattccctttatgatcgtttttttcatgacttattttattctgattcttcagattccgttgtctctgcagattcttaatctctttctggttaaaagtttctagaggatggtcatgctgcagttgaattttgaaacaagggtttgccaacctgaaggtaaataattttgcatgaaatgggttggtttaccaagttgcttaagggctctgattataaaattttacgagggcaataccatggcaaatatggagaggacagaatttgggataatcatcatagttcgatggatgatttgacagatattgagaaagaagacattgaccgtgcaattgcactttctctgtcagaggaggatcataaagggaaaaaagttgttgattacgactctcaatctgaagatgaggaactttgtaaaattgatgatgaggaagatgaacatcttgttaaagttcatctagaagaagaagaacgtcttgctaaaattcaacaagaagaagaagaacgtcttgctaaaattcaacaagaacgcttctcaacaagaagatgaatgtcttgctaaaattcaacaagaggatgaacgtcttgctaaagctcaacttgaggaagacgagcaacttgctagggcaattcaagaaagcttgaaaattggttctcctcctcaatatgacaatggttcttcaattctatcttttcctcaccttttcccccctggatacagaatctgtgctggatgcaagactgagattggccaaggaagatttttaagttgcatgggaggtgtctggcatccagaatgcttctgctgccatgcatgccatcttccaatcactgattatgagttttccatgtctagcaatcgcccttaccataaatcatgctatagggagaagcatcacccaagatgtgatgtttgcaagaactttatcccaactaattcatctggcctcattgagtatagagctcatcctttctggctacaaaaatactgcccatcacatgagcttgatggcacttctcgttgttgtagttgcgaaagaatggagccaagggatacaaaatatcttttgcttgatgatggtcgaaagctatgtttagagtgtctagactcatcaattatggatactcatgaatgccaacctctttaccttgaaatacaagaattttatgaaggtttaaatatgaaattggagcaacaaattcctatgctcttggttgagagacaagcgctgaatgaggctatggagggagaaaagaatggtcatcaccacttacccgaaactagaggactatgcttgtcagaagagcaaactgtcaccactatttcaaggaggccaaggattgcagcaggctaccgagccatagacatgataactgaaccttataggctgatccgttgttgtgaagtgacagccattcttgttttgtatggccttcctaggttgttaacaggatcaatcctagctcatgagatgatgcatgcatggcttaggcttaaaggttatcctaacctcagtccagaagttgaagaaggaatctgccaagttttggctcatatgtggttagaatcagagctctattctggatttgggaatgatggtgcatcatcctcaacatcatctttgtcttcgtcatcaccttcctcctcttctgtctcaacaaagaagggtaaacggtccgactttgagaagaaacttggtgatttttttaaacaccagattgagtcagatacctcctcagcttatggagatggattcagattgggtaaccaagcaatggtcaagtatgggcttaaaaggacccttgaccatatccatatgacaggaagttttccatattaaaaattgaaaatttgaaagatatgattctctgacctatacaatggccattaccacagcttggttaataaattatatagttcaaagtttccaagatcatatagtttaacattagagaaaataaggaataaaattgctcctcttacgttgcggtcccttaatttcgtgtcaaatgtggcaccgcatgccttatatgtataattaaatactactcaggaactgaagcaatgaaagtatagaattaattttgtatctcttgtgttttgct

SEQ ID NO: 22666 - DNA, 725 bp, Glycine max
  Clone ID: PAT_MRT3847_12046C.1
cgcgatctagaactagcggacgcgtgggttttttttttaaccttcaatttacacctgatcatttgtttctcaacttttaaaaaaatactatgttacagttacacacaaatctaaacacacacaatatattattattataattattatttattatcccctcccaaaatagactaaataaatagtacacaaaagtttccaattttgaagtgaacagaaagcaataaagaaaaaagagaagaaacaaacccacccagccacccacctggacttagggtagagtccttccatggaaggggtggcagaggtcatggtcagaagatgcagatcccaatccttgtccacagtaggaaacaacctcaggaacttagaataggcctcagatgttcccgccacccccaacaaccacaccttccctccatgaatccccaacaacctcgtcagttgcgaaaccacaaacccaacatcaccctcttcattattccccccaacaaaaacctcaatttccccgaaacacaccacaaccccagcaccacactgctccaccaaacgactcacatgctcaaaaatcttctcacccctcccaccttccctaagaaactccccaatctccttttccaccgaaaccacgctcaaaccgtttagttcacaaggcaagactccacctttaccattcttcacaacttcaacgaagctcctgagagaggttttggcataaacccccatca

SEQ ID NO: 22667 - DNA, 624 bp, Glycine max
  Clone ID: PAT_MRT3847_120470C.1
cgcccatgattggaacggtgattgtgcgctctactctcaccactcggggcagctgattgttcttcctcacaatgtggcgctgccggtgtcccttaaggtgttggagcacgaggtgtatgctgttgcgcctattaagaaggttttgggtggtggctacagctttgcgcctcttggacttgtgaacatgttcaatgctggtgctgctgttgaagggctggtcttcgaggaggatgggttggttcgtttggagatcaaagggtgtggtaagtttggggcttattcttctgccagaccaacaaagtgtttgctgggaaaccatgagctgctggatttcgattacgatgctgattcaggcttgctcaccttcaacatagatcatttgccccaagagggacactgggttcacttagttgagttagtttacagtctttcttgttagttagttgcaatcagagagggagaggacattgctatgcttttgtggtatttctttcttttgctgggtaggatagaatagacaaggagagggttttcaacaatttccactttgtaagatttcacgagctacctgttatggaatttcgataggaattgaatacatgtttcttactcttctttcttctt

SEQ ID NO: 22668 - DNA, 343 bp, Glycine max
  Clone ID: PAT_MRT3847_120471C.1
ttacgatgcccaacatgtctcaacatttggtatacactaatacaaaaaactatggcaggtattacatgggtaaagaaggcctacacgaatagggaagaaagaatccttttggggacaatacataattctgtatcgtatactttggtcccttatattcaaaccagtcctcataattaaactccgaaatggaattcttcgacccccaagatagcccgatatgcaaattatagcctaaatatataaaatatcgcacgcattgcgattatgcgcgtaaagtgccctagtcgcctggcccacggccatggggcacttcttgcggactgaacttattaaacaccttgga

SEQ ID NO: 22669 - DNA, 101 bp, Glycine max
  Clone ID: PAT_MRT3847_120472C.1
ttcgtgcaccaagaaggagctcctatactatcccattcttgaattcatttagctccttctttgcgcacgaggcgacatttaacttcacatactttaactct

SEQ ID NO: 22670 - DNA, 1064 bp, Glycine max
  Clone ID: PAT_MRT3847_120473C.1
cccacgcgtccgtacggctgcgagaagacgacagaagggtacggctgcgagaagacgacagaagggcgggagggttttgtgctgttgtcgctgctcatcctccataacctccgagctctacaccgaagaacgaagccatggggaagacacatggaatgggagctgctcgcaagctcaagtctcaccgcaggaggcaaaggtgggctgataagtcatacaagaaatcccatcttgggaatgaatggaagaaaccttttgccggttcatcccatgccaagggaattgtccttgaaaagataggtattgaagctaagcagcccaactctgctattcgtaagtgtgccagagttcaacttatcaagaatgggaagaaaattgcagcttttgtccctaatgatggttgcttgaactacattgaagagaatgacgaagtcttgattgctggatttggacgaaagggtcatgctgtgggagatattcctggtgtcagatttaaggttgtgaaggtatctggtgtctctcttctggctcttttcaaggagaagaaggagaaaccaaggtcttaaatttgtgaaatgcttcttatgtttgttttcaatagtttctctgaagtattacgaattttgttttgaggtgaatgggttttatgaacaattttgtatcttttttagttattttactgaacttcatttagcatttttagtaacatatctcggcttgcctcgccccagattgggtaaccaagcaatggtcaagtatgggcttaaaaggacccttgaccatatccatatgacaggaagttttccatattaaaaattgaaaatttgaaagatatgattctctgacctatacaatggccattaccacagcttggttaataaattatatagttcaaagtttccaagatcatatagtttaacattagagaaaataaggaataaaattgctcctcttacgttgcggtcccttaatttcgtgtcaaatgtggcaccgcatgccttatatgtataattaaatactactcaggaactcaagcaatgaaagtatagaattaattttgtaaa

SEQ ID NO: 22671 - DNA, 896 bp, Glycine max
  Clone ID: PAT_MRT3847_120474C.1
gtttcgggccggaattcccgggtcgacccacgcgtccgtttccatatcactctcaactctgcttcttttcaatcagttacattttctttggtattccaatggccactgttgaggttgtgtcagcaaaggtttccctcccagaggacacaaaagaggcatcattgaaggctgatgagaagaagaacacagaagaagttgttgagactccaacaccaacaccagaaaatgtcgtcactgagcaaacaaaggaggaaagtactgaggccccacaacctgcagcttcagaagacaagccctcggttgaagttgtgtctggaactgtcacagaagagccaacagttgagaagacagaagaggaaactttgaagcaagaagctcctgaggaaacaaaagaaaatgatgatcctactgaggttaagacaccagaagctgcagaagcagtgacagaaacacagaaagaaactgaggctgaagctaaggaagaggctaacacagaagccccggcagagaaaagcgaggaggagaaagaagggccagctgaaaagaaagatgaggaagtgattgcagaagcagaagcagaagctgagaagagcgaggaggtcacagtcacagacacagaggctccaactgagaagactgagtaaagaaagtgaagaggggaaatgtgcagtttatgtgactgttttagttgcatcatgccataatgtcttgttgctccatgttttttcttttctttgtttagtgatctaataaaatgtctagctaggaatgagtgatgacccacttaagtttacgaatgccaaccatcagtacaaggaccacatggcatgtactctttcgatctgtttatgtactgtgagctctgatccaatgaatagaagtatattatggtcctt

SEQ ID NO: 22672 - DNA, 320 bp, Glycine max
  Clone ID: PAT_MRT3847_120475C.1
ttcttcttttttttttttttttttttttttttttttttttttttttttttttttttttttttaaaaaaaaccccccctttacacattttttcgataattaaaagggggggggaaatttttaaatgggcggagccttctcaacaaggggggcatgcctaatttccttttttggattaaacccacgaacaagggaaagaaaacccaaattccaaatcatgcagaggattccccattttcaaaaaaactggcagtagcctggggaacaaaaaaagctgggataagagtttttcccgcattttcaaaattttgagaaattccca

SEQ ID NO: 22673 - DNA, 1191 bp, Glycine max
  Clone ID: PAT_MRT3847_120476C.1
cttctataaataataccaaaaacagacttggctttgactgcatacttgaagacttacaatttgatccagtttcatgctgcttgtcatacaaatttactgaaaaagcagcttcttaatacaagaaaaaactcatttgaacaatgtattttgtacccatatcccctttgtatcataatgctaatgacctgggctgacataatttaaatcacgcaatgcctgcaaaagttgtcttgcaattctcttaactaaaagtactaacaaatactaagtttggtggttcttcttacttttcttttttcttgtagcaaagctgcttggtccaatttctatcgacattcttttcgtccttgatgacaactcgtctgactccttgcaatcctcagcagcatcaccatcaattacatctccctcttcagttccctgctctgactctgactctgaaccccatctatcgccaccatcatcattgtcccaacgatcaccagcaggaggcatccagaagtcttcgtcttcagtgtcactgttctcattggaagacttcctaacttcagatataacctcctcaattcccttgtccttattattttccttcttcattctatctttttttgcaccatctgcactttttgacacctgcaatttctcctcatcaatttccttgaccctattctttttcttcttcttcttcttcattctatccttttttccaccatctgcactttttgactcatgtaagctctcttcaccttccaatccatgacacaacaacttttcttcttcctcttgctctaatttattgagaaaccttttcccactcatatgcttccagatatgttcctcagacttattgacattatctccagtcagcttacatatcaactttgaacggcagagagggtgttgtttgaacatgttgagagggggtttgttattggacaaggcgaaatcgatgagacccaaacggcattttttgctgtgcgagtaggacgctatgtccttcgagaggacctcgtgccctgtttctaagcacttgaaacgcccgtttcctaattctgtgaagttcggcaaccctagcaagttgttcccttccttcttccccgtcgtagccatcctcttgttcaccatttgccagctctagcctaagaactctctaataggaattaatagtctcctacggtgtcgtgattttag

SEQ ID NO: 22674 - DNA, 110 bp, Glycine max
  Clone ID: PAT_MRT3847_120477C.1
aagtcgacaagggtttggagccccttgttggttgcaacgacgagtcatggtgccaaggtttgaatggtatagccggtcgctcacctgcatactactagcaaggtgcccgt

SEQ ID NO: 22675 - DNA, 287 bp, Glycine max
  Clone ID: PAT_MRT3847_120478C.1
ctcaccacttatattattaaaaccaaaaaccacagcgcatctgtggcaacctccaacagttcaaataagaagaacaccgccttgggaaactgccttaactaggatctttcccactctaaaaataggtgccttaacaaaactaaagaccacatcacctatccacctttcagtaaacgtgaaagtgatatggcaaactgctaactcaacacaggctgcaagggatcaaaacccatgaaaggagagacattctgtaagcaaccatagggctcaccacgacacgtgggtaa

SEQ ID NO: 22676 - DNA, 157 bp, Glycine max
  unsure (1)..(157): unsure at all n locations
  Clone ID: PAT_MRT3847_120479C.1
ctcgcancaacaccagcacttcaaagnagacngnntcncgcagnccttggagttggngngngngattccgaccctaattgtccactggcngncgagncagagactatggtggagaagcgggngtcntcaacaacgtcntgtgtcttttgacagacnc

SEQ ID NO: 22677 - DNA, 396 bp, Glycine max
  Clone ID: PAT_MRT3847_12047C.1
taaagaaacagtcataattcatcgggttggaaaaagaaattccaatacattataatccacccacattacggggaaaaatggaatactaatagattaaccaattgatgcttacgcttataaatactgctaaaaaacaggtgcctcaaccaaggattgaaagaatgctcccacaccccaggagccatttgacgcacgtttataaaaaaaaaatgcccaaccttcagggaaaagggaaaaaaatctcgtgcctgcaaaaataattgctgggttgaataaaccatatgaacgggacaaagctttatcataagcggacgcatattcgtctataataccaagaaacgaaggtttttcaaaagaaaattgtattttgaaggggaggaaaatatttttcccaaa

SEQ ID NO: 22678 - DNA, 694 bp, Glycine max
  Clone ID: PAT_MRT3847_120480C.1
tgggctttgaggtaatcgatcaatttttgtttggtggttataggagattacgatgataccgtagttagataaaagtaagatatggtaagagtatgaaaagttcttatattttgatgttaattagataaatcgtaaaggtggtataatataatttaaaggtttttaaaagaatacaataacatgttttaaataattgatatgattttattataatatatgtaattgctatttttagttttcttaggaaatttgaaaaatacttgaattgtaattatttaatttaatttttaaaatgcttctatataattcagtatatggtatcatttattccaaagatcacacaaatagaacattaattgtgtatcaaatgcttagtaaatcagtatatggtatcatttattccaatataattttttaaacacttccatgtgttagcatttcaaacataattctttaaacttaatatttattttaaaattatttgttggagcattaataacaataataattttattattattattatgttatttatatttatttaaatatgttccatttgttagacttaaacagttttttaactaactgaaaaagttttaacttgatttatttaatatctgtaactaaaaagaaagagaaaaattcaaaactgtgagcaaaatttattatttattttatctaacatgatagtggt

SEQ ID NO: 22679 - DNA, 373 bp, Glycine max
  Clone ID: PAT_MRT3847_120481C.1
aaggggaactttcatttgaatttgacatgacacccgaaaatattggcccgttttgaagttttgtgaccggaattttaaattttccccaaacaggccaaattttttaagctacagctacctaaaactttgaatttcaagaaaagatttttttccctattggccaaagaaaaacaacaaacccccccaaaaagctggaactgcaaaaggggaattcagcggcttccaaatgcaactggttcggtattgaagagatactttacttgggacaaaaccgaattatgtgccggatcataagggtgaactttaaaagggatttcaagtattgcatgaacgggcttggtataacttttcacccaaaaccttatcatatttg

SEQ ID NO: 22680 - DNA, 329 bp, Glycine max
  unsure (1)..(329): unsure at all n locations
  Clone ID: PAT_MRT3847_120482C.1
tgatccanataattaaaaaatgtcttaagagaagaccgtnttgctgactcatctaaaagactaaagaaaaccctcaccctcagtcatgtaattccgtngtgactctttacatcagaggttgactagagatagcgtgtcaacagctgctaaataaaatttaaaagcgcggataggtggccttttactttttcgaaaatttgcacaaacctagacctaccgaaaaaaacacatcttttacaacataattgcgaaagctcttttaccaaacacgagcgtggatttgcgtttgccattccctactaccccctggttttagacacgcaagagcc

SEQ ID NO: 22681 - DNA, 423 bp, Glycine max
  Clone ID: PAT_MRT3847_120483C.1
cataaaaaaaagtatccaactgaaaatgtccaagtaacagaaattacaaaaaaatgttctgaaaaatggaaaacaatgtctgatgatgagaaaagacgtttttacgagctagcacaaaaagatgcagaaagatatcaagctgaagtagctgcatatggcggtgatgatgtaactaaaaagcgtaaaataactaaaaaagatccaaatgcaccaaaacgtgctttatctgcatttttctttttttcaaatgaagaacgaccggaagtacaacgtcagcatccagaatggaaagttggacaggtagcacaagagctaggaaagttttggaaaaatctgcctgatgaagagaaggcgatttatgaaaacaaggcaactgaggaccaagaacgatatgcacaggaaatgaaaacctaccgaggcgaa

SEQ ID NO: 22682 - DNA, 233 bp, Glycine max
  Clone ID: PAT_MRT3847_120484C.1
ggtcgaggcccgcgtcagcacagacgtcccttcatggattttggtataatccctacactttgagggtggtatggacctgaaagttgaacgataggccatagcattacatagaagaacatcgcaagaataggagtcttcaacttcttgcatacaacccattcatagaacagtcctccagtgcctgtccatatgggaaaaccctgatgtgagtccatgcttactgttggctacat

SEQ ID NO: 22683 - DNA, 661 bp, Glycine max
  Clone ID: PAT_MRT3847_120485C.1
agcaaagaacaaatttaaatagtatggaaataaaaagagaggaggatatagtgtactacataactagtcccaaataataagaatgaatgataatgagtattaacctcctcctacagttttgtaaaagaaaaagaaatgatactgatatctagatgaatacaagtggtgcagcgggggaaggtaataaaaagttagatgatagggatggatggatcttaaaaattaagaagtgagttttcctctaaaggtgccaaagggtttgacaatctgaaaggaacagagtaaagtttggtcgacgcacatgagggcaccggcattgttgaactctccgcagtagtttggggcagagaagatggtaacgagctgcctgtcagcgaagaattggtagccatcttcgacgacctggtgggccctgcaaatgagatcgagatcgtgtttcttcaagaactcggagaccttatcggggccgaaagtgtaagagacgcccctatcattctcgccccaaccactgatttcgttgtcgggatcggcccaaaggaggtcgcataagaggccctggtcgggcacgtccacgggcctctctatggctttgatctgattcaggctctccatgtccggggaaagcccgccgtgcatgcaaaggattttgtcatcgatcact

SEQ ID NO: 22684 - DNA, 597 bp, Glycine max
  Clone ID: PAT_MRT3847_120486C.1
agatgctgttttctccgtcttccattttgtttaacttgctcaacggaggtcacaacgtcatccaaacacgacctgggaacccttccttctttcatttctttgccgttttaagcttcagtatcgcgttatttttcccatttcagaggaggaaatgcaggtgaagtcgccaccgcgccaaacactaccccccccacacctaacaccacccactgcccactgctgccaccaattctcaagttgttacattttgcgctgtgaaatactagttctttttttatatttctgttgatgttagtacttgtttgcttccctctgtttttgtgcatttgtctctcttgttaggggctctcgctagtttctcttagctgctgaattttattggcctttgtggctcaactgtgaacatgagctaccattgatgattctgattgtggtcatgtttaagtttctgtttctgtttgtggctttcttaagcttattagtttatacttgatagacatgatacttgttattgcagaagcacaaattctttgttaattgtaattagtcaaactatgctttaaagcaatatgggaattttagactcttcctcgttga

SEQ ID NO: 22685 - DNA, 331 bp, Glycine max
  Clone ID: PAT_MRT3847_120487C.1
gccagactcacttgcaagcttcgacttttactcgaaggttttgcatattgccacttgccaaagttttggtgcataaggcctcacaatcggtatgatgatgattttatcattgtttgaagtattactttgatttgggcccagcatttacttcctttgataaatttattttcttgattttatctttacttcattttgatttattcttctatgccttgctacaatattttcatctttgcttcttcatagtaacttctattagatactgtatttggtattcttaattggtgttgaattttttttttttccagaagacacaaacatgactttgaaa

SEQ ID NO: 22686 - DNA, 403 bp, Glycine max
  Clone ID: PAT_MRT3847_120488C.1
atgaaatgatagtaagaaattatcgcatcaaaaaaaaaaaaaaaaaaaaaaaaaaaaaaaaaaaaaaaaaaaaaaaaaaaaaaaaaaaaaaaaaaaaaaaaaaaaaaaaaaaaaaaaaaaaaaaaaaaaaaaaaaaaaaataaaaatggaaaaaaaaaaaaaataaaaaataaaaaaaataaaaaaaaccgcgggggcggtttttaggggaccaattttaatttccggtgattggggggttattttttttttttgggggtgcctaaattaaatattagggcccgttttttacaacttttgaatgggaaaacccccggggttgccaaatttaattgctttggaaaaattctcctttttcccagggggggtaaattaaaaagggcccagaccaattcctttttta

SEQ ID NO: 22687 - DNA, 416 bp, Glycine max
  Clone ID: PAT_MRT3847_120489C.1
aattaaccttattttcacatttcattaataataggtgtttttttttatatttaaaattaagatctacttatcataactgttaaatgtgatttttctgtattttatttgggaattcttgaaatacaataaatcaataatcattaaaattgcaaaaatatgatacctctattttatacttaattgttattacaactcttggcctaaagagaggacttttttcaactgaagtaggtcagtcggtggctgactgaatccatgtggagggcttcttgttgggggttgtgtaattgtacagtcaacaaattaatgatacttgtgtaacatatacatataccgtatcttggatacagatctaaccattgatatctcatgcataatttgcttgttttgttaatttcttttggattgatgtttct

SEQ ID NO: 22688 - DNA, 167 bp, Glycine max
  Clone ID: PAT_MRT3847_12048C.1
cggggggatcatccatatcgctgcgctcatgctacaacccgagccacttgctgtgttaacacagcttagcaactgctactaatttggctggcctccaccatggcgcttggcatttatacctcgcctggtggtcttcctggtcatccttgtatcaacgctttcagtcc

SEQ ID NO: 22689 - DNA, 481 bp, Glycine max
  unsure (1)..(481): unsure at all n locations
  Clone ID: PAT_MRT3847_120490C.1
aacacttcatcaaagggtgcaacatgaaaggggatggcagcgttggaagtattagggaagtaactgtggtctcgggcctcccggcctcaaccagtaccgagaggctcgagattttggacgatgacaaacacgtcctaagttttagggtcgttggcggcgaacaccgactccaaaactatcgttcagtcacatccgtgaacgaatttcacaaagagggtaaggtttatactattgttttggaatcttacatcgtagatatacctgaagggaatacggaggaagataccaagatgtttgttgacaccgtggtgaaactcaatcttcaaaaactaggggtcgtggccatggcttcatcaatgaatggacgataacaacaacagtgaatggagaaattctatggtaccatcatgaaattcaaggattttggtattggtattggaaaaatnctctctttctctctctttctctctttctttaacat

SEQ ID NO: 22690 - DNA, 425 bp, Glycine max
  Clone ID: PAT_MRT3847_120491C.1
gttgggttttgcagtgatggagatgggaatttatagaagccattactgtattctcaggggtgttaggtcatatattattcaagaaagtgttgcactagcaattattgttgatctactgaatcacgtggtttgattttatcaaaaaaaaaaaaaaaaaaaaaaaaaaaaaaaaaaaaaaaaaaaaaaaaaccaaccaaaaaaaaaagacacccaccaatcaaagaattagggggcccccggcttaaagggctcgtccaccccggaaatatatccagacccccccctgggggggcaccacttttccctatagggaggggagtaaaaacttggggcaatataagaattacagctttcccgggtgaaagaggtatacgggctcaattccccacaccttaaaggccgggagccttaaaagtaaaacccgg

SEQ ID NO: 22691 - DNA, 1897 bp, Glycine max
  Clone ID: PAT_MRT3847_120492C.1
aggaaaacgttactagcacagttaatttagattcttctgattatccaaagcatagtaatttcaagttacacggtgatacaagtaaaggaaaggatgagttgcataagtttgagaaggtgccaattggtagtgggattgacatgtgtagttttgaggaccctttggatgaaaatcctcctgcattgatcagtttaggtggcaatgccaaattgtctgggtataatgataggattccctgtagcttgttgtccaaaagtcgtgacaatgtaccagtagttagtagagatgatgatgaaaactcttatgggtgtactcaccctattaatactaaaaccaagtcctttaggctaaagactggtataggtgataatagaataagtaaaagactggcttctaactttcagaaagttgctgaaaaaacaaaggatcatacacattctaacaatgatggagattggaagcgaacttactgcagcaagaggaactgcaataaacaccaaagttctcagatgaatattcctttcaaaaagaggaagctttttaattatcgctctgtttcaaattctaatggattgatcaggagtggtggcatttattattcacctgagaattgtatgaatcaggacggttgtggttcaccacctgggatgcacaaagaccctggaatgccatctttggaagcatgtcaacatcagacgttacgaagtagaggttctcatgtgaatcttaggatcaagtcatttagagtgccagagctttttatagaggttccagaaactgcaacaattgggtccttgaagaggacagtgatggatgcagtgactgctgtgcttggaggtgaattgcacattggtgtttttctccagggaaaaaaagttaaggatgacagtaaaactctacttcaaaccggaatttctcatcaaaacgagctggatgctttgggtttcaccctggagcctaattcttcacaaagcctaccgattgtatgtgctgcacattctcccggtcctaaagctgacataactcagcctgtaataaggtatccttccagtccagctgtaattcatcagaggattcaaggcaattctgacatgttacctgagcatcaagtaaccagtttaggtagccattttgaaaacgaccatgattcagcaccttctcctgttaatgcatctgttgagaaaggtatgaaagattccaaagaactggttactgttcctgaaatggatgaggaactagctatggtacctgtacaccagaagtcaaagcgatctgagatcgtccaacgccgaatacgcaggcctttttctgtagatgaagtagaagcactggttcaagcagtcgaaaaactaggaactggaaggtggcgagatgttaaggtttgtgcttttgataatgcaaagcatcggacatatgtggatttgaaggataaatggaaaacactggtgcacacggcaagaatatcccctcaacaaaggaggggtgaacctgttccccaagaacttttggacagggttctagtggcccacgcttattggtcccatcagcagactaagccgcagcacaagcaccatccagaaactgaaactgtcttctccttttaataataagggccagggtcaggggttgtcagcagcaagtagccatgtggatgaggagggtgctttggtttctgacttgttattagtgtcttttctttttctgctttcaataaatatttatgaagtctctctgtttatcaaccatgtaaaaagtgacgacgacaaggaaaaagaagccaagcctagaggctgcttgtaaatgatttgatgtaataaagtgctcgctaacacaattcttttgcttgtaaataattgaaattgttctgtataaaattgttatgtttttattgcttgat

SEQ ID NO: 22692 - DNA, 2703 bp, Glycine max
  Clone ID: PAT_MRT3847_120493C.1
cccacgcgtccggggttttggagattcaaagcaacaaattgttttccttttctcttcaattcattttcctaagagaaaaaaacaaaccgaaatttcgagcaaaatgagagaaattgtttctgtcatggaaaactagttttttttttttttttgttagttcacttcggattctccgacaattcgccgatcttacattcgccggaatttcgcttcgtctggttaaaatcgcgacctctgaacagcaggctttcaaattgagtgctcatttatctgatcacgggtcttggattgctggttttttgtgtttgatccatctattttggcatggttcctaagatatggtattgcagaaaaggttagagtacggatttaatggctatcaggctccggccatgccgcgagcttcccgatcaactaggaggagggctaaatttcgaagagcagaagacaatcaaaagtgtgcatttgacttattggccaccgtagctggtaaactattgcaagagagagagaatccaaccatgtctagtgatacatcattagaaaaggatcagtgtggatttgtcaaagagtgccaagatgcaaataaaccatccaaatctgagatttctgatgaaggaagttgtgacaacagtggtttctctcgtctttcttcacaaacaaacaaaaaaaattgcggtttgaaagaattcacacatcttgcaattgatggtgatgtagggattgcttctatagtgacaagttctagttgcttagagaggttcattgcagagaaaatggtggatagcaatagccatttcaaagtggaaaatgttactagcaaagttaatttagatttttctgattatccaaaggatagtgatttcaagttagatggcgataccagtaaaggaaaggatgagttgcataaatttgagaaggtgccaattggtagtgggattgacatgtgtaattttgaggaccctttggatgtaaatcctcctgcattgatcagtttaggtggcaatgccaaattgtctgggtataatgataggattccctgtagcttgttgtccaaaagtcgtgacaatgtaccagtagttagtagagatgatgatgaaaactcttctgggtgtactcaccctataaatactgaaaccaagtcctttaggccaaagacttgtataggtaaaagaatggcttctaactttcagaaagttgctgaaaaaacaaagaattatgcactttctaacaatgatggagattggaagcgaacttacctcagcaagaggaactgcaataaacaccaaagttctcagatgaatattcctttcaaaaagaggaagctttttaattatcgctctgttgcaaactctaatggattgatcaggagaggtggcatttattattcacctgagaattgtatgaatcaggatggatgtgattcaccacctgggatgcacaaagaccctggaatgtcatctttggaagcatgccaacatcagacgttacgaagcataggttctcatgtgaatcttaggatcaagtcatttagagtgccagagctttttatagaggttccagaaactgcaacaattgggtccttgaagaggacagtgatggatgcagtgactgctgtgcttggaggtgaattgcacattggtgtttttctccagggaaaacaagttaaggatgacagtaaaactctacttcaaactggaatttctcatcataacgagttggatgctttgggtttcaccctggagcctaattcttcacaaagcctaccgattgtatgtgcttcacattctcctcgtcctaaagctgacataactgagcctgtaataaggtatccctccagtccagctgtaattcatcagaggattcaaggcaactctgacatgttacctgagcatcaagtaaccagtttaggtagacattttgaaagtgaccatgattcagcaccttctcctgtcaatgcgtctgttgacaaaaatatgaaagattccaaagaactggttactgttcctgaaatggatgaggaactagctatggtacctgtacaccagaagccaaagcgatctgagatcgtccagcgtcgaatacgcaggcctttttctgtagatgaagtagaagcactggttcaagcagttgaaaaactaggaactggaaggtggcgtgatgttaagctttgtgcttttgataatgcaaagcatcggacatatgtggatttgaaggataaatggaaaacactggtgcacacggcaagaatatcccctcagcaaaggaggggtgaacctgttccccaagaacttttggacagggttctagtggcccacgcatactggtcccagcaacagactaagtcacagcacaagcaccatccagaaactgaaactgtcttctccttttaataataataagggccagggtcaggggttgtcagcagcaagtggccatgtggatgatgagggtgccttggtttctgacttttgttattaatgtcttttccttttttgctttcaataaaacatttatgaagcctctctgtttatcaaccatgtaaaaagtgatgatgacatggaaaatgtaaaaattatctttgctcatgatgtggatgcttccctgtgtggagaggctgctgcttcttgtaaattgattgatgtaataaagtgctcgctaacacaattcttttgcttgtaaatatttgaaattgttctgtat

SEQ ID NO: 22693 - DNA, 541 bp, Glycine max
  unsure (1)..(541): unsure at all n locations
  Clone ID: PAT_MRT3847_120494C.1
gggggagtccaanagagagaccattttnagagcggtgngagacaccccagaanagtctgagtcttggggcgttnccattttatcttntgcattcccttaatttntgactacaatggggnagattgtggtgggttttnagttccacaanagcatcggcnactgtgacagtgagaactngggtntgnagcagtgggggttcaatgagttntgcaatcggctccttcccacaatgcgttnggacactctcatggggaanagtgggagtgggcgttattcccatggagaaaccattgaggggattgtgtgangtcttcanaggagtcctatacaccccagaataatccacnccattaaancancacatgcgttanngggtgagttnaggggtntgancgagncgaataccttcttcatcnaaacaattttaaagcacttaaaaataaaggagtgcgtctcagagagcaacactaacccggggtatattaatggggaggggaggggacnaattttaccttaccatgagttcaacaattctccccat

SEQ ID NO: 22694 - DNA, 1003 bp, Glycine max
  Clone ID: PAT_MRT3847_120495C.1
ccacgcgtccgtttggagattaaggcttaatttgttttccttttctcttaattaattttcccaagagaaaaatgcaaaccgaattgtagaggaaaatgagagaaattgtttctgtcatggaaaactagtgttttttttttttttttttttctgatgttagttcacttcggattctccgacaattcgccgatctaacttcgcccggttaaaactgcgacctgtgaacagaaggaggctttcaaattgtggctggtgaggtcaagcaacaagagtgctcatttatctgatcatgggtcttggattactggttttttgtgcttgatccatctattttggcatggttcctaagatatggtcttgcagaagaggttagagtacgggtttaatggctatcagactccagccatgctgtgagcttcccgatcaactaggaggagggctaaatttcaaagagcagaagacaaacaaaagtgtgcatttgaattattggccaccgtagctggtaaactattgcaagagagagagaatccaaccatgtctagtgatacatcatcagaaaaggatcagtctggatttgtcaaagagtgccaagatgcaaataaacattgcaaatctgtgatttctgatgaaggaagatgtgacacaggttcatctgtggtgtaccaaagcaacgagccatcagcactgtggtttgatatcattcaagatgttgcaattgatggtgctctcaaaaccatgctcctcaatgcgagcaggcgtaacagattcaaaccgagaagaggcaattgtctgtagcagggggttcaccatgcgcacgcgttgtagaacagcatttctaatgacattcccatgtgacaaaaatgatctcattcctccttgcattttagctgtcagagagagagtaaagtgaagggtgtgaaagagagagagacacagagactgagtgtgagagagagttagcggcgtggagatagaatatgcctgccctgagccctacactcgt

SEQ ID NO: 22695 - DNA, 597 bp, Glycine max
  Clone ID: PAT_MRT3847_120496C.1
attgatggttttccccgcaatgcagcaggctgccacctttttgaattgtcagttgttggttcttcctttcaattacctgggaatacctattggggcaaaccctaggagaggcgactacttagtaggaaccagggtagagaagatgacaatattgagacaataaggaagcgatttaaggttttcttggagtctagtcttcccgtgattaattattatgatgcaaagggaaaagttcgcaagattgatgctgcaaggcctatcgaagaggtatttgagacagtcaaaggaatttttggtccaaagaatgagaaggctgattgagcatgttcaccttcactccatggtggaaatttagaggtcatatcagtgttggctgctttttctattgtgtcacattttgttattaagtatagaaaattgtagtttatacctaagggttttacctctgtattctaatgtgttatatcttgttgactcattcattgataattgcaataaagatttgtgtgggattatttctaccaatttatatatttacttttccccaaaaaaaaaaaaaaaaaaaaaaaaaaaaaaaaaaaaaaaaaaaaaaaaaaa

SEQ ID NO: 22696 - DNA, 163 bp, Glycine max
  unsure (1)..(163): unsure at all n locations
  Clone ID: PAT_MRT3847_120497C.1
gttntctacttttcttcnacacccactccataaacttactcaatanatatcagtnctgnttcaacacngcacatcatcntctaatgctgtaaaatttgtaccangcagcaaggggctctgnttntncttttgagcgnggtctcncngttccccncatcataag

SEQ ID NO: 22697 - DNA, 1220 bp, Glycine max
  Clone ID: PAT_MRT3847_120498C.1
gcagcaggctgccacctttttgaattgtcagttgttggttcttcctttcaattacctgggaatacctattggggcaaaccctaagcttgtacctttcccccaaaaaataaaaagcacaccttcattcgttcctctttctttcttccaactctataaatatcaatcaaaattcccctccacactcattctcccatcgttttccctttctctctctcatacttattctccctcgcgcgaaagataaacacatttttagttgcaactaatgggaactgttgaagctgcaaacaaggatgcaaatggaagcctcctagagaaaaatcctacagttgtttttgtgttaggtggcccaggcagtggaaagggtacccagtgtgcaaatattgtcgaaaattttgggtatactcacctcagtgctggtgatcttctgcgagcagaaatcaaatctggttctgaaaatggcacaatgattcagaatatgattaaagaaggaaaaattgttccctctgaggtaacaattaagctcttacaaaaagcaatgcaggaaaagtggcaatgacaaatttcttattgatggttttccccgcaataaggaaaaccgggcagcatttgagaaagtgacaggaatagagccagcatttgtcttattttttgattgccctaagaagaaaatggagaggcgacttcttagtaggaaccagggtagagaagatgacaatattgaaacaataaggaagcggtttaaggttttcttggagtctagtcttcccgtgattaattattatgatgcaaagggaaaagttcgcaagattgatgctgcaagacctatcgaagaggtatttgagacagtcaaagcaatttttggtccaaagaatgacaaggctgattgagcatgttcatcttgactccatggtggaaatttagaggtcatatcagtattggtggcttgttctattgtgtcacattttgttattatagtatagaaaatcgtagtttatacctgagggttttacctctgtattctaatgttatatcttgttgactcattcattgatattgcaataaagattttcgtgtgggattctttttaaataataacaaatttattgatattgctataaagattttcgtgtgggattccttctactgagaccaagtagagaaaagtggacattaaacccaaaccacactactaaaaaaaaaaaaaaaaaaaaaaaaaa

SEQ ID NO: 22698 - DNA, 518 bp, Glycine max
  Clone ID: PAT_MRT3847_120499C.1
gcgctcgtgaggctgctatggcagttcaaggaaagatggtagattctcagcgtaagaagagcaaagcaagtttgcggaagcttgagaaacaacctgaatggttgaagggtggagagctccgtgattatcaacttgagggtctgaattttcttgttaacagttggagaaatgatacaaatgtcattttagctgatgaaatgggccttggaaaaactgttcagtcagtatcgatgcttggttttctacagaatgcccagcaaatccatggtccttttcttgtagttgttccattgtccactttatcaaattgggccaaagaattcaggaagtggcttcctgatatgaatattatcatatatgtaggtactcgtgcaagtcgagaggtttgtcaacaatatgaattttataatgagaaaaaacctgggaagccaataaaattcaatgcactgttgactacatatgaagtagttttgaaggataaggctgttctctccaagatcaaatggaattatctgatg

SEQ ID NO: 22699 - DNA, 496 bp, Glycine max
  Clone ID: PAT_MRT3847_12049C.1
tttttttttttttttttttttttttttttttttttttttttttttttttttttttttttttttttttttttttttttttttttttttttttttttttcaaaaaaaaaaaaaagattttttttcccggtttaaaaaaaatttcccggccaaccaaccgaggggaacccattgcctttttttttttccaaaggtttttggcccccccctaaaatcccccggaaaaattcccaaaaaccctgggttcccggttttttgccaaaaaaaaaaaacccctaatttggtgggaccacccttttttccccttcccccttttcaaaaaggcgggggccctaaaaccctggcccccctagtttaaccaaaaaaggccccccccccacccccaattgcctggggcccccttggtaggggaaattatttaaaaaaaccctaggcccttaaagggctggggaaaaaaaaattttggcccccggttctttatgttgggtccccccccctg

SEQ ID NO: 22700 - DNA, 1449 bp, Glycine max
  Clone ID: PAT_MRT3847_1204C.1
catccggacataccctttggtacatgaaaagcctgatgctgctcctacaatggacaggatccaaccaggtttggatgattctgaacgggatttgcaggccactagacatgcaagactgagtaaacatggtcatgaaaaagcactctctgttcaggaagatgctacagaagccgttgtattaaaacaaaagtctacaagacggaagcactcaaaatcaagatctactcaagatgatgccagtaatgaagatgctgaagttgtgagaaaaccaaggagtaggagacgagatgaacaaaaacgtggcctgcaaattttgtttgatgatgagcggcacaaaaacgatgaagaggaaagggtaatagatagattactgatacattatagcaaaaaaccatccataaatgtgcctgaataagcaagaagcccacgcgtccgaaagtatagaagtcgccttgtacatcagatggataactcaaccagagatggacctgatgagacaccagagatggttactcgtccaccaagatcagtttcacttccccgtgaacaaacagaagctgtggaagttaaaaaagtatatgctcgtgctgcttcatttcagcctgagaggttgaacgaagctcggcatgtacatcccaagttacctgactgtgatgatttagctgctaggattgcggccttgagaggaacataagtgatagaatcacgatgaataagtactcgtctaccagcatgattgcagtgattatggtcatcatgctttaatctcacgtacggttggtattgttgaggaatgcagtgtagtgctttaatttccaagtgtcgaatacgccatagctatattattcgtcagccatggccgttcctgtgttgtcatcatattttctaatgatggttttacgcaaaattcatagtgttttcaaatgttatgattgtaaaagtgttttctgtcgagtaaacgtggttttgtgccacagttagtcgaccatatacattgtagtaccacacctccaaacatgaatttcgttgaggatacactattacaatattgtcgtttttagttacctgactgtgatgatttagctgctaggattgcagccttgagaggaacataagtaatagaatcacgatgaataagttctcgtcaaccagcatgatcagtgcttacgatcatcatgctttaatctcacgtactgttggtattgttgaaggatgcactgtagtgcattaatttccaagtgttgaatacgcctgagctatattattagtcagccatggccgttcctgtgttgtcatcattttttactaatgatggttttacgcaaagtttattgagttttttcaaatgttatgattgtaaaagtgttttgtgtcgagtaaatgttgagatatgtggttttgttgtgccgtttactcgagcttatacattgtagtactacacctccaaac

SEQ ID NO: 22701 - DNA, 580 bp, Glycine max
  unsure (1)..(580): unsure at all n locations
  Clone ID: PAT_MRT3847_120500C.1
accagggagaatagcaaaaggctgcgaatttttggtatatgattagggtgtgtgcttgttatctatgtcctacaaaataactatttataatcaattacttaccttaaaaaggagaataggaaaaggttgcaaattgttgtgtattattagggagtgtctggcttgttatctatgtcctacaaaataacactctaagtcaccacgcgatgaaaaccacttggtaatgttaaaaccacaagattacaaaataaacatggagcccctaaagagagagaaagaatgatgaagtgatttgtgattgtaaagtttccatatatagacggacaaggcctctgtacttcgagcagcaatcgattatttgaaacaacttcaagaaagggtacaggaactggagaaacaagacaaaaaaaggagttaggagtcagtgatattcaacaagaaacccgacccaaattggaacaacaatgaagacaccaccaccttcactgaaaccaacttgagcattctttctgagaatgaagttagaatggtgggggaaggaggtgctcatggagatcactgtgagaaaggagatggtgtn

SEQ ID NO: 22702 - DNA, 442 bp, Glycine max
  unsure (1)..(442): unsure at all n locations
  Clone ID: PAT_MRT3847_120501C.1
cccacgcgtccggctatagttccttaattgataatgatttgctccaaatggttctctaggttgttagaaataatgagtaggttcacattctggactttgttggaaatcatttgattgttgataatcttgtgtaagttcctaacaataattttggggtaaattattttcagggtagtaggttgtgtcataaatgtttgtattcatttggttttggttgtaaaaatcgacctcatgttgatgttgataagccaaattgtcctaaagtaagggacattgtgatatatagtgattggcactctggcaaaactcgcagtagatttgatggtcatcatacattgaatacaaggttcaaggtgaacgttaatcgtttatgatcacaacaaggaacacttcaatattttgacgttatatgactttatctttggcttatttagttntctat

SEQ ID NO: 22703 - DNA, 268 bp, Glycine max
  Clone ID: PAT_MRT3847_120502C.1
gacatcgagcgaatcggctcgagggctcgaggcaatctgtgctctaagtaattttactgtaaagaccatgcgctgctaaacatgttgagagactttatatcatacctagggcagcctttttctggggttttaaggaaccctcggttccatggcttggtggccttcccaggccagctgtaagttgaatcatccaatcatccggtttgaccttaagccatgtgtcctaaattatggtcattaatttattttatgaatatttttttttgtt

SEQ ID NO: 22704 - DNA, 307 bp, Glycine max
  Clone ID: PAT_MRT3847_120503C.1
tttttaaaaaaaatttttataaatattgtcatttattttaacaatggggaaaaatattccaaacgggggtccttttcctagcaagtggacctcactcctctaaatacccatttctttttattggctccacacttttattacttaacaaagcattaaacaacaaatcgaaactttatctccctggaagactttttaagtcatctaagacatattttggactgcattactgttaattcttgtcatcaaaattgttgctccaaagtcgtccatctttaactatcatcaatcaacctgtactgcattccat

SEQ ID NO: 22705 - DNA, 388 bp, Glycine max
  Clone ID: PAT_MRT3847_120504C.1
aaaaaaaatttgcctttttggattttttgggggctttgggacaaaaaaaaacccggggttcttttttttgggtgggggccctggcccctgtttttttgctttttaaaacattaatccccccccctaaaacaatgttttttttaaaaccccccaataaggggcccttcatttgtttccccctttttgaaaaataaatgggggggccaccatttttttccaaactaaatctccgttaaaaaagcccgggggccctggaaaaggacaatcccttcattttttgggggaaccgtcaaaaaagaaccctttggccatacctgaatctcccgggggggtccttttgggaaagctttttctttcaggacatttagaccccaacttttgtttcggg

SEQ ID NO: 22706 - DNA, 326 bp, Glycine max
  unsure (1)..(326): unsure at all n locations
  Clone ID: PAT_MRT3847_120505C.1
tcgcatgcacgcgtacgtnagctcggaattcggctcgagngcnnatgctgatggatactgagnttgatganaancagatgngactgtgcncaaaccncncnncngagtggtaaagntctatctccagtcctaagcnangntcgngancaagctacnantgaggctgnaaagctncncgcttncagctgtaagctttcnatcatngagctancnntagntgacttntatcntngnntctgaaccntcncatggcnnnannaatanngctgnnctgnttcatgcatncnatctgtccncanagntgaccatggngatgttaaacggcc

SEQ ID NO: 22707 - DNA, 2068 bp, Glycine max
  unsure (1)..(2068): unsure at all n locations
  Clone ID: PAT_MRT3847_120506C.1
tgaaggaacaccctccacggatatggcacctgtggaaacgttgttgacaattagcggagtggttttgagaaatttggatattccctgaggatgttcttctccagctctaacgagcaagttagtgaaaccttggttgtttaaagaaggcaaacaaagactgaactttgaaggaaccttatttgccgatgcaagctgaattggtaatgcaagttgtgactttgaaaggcctatgattcctttggtgttattgggtaagccaaatagaggtaactcatcgtcggagaatgatgggaatgcatcggtgtcaatacaactagaaagcaaaccagacactttgttttgacgaatgaatatgaaatcctcacctaagccaccactgtaaatgaatttggctaattggttgattacattagcagggcatgtattgtttgtgcaacctggtttgaaggggccattgacaccaacacatccattcattgtcttaatgttagcaatgtcttcctctttctccatccatttcttcctcctcctctcaatagcccttttctcagtttgttgcttagcagcatctcaagctcccaccaccaaatcacacccctatatccttcccattaagaaagaccccgcaacaaatttgtactacacttcagttggcattggaactcctaggcacaactttgatttagtcattgatctttctggtgaaaacttatggtacgattgtgacactcattacaactcatcatcctacagacctatagcttgtggctcaaagcaatgccccgaaattggatgtgttggttgcaatggccccttcaaaccaggttgcacaaacaatacatgccctgctaatgtaatcaaccaattagccaaattcatttacagtggtggcttaggtgaggatttcatattcattcgtcaaaacaaagtgtctggtttgctttctagttgtattgacaccgatgcattcccatcattctccgacgatgagttacctctatttggcttacccaataacaccaaaggaatcataggcctttcaaagtcacaacttgcattaccaattcagcttgcatcggcaaataaggttccttcaaagttcagtctttgtttgccttctttaaacaaccaaggtttcactaacttgctcgttagagctggagaagaacatcctcagggaatatccaaatttctcaaaaccactccgctaattgtcaacaacgtttccacaggtgccatatccgtggagggtgttccttcaaaggaatacttcattgatgtgaaagctgttcagattgatggaaatgttgtgaacttaaagccttcccttttagctattgacaacaagggaaatgggggaaccaaactcagcaccatgagtcctttcactgaattacaaacaactgtctacaagactttcattcgagatttcatcaagaaggcttcggacagaagattaaagagggtggcatcagtggcaccatttgaggcatgttatgattcaaccagcattagaaattcctcaactggactagttgtgccaactattgatctagtgctgcgaggtggagtgcagtggactatttatggagccaattcaatggttatggcaaagaaaaatgtagcatgtcttgcaattgttgatggagggacagagcctagaatgtcgttcgttaaagcttcaattgttatcggtggatatcagttggaggacaatcttttggagtttgatgtggcttcctccaaattaagcttcagctcatcgctgttgctccacaatgccacatgttcacgtacttgaatgtcatagccttatagccttattacgtgttgaaattagccactttcaattatctagtagcttctatatctttcaatattaatattatataataaaatatttaattaagtttgctatgttgtaagcaaaaacacatccgtgtttcatttgtagtagtagcatttatttttatgcttgacgggactgtgatcccaaagtatgataacttttgtgacatgtgtaaataatatcttcaagagttcatgcccgcaanaatattttatttct

SEQ ID NO: 22708 - DNA, 377 bp, Glycine max
  Clone ID: PAT_MRT3847_120507C.1
tatgttcaactgtggctgcagttgccactgtagaccatgctgactaaatattcactataggtgctgtgatggcaggctgaatagtgttatgagagctcactatttagcatatatatgtatatgatcaactttcaacactaagtgctctttatcctttttgggtgtgtgtcaacataaaattaaactaggtagagaatctgtggtgcatgcacatctaaaacatatagattattgactaaacttaccttaataatgtctggtggtattatatacggtccaatggaagataaagctgccgttacttgagcacgtttggtaccgaatacagttattgctgggttgattatcatactgtgattcctgacctagtgtaagca

SEQ ID NO: 22709 - DNA, 467 bp, Glycine max
  Clone ID: PAT_MRT3847_120508C.1
aaatataagaataaagatgagcattaaaccttaaagcaggggtagctcgttatatcaaaaaatgtcatctatatagagtcaccaataacataagtatcttgagtgacgaaaaaaaaatgacctatatagaataatcctataataaatgcgggataagaaagaaaggcaaaaaagggggtataaagagccaataaaaaaaataaaggtttacaatctcgcagataaacaatattaaatacatacaaggacaaaatatgttatagttacaaataatctacgaagcaacacaaaaaaccctaaagacaataatactaaaatcattgtctacacgtgttaaagtgtcaaccaaatataaataaagctaaaattttcataaaataaacacataataaataaagaagagaaaagcgtaacgtactaactggtctaaatcaaaacgcgagactaaaatcaacaagttaaaccag

SEQ ID NO: 22710 - DNA, 873 bp, Glycine max
  Clone ID: PAT_MRT3847_120509C.1
ggaagaaaaagtaaaacacagagagcaaccaccaatcgaagaagaaacaaccgtaacagatctccgtttctcgccaaacaaaaaacaaaaaaatggctgccttcagcggtgacgaaaccgctcctttctttggcttcctcggagccgccgctgccctcgttttttcctgtatgggcgcggcgtacggcaccgcgaagagcggcgtcggggttgcgtcgatgggcgtgatgaggccggagctggtgatgaaatcgatcgtgccggttgtgatggcgggtgtgttgggtatctacggtttgatcattgcggttatcataagtacgggaattaaccctaaggccaaatcgtactatctctttgacggttacgcgcacctctcttcgggtctcgcttgtggcctcgctggcctctccgctggcatggccatcggcatcgttggcgatgccggtgttagagcaaatgctcagcagcctaaactttttgttggaatgattctcatcctcatttttgctgaggcattggcattatatggtctcatcgttggcatcatcctctcttcccgtgctggccaatccagggctgactaataaactttccagttggatgtggtacacagccacagattgtgaatgttactgtggagtccgggtgggtaatgttagtacacagactgctgctttggcttgctcatgtgattctatttatgtccgcattataaaattgaggctatccaggaagagagtcagtcgaactttccttagccattcattatttttagttatatgctcaaatccaaactagaatagagatatgcacaataagactgatgtatgttttgattccatttactttcaatattgttttctactcttc

SEQ ID NO: 22711 - DNA, 328 bp, Glycine max
  Clone ID: PAT_MRT3847_12050C.1
gggaagggtgattcgcgctcactgtaagggtgctgggtccttgttcaattataacactcaccaccgtaagggtccggcgaggttcctcatcctcgacttcggcaatctcaacttctaccttaaaggcgtagtcaccgacatcatacactaccccggtcgcggtgcccctcattgaaaggtggcaattcgccaccctttccactacaaaaagcaaacggagctcttcgtcgacgacaagggcctttacaccgggcagttcgtctactgcggcatgaacgccaccctcatggtcggttacgtgttgccgatccaatccattcgcaaaggt

SEQ ID NO: 22712 - DNA, 142 bp, Glycine max
  Clone ID: PAT_MRT3847_120510C.1
gtctcctattgcctcatacgaaagtaaaaccaaattccattctcaggacgtggttgcggatcgagaatcgaatacctacagattgtatagtatcatgggccaaagaaattcaccttgggttaagttggactcaattaattaa

SEQ ID NO: 22713 - DNA, 941 bp, Glycine max
  Clone ID: PAT_MRT3847_120511C.1
gcgagaagacgacagaagggggaagtaaaaaacacagagcaaccaccgatcaaagaagaaacaaccgcaacagatctccgtttctcgccaaacaaacacaaaatggctgccttcagcggcgacgaaaccgcacctttctttggcttcctcggagccgccgctgccctcgttttttcctgtatgggagcggcgtacggaaccgcgaagagcggcgtcggggttgcgtcgatgggcgtgatgaggccggagctggtgatgaaatcgatcgtgccggttgtgatggctggtgtgttgggtatctacggtttgatcattgcggttatcataagtacgggcattaaccctaaggccaaatcgtactatctttttgacggctacgcccacctctcttcaggtctcgcttgtggcctcgctggcctctccgctggcatggccatcggcatcgttggcgatgccggtgttagagcaaatgctcagcagccaaagctttttgttggaatgatactcatcctcatttttgctgaggcgttggcattatacggtctcattgttggcatcatcctctcttctcgtgctggccaatccagggctgactaataaattttcctgttggatgccacagattgtgaatgttactgtgaagtccgggtgggtaatgttagtacacagctgccgctttggcttgctcaagtgattctatttatgtttacattataaaattgaggctatccaggaagaaagtcagttgaactttccttagcccttcattatttttagttatatgctcaatccagactagaatagagatctccataataagacagatgtatgttttgattccatttactttcaatattgttttccactcttcaaaatgcctcccacctccccctatatctattcttatttgatttcattgagatgtgatctgtcaaaatggg

SEQ ID NO: 22714 - DNA, 871 bp, Glycine max
  unsure (1)..(871): unsure at all n locations
  Clone ID: PAT_MRT3847_120512C.1
gttcaggaaaaaccacactccttttggccttatcaggaaagctcgataaaactcttaaggtatctgggagagtgacttacaacgggcatgaattgaatgagtttgtgccccaaagaactgctgcttacatcagccaacatgatcttcatattggagaaatgactgtgagggaaaccttggctttctcagcaaggtgccaaggggttggatcgcgttatggcaactgcaactgaaggccaggagtcaaacatagtgacagattatacactgaagattctggggttggatatatgtgcggatactatggtgggggatgaaatgttgcgtgggatctctggaggacaaaggaagcgtgttactacaggagagatgttggttggaccagcanatgccttattcatggatgaaatctctactgggttggacagttccacaacatttcagattgtaagctctctcaggcactatgtccacattctaaatggaactgctgttatatctttgctccagccagcacctgagacttacgacctttttgatgacattatcttaatctctgatggccaagttgtataccatggtccccgtgaatatgttctggacttctttgaatctatgggtttcagatgtcctgagaggaaaggtgttgctgacttccttcaagaagttacttccaaaaaagatcaagcacagtactgggtgcgtagagatcaaccttacagatttgtcacggttactcaatttgctgaggcatttcaatcattccatattggtgggaaacttggagaggagcttacagttccatttgacaggactaagagccaccctgctgcattaaccaccaagaagtatggtatcaataaaaaggagc

SEQ ID NO: 22715 - DNA, 291 bp, Glycine max
  Clone ID: PAT_MRT3847_120513C.1
gcaatttcctaccctctaaattccagcagcagcaacagcagcagcagcagcagcagtctggatcaaagaagtggtggcatcttggtctgggcaacaacggcgatggcatggatcaggttccacaaaacggagaccacgccaacgggagcctcggcgtgcggtattgagcagccgccactgctgccacatccatcgcctatcaaatccccactctggaccgccctggaagtttccttgcctcgttggccgtcactatcattccaccgagattccccatttgcatttgcaacg

SEQ ID NO: 22716 - DNA, 268 bp, Glycine max
  Clone ID: PAT_MRT3847_120514C.1
cactttattattttcttctcttagaaatgtttccaaagaaacttacccaaacaggccctaagttgggttttgataaatttctcaataaccacttattacaagtaaagattttcttatatattaacttatgcataggtttaaatcaacctttggggaagttatctgaaagagcttctggaaaataaactttgtgcatagactaatattgatggggccgtacattagtagaaatggattagggagggagctcttagttgtagatgtttta

SEQ ID NO: 22717 - DNA, 288 bp, Glycine max
  unsure (1)..(288): unsure at all n locations
  Clone ID: PAT_MRT3847_120515C.1
cngtttngggggcagaaatccagcancaatggtgtacgtcaaggntcanatatnnacangcntacttcnaganatatcaagtcangttcaagagntgtgagagggaaaaaccgattaccgtgccaggattcggttgattnatcaggacaagacaaatatnacactccganntaccgatttntgnttcgctntagcnnnaaggncattgttncncaaataatatctgctaagcattgccggngatttagttcttgctacagcatattcacatgagctgcnacgatntgg

SEQ ID NO: 22718 - DNA, 730 bp, Glycine max
  Clone ID: PAT_MRT3847_120516C.1
ctcgagccgttatgatcgatgtttatgtgtgcatgtatgttcattttctttcgagggatatgatgtattatgcgtctcttatgctgagttacttgtcgctgtatggagatctgagtgagtgacctttcaccatgaagatgaaaccatcgacgtgggaactgtcaagaaaatcaaatctcgagagatacaggtgttgccagcggaaatagatcgaaaagtatcagaggtgatgaagttttgttccgagatggcaaatcacgcccattcgactcaattgttttctgcacacgcttcaagagatcaactcaaaagtggcttcagggggtgatgatcttctaaatataatgagaatggctttccaaagtccagtttcccaaatcattggaaaggtcgaaacggtttgtattgtgttgggctgtcgagaaggggtttctttggggctaacatggatgcccaattaagtagcaaatgatattgcgtcgttaattcctcaagaagaaagagaaggaatttgagtcatgtaattgtatatctattatgtgcgggtagattataaacttggttgcagaaacagtacatgacacatttttctttcttttgggggtatgaatcaggtatgttgttcaaaatgcaaggaggcaatataattggctgtacatgaggaatggcctcaacccaacaatagtaaggtaatgaaatgctagctttgctagccaaacgtacgtctgaa

SEQ ID NO: 22719 - DNA, 829 bp, Glycine max
  Clone ID: PAT_MRT3847_120517C.1
actgctagttgcaggttgggttcctatgaagattatattgagtattacgtgtgccttaatggtcacttgcttggggtctgcacattgttaccattgtctgattcagaagatgtgtctgaggagtaagatattaatgactcaggttggcattgaattctccaatgagatttggttgaacacactgatggtctactcaagaagggtaaaattctgctcagcaactgctgaaatgttccattatgattcaaaacctctatattccattatgcttcttcatgttgctgtctcaacccaagccggcatttttcattgattattataaatattggcaacaatttgtttttaatgaatcaactagaaggtagttactgataactatgtggtatacccgtgtatattgatgtgtggatatttgacctgggtgacagatttggttgtgcaatgattcatacttgttaagaattattttgatttagtagcattttccaattcaaattcattttgtgctatgattcacactatgtatgtgttccaccctcttaaatccaccactgagtaagtaggtactaaaaaaaaaaaaggtaaaaatgtgcttgtagttcctatatttttggccaaacatgggcaaggtttttatacttttatgttgatgaatttagtgtttgtttggcagcctattagccaccaataaattcacgtcaatacaaaagcagcaagtactagcttccgtgttagttttgtcaaattgacgtgaattttacaacagatgtggctagttggcacgtatccaaacgcatagttacccttctgtctcttatccgtcccgact

SEQ ID NO: 22720 - DNA, 269 bp, Glycine max
  unsure (1)..(269): unsure at all n locations
  Clone ID: PAT_MRT3847_120518C.1
cggangacgnggtgncatgcagatcttcgttaagagccctcaccggcaagactataaacctagaagtcgcnagtcccgacancatcgacaacgtcaaggctaaganccaggacaaggagggtatccccccagaccaggcagaggctgatcttcgccggnaagnaantncgaggacggagtaccncttgntgaattacaacatccagaaagnagttnaagtctccaattggtattgcntcttcntggtggnattgcaantcttgnncaac

SEQ ID NO: 22721 - DNA, 235 bp, Glycine max
  Clone ID: PAT_MRT3847_120519C.1
gtattgctgcggtggtaactgtgtttgctgaatctcctgcaagtgcggcatcagcttctgatgctgcaagatgtgcccagacttgatctacactgattcaaccaccaccgaaaccttggtcatgggagtggtaccttgtaatgctcaattctaaggtgctgaaatgggtgtgcccgctaagaacgatggctgcaaatgtggaccaaactgctcctgcaatccctgcacatgcaag

SEQ ID NO: 22722 - DNA, 198 bp, Glycine max
  Clone ID: PAT_MRT3847_12051C.1
gatggtaccgtctgacagaagacgaccgaaggttaccgctgatagaagactactgatggttactgttgcgagacgaccacagatcgttacagtttgcacaagacgacagactggtagctgcagatgagacgatattaggctgaattcatgccactcagatcgtgcgatctatatgagtccaggttaactacccgtaca

SEQ ID NO: 22723 - DNA, 457 bp, Glycine max
  Clone ID: PAT_MRT3847_120520C.1
taacatcctactatccacatctgaacctgaatacgagggataccccgaccagctgtgcgaccagatctatgaagcattgctctattcgtgcctccaacaggaccctgacagcaaagagggctgagagacatgcacctagaccaacatcgtcattatctttagaaaaatcttcactcagaggcctacggggactatcagcagtattgcccctgactgatgccgccaatatggattcatctctgctgatgtccgtcttgatactgacaaatgcaaggtgtagggcaacaccgaacagcagagccgtgatcatcggcattgtgagcacagtctacttaccaaccgcccacaggaggtatgtgctgatgaccacagtcacatgtatggctctggcactgatgacacccctgagtacatgcgctttaggcatgtgcttgcatccatgctcggcgctggccta

SEQ ID NO: 22724 - DNA, 415 bp, Glycine max
  Clone ID: PAT_MRT3847_120521C.1
ctttggttttggcagtaccaaccacccatcattgggttcagacccaaccactttgtttatgaaagagaacgtaccaaaaacaatggaaaactttgatattcttggtgtgtgccttttgttcctctccttgataaccatgtcctccacgttggacatggttacaacaattcaaccaatcagagatggtaagaatgagaatgaaactctggtttcaacaaatggaacctttgaagcaggattcttcagcccagaaaacttcgacagccgttacctcggaatttggtacacaaatatatttccaagaacagttgtttgggtagccaacaaagaaaaaccacttaaagaccactctggagtcttagaagtagacactgatcaaggcattcttagtatcaaggatgggacaggagcaaaa

SEQ ID NO: 22725 - DNA, 280 bp, Glycine max
  unsure (1)..(280): unsure at all n locations
  Clone ID: PAT_MRT3847_120522C.1
gcacagccacaaagcnccaacacaagcagcagcagcgacaagaacgcatccccacgaccgaaaggaaacgggacgcgaaggaacagcccaacggaacgcaaaaaccaaccaggcggagaagaacgcaccacctttttttttttgaagaggatttgacttcattgacagaataaagagccttgttgaaaatgaacgccctggggcggtctcttgtgttgatcccccccctccgcctgccacagacatattggagccacaggtggacactactggaaagttc

SEQ ID NO: 22726 - DNA, 449 bp, Glycine max
  Clone ID: PAT_MRT3847_120523C.1
ccaagaaggtttcccgtcatcactgtatgacgtccgccgtctttgggggggggggggggcaagccaacaacctagagtgggaaaggcaaggcagccccaccgaaaatattcaagggaaacagggataagtagatgtaagaggctagtaataaaaaccaaggggaaaaaaaaagcatgggtgggggggatgggggggatttaaaattgacctaaaagagaaaaataaatgatatggggggggaaatgtgggaaagttaaacctggagtataagtaaaatggcaccttcgaagcgttgacgtggatcggatcgtggcgtagcgtcgatcagatagacttgatggtgagacgccgtattgaaaggtaaggtatgcgttattcggggataatcgtcgcatgcccaaaatttccgtcggatttaatggaagtcttgcgtactatagtttttggg

SEQ ID NO: 22727 - DNA, 395 bp, Glycine max
  unsure (1)..(395): unsure at all n locations
  Clone ID: PAT_MRT3847_120524C.1
cgcccacgcgtccgcccacgcgtgcgcggttttttggggngggccgccacttatcacaccaaacctgaaaatgcagttcgtagtatttctgttgcgcctttcagaggcggaaggcccatacaggtggctacatatccgaataccatggagcagattgaaccagacatgaagtcaagggtccagctgaggcgtaccactaccaatggagactatgtggaaggggaagatatggcaacggataaagttaaagtggcacgtgctgatgttggatcgacaaaaagttacacgccaactccattgatggaaactggtaagcaaaaagacagagggacaaaggtggaggatccaggatggcatggggacccatgggcaaaacgttatgccagggggcaaag

SEQ ID NO: 22728 - DNA, 487 bp, Glycine max
  unsure (1)..(487): unsure at all n locations
  Clone ID: PAT_MRT3847_120525C.1
gctccgagccgacacggcacttttgggggatccaatttaggaaaggcagaaagacaaagagccgattaagatcgcagctatcttaagcctatctttgattgcctaataccttccaattgtagctgaagttatccgactacttcattcttgcacatgagagggattgcaggtttccacatcgcattcattactgtgattctcaagctaccgggaagagccatcgagaatggaatctgatgagcctgctgatccgaaacaaccggtgacacctcgagcttgcttgcaatgccggaaggtgaagatgaagtgcctcaaggccacacaaggcactaaatgcgctaggtgttcgcggaagtctctgcaatgtgatttccttgaacatcggcgcggcaggaagaaaggcttcaagttaaacagaacagcgtcgaaagctggactgtctactcagatctatccgagttctggcagnctccaaatgctggcaatg

SEQ ID NO: 22729 - DNA, 273 bp, Glycine max
  Clone ID: PAT_MRT3847_120526C.1
gggaagaagaataaaatggcattttaatcccattctcacacgtttttgggtttccttactaccaacgaaacatcaaaatttttcaaaccaaacactgcctaaaaaagacatgtacaagcgtgctacctgcccttgtgtgaccaaaaatgtttgcctaaaatttgggggcatataaaaagcctaaatgttaaaaaaaccctctttttagaaaacaaattagaacattttttcaaaaacaagggcctttgaaaataaaaaggccaacaccctttt

SEQ ID NO: 22730 - DNA, 155 bp, Glycine max
  Clone ID: PAT_MRT3847_120527C.1
aaaaaaaaagaaagttccaggggtaaggggatatccattattattttccacacagatctttttacctttagatagacaatcttccccctccttataatgggggtagatttctattttttaggagcttctccctccctatttaatggccccgaaaa

SEQ ID NO: 22731 - DNA, 642 bp, Glycine max
  Clone ID: PAT_MRT3847_120528C.1
aatcctgctgttttggatggtcttggtgctgatttggaagaaaaggagaaagttgagggtgaagagctacagaagtggttaagattggttgtcgcaccaacagagcttgccacctttgtcaaaggtacacagccacctcttcttccatcgcagacaggttcctgacagttgagagcttattatgctagctttgtggactgtaaattgggttatgaattgacaccattgctctgaagccagtgaagttatatatcaaatagcatgaattcacctttacaactttgtatatccctgtaaggtgaattttggcatcatttttaacaagtatacactcgaccaaatgtccaaatccatgggagatgggaatatgcaagtatacacacatcaatacctcttcacaggtgtcacaattctttaactggtgccacctttacaacatgcatgttggtatatgaatttgttttacactgacgattatttgttacatgtgatttctgcaaatttgtgtacagtttgattttacgatatatacaacgactctactatgtgttactccaaaatattttttcggaatttgttttacaggcaattatttatgttcgcaatcattgagctgtcgaaagggaataattcggaaggacc

SEQ ID NO: 22732 - DNA, 621 bp, Glycine max
  Clone ID: PAT_MRT3847_120529C.1
gcactggctgtagcactttccattatccgagccaatcctactgttttggagggccttggtgctgatttggaagaaaaggagaaagttgagggtgaagagctacagaagtggttaagattggttgtcgcaccaacagagcttgatgcctttgtcaaaggtacacagccacctcttcttccatcgcagacaggttcctgacagttgatagctgtttattatgctagctatgtggactgtaaattggggtatgaattgacaccattgctccgaagccagtgaagttatatctcaaatagcatgaattcacctttacaactttgtacatccctgtaaggtgaattttggcatcatttttaacaagtagccagcctgttatttgtgttataattcactccaccaaatgtccaaatccatgggagatgggaagattcaaatatacacatcaatacctcttcacatgtttcacaattctttaactggtggcacctttactacatgcatgctcgtatatgaatttgttttactgacaatcatttatgttacatgtgatttctgcaaatgtatgtttgtgtacagtttgattttctgaaatatacaaggaaatttaccaagtgctactcc

SEQ ID NO: 22733 - DNA, 306 bp, Glycine max
  unsure (1)..(306): unsure at all n locations
  Clone ID: PAT_MRT3847_12052C.1
tcgcangcacgngtacgnnagctnggnngncggtgtnnttcttcttcttctttccaaatcctcaaatgggccgcaagaaaaacgaaccaaaacgcaccgtttgcagcatccctctgatcttgcctctctgcgtttctcgtttcctgtggtttgatctacgccttggtagtgctaagagctccgctttcagagtcagagttgttgccactggtcgaagacagtaaagcgtgttgcagcngagtagaaaatttggagctttggggtgacgttgtgaagtggggttctgacttcaaactcaacacttcc

SEQ ID NO: 22734 - DNA, 492 bp, Glycine max
  Clone ID: PAT_MRT3847_120530C.1
acgaggaacaacatcaaaagacacaagaagagatgctcaacaccattagagaacttaaagcatttgtgagtgaccttagtcaatgtcttcaatcttgtcgtcgttgccatacagactatgaagaatattctgatcatgatgaccaatatcatcgcacccagtcattagagacatatcctcccattatagcccattgtattatagacaacttcatggtcgttgataaaatttacggatggaacttttacagacagactcgtagcccattgtaagccatttgtttacagtgggatttcactattacagtgggctttaaacattcttgtagtggttgtcgatggagttgtgtgcaatggtggaggtgcaattggtgtttgcagagaagagaaggaacatcgtgttgtggaggactatggttaataattttacaaccagtgtaaaaaaatattcttttacatcgatagtaaaaataaccgatgtaagagatcattg

SEQ ID NO: 22735 - DNA, 1244 bp, Glycine max
  Clone ID: PAT_MRT3847_120531C.1
gccatttctgatattggggttgggattgagaataaaataattttacactttaaaaatgttttctggcctaatgtggaattcttaggagtagttgcagagacatcttatggatgcagctactttcttaatctccacaaggctacaggtcgtcctgtccttgtttacatgcctgctgggcagctggccaaagacattgagaaaatgtctgatgaagcagctgctagctttgctttcatgcagctcaaaaagatccttccagacacttcttcaccgattcagtatcttgtgtctcgatggggtacagatattaatacactaggttcctatagctatgatgcagttgggaaaccacatgacctgtatgagaggctacgggtccctgtagataatttattctttgcaggggaagcaacaagtatgttgtatacggggtctgtgcatggtgcatactctactggaatgatggctgctgaggactgcaggatgcgtgtcctggagcgttatggggagctagatttggtcccgccggtaatgggagaggatgcttcagtgataccactccagatctctcgtttgtaatctcaggaggctttatgcagcccccttccgggtggcatccgttgtcaaatgttgtgttgaacttgagtagctgggaggtgctgtgactcctagagtatgaataatctcattagtaacgcagaaatgcgtaatttggaatgacatgcactcgcatttagttatatagttgccaataatatggtaacgcattggtgttttcgttgttgtgtttaagctctaccgtgtttaggacttattttatcattgaagaactttgcacaatcattgtaagtagaccggtaggacagtaggatatatacatggatgtatggttcgtgcctcaattcatccagaacagtatatttatcatacggaactcatcgatggtgtgaagtttgctgctcccgatgattggagttccattgcaatcgaaagtgattccaaaaaggtaggtaacattaatagaaatgtaacagattggtctgaactaggtgttatttatgagggcataagattagcagtcattgtttgatgaatgtatttccaactttgttcctaggaaaggaactaaatttgcccacaagttgacaatgggcacaattctcggttgaaggtttggcttggtgtttaattcttggtgatatactctgattctgttgctgtttaatgaatttgatgtatatttg

SEQ ID NO: 22736 - DNA, 438 bp, Glycine max
  unsure (1)..(438): unsure at all n locations
  Clone ID: PAT_MRT3847_120532C.1
ctgcnataaaaccacagaaggttggctcattaccactaatcttnttnattcgagtaagtcttactctaaaaatcgagaaatctttcaatatattctctattataatccacatattttatgtttaattcttttttcaacataaaaaggtagagaaatcacatattattttttctatctatcctatatattactctaacttcttatcatatgttattaatatcttactttataaatttaaacacttacaatttttttttaattttttctattccacattctttcttttattccaatttatttataatctcttatctattttatttttcttttttttttttttcattatttactatctttttatttttcttttacttttaaatatatcatttattcttattttatattttattatttttatttttttatatttttatattt

SEQ ID NO: 22737 - DNA, 2379 bp, Glycine max
  Clone ID: PAT_MRT3847_120533C.1
ggctcgagcaattatatgaatgaatgaattttctccgattctctttttccttgtctgagttttctcggaaaccaaaccccgaccaacctctctctcccaccttcgcgatccgatccagctgagagtggttgggctttggaaaaattagctgcatgagctggtttgggaagctgcgtttattctccaatttcaattcctttcacttcattacttctttgttaatttttaccctccatttttcaccccaatcgcgctctaattccctccaacccttattgatcaacgacggtaaaactaatctcaatcttaatttccggttttcgtcacaatatggagtcccgattcaagagtaatccccaattacgcagaggcctttgctgtgcaaatgatgacaagcagcaggagaggtccccatctgttattgtcattggaggtggcatggctgggattgctgctgctcgggcacttcaagatgcctcatttcaggttattcttctagaatcacgggaaagacctggtggccgaattcacactgattactcatttggctttcctgttgaccttggtgcatcgtggctgcatggagtttgcccagagaatccactggctccattgattgggaagttgggactacctctttaccgtactagtgaggataattctgtcctttatgaccacgatttggaaagctatgcactttttgatatggatgggaatcaagttccccaagaattggtaacaaaaattggtaaaatatttggagcgattttagaagagacaaataatgtacgagaggaattcagtgaagacatgtccatactccgtgcactttcaattgtttttgaaagaaaaccagaattgaggttagaagggctttcccacaaggtgctacagtggtatttatgcagaaatggagggctggtttgctacagatgctgataccatatcactgaaatgttgggatcaggaaagtattactacctggtggtcatggtcttatggtcaggggttaccagcctgttataaataccctagccaagggtcttgatattcgcctgggacatagggtaacaaaaatagttaggcaatataatgaagtaaaggtgacagtggaaaatgggaaaacatttgttgcagacgccgctattgttgctgtacctcttggggtgctgaaggcaaagagcataaagtttgagccaaagctaccagactggaaagaagctgccatttctgatattggggttgggattgagaataaaataattttacactttaaaaatgttttctggcctaatgtagaattcttaggagtagttgcagagacatcttatggatgcagctactttcttaatctccacaaggctatgggtcgtcctgtccttgtttacatgcctgctgggcagctggccaaagacattgagaaaatgtctgatgaagcagctgctaactttgctttcatgcagctcaaaaagatccttccagatgcttcttcaccgattcagtatcttgtgtctcgatggggtacagatattaatacactaggttcctatagctatgatgcagttgggaaaccacatgatctgtatgagaagctacgggttcctgtagacaatttattctttgcaggggaagcaacaagtatgttgtatacggggtctgtgcatggtgcatactctactggaatgatggctgctgaggactgcaggatgcgtgtcctggagcgttatggggagctagatttgttcccgccggtgggagatgtttcagtgatacccctccagatctctcgtttgtaatctcaggagactttatgcagccctcttccgggtggcatccattgtcaaatgtcgtgtggaattcaatgggaggtgctgtgactcccagagtatgaataatctcgtgaataacgcagaaatgcgtaatttggaatgacatgcactcacatttagttatagttgccaatatggtaacgcattggttattttctttgttgtcattaagctctaccgtttttaggacttattttctcattgaagaactttgcacaatcattgtaagtggacggtaggacagtattaggatatatatacatggatgtatggttcgtgccacaattcatccagaacagtatatttttcatacggaactcatcgaagttgtgaagttttgctgctcacaataaatggagttccattatcatcgaaagtgattgcaaaaagttaggcaatattaatagaaatttaacagattggtctgaactaggtgttatttatgagggcataagattagcagtcattgtttgatgaatgtattttcaactttgttcctagaaagaaactaaatttgcccacaagttgacaatgggcacaattctcggtg

SEQ ID NO: 22738 - DNA, 178 bp, Glycine max
  Clone ID: PAT_MRT3847_120534C.1
tttctctcacctaaaaatatcttccttccttcataactctccattcttaatctccttcaaattctccaactcctttttaaacttcaacatatacccatactttacctacacttaatcaaccaccacccataccttttccattttaatttcaccttttaaatctcaattttattcttcc

SEQ ID NO: 22739 - DNA, 597 bp, Glycine max
  Clone ID: PAT_MRT3847_120535C.1
tttttgtgtgtgagagagagagagaaagagcacacttcgatagtttgatttgattaaggaaatctcaagctattcggattggaaagcaggaagaacagcgacacttgttacttccaatttttcattttaacgaacatttctcatcagcttttagcaaaatcagatttcgaatttggattcaggtacgaaattaaaaatgaaagactattttttttagtccgtttcacttatcaagggctaatttagattagtaattatttcgccaaacactaaattcatatatgatttacatttttaaagaaaaataattgaaagaccaaaaggttctacaattgtaatgctgaaatactgttctgtgacttttatcaaaaccaaattgaattgcgcaattttttcagtgaccaaaggaccaaattgagtgttgatctagaaagcaattaaaccaaccgaggaacataacactatccagccagtctataataatattgaaatgcaagaataaagaatacagaattctgttgagaccaaaaatgtagaaacatgcagtatggacacaatgcataacataaaactttaattgcttactgaatccttcat

SEQ ID NO: 22740 - DNA, 438 bp, Glycine max
  Clone ID: PAT_MRT3847_120536C.1
cgcatgcacgcgtacgtaagctcggaattcggctcgaggtgtggagaagaagtaccccaatcgggggaacacctgtctggagaatggctcgttcttactgaactttgcaggctgcgccgtgtgcagtaagcgggactttatgctgatcacaaacagatccctgaaagaggaagatggagaagaaatagttacctatgaccatttgtgtaagaattgtcatcatgtcatagccagacatgagtatacattcagcatcatggatgaatttcaggaatataccatgctgtgtctgttgtgtggcaaagccgaagatactatcagtattctccctgatgacccccgacaaatggctctgttattctaagcctcctgcaattctgttgtaactatattgggttgctttaaaatatagcaggcctaaaggtttggctaataatg

SEQ ID NO: 22741 - DNA, 298 bp, Glycine max
  Clone ID: PAT_MRT3847_120537C.1
aagctccgcactcggctcgagttgaaatgactgtcgaatctggtgaaggaactcgtatttcacagagctgacgcctttttcaatcaagtggtcctccctactagcaacgactatatgggacgctcttaaacctgtgatgataatacgaaccatgctgaagagctccacattgaggaacagatgcattgaatcactggcagcgaaggcatgtactgacccggctttatttagctcggcattgctggagcatgatggtacctcgcagagtccttggggcagtgtcttgtgcactggaata

SEQ ID NO: 22742 - DNA, 342 bp, Glycine max
  Clone ID: PAT_MRT3847_120538C.1
ccgtaatggaaggcctgatgctgaatatgttaaatggaggtggcggccaaatgggtgcataattccaagtttgaatgcaactgattttctggagaggttgcgtgggcagaggctagtttttgttggggattcactgaacaggaacatgtgggagtcacttgtatgcattctccgtcaaagcatcaataaaaagaaacgggtttttgaaatttctggaagaagggaatttaagaagaaaggtgtctatgcttttagatttgaggtgagttttctaatcacttctatgatgtttgtgtatgtgtagtgtgaaaagtgaatcttgcatgggtatggggctgacta

SEQ ID NO: 22743 - DNA, 278 bp, Glycine max
  Clone ID: PAT_MRT3847_120539C.1
caaaattcaggaaaaaaaaaaaaaaacatgggggtaaaggtgtatggtccaacccatggatccccaaagagggtcctggggtgtctgattgagaaggaaattgagtttgaaacagtgcatgttgatctcttcaggggggagaataaggacctgagtccctaaagctgcagccattgggaccccttccggttattaaagagggggattatactctctatgaatcccgggcaataatcagatacttagctgagaagtataaagcccaggggactgacttt

SEQ ID NO: 22744 - DNA, 318 bp, Glycine max
  Clone ID: PAT_MRT3847_12053C.1
acatggtcggggctatgctatgggttgctacttatgataccaatcctgaagatgcatatcgtagtatttttgttgcgcctctgagaggctggaggcccattcggctggttacattttcgaatacgcattgagctgagttgaaccatacatgaattcaaggtgccagcttttgaggaccactaccaatggtgattttgcctcaaggaaaagatctcgccatggttaaagttaatgcggcatgtgctggtgaaggcttgacagtctagtttcactccaactccattgttggaatatggtttgcaaaacgacagacggata

SEQ ID NO: 22745 - DNA, 171 bp, Glycine max
  Clone ID: PAT_MRT3847_120540C.1
tacggctgcgagaagacgacagaagggtatcctaaacgttagctcacaaattctcaaaataaagaatagatagacttgcgtccaaatacatttccctgcttagttaagctagccttaatttccagcagagttgtttagctaattcatctagttttcagaattatcagaccc

SEQ ID NO: 22746 - DNA, 1180 bp, Glycine max
  Clone ID: PAT_MRT3847_120541C.1
cgtcagagttggattactatctgatgttacacgaatctttagagcgtctagcctctctgcttcgtgggcgcaactggccgcggggggccaagactgttgtcacggatgaagccacacacactgagagaaggcttcaccaaatgatgtttgctgatagggattatgaacgagttaatgatgatgatgacttcgctgagaagcaaaggcctaatgtgaatgttgtgaattggtctgataaagattattctgtggttactattcagtgtaaggataggccaaagcttctctttgacacagtttgtactttgacagacatgcagtatgtggtttttcatgcaaacattgatgctgaggggccagaagcatatcaggaatactacatcaagcatatagatgggtcccctgtgaaatcagatgcagaaagacaaagagtgatacaatgtcttgcagctgcaattgagagaagagtttctgagggtttgaagctagaactctgcaccaccgacagagttggacttctatctgatgtcacacgtatcttcagagagaatagcctcacagttacaagggcagaagtggccacaaaaggaggcaaagctgtgaacactttctatgttcgtggtgcttcaggtttccctgttgattccaagaccatagaatccataaggcaaacaattggcaacacaatccttaaagtaaagggtagccctgaagagatgaaatctgttcctcaggattctcccaccagatcactctttagtggtcttttcaagtccagatcttttgtgaactttggcttggtgaagtcttattcttgagaaagccattattaccacacttattgctatcttttcttgtacagtgaaagaggtgaaagaagatgcaaaagggctttactaggaagtgtgacacgactttagttttagggaagtaggaacaccatcatatcacacgttagggagaaaagtggcttgtaaattttctactaccccttctgctttaatatagcttagttttttccactatggaatccaatcacactaggttgagttatgaaggcaaaagagaaccttagttgtgtaaacttgaaacaagtagtttcaagctttcatcatcatttgtaaatatactcattcattttctagcagcggaaaaaaaaaaaaaaagattaaaccaccca

SEQ ID NO: 22747 - DNA, 265 bp, Glycine max
  Clone ID: PAT_MRT3847_120542C.1
aaaatattctctgtagtcatggtcctgtgttaacttattatgtgattgaatttaatttcagttataagagcaaggctgtcatatatcatataaaaatgattcaccatttttaggagagagactagcatgttttgttattgggtcatttttacagcttccctttgatgctctccacattgttatggcttcactttgatgctcttttgttgatggttttgcattgcattgctgctttactttgttctctaaggtatccttttgcttc

SEQ ID NO: 22748 - DNA, 388 bp, Glycine max
  Clone ID: PAT_MRT3847_120543C.1
taatcaaccacaccaagagaaacaacaaacaagggaaaaatactacatcatacatgtctccaattccaaagcagtttataggtgatctcataagcaagccactttcacttgatcttgaaacttgagagaggaccaaacatatagaatttcttcaatggatcttattctgatggtggattgttgcacttatttggctaattagcttgaaaacttatcacagctaaatcatgaaacaacactttgatcttgaagtggtggcctcagcagaatatgaatctgaagttagcagcaaggttgcttccaatatatctatccaagaaacctatgcatgtccttgcagtgacaacctcaccaactcttccaatgtgacaaatccaatagagcttca

SEQ ID NO: 22749 - DNA, 457 bp, Glycine max
  Clone ID: PAT_MRT3847_120544C.1
actgagcatgcgtctagctatctcgatcgaactgtccaaggtcctgtcacaaggacggtaggtgtgggctctacggtttgattgtgttgggtaacagctacagtggtcgtaacatttgtattccaaacattagtatttggcaccgccaaactgtgcatattagtcataatcgtaacgttaacagttaccataaccaaccaaggtttttcagtactaatcgtgtagtggtcttccaaactactgtcaccatccttcgatttgtcttatgataatagttacaaccacgtaatttggtattggcgctggtcgtgttgccgcctacgtacagtggcgtaacatgtgtatcctaaaattagaatttgacacgtaaactgtgcatattagcataatcgaaccttacagttacataccaccaagtttttacattctaacgtgagtggcaccaactaatgcacat

SEQ ID NO: 22750 - DNA, 325 bp, Glycine max
  Clone ID: PAT_MRT3847_120545C.1
aacttaaaggaaggttagctcaattgattgaacaggaaaacgttaaagaaggacaccatcaaattcaaatcaaaaaccctgaacttccaaaaagaatatggctaagggacattggtcaaccgagccaaggttttccaatacctggtattggaggaaagggcttccccttcctgtcgctgaagctaccacacgaagccaaacttggaagggagcactggacagaaaaaacagggttctctctaaagggggccggaacaacaatcaagggactttcactggtacatgcagaggttcctccagagacaaaagggagaccgggggcaaa

SEQ ID NO: 22751 - DNA, 170 bp, Glycine max
  Clone ID: PAT_MRT3847_120546C.1
aattcactgaaacagcacactttgataactgggtattttaaaatttcactttttccaacctcattacccgctttgacaaagaatattaaaaaactggaagttcttcaaacctccaattattgttttcatccttctcagataaaaaagtttgagccgcttggttctttatc

SEQ ID NO: 22752 - DNA, 1782 bp, Glycine max
  Clone ID: PAT_MRT3847_120547C.1
tacggctgcgagaagacgacagaaggggggtcctcacataggaaaagaagcggtgttcgaatttgaggggtgaatggatcaatcgttccttgtaatggtctcgaatctcctccagctccacaactccctggaccccaccagctccctcctctccaacgccgacggcgcatcctccctcctccactcctcctccgtcgcccctctcctcttcttcaccatcgcctccgtcctctccttcgtcgcctccacgcgcccctctccttcctcggactactctgtctctgccttccgcaccctctccacagaacacatctggtccctggaagcccctctccgcgacgcccactggcgctccctctacggcctctcctaccccgtcttcaccactgtcgtcgacaagctcaagccccacatcgccctctccaacctctccctcccctccgactacgccgtcgccatggtcctctcccgcctcgcccacggcctctccgccaaaaccctcgcctcccgctactccctcgacccctacctcgtctccaagatcaccaacatggtcacccgcctcctcgccaccaagctctaccctgagttcatcaagatccccgtcggccgccgccgcctcctcgaaaccacccaggccttcgaggaactcacctcgctccccaacatgtgcggcgccatcgacaccacccccgtccacctccgcattaaccctaaccctaacatttaccgctgccgctacggcttcccttccttgctcctccaggtcgtgtcggaccacaagaagattttctgggatgtttgcgtcaaggcccccggcggcaccgacgacgctacccacttccgcgatagcctcctctaccaccgcctcacctccggcgatgtggtgtgggacaaggtcatcaacgtccgcggccaccacgttcgcccttacgtcgttggtgactggtgcttccctctcttgccgtttctgcttaccccgttctcgcctagtggaatggggactcctgcgcagaacctgttcgatggaatgctcatgaagggaaggtctgtggttgtggaggccattgcccttctcaagggaaggtggaagattcttcaggatttgaacaccggtgttcaccacgcgccgcaaaccatcgttgcttgctgcgtgttgcataatctctgccagattgcgagggaacccgaaccagagctgtggaaggaacctgatgaaagtggacctccgccgagagtcatggacagcgagaaatcgttttattactttggggaaaacttgaggcaagccctagctgatgacttgcaccagaagctttcctcaagatagttgtttagttgttggatttggatagttacttgctttactataactgcctcgccgccaagaggaaggagggttcaatcaaacacagcaacctcaacctcatagtgtgtttttatgattttaatttctgcgcttcttgtcgttagtaaccaggtgtagaagtagattactccatgataagattgttggtggtgtctaactgtaatggcatagctctagtctcgtgaatgtgaatgtggaggagtggactactaacattgttttttattcgtatgatatatgaaatgaagtgtttcaaactagttttttcaaaaaaaaaaaaaaaaaaaaaaaaaaaaaaaaaaaaaaaaaaaaaaaaaaaaaaaaaaaaaaaaaaaaaaaaaaaaaaaaaaaaaaaaaaaaaaaaaaaaaaaaaaaaaaaaaaaaaaaaaaaaaaaaagggggggcccttttaa

SEQ ID NO: 22753 - DNA, 307 bp, Glycine max
  unsure (1)..(307): unsure at all n locations
  Clone ID: PAT_MRT3847_120548C.1
ggcactttctgtattcaggtgtgtatggattgtattttgagtgattgagagaggaagactctgttaggactcgggcacgtgtattctttaacgagaatttaaatacattaagaaaatagcacatttgtgtgagataagtaagtttcaactgccaatgaaactaactgcctttatgtaaatgttgatgagtctgtaagttgtgattttctgaatggaattattggagtggttggatgaatttgtcaaacnaaaaaaaaaacaaaaaaaaaaaaaaaaaataaaaattaaaaaataaataacaacaaaa

SEQ ID NO: 22754 - DNA, 406 bp, Glycine max
  Clone ID: PAT_MRT3847_120549C.1
gtttttggggttctgcacctgaaggggagggaaaggaagcggaacccaaataaggggttctttacttgggggttccatggcatggggggtagctttcctactcctggggctgggggtggggcacccttaaccttaacaccataggatcactcgctggccgggtaaaccccatgttaagtttaataagttttaaggttttgtaaccgtggatgccaaaaaccagcgggcactttttttttacttggttgaagccgaaaaggatgcactttccaggccctttgttttggggttaaatggagggcctggtggttcttttttgggagtgggggcattttaagggaagggcccatttaggcccaaggtgaagggctgggttggaaaccaattcagttggaccagaaaggcg

SEQ ID NO: 22755 - DNA, 1049 bp, Glycine max
  Clone ID: PAT_MRT3847_12054C.1
ggtccggggtgttgtgttggtgttgtgtggtgtgtcgttgggaggggggaactcttggtctagctttggagccatcccaccaatccatcacccgatcacatttcaaagccccaacacatcacaatttacacaacacacatcacaattccgaacttagtgtacaacgaaagtccaacacacgaatcaaatcagacacacaacacaaacacaacacacactcactctccgttatccacacacaccattactctgttctgttctgttctgttctgctctgttctgtttcccaccacacccccccatggattgttggtactctcctcaccctctccatgatgaattcgagaagcttgtcattcgaatgaaccccccaagagttgctgtggataacatttcaagcggaacagacactgtcataaaggttgatagcgcgaacaagcgtgggagcttgttggaggtggttcaggttctcactgatatgaatctcagtgttagaagagcttatatttcctctgatggagaatggttcatggatgtttttcatgtcacggatcaaaatgggaaaaagtttatgcaagatgatgttgctgaccgcattcaacagtcactgggtccaagagcctctagttttcgatccttgagaaggtctgttggggtccaagctgaagcagaacatacaaccattgaattaactggaagagacaggccaggattgctttcagaagtgtttgctgttcttgcagacctcaaatgcaatgtggtagcagcagaagtctggacccacaattcaagaatggcatctgttgtttacatcacagatgaggcgacgggattgtccattgacgatccggatcgccttgccaagattaagcagcttctactgtatgtgctgaaaggagacatagataagaagagcgctaacactgctgtttctgttggttctactcacaaggataggaggctgcatcaattgatgtacgctgaccgcgatcatgacgtagatgatggggattctgggtcaacaagtgacaggaacaagctcctagaaa

SEQ ID NO: 22756 - DNA, 160 bp, Glycine max
  Clone ID: PAT_MRT3847_120550C.1
gatgcctacagaaagccgaacattcttacatggaggggtgcgtttaaacaacataccaactccaattttcctctgtcagttgcaaattatgacattttacaaaaatattttcattcagacccagaataatcaataggatggtcaagtgcccacttaaccc

SEQ ID NO: 22757 - DNA, 370 bp, Glycine max
  Clone ID: PAT_MRT3847_120551C.1
cggacgcgtgggaaaggattctacctgccgttttatgggaattgcgcttcaaggggtctcagatggcttatcacggtgacgagggtcaccaacggcacgtgcctttggggggcctaggccccctactgctggtcggcaaacggactgctggcgcacgcgtcgcttctagcccggattctgacttataggctttcagtcataatttaacgcactgtaacttttcgccactgactctttaaccaatcgcgctgaccaactgttcgaatcaacttttcctctcttactagggtgaattactattgctacactgttatcacttgtttaaaactatcctggcttacgacggtttaatctcagcttactttcccta

SEQ ID NO: 22758 - DNA, 484 bp, Glycine max
  Clone ID: PAT_MRT3847_120552C.1
tagggtgccacaagtgtgaacgaagaaaaatcaaagaccttagttactattatggatacagaaaagcattcagaactgcattgagaaccatagcaagtctcgaagggtacaggggggtgacatttttgagaacattttcccctgctcactttgagaatgctgagtggaataaaggagggagttgtgagaggacaaggccttatagcaaggaacaaatgaggtttgatgggtatatttttgagacatataagactcaagtggaggagtttagaacagcaagaaaggttgcaaggaagaggggtttgaagtttttgatgatggacacaactgaaatcatgttaaggaggcctgatggacatcctaataaccatgtctggcatgcagtgaaccaaaatgttacacatagtgattgtgttcattggtgcttgcctggccctattgacacatggaatgagttcttattccatatgttgaaaatgcatag

SEQ ID NO: 22759 - DNA, 411 bp, Glycine max
  Clone ID: PAT_MRT3847_120553C.1
gggacaaagttttgtgaaagtttccattgcatggaaacgggaacattgcttacccaaaaaaaagttgggagtaaaaggagaaaaggaaaaaaaaacaccgcttaagccttggggaaatgactttagacctatgaatgaagtgattgacgtcgtggaacacccaaatttttcacccccccctatgaagacttcccttgaagggggtgtttaactttccaacatttttaaacttgggggttttcaaacttggggggcttaacaacttcccaggtgaaagcaggggcaccccttccaaagggaccaaaaacagttgtcttgaggaacctatggcccccccttttaaggtccaagttaggggggatcattccaggcctgaagtccaaattctccttcacaatctgaaaaatctcc

SEQ ID NO: 22760 - DNA, 254 bp, Glycine max
  Clone ID: PAT_MRT3847_120554C.1
cacgatcagtttactaatgttgatgggtaacacttaattggtaacataatcaatgtagggaagccgcccaggagattacagccttggttacgcgtactgcgtcatgattcacgctactaaattgttcccaaaatactggacacaggccatcgatatcagcctgttactgggcaaaaaggattgcatgacccacataagaccgctcaaaggattgcccactttcagcacagggctgcaaccagccaatctgagca

SEQ ID NO: 22761 - DNA, 390 bp, Glycine max
  Clone ID: PAT_MRT3847_120555C.1
cccacgcgtccgtccttgcttaaattttggatttttggctacagtttatgcctggtcacttattctatgatcctaattctctttttggattatgatcattaagagtagtacttcatttccacatttacttcattaatcggatatgcttatgttccaccttgcaaaaaaaaaaaaaaaaaaaaaaaaaaaaaaaaaaaaaaaaaaaaaaaaaaaaaaaaaaaaaaaagaaaaacaccaaacagacaaaacaaacaatagaacaaaacaaaaatgaaaaaaagaaaaacacactagggggggggcctttttaggggtccaatgttaccgtcccctgccttcccaatcaatattttttttatggggcccccaaattgaaattatcgggcggtg

SEQ ID NO: 22762 - DNA, 599 bp, Glycine max
  unsure (1)..(599): unsure at all n locations
  Clone ID: PAT_MRT3847_120556C.1
ggccgcttcgaggcncggccggtttcggagataccaataagcaaattaataagattaccttgttcaatggcatcatcaacagcaaaagtggtttctctagtgttaatagtatgtagggagaatgatgatgaatatntgtggaagcaaacacttggtgcgtggcaaggagcaacgctggctacggagcactgaagtcagggttggactttgcatgctcacatggagctgactgtagggcaattcaacccggtggcagttgcttcaatccgaacaccattcaaaaccatgcttcttatgcctttgacagttactatcagagaaatggcaaaaaccctggtgcatgtaactttggtggtgcagccaccattgccgtttctgatcccagctttggacgttgtgtgtacccaccttcttcgagcactgatggaggagttgatacaacaatcacggggcttccaatgaacagcaagacattacaagaccagaccaacaaggaggattgaatactgacaacagggaaatgatcaacctgttattttatgatataaacatttgtattaagagaattcatataaataaataaagatgtatttatttac

SEQ ID NO: 22763 - DNA, 1128 bp, Glycine max
  Clone ID: PAT_MRT3847_120557C.1
ctttccagagaatatcacacgaatcccaccctcccccagggtacggatcttcaggccttccctctctcacccattcacacactgaaatgagcaatttccagagaatatcgcacgaatcctaccctcccccagggcacggatctccttaccctccaccccaaccgggttacccatcggcgccgcctcatgaagggtaccctccgccgccgccgcctccgggatatggtgggtaccctccaccgcatccgccgcagcgtccgccgtatgactcctaccagggctacttcgacaacgggcgtccaccgccacctccgccgccgcactaccattaccagcacgtggatcatcatcacctccacgatgagcccgggtgcttttcattcctgctaagggtccggtgtggcgaatgattactatttgagctcttccctctcacaaactcagaaaacaagtccaatgagcaatttccagagaatatcacacgaatcccaccctcccccagggtacggatctccttaccctccaccccaaccgggttacccatccgcaccgcctcatgaagggtaccctccgccgccgccgcctcacggatacggtgggtaccctccgccgcagccgccgcagcgtccgccgtacgactcctatcagggttacttcgataacgggcatccaccgccgcctccgccgccgcactaccactaccagcacgtggatcaccatcaccaccatgaggagcctgggtgcttttcgttcctccgaggctgcatcgcagcgctttgctgttgttgtgtgctagaggagtgttgcttctgataatcacatcgtaaaagttgtttcttcagtttgctgcacttggttatggctctatagagaaatgtggctacaattctagataataagtgagaggtggtaagtcttggtcattcttgtaactctttggtctttcccctctaccctaaatcctggtctgtgcatagcttctgtgatgtggtctatatcatatatgaattactttgtacgaacactatattggaaagtgtaaaccgtttcttataaggtgtaacagacaatgatatggttaaaattgtttcatattactcgtcttcagtaaaaaaaaaaaaagaaagg

SEQ ID NO: 22764 - DNA, 366 bp, Glycine max
  Clone ID: PAT_MRT3847_120558C.1
gaattgacccatcgacccacccagacgaccacacacgcgtacggtcacttgtacgtttcttggtttctcttcctccatttgatcgagcgatccttctctgtcttgtggttatgccatcaatgacaccgtatcagtggcactgcactaaacgagattgagagctttcattgtgcaagtaaaagcctatgttcgtaccattgcctcacattaacccttgtcccccttatctcgttctataccactaactcatcggattctcaatgcgccccgcgtacgttctgctgtgaactctcactcactattgtcaccgtgtaaccactagaatcatacttagtggcatggcaagaattaatttatgattaacct

SEQ ID NO: 22765 - DNA, 304 bp, Glycine max
  Clone ID: PAT_MRT3847_120559C.1
ccacttttatgttatttaatctattatttttaaatcaaacctactttgattggggtgcattgactctctttccatcatcattggctgaccaaactattaagcttgcccactgcacccctcagctaacacttggaacgttaatcatgaggaaaacatcctacttaactgcacaccctacacgccgatgggacaaacctccacccaacaagaacaaactctccattatattatgaacccaagtcctaccttactgaaaaattaccaaaagactcagtttgaaacactgttggcctatatgttaacc

SEQ ID NO: 22766 - DNA, 1642 bp, Glycine max
  Clone ID: PAT_MRT3847_12055C.1
attggagtaacgtattatggagtaaaaaaaagagccttcctgaacagataaagaggaatgatgactcttctctcaaccattgagcctaaaaacattgaggaagcactaagtgaagattcttgggtgatagccatggaggaagaactaagtcagttcaccaagaacacagtttggaatcttgttcctcctcctatgaatcaggcatggagtggaaataagtgggtgctcaaaagtttcaaagactaaaaatcacccttagttgaagacaaggactccgttcgaccggcaccatactttgagccataaggagacgctgagccagtgtgcacgcctagcacataattcggctcgagaagctcaatgaagcaggagaagtggtttaaaacaaggctagactggttgtttaagaatacaatcaacaagtaattgactatgaataaacctttgcaccagtaacaatacttgaagccattagaatactcttagcttatgctgcacacaaacacatcaaactgtaccaaatggatgttaagaatgcctttctaaatggattcataaatgaagaggtgtatgtgaagcaaccactaggatttgaagataaagaaagaccttgtcatgtgtacaagcttatcaaagccttttatggtttgaaacaagctctaatagcttggtatgaaaggctaagttcatttctagtttcaaatggattcaccagaggaataacggaccccgcactattcagaaaggctcaaaaaggaaaccttcttattattcatatctatgttgatgacataatctttggtgcaacctcaaaaaggatgtgcaaggagttttttgagttaatgaaggatggatttgaaacgagtatgaaaggtgagctaaagttcctcctaggacttcaaatcattcagaaagtttatgggatttttatccatcaagagaaatatacaaagtcccatctaaaaaggttcagaatggatgaagccaaacctatggcaacccctatgcatcgttccacaatcattgacaaggatgagaaaggtaatcatacttcataaaaggagtatagtggtatgattgattctttatcatatttaacttctagtagaccagatattgtgtttgtcgtttgcctttgtgcaagatttcagtcttatccaaaaatttctcatgttactgcagttaaaaggatcttaagatatcttgttggaactactaatcattgtctatggtttaagaaaaggtctgagtttgatcttttaggatattgtgatgtttattttgctggtgataaagtagaaaggaagagcactagtagaaatggatgacccgttgtggcgagtgtctcttaacttcaaggtctttagctttgtagatttgttgtgacaaattgcaccttcgctaaggcgagtccatgttagtttcagcttatcaagtttcttgttttgttgtggctaatacacatctcaatgtagcgagatcatgtatgccgctcttcattctttgatgatcaaaatatgctcttgtaatatctaaatttactcaaaagcatccaaaactatctttaaaatcattttatacaaattgttagtaaaaacaacaattatgtcctcattatcctcttaatttgatcttgtctcaa

SEQ ID NO: 22767 - DNA, 163 bp, Glycine max
  Clone ID: PAT_MRT3847_120560C.1
tactacaaagggatcaccctccttactcatacattcaaaaaggtttctcataaacgaatgaataaacttgctaagacttatcctattatttgcaagcccctgattcaaaggtactacctttattcgtgacaccatgaactaccaatgtcctctataaatggat

SEQ ID NO: 22768 - DNA, 338 bp, Glycine max
  Clone ID: PAT_MRT3847_120561C.1
tagggagcaacttgtacaccatcatatttaaatatgcgggggaccccgtccggcccccggccgactttctcgttggcggaccccaaccccccgccccggccctccttttaccacgccccgacagggaaaaccctggccgtacccaaacaacgcggcgggcgggacaaccccggcgcgcccccacgcaaactaccggcaaggcccgccccgttcgcccgttcgcacaatagcgcagacggcctggccgatgggccgcgccctcaggcggcccatctagcgcggcgggggggcgggccacgcgccgggggaccaatacccgtggcaggggccgatacccc

SEQ ID NO: 22769 - DNA, 460 bp, Glycine max
  Clone ID: PAT_MRT3847_120562C.1
cctcgtgccgaattcggcacgaggaggtgcctggtctgttacctgcaaatagggaagagttcaacagcattgattctattgaaccagatcctgctgaatgaatacaacgagttgccatgttgtttaaagaatggtataggatatgtgaacttcctggtgccaatgatacagcttcagcccactttatcttacaattgcatcagaatgggctgcttaaaggggatgatgttacagatcactttttccgacaattgatggaactagctattgcacattgcttatccactgaggtgattaattcagggtcactgcaatctcaaccacagcagacaatgtcatttcttgcaattgatatttatgcaaagcttgtcttctcaatcttgaagggatcaaacaaacttgttcttctttccaagattctggcagttactgtcagattcattataaaagatgcagagga

SEQ ID NO: 22770 - DNA, 341 bp, Glycine max
  Clone ID: PAT_MRT3847_120563C.1
caccttcactgattcatagattatagtcaatagtagttatgaggttatccccatgcatctacaattctaaattgcaccctttttggaaaatggtccataaagttatcggcttctgatgaattttactgttgacctttttatatgttctttgtatatatccaaacttgtttatatttaagagatcaaaccatatctcatgcaattgatcttgtctgctcttgttctgtgcaattgatactctagatttagttctttgcaggaaatgtgcagccatacaagtttatcctccccccgacttgggaacaggctcgtgtagcaaatatattatctggaaattactg

SEQ ID NO: 22771 - DNA, 339 bp, Glycine max
  Clone ID: PAT_MRT3847_120564C.1
acgaccacgcatacaatcatatccaaacttataaccatagataccattcatcaccaaatcgatgagtatattacttagtcgcttcgcaataactactattaaccgtccttttatcctatcatcgattctctcaccaaatcatctatctaagagtatttataaatatcaatttatgaagaccccactgtatatctattaatatcgcattaaatttcgcattaatcttattaataatgcattttatactacatcactttctcccaaactatctcctaaatttatacataccctatcatattatcattgcactaaacttataaatactcctactcctactta

SEQ ID NO: 22772 - DNA, 372 bp, Glycine max
  Clone ID: PAT_MRT3847_120565C.1
tatgatgaaagttcgaccttgaaactttatttgttactcaaaaactcgaggagaagctgtatactgcgcacgtgactttctccatacttagttagagctgactatgctagatcattacgcctgccggagattacgcacttgtcttgtcacacttcatacagacggaactattattttgagcaggggtatcattaagttagttatagatggtccgggggagtacgctcccagtaaatgtgtaaaacccacggggttgaccagctttaaagccctgtttgaccaccctcgtgagccacctaccattgtagacaaaaggcccgttgcttaagctccttgtcgatcagaggtgaattcagaattgtgtaggggaac

SEQ ID NO: 22773 - DNA, 649 bp, Glycine max
  Clone ID: PAT_MRT3847_120566C.1
gtcgagtttttttttttttttttttttttttttttttagcaaatagaagcagaaccaatcttgaaatgaaaaacagctcgataacatacacaggttgtatatattgtcacaatcatactgctacataatttagagttcaatccaagtacttaatagggtagtggaagttgatctatattggggctggtgcttcatcattgacactgtattgtctttgcaatgctggattttacacaggcaaatagtgaaggatgatgcttttgcttctttaacttgactccaaacaaaaaagacctcaagggtattcgagcacgactactggagtgtttcatctggccattattcttaggaacactactgttaacaccaatagcttcatctagctcatctagtgtcttctcaacatcatttttcattcccttcacaagggtaaggcctgcttgcagttcacttgcaaccttgctgttctcttgcttcatgttgagaatctcaccctgaaactttgcaacttggtacttactaattagctctgccgtgtcagcaccgggatttgtgtccctgctcttgctatctcaatcttgatgttgctcatagatgcgtacctttccttgagttcaatcttgcaacactgcttgggttccacccacag

SEQ ID NO: 22774 - DNA, 249 bp, Glycine max
  Clone ID: PAT_MRT3847_120567C.1
aaaaaaaaaaaaaaaaaaaaaaaaaaaaaaaaaaaaaaaaaaaaaaaggaaaaaaaaaaaaaaaaaaaaaaaaaaaaaaaaaaaaaaaaaaaaaaaaaaaaaaaaaagggggggccgccgactagggagctcgccaacccgggaataaattccggaccggtccctggaggggtaccagctttcccaaaagggaggcgtataaaagctgggggaaataagggccaaagcggttaccgggggaaaaaggta

SEQ ID NO: 22775 - DNA, 636 bp, Glycine max
  unsure (1)..(636): unsure at all n locations
  Clone ID: PAT_MRT3847_120568C.1
gatatttcatgaagatgctgaggcatnttaatcataataaagatcacctctccaaccnataacattttcaaagaactaaggcagacatctaaagaaaggaccaccagatgccaaatgacatgaaggaaagtaaagtgtgagctttttttttttttatttttttttggggggggggtgacataaccataattatattcagtaaatatgagtaagaggggcaaaatcatagaatgatagtgtcaaatatttaagctttaggacatctacttcaaaagttgaacactaaatggcttctcgtttcagattttcaataacttccgcaatctatgttttaacacacaagaagaacctatcaaaatcatgaacaatgcctaatgttaaaactaaacaaatcaacactacaaggaagtaattctcacaattttcagttaacaaacaaacaacaacaaagcctttgtttgtgccatggttgtcacgtcaaactcttttttagatgcatcaataaattattggataaagtgaaagcatcttatagattgaaaagggaacaaaattaaattcaaatttaaaaaacctggggggaaaaacctcgagcccccccctaatccatttgagttagcaaaacgnacgagtggg

SEQ ID NO: 22776 - DNA, 527 bp, Glycine max
  Clone ID: PAT_MRT3847_120569C.1
gcaagttctaagctctagagagaggagaaaaaaaagggaaaagagaacacccttatttccatttctaaaagagttcattgaagaaatgaagatggatagtgcttccatgacaggctcaaagaggaggatatcatccaacagaggaattggaggagtcctcagagagcaaagggcaaggctatacattataagaagatgtgttgtcatgctcctctgttggcatgactagttttttcaagacttgaagaagttccacaagcagcatggcaatggaagaaaagttcttctttctatgtttcttttcttttattccttgtttatttttttcctctttttctcttccttttttctttctttgctctctccctctgattcatggtggagtgtaaatagaaacggcgagatatcatgggagagagtataacaagttttgtactatggggttgctggccttcatggctgggctatatatgtatatcggaatagcgtggattataatgatagctatatcaacaaatcatatctcc

SEQ ID NO: 22777 - DNA, 657 bp, Glycine max
  Clone ID: PAT_MRT3847_12056C.1
gaaggagaaagttgtgcctttgttgatcactttaggctttcaaattctttaattaacaataataaagccattgtatttttttaaaaacaaataaaaagtaaaataaattgagaacaacctataatagcatgtaaaatccattgatctacagtggaccatacgtgtgttgatggtccattagagatagggacatagggactacaatgtgttttgatagacatgggtagtagtcagtcatttgtcctgcttggtaaatacctaccatgtgcctgctttgttacctgcacggttttgtgataagcaaatacccacgaatgtcatgagtattcgtggatatttgcaaaaaaataaaaatagcttaaaaatattttaaaaaaacacttttgttatgatttctattttttctaatattttatttcaaaaaataattttaatagctacaactaaaattattcaaatattttacacaattaaaaatattcattgataattcttaaaaataaaaaatgaataaataaaaaaattattttgttaccttcaaataaaattatctaaaatttactttacaaaatataaataaaaacaaagctacactaaaatataagtctaaataaaattatgctaaaaaaacataaataaaaataattaagtatttta

SEQ ID NO: 22778 - DNA, 525 bp, Glycine max
  Clone ID: PAT_MRT3847_120570C.1
tctcccggggtcctcacacaaagttaccaagtttatttattaagctcaagagagaacaccctcatttccaattctaaaaagagtttattgaagaaatgaagatggatagtgcttccatgacaggctccaagagaaggatatcatccaatagaggaattggaggagtcctcagagagcaaagggcaaggctatacattataagaagatgtgttgtcatgctcctttgttggcatgactagttttttcaacacttgaagaagtccaacacaagcatggcaatggaagaaaagttcttctttctatatttttttttgtcttgtttcttttatctcttccttttttctttctttctccctcttattcagattcataatggtggagtgtaaatagaaacggcgagatatcatgggagtcagtataacaagttttgtactatggggttgctggccttcatggctgggctatatatgtaaatcggaataccatggataataatgatagctatatcaacaaatcttatgtccg

SEQ ID NO: 22779 - DNA, 585 bp, Glycine max
  Clone ID: PAT_MRT3847_120571C.1
tttttttttttttttttttttttttttttttttttttttttttttttttttttttttttttttttttttttttttttctcccagaaaaagttttaaaaataaaaggcggagattaaaaattaaaataacccgaactttatccaaaagcgcccaattcccaaacataaaaaaaaattttttttaggcacccgggggctaaacacccccataaaaagcccaaaacactggaactgggggaaggggaaaacaggccccctttttttaaaggggggggggtaaacaaaaaaccccagggggcccaaaacccatcccagacaaaaaccaaaggttttaagccccccataaaaaggtaaaaattatcccaaaaaaagggctatctcgggtggaagctggctccccaaacacctaatttgaaagggcaggggttgaagaaacattttggcccaaattggaagccatggttctaagggggcacccccatttaagccccctaaaatggaccctaaaaaggggccacccccaagacaaagggctggggggggggggactaagggaacccaaagtcggggaacatctggcagcggc

SEQ ID NO: 22780 - DNA, 436 bp, Glycine max
  Clone ID: PAT_MRT3847_120572C.1
ggttctggtttgggctaaagggccaaggatatcacggaccaccaacgaaaaaaaggaccaggggggtgcttcgggggcattggaacccaaaaaaaaaaaaaaaactacgaagaaaccccccctttttggggaaaaagggggaattatcccttttgggcaaaattaaacttttgggaaaattaacaattcttgcgtaatgttccaaccccaagataggggaacaccccccaaaaaaggggagggggaccaaaaaaccaaaaagcaccggagaggggaaaaacccccggaggggggcaaaccccttggagaaaaagaaagaagttgtggacaacggaacacccgccggggtggggaccactggcacaaatacaaccttctttccaaaaaaaaaaggaccaaatgcccgggccgccggcccccgggggaactttaaaac

SEQ ID NO: 22781 - DNA, 439 bp, Glycine max
  Clone ID: PAT_MRT3847_120573C.1
cacgcgtccggtttctttgccgcaagaacaaaagtgcttttgagaattctgtcccgagaaaagctctatattttgtgtgctaaccactgtgccactatcccgagacgagtagaaaaccctaattattcgagaatgaagttggagatagaggacataaccgtgtacttcccctacgacaagatctacccggagcaatactcgtacatggtagagctcaagcgcgccctcgatgccaagggccactgcctcctggaaatgcccaccggcacagggaaaaccatcgcactcctctcattgatcactagctacgtcctttccaagccccattcccctctcaagctcctctactgcacccgcaccgtccacgagatgggagagacgctcgccgagctccgtcttcttcattattaccaacttcggcacctcgggcccggcggca

SEQ ID NO: 22782 - DNA, 513 bp, Glycine max
  Clone ID: PAT_MRT3847_120574C.1
aaaaaaaaaaaaaattatgggtttttttatttaaataagagcagaacaaatgtataattccaattatcgattaaaaaaggcttcacgggaaggaaactcaaacttatctataataggaactgggcctttataaactaaataaacaagggggccggtcaagaacggttctaaataaaaattttaactatcttctccggagaaaccaagggcgaaaccctacaacctttttccggcggtggcgaaattttttggggggacttctccggccaatatgccgcctttggcacccgagggaacaggcggggccacgctgccaccgggcattggtccggcttgccctggtacctttggaacaggtccttcgcgggcaggttgaacttggggaaaacggttccggtaatgccaaaggggggggtcttgggagggggggtaagccggtaaacgggggccccgaaacggtcggggttgcggttggggatacggacaaacttgtaaggaacaagggggaacttt

SEQ ID NO: 22783 - DNA, 330 bp, Glycine max
  unsure (1)..(330): unsure at all n locations
  Clone ID: PAT_MRT3847_120575C.1
ttntgcgttngtctgtacgntcatctttgngtttcggnntcgtaggngggttgtcgtgnncgngtgtgntgngggntnntgtgtttggtggtggnggttgngtttgtntntntgtggtttgnngtggntgttttgtnggaaggtgtagngttggttgggggtnnntggttngtgtggnnggtttncctgggtgngtnttgtgnngttgggtttnngtgncntnggagtagtgttttgtgggnggtgtgttgnttggtggngtggtgtgtcgtnnccgttgngtntgtgcgtgtnntgngnnttnngnttgntggtttngtnnctttttgt

SEQ ID NO: 22784 - DNA, 1110 bp, Glycine max
  Clone ID: PAT_MRT3847_120576C.1
cttcacgcgtccgggtgtcgcaatgggtgtcaggggcatcaggtttacctttggcaggattctgttttatgattttactcagagatatcttctgtaatttatttctattttaattctgatgtttccccaatcattatagatttcactttaggaaatgcatctgcatctgattatgtggacctggaatcaactgaaacgtggcttgcggattactttaatgatgctgagatggatatcagtcccgaggaattgaaattttcagtggcagatgatgttcaaattgatggtacagaggttagtgccatcaaaccatcacgtgaacaaaatgtgcttcagcatcatgtcacccaaactacccgaaatattatcttcaaaggaggaaaatcatttatagaaacaccgacaaagctagctgctgtggcctatccatttaccttcattaaaccctgtggtgcccatgaagatgtcactctagataaatcagcgcattctgtctcccccacctcctttgaagtcccaacaaagtatggaagatccatcagcttacccaaaatcagcattttctgggaagcccgtagttggaaaaacaaaaattcacattgaagggggaaaaggtagcatcaccattatgagaaccaaaggctaagccttaagtgttcagtactaacttcttcttgggtctggcttcattttctgtatgtaaaacacctggtaatttataattgttattgcaatttttgttcttattggcatctataaataacaccaccttactaccttagtgtttgtatcctaggtgaggaatctagatgactgtggcatttctcttggtagatgtttttctttgagctaactctgcaatgggacttttgatcagtcccgatgctttggctcatattaaaaactaatgtaacttgctttagaatttgaatctatgatatatatgaaaatacgttttagtttcctctattgaccgtttcaacatgccattggcaccctgcctggtagtattggggggtgtctccgcattttaccccatattttattccaaaaataaagtatgtttacagtaatgcttcaagaagatgtgagaagcaagcatgatttaca

SEQ ID NO: 22785 - DNA, 730 bp, Glycine max
  unsure (1)..(730): unsure at all n locations
  Clone ID: PAT_MRT3847_120577C.1
acccagaaanacgangaacgcgctgagcgccttgctgcactaagccagagcttcgcttctgttgaagattttggatttgcagatgaatgtgctaagcgcagttgtcgcgctaagcgtgttcatcttctcttttgagttatctgttgaactcgctaagcgcgactgtgcactaagcgagtactatgtatcaaacacttaggatttttgtgtttttgttgggcgctaagcgtgcttctcatgctaagcgctattatgtctctgtttttaaatttcttagaattacgcttagcgagcctgctcgctaagcctatgttgtctagtttagtagttgcgctaagcgctaatctttatctgttttaaaaatttatggaattgcgcttagcgagcctactcgctaagcccattctacagaaaaaaaaaatattttctgtgttcacatgccaagcgcgtgtctatcgtgcttagctcatgagtaaaattttataaggcgcgctaagcgcccagccttaatttcaattgtatttcctgcttttcactttgaataaatcttttctaatcttgtcttatgattcttttgttttttagatggcttcccgtaagagaaaaacaccagcttcagtgtcccaagcatgatatgacatatcaaaattcacatcacaagatgcctgggacagatacgcaaacaatgtctttagccggaagatccttccggaaaggaatgtgaagttgt

SEQ ID NO: 22786 - DNA, 318 bp, Glycine max
  unsure (1)..(318): unsure at all n locations
  Clone ID: PAT_MRT3847_120578C.1
ngtcgcangcacgcgtacgtaagctcggaattcggctcgagncggctgcgagangnnanangnggngancncnannntcncncgcgntnnnntngagnngcacaacacaagagagagtncnnagctctagantgtgngngggnnannngnncagnnncncnnggnggctcgngtgtgaaactnnanatgccntanncgcaagananngtgantttaaangtgnntatanngcnggtntttgagagngggtcncccgagnnncgnnaattntcgcnnccannntgtgnacnaggngcnnccgcnatgnncngagnnncc

SEQ ID NO: 22787 - DNA, 400 bp, Glycine max
  unsure (1)..(400): unsure at all n locations
  Clone ID: PAT_MRT3847_120579C.1
cgaacgcgtgggaagactaattgggttttgtggcttgctttgatctncactggaaatggcggcgtgggagcccaaggccaatgcacactatcctgggccttccacaccctagtctacacaacactatatacaaatgtatgcggcacatgctacttaataaccacctccggttcagcttctaccaccagatagcactctaacgacacaccgaatcaagtgttctgcgcctgtcttccatgcttcgttacttgcaccacccgcatctcctgcctctgcctgtgctgctgcagcgtttgcaccacccgcatattctgccgctgcctttcgtccttcggcatctactaaagcagacactccttcgtattgaatttgcatgtgccttttaaacaccaccagcaac

SEQ ID NO: 22788 - DNA, 253 bp, Glycine max
  Clone ID: PAT_MRT3847_12057C.1
tgaaacatttgaacatggctgccacattcgtctctcacttgtcgcttcttcgatccaactactaccctgtctctcgctcacacaccctctcgcttccctcattctctcaccaaccgtgtcaaaccctccctctgtgtggtatctgttgccaaaatgggaagtggagtggtgccaaaggccaatgtgaatgcctttgatgccaattcggggttctccatttcggctaagaagtccaacaagaaccccattgttg

SEQ ID NO: 22789 - DNA, 1191 bp, Glycine max
  Clone ID: PAT_MRT3847_120580C.1
atggccaatcacaccactattcttaaagaggccttcaacgttgaggtacccataaaactacctctgccatttcctcccagactagggttagacagaaccaaacactgcagataccatcgcagttatggtcacaatgtaaaagattcatgggatttgaaagataaaattaaagagctcatgcaggctgaatatctagcccaattcatgaagaggcctgacaatcacctagcaggacttgaacccaaacccgggcaatgtacacagcttagcaaggatcttaccaaccatgagtacacacgtatagttgatgtcctacacaggaatacaaaccaattcatgtggcagctatttgacatgccaggtatccaccccaacatcatatgccacacactggccattttgtccccatgccaagccaatgtcattgaagaaaaggaaaatgggagaagagcagtgcatggcagtcagagaggaggtggacaagctactaaaggcccagtttatcagagaaatcaagtactctacctggttcgcaaatgtcatcatggctacaaccaaatcataatgcacgccctagatgacgagaaaacaacattcataaccgaggatgacttggaagaggtgttcgaagaaatccgcaaatatgacatgtgccttaacccagaaaaatatacttttggggtcagcagaggaaagttcttgggtttcatgatcacacatcgaggaatagaagccaaccccaacaaatgcacaaccatactagggttgcacaaccctaccaacgtccaagaagtccaaaacctgaatggtagacttgcgtccttgtccagagaaggtagtgttgtcactcataacctcggcccgacgcctcaggccgtacttcgaaagtcaccaagtggtagtcatgatgaactaccttatcaagccagtgttgcaaaagcctcagttggcaggaaggatggcagcatgcgagcattcgctaagcgcgacactcagtggctaagcgcgaggaagaatctagaagaagatgagttgtcaggttcactgagcgcagtgctccaggtcatcaagtgcaccacttcagctcatccgctaagtgagagaagcgtgctaagccaaaaatcactaacgtgcgctaagcggtccatacatgcgctaagcgcacgagcacaaacaaggccacctatttaa

SEQ ID NO: 22790 - DNA, 126 bp, Glycine max
  Clone ID: PAT_MRT3847_120581C.1
tgtgatttagaattatatccgtcactctttactttctaatagtgaggagggcccaaagacatttggcaatgcgcatatactagtaccctggagcatgcatccacttccatataaaacttttactgg

SEQ ID NO: 22791 - DNA, 566 bp, Glycine max
  Clone ID: PAT_MRT3847_120582C.1
acgagcagtcatcatcctgtacatttggacacgatagtacggctgcgagaagacgacagaaggggatggcagctattgtttattttctcctgataaaaagaggaagttgaagttgggttgctgcaacaatggaacctgctactaataacaatccttctccttctgctcatgcttcattacatgaaaccaaatatattgagagggtgaaacatgccctgatcgactttggagtcccagaagagctaaggttgtctgatcgtagcatctacaaggttccttgctatctccgaaaggtgaaggaagatgcctacactcctcagtgcatctcaataggtccaattcacttcaaaaaagaagaactcaagccaatgcaagagcataagctaagatactaccaattcttcgggagacgtgttggtgtctcagacgaacaaatggaggcatacaaacactaccttgagaccgaagaaaagcagattcgacaatgctatgcagagaaattccttgacataacccaaagatactttcgtggacatgatgcttgctggacgcccgtatttcatcat

SEQ ID NO: 22792 - DNA, 307 bp, Glycine max
  Clone ID: PAT_MRT3847_120583C.1
ctcgcacagaatcggctaggtgagacttccagtaggattatctacaactggaagtaactcttcacattggtcaatcagtggcatggtaaaataaccgttcgtctctctcctgacgatccatcattgccatatacttctgcaatggaacttgctactggcgtacgtgctggacatttactccacctgagtttcttgaggcataactgctgggggaagatgaccacgcaagtagtgggcatccctctcatttcagtgacggccaccctatgtttgaagtggggctctcgcaacagtgtctaaccactgg

SEQ ID NO: 22793 - DNA, 349 bp, Glycine max
  Clone ID: PAT_MRT3847_120584C.1
tccgatcaaaaacatcggcgctggaaggcctgaataggcgactcaccccgacacgtcgaaggcggctttggctgagttcatctcaaccttcatcttcgtgttcgccggctcaggctccggcatctcctacaactagctcaccggcaacggcgctcgcacccctgccggccttatctccgcctccatcgcccatgcattcgccctctacgtcgccggctccgtcggcgccaacatctccggcggtcacgtcaccccctccgtcgccttcagcgccttctaccgaggcaacatcacctttcttcgtggaatcggctacgttatcgcccagctcctctgttacatcatatct

SEQ ID NO: 22794 - DNA, 216 bp, Glycine max
  unsure (1)..(216): unsure at all n locations
  Clone ID: PAT_MRT3847_120585C.1
ctttacagaccttgtattgccggatagctgtcatcttacttgggaagaaccacgctctgccttttgtactagnnatcaattctcngctcgcggaaaccaccgttaccgacggcactgtcatcgaccttgaccgtaacttaatcggatttatgccaccatcggctgctcggtnntgcatcaatatatttttaggctgccactcttgctccgacagca

SEQ ID NO: 22795 - DNA, 236 bp, Glycine max
  Clone ID: PAT_MRT3847_120586C.1
gggggcgagaagcaagcccacccaaaaaacagaacagggcatagagcaagggcaagcgagcgagcacgggaaccacggcgaacggggggggcaaaaaacaaggcggcacccctgaacccaaagacaacgaccacgccacagactacagcaccgacgcccgccgcgaccaccagaaagagatgcgatacgaccgcgagcgcaaggacgccaacctcgacgccaaccgacaaaacaaa

SEQ ID NO: 22796 - DNA, 400 bp, Glycine max
  Clone ID: PAT_MRT3847_120587C.1
gagaaaacccgcaattccattgggcctccaaaaagggccaaaaagggccctccgggggggaccaaaaaaaccgctttttaaccgggggtttaatttaaggaaaaaaaaaggggcgaccgaaaagaacccccgggcggggcggtcccccccaaaaacaacccaaaacccccagcggggtcgggggggggacccaagggatcctaggccaaaaaaggccgggggggcgccacccggcaacccccccaaaaaaaaattgggggggggaccccccccccctgacaccgaaaaacccccttgccaaaacaaccctccaccgggaagggggaaaagacaagacccccaacccggcgggtaaaggaagcgccaaaaaacacgggggagcctggggcggggggcccgg

SEQ ID NO: 22797 - DNA, 267 bp, Glycine max
  Clone ID: PAT_MRT3847_120588C.1
cttaatatgtgatactttgatgggtaaaggggaaaagcagcaggtaatctacattctcattgtaagtagctactgcttgattgtctctttctgctgctccatatttcattacatctgtgattgcactactgctaggctagattcaatatttaattgcttgttcaaaatagctaggaatgcatattattattctttttctcttggaccaattaaagatacatttttccttgtgaacacagcataattcttattcctagtgatctttgc

SEQ ID NO: 22798 - DNA, 262 bp, Glycine max
  unsure (1)..(262): unsure at all n locations
  Clone ID: PAT_MRT3847_120589C.1
ttattaattaattanttaccattagnaatatagncacaacatttttntgcatggggaggaggatgatgcaatggaacaccatcaccaaagcttcaattctcatcaccatcaccctcccacttgattctccccgtggccgttaacngcatgaggctcgaactggtgcacaggcaccacgagcnttntcggcggcggcggtnangtggatcaggtnnagcgttacaggnttcctaaacgggccgcttggggggnaagagttant

SEQ ID NO: 22799 - DNA, 151 bp, Glycine max
  Clone ID: PAT_MRT3847_12058C.1
ggctgggtcacagatcttttatgagggaggacttgactacttgggcaacccaaacctgatccatgctcaaagcatccttgccatctggactgtgcaagtagagctcatgggttatgtttatggttacaaagtcagtggacgaccccttgga

SEQ ID NO: 22800 - DNA, 389 bp, Glycine max
  unsure (1)..(389): unsure at all n locations
  Clone ID: PAT_MRT3847_120590C.1
agtaactaactgactgactgactgaataggctgagtagttacagggccttgtataaataagcaattgtaaaatgtaaacaaggcaagtggtgggaaagtaatagtaatgtggagaggtgccgaggtactcttatattaacctccgaaagtgtatttgactgttcggtatagtgattagacggaggtaaattaatagaagtcttttggtttcttgagtattcaaatctttttttctcttttaccagttggttctattggtatcttgtaataactctcttagttgaggttgatgattagatgcactcgattagcattgtggttgtttacaatattaatagttctctatgccatggaagttagtttacataaggtattcagcanacatactg

SEQ ID NO: 22801 - DNA, 397 bp, Glycine max
  Clone ID: PAT_MRT3847_120591C.1
tagcatagtagctatgacatgcacatcgctcccttagctcggctcgcaattcgagtcgaggagagtatgaggcatgcgagaactcggagtaggaaattgatacagtatcaaggaccaaagcgcaaactctaaaggataaaaactgcggttacagctcatgactgtttcattatttaataacgatactgatactgaatccgcaagactactttcaacttacgaagctccgctggtaacgtcgcctcaataagaccgtctgtgaagtgactccattgtctcggactcaacatccatacccggcaggatacggagggtcaccagaagacaacaggcggctcatcgacggaaacgttggcagcaacaccttgaccatagcaataaccatgaccggcctcgt

SEQ ID NO: 22802 - DNA, 1021 bp, Glycine max
  Clone ID: PAT_MRT3847_120592C.1
gaaaaacactgtatctgattacctcaaaggacatacagacacactacacattcttctcgtatacaaaaacctcaatcttcacaaattcacacttttttctttcttctctctcacttctccgtagatctactttctctctctctctctctgagaaatgtgtggggtctcgcttctggcgtttctgcttctgctatccctctgcgccgaagcttctgttcacgactacagaggggagaaattcgccgccaaaggtaacgcctttgtcgtccatggaggcagcgaaggaatttacgcttctgcccccaacctcaccgacgcttatccaccgccaaatcccgactcttacatacggtttgaaaggattacatttaggagaaacaaggacttttctaactttagctcatggcctattcaagctgttatttttgaagtagaagatagagagacaattggtggttcagcttatggtggtcaaagggctgtctgctgcaccggtgatctagcaaaactaggtgtgtgcactgaaggacaggtcatttaccgcccttctgtggagaatcccgattggcctcaagtttttggtgtctcttttgaaatggatgatgaagtggcagtgctgccgttgaaatctatacagatcacaaaaactgggatgtataacttgtatttcatccattgcgatacgaggcttaaaggattgattgttgaagggaaaactgtatggaaaaatccctccagttatctacctggtagaatggcgcctatgaaagttttctaccaattcatgtcttttgcatatgtactgcttgggatcttttggttctctcaatatgctagattttggaaggaagtatttcccctgcagaactgcattaccgcagtgataaccctatgcatgtttgagatggctctgtggtactttgactatgctgaattcagtcagactgtaatcaggccaactgtgacaaccatatgggcagttacctttgggactgataagcggacagtggctcgtttggta

SEQ ID NO: 22803 - DNA, 648 bp, Glycine max
  Clone ID: PAT_MRT3847_120593C.1
aatactaatcaacatttttttattatagtttttcttgagacgattattttttctattttcaataacttgaatgtacaaaatcctagtaaaactgacttccaggggtcaaataaggagcctcatctgtgctgagccaatccccaacaacattctgtgtctcaggggtatcaacgggacaaataggcctaattctcactcttggtttactggttggcaactaagtagtgcttccttcatggcgacatctcttactcttgccatctctagttcatcaaactttcccttcctaactcttgctttcaccacattctattcactctaattcccatcatgcttttgtatatatgatcagttattaatatatcagtgagtataagcacaggagtactatgcattagaatcataggtactaccactattgctcaaagtattagatgaactatgtctatggttatgctaaactaagagcctagtcaatctctgcacacagcatcatttgtctcttctgaaatttgctttcgtctgaagacaccccacaaataatacttggcttcaaatctccaatatttgattggaagctcgatagaatgaaaaattaaaagctctgcttttttagccaccaattttatggcattgctcatggatcat

SEQ ID NO: 22804 - DNA, 284 bp, Glycine max
  unsure (1)..(284): unsure at all n locations
  Clone ID: PAT_MRT3847_120594C.1
gtcnccaanaaataagaagatatacataaaaataaaacacaccctctacgtgtccacactntatgagnnnanganancngcntaattaaatgtctatatataaannccttnaggcantccactatgacgggcanntgaaatttttcatangatgaagganaaagttttgggattcatctgatcnngnttncaggtaaaggaaagagcaagatgaagangcncataantncatggctttcattggtaagggaagattaggtcatgccaggaagatatgtgttgtt

SEQ ID NO: 22805 - DNA, 406 bp, Glycine max
  Clone ID: PAT_MRT3847_120595C.1
atctatatctttgcataaaaactgtttgatgtgtgtgtgtgttgatattcctcgcacagcttgtgctgcattggacagtgctaggaaaagtaaaataaaattatcatgtttaagaggaaaactacaaattctgggtgatatgatcctcaaagcacaatgatcctcagactaacatggttacacaaattgctgaaatgtctgatgagcctcaagagctgtacttctaaatataacagccacttgaacactagctgagtttgagtaggaaagctgaccaagcccaggaattatcacaggctgccagctcatcgggtggggaaacttacaagctgggccaaattggcgaattccatagcgactgtgatgggagcagacactttggtcaggtctcaaaggcagacccttg

SEQ ID NO: 22806 - DNA, 317 bp, Glycine max
  unsure (1)..(317): unsure at all n locations
  Clone ID: PAT_MRT3847_120596C.1
aagcncaaaggcagggcancagngcgannggaaaanngcaaccaaggaaaaancccccancanggaanangnngcncnnncaaggaagncacccaggcccagnnngaaaacagggcnnancaccgggaggggggcgggcacngaaggnnnngcagnnggaaggacannngcagcncncaaaaaccacaaagngganggaaanaaggaaanganggcaanngggnnnangaangnggnnggcncccccaccccccgcngngnnacaacaggngcccgcncncgaccagcggggaacaanaacgcaggagcaaaaacag

SEQ ID NO: 22807 - DNA, 368 bp, Glycine max
  Clone ID: PAT_MRT3847_120597C.1
ctattttcgggtggagattacttcaagacagattaccaacaaaatgtaatctgcgaagaaggcaagttcagatctcggatgctttatgtcctttttgtggtgttagggatgaggaggtgtcccacctattttttcactgcacaaagatttggcctatttggtgggagactatataatggctgagtatcactacaggcttcccttccaatccagctcagcatttccttcagcactcctttgctcaagtggaagggttaagaagaagtaggtggcaaagttggtggatggctgtggtctggtctatatggaagatgaggaacagaattattttttccaatgattcttttaatggtagtaagcttgtagac

SEQ ID NO: 22808 - DNA, 367 bp, Glycine max
  Clone ID: PAT_MRT3847_120598C.1
aaaggggcaaatgggatatttattccacaaattaaaaggcagggttttcggcacaggaccaaatcttcccaaaaaaaaatcactggggggctcataggaccccaaaggacccatcaggactttgatattagggggggaacaatccatgctactacgggcaaggggcccccttccctaaaaatatcataaaaaggggggccagggggaaaaaccccaattagctttacaaaaattatggcccaacaaagaaacaagaaatggcaaagctcttcataaacaatgggtttcaaacttttgggggaggcattccaccctggagccttccttccctattccttcaaacaaaaaaaaggcaaactgatttcca

SEQ ID NO: 22809 - DNA, 690 bp, Glycine max
  Clone ID: PAT_MRT3847_120599C.1
ctttttttttttttagacaaccacacgcagtggttacatagattatgcattttaattttgttttactattgtcttttgtttgtggcgttcgaggagcagaggactcacccctacaaccaacaacttttaggtattgatgatgtcgagtacactgaggcgtcaacgggctcgatgtagctcacaaagagaatgggtatggccctacaccataacgcggactacacgttacacctgccatactcgagtccacgtagtgctagctgatagaccggatacagcatgcatcgagtacactgagtggaggttatagagaaccaaggtgaccattcatacatgttgtccaaggagatggaggagtaccaagaactactaaagcaattggaactgacgtctgaggaggagagtgacgattcttccgaggacacgtcttagttagttctatacttctagtgagataagtggtctgctttgctcctagtttctttattggtttgatgtattttgttttaggagggatgaaaaatatattttgtttattatcacactattatggattgtatttgtatatttctctgtgaccctacaagttttattttagttatgtatgaaaattgaattactctacatctgcggttattttaattggatgcaactatttagcattttccgactatgggtggttgttttttt

SEQ ID NO: 22810 - DNA, 210 bp, Glycine max
  Clone ID: PAT_MRT3847_12059C.1
tttttctttctctctctctctctctctctctctttctttttcctttttacctatcttgtgagctatgtgatgagtgagaaaaacaaaagtgagaaattgtgcgtgtatctggttgctaatactagtgcttattagtctgcggtatggttggtttgttaccccgctacttgggctttgtttgattgtattttatcctagagaaataaaaat

SEQ ID NO: 22811 - DNA, 276 bp, Glycine max
  Clone ID: PAT_MRT3847_1205C.1
tttttgacaacatacatactatgggcactcggaatggattgtttattcttgcattcatacacacacaaacatacacatttttatacattgacaattaagtaaaacggtggttcagcacttgctcagagctgatgtataataccttacgcaaaaaactagagcattgaccattttagacagtatatttaagggggttgaggaacggcaataactggatacagggtacaacttaaccggcatctctggggctagaatgtaaaaatataataaataatg

SEQ ID NO: 22812 - DNA, 577 bp, Glycine max
  Clone ID: PAT_MRT3847_120600C.1
ggctcgagcaagttttcttccttcccttcagcatagccaatgttgttcactatgtttacaagcctattcgaaagcattcggactacgaacctattcgcctccaacgcttagtggaagattatattggtgttattgccaataagtatccttattggaatagaagtgaaggggcagaccatttcttactatcatgtcacgattggggtccgaaagtttcatatggcaaccctaaactcttcaagaacttcatcagggtactttgtaatgctaacacctcagaaggattcctacctaacaaagatgtgtcgatacctgaagtgtatttgcccaaaggaaagctaggtccacctaatttggggcaacgcccaaatgaccgctccatactagcgttttttgctggtagagaacacggtgatattcgaaaaatcctattgaatcattggaaaggcaaagataacgacatccaagttcatgaatatcttccatagggcaaaaactacacccaattaatgggacaaagcatgttttgcttgtgccctatgcggtatgaagttgcaagccccagagtggtggaagc

SEQ ID NO: 22813 - DNA, 234 bp, Glycine max
  Clone ID: PAT_MRT3847_120601C.1
agagctgagagagcttcgaatcgatactcagaagtagaaagatacacaaatcacaatcgttatggctaggtacgtccgagcaatcaccttgttctcccctgtcggccatctctttcaggtcgagtacgccctcgaagctgtccgcaagggttacgccgccgtcttggtccgcggttccgacaatgttgtcctcggcgtctagaagaaatccaccgccaaactctaagactccag

SEQ ID NO: 22814 - DNA, 236 bp, Glycine max
  Clone ID: PAT_MRT3847_120602C.1
tgacatagctggaacgctggcacgcacggaggcgccggtccggaatcgaccgacgcacccattcgcgcgtttgcaggactcccccacccaacggaatcattgacaaaccggacgggctatacctctatacacaaacgtctttgtactatcactggagcagagcattctaatcgcagcacatattaagggtgctacagcgcacttgtatgccaacactatcagggccccccgtttgc

SEQ ID NO: 22815 - DNA, 1756 bp, Glycine max
  Clone ID: PAT_MRT3847_120603C.1
cggctcgaggcatttacatctgaagaagtatatctgaaggtgcttgatctgcaaaccaaggtactcgtctcttctacttgtctaaatcacaagacagtgtaattgcatgtgattttacaggtctaagaaagcagcgtcattttttgttgatgtacatttaccgcttcgactgaaataacagagtgggtggaagtcgctaggaagaatttgaccaaacagaattcaaccgtttcatcaaatgtttcaactgaatctgctgcgggtaatagttctgaagaaaacaacgaaagcgtgcaaactgatagtggggttaataagacatccaacattagttcagaggagcaagctgctgctgagcctgctacagagaaaaagctgaaaaagcggacctttagggtaccattaaagattgtagagaagataactctggatttggaatgtctctatcacaagattttcttgctgaagccaaaagaaaactacaagtactagataaaaaagatgcagacagaaaaagaacagctgagttaaaaaataatttagaaggatatatatatacaactaaggaaaagattgaaactcttgaggagtttgaaaaagtttctacaagtgaggaacgccagtccttcattgagaagcttgatcaggtgcaagattgggttgtatacagatggtgaagatgccaatgcaacagagtttcaagagcgtctagatcagttaaaagctgttggagatccaattttcttcaggttaaaagagcttacagctcggccagcagcagttgagcatgctaataaatacattgatgagttgaaacagattgttgaggagtggaaagcaaagaagtcttggcttccacaagaacgagtagacgaggtcataaaaagttctgaaaaattgaagaattggttggatgagaaagaagctgagcaaacaaagacttctggattcagtaagccagcatttacatctgaagaagtatatctgaaggtgcttgatctgcaaaccaaggttgccagtattaatagaattcccaagcccaaacctaaggttcagaagcccgtaaaaaatgaaaccgaaagcagtgagcagaatacagagaattctgattctaactcagctgatagttcctcttcaagtgattcatccgttaacagttcagaaggcacaagcgaagagacggtaactgagcaaactgaaggtcatgatgagctatgattaacctggcatacatgttaggccggtttgaatcatctacctgcaacgtttttatagtcagagatgtagactggtaatggtagaattaataggtgaaaaggaggcagtgtcggttctcggcgagcaggagaatagagttgaggcaacatttgctggttgagttctaaaattttgaggttagatggctactactgtagtagatgatttattacccttttatatttaagggggcaacttgtaatttgcagtcatatgaaagcttgtatttgccgaaacacaatgtgataggggaagaaaaaaaaagaaaaactcacgagatttgatttgctcagaacatataggaattttgcttgagtgactcgtaattctaaacgatttttgtttttaattaatttagcagatacatcttatcttatttttaattttcaagttttctcattctgtcaaaaaaaaaaaaattaaaaaaaaaaaaaaaaaaaaaaagtttcaagagcatctagatcagttaaaagctgttggagatccaattttcttcagg

SEQ ID NO: 22816 - DNA, 406 bp, Glycine max
  Clone ID: PAT_MRT3847_120604C.1
gaaatatggaaaccaccacatcctctcctttttcctaaactcaatctaagttgccttcatcctcatcataggtaaaacactttttttttcattataatcatttgcgtctattttataatcctatttcgtttcttcttgtttcctcttacctggggtgttataatatcattcctgttatggaagtgttgaagaacaatcaagaacaacaacagtagatgcaacagaacagaaatgccgtacacacagattttgcagcaaattgaaagggggagagagatgagaaagaacacacagatttacgtggttcacctttgatcaaggctacatccacccgagggaaaacataaagcctttctttattactgatgcagtatacaagtggaagcttattctaaaaaaacaggac

SEQ ID NO: 22817 - DNA, 275 bp, Glycine max
  Clone ID: PAT_MRT3847_120605C.1
agcgtagcgatgaattgtacttaacgattgcgctacgatgaagttcgatgacgggcactctcgtttcttgatctgaggaagttaagtgtactgcttcacgcatgtggcagatacacttagtgaggacataaaggatggtgattataaaggagactgacagacctgacgggcgaactccgaatcaactgatacctatggcctgcttgtgcggtatactgcatcgagcccatgggtcgtccagtagggctcagagagagaccacatagcttgctgac

SEQ ID NO: 22818 - DNA, 1325 bp, Glycine max
  Clone ID: PAT_MRT3847_120606C.1
aattcggctcgagagaagacgacagaagggggctaaataaattaacggagactgtagacgggggtgggtatttgaattggaggtggatgttttctgtgaccaatctatgcttggcggcggagtaaggtggttgcgctcctcggagcgattcaagtttctgacaacgtcattctccaccaacgccaagaccacttattattccttttgcacttcatcagccaacaagaacaacaacaaaaacatgatcgttgatgaaaggtatcggcagctggagaatctggacatggtgactgccgctaagatccttttcagcgacccccctaagaagaggaagtttgggtttgatttccatcttgtacagttcttttttgcgtgcttgccttccgtggctgtatatttggtggcacagtatgctcgttatgaaatgagaaaaatggaagtggaagtggagcagaaaaggaagctgaaagaagaagaagaagcgaaggaaaaagaaaaagaaatggaactaaaccctccagaggaaaaggaagaaaaatctgatccccagcttgcacaggtgaaagtaagacttgagaaacttgaagaggctgtgaaggagattgtggttgaaacaaagaaacattcaggcagcaaccttggagaaaatcaggcaactgatgatgagaaaaaacgcctaaattcttctgcaccaagggacccaagtaccactgattctgcatcaaataaagctgtagatgaagaccattctggtaagcatgatattctcaagtcaaagcccaaattacgtgaagagaccaagggttcagtagcaactccaaatccttctcttcaggatcccaagggaaaccaaagtggaggggcttcataaggtactaggatcttgagaaattttttgaagttcatagacatagttgatcaaaagctacagggttttatattgatatttttctcaagaagtgaatagttatttagtaatgtttcacagattacctaacctgtgaatcctccttcatctgccaaagaattttcaagttttattgggaaggaagatttaaatgggaaagctattgctggtgcattagttaagttgccatatgtggaatctagaaagcaattcctagttggactctaagctgtctgcaatcatgtaagaatccagtaaatagattttttctaggctatgatcattttgaatgctttggggagtgaactttggatgcatctcttcatcctctacctttaatgtaagtcctctaagttcagtttagttcttcaacatttttttattgaattaagtcctctaagttatttttttttatgcc

SEQ ID NO: 22819 - DNA, 285 bp, Glycine max
  unsure (1)..(285): unsure at all n locations
  Clone ID: PAT_MRT3847_120607C.1
atgacctctganatntctatattttggttctctgtgnatctacgatcangggtccaacggtccaaaatgttcggggnctgngcngtatgtntttcnnagttttagagctccaaancttcagatncacctcatttcgtctccagatcttcctttccnggataacgntttcggggtcgagnangcattgtggtgtttttnggtacgaaattgaggtaaacagattcggggancgttangctcaagtanngngcttgangtgcgcgngnannaattggcnaatttgca

SEQ ID NO: 22820 - DNA, 388 bp, Glycine max
  Clone ID: PAT_MRT3847_120608C.1
aaagaaaaaccttttttttgtttgatatggccgtttacaaaggggtgtcaaaaaaaaaaatggattcctttgcgggggccccccaaagggacacccatttttccctgccaaaaaaaaaggaatctttttttgggggagaaaaccccctcaccctttttgttatgggtttacccaaaaaaaggcccccccatttttgcggttgccccaaagcaaccccccgaaaaggggaatttccaaaaaaacccctttcccaaaattcctatttttaaaaccccccttttccccctcgggggaaaacggggttttttttttatcggggagtggttttaggccccccaaaacttctttacccagggggcaacccctttctggaaaggggttccccttt

SEQ ID NO: 22821 - DNA, 911 bp, Glycine max
  unsure (1)..(911): unsure at all n locations
  Clone ID: PAT_MRT3847_120609C.1
cagttccctacctctcctttcaatttgcagatcttcgccatgaccttcaccggaaagaccatcacccttgaggtggtgcagctgcaaatgcagtgagggattatcagcggaaaattcaagaaatgaatgaagaaagaaaaactctagacagggagttggcccgtgccaaggtaacagcaaacagagtagctgttgtggttgcaaatgaatggaaagatgccaatgataaagtgatgcctgtcaaacaatggcttgaagaacgccgattcttgcagggagaaatgcagcaacttcgtgacaagcttgctatagttgagcgcgctgcaaaatatgaagcacagttgaaagaaaaatatcatttacgacttaaagtgctagagattagcttagggattacttctgccattactcaaggtaaaccttttacaattttcaggaaaaatatcaattaaggcttaaagtgctacaggagagtttgagagaaacttctaacagtattaatcgcggcacctcagagggaagatgtgttagcaatgggccttctcgacgtcaatccctaggtggagctgataacatctcaaaactaacatctaatgggtttttgaagagatcaccgtccactcaaattaggtcttctgtgtcttcaagcacagttttgaagcatgctaaaggcacatctaaatcatttgatggtggtacaaggtcattagaaaggagtaaaattcttctaaatggaaaacctccaagttactcattcaaccagtcttccgaaggaaccaaagtcagggaagaaaaagataaatggaaaggaaattcagatgataaaccaaatgacttcccaacagtggatacagacgatagtgttccaggagttntgtatgatttgctgcagaaagaggtcttagccttga

SEQ ID NO: 22822 - DNA, 210 bp, Glycine max
  unsure (1)..(210): unsure at all n locations
  Clone ID: PAT_MRT3847_12060C.1
tctcgagccgattcatttcgagntgcntcgagctcgagcgctcgagtgctcgagccgttactacatatatcttgagacatcaagcgnactagnagcatggtgtaaggctctccatctggcttcgtctgataaaaaagaaaagcatgagtggtttgcccagttgcaagatgggtttcatagctatttgtcatcattaaatactgaacatca

SEQ ID NO: 22823 - DNA, 871 bp, Glycine max
  Clone ID: PAT_MRT3847_120610C.1
accaagcgttaataccggtgccaaaaaaacaaaaaaaggaatttaacccacaattttttggaaaaaggaaacctcaaggaaaggattcaaattattcacaagctatctggacatattttccaattaagccagcataaatttgcatcaaatgttgttgagaaatgtttggagtatggtgatgctactgatcggcagttgttaattgcggagattgttggacatgacaaacaaaatgataatttattgacaatgatgaaagaccaatttgcaaattatgtgatccagaaggtttttgagatctgttctgaaaatcagcgagcaacattactttctcgcataagacttcatgctcatgctttgaaaaaatacacttatggaaaacacattgtggctcggtttgaacagctacttggagaagagaaccaaacaaatggatcatgatgacaataaaggtcttgcgcaatgcttccatgcaagcacaactagtatttctgtgttacaggagacagatgagatattggatctttgggcttttcccattgaaaaaacgaatgctactgtggcttcatatctgatagttccgacattcatggcttcaagaaacatcagtgtatgcatacatgttgtgcacttaatgtaatgtcagttaagtaaattggtttgtatgattgcttgggtataattagttgggaggaaatccttcgtgatgtaaatttactggatattctctgctttactgtggttttagtgtggggacaatcaagggtttgtctccttaatatctgctctctcgtccttgtggtttgtacgttgatttagttaaatggtggctgtttttaatgttccatttgttcggacgaggattcctgat

SEQ ID NO: 22824 - DNA, 649 bp, Glycine max
  Clone ID: PAT_MRT3847_120611C.1
gcacgaggcacacatcaaacatactaattaaaataacaaaagttacatatttaaaataataaccaattttattgattatcgtgttcaaaatatttttaaatatgtttcatgagatctgtctgaaattgatgatatcgtcctctataacaacataattaaaacataaataattagtgagggggacattataataactagcacagttactaaattgaagtgtaccctaatttatatacaataataaaatgtaattgttaaaaattttaatggttacatttttttaaacgttatcggccaacgactttttttctttctcattcgacatagtcaagaatattttttctttctcatccaacgactatttgttaaaaaaataatattgatttgcttctttttaattagctaaagcaatgctgcttcttcaagtaacccatgtctactgaataaatccatacgttgtttgcagccccaattgcttctcaagcacgttgcttccaatgtttcaattgcttcccaagctagcgatgtgggtgctcttagaagactccaaattacttataaaaatatgacttccgaagctgcttctataagttcagactctaacttatgtaggttctaattttatcttttctcaagaaaagtagttgtt

SEQ ID NO: 22825 - DNA, 207 bp, Glycine max
  Clone ID: PAT_MRT3847_120612C.1
atgtgggggggtgtttcctttcattacaacttttttaaatcttccgtccaaatatgtctcaaaaaaagaagaacacccgcttactcgggctttgctttaaaccaaaacaacaatcccgaattgaaccgacgaaaagacatgaaaaaaatcattcttcttccgggaggggggcggacaatttttaggggaacattatttgcaacccta

SEQ ID NO: 22826 - DNA, 560 bp, Glycine max
  unsure (1)..(560): unsure at all n locations
  Clone ID: PAT_MRT3847_120613C.1
tacgctaagnctgcggaattcggcgtccaggcccagggaggagcaaaaaacggggaaaaaccatcatcataacccaaacccaacacaccatagcacagcgccacctcgtgtcacataataacaaccttaaacccccaaactttcatgtgtcggggcccgtgagtcgggtccccaacaacaacaacgccaaaaacaaaaaacgggggagtgttattgggggccggggcccatgaggcggggtggctcgcgttgcggccacaatgggggcaactcaaggacttgcgctaaccgcggggggagggtcttcggggggcgagtaaccgaggggggnatccggaagagtgcgancgtgggcaatctaacccactatgcggggtccggggcgggccactccatacgcgggtgagtaaccccggggcggccggggaaacccccgatcatgccggcggangcggcgacggtgacttgtgcgaggacttcgttcccggggcttcttctacctcccgtgaaagaaagaggggggtgccatggactgaggaggagcatagaatgtgtttact

SEQ ID NO: 22827 - DNA, 415 bp, Glycine max
  Clone ID: PAT_MRT3847_120614C.1
tttgggagtgatcaagagcccatttgatttcacggtaaacatttccctcaacttgaagggagatgaatacaaatatgtgcattatttttgggggggcaccatttatttttttttcaaatccaacccacttcacacgaaagtttccggtcttcttcacaaatcacaatcccatagcaaaagtgtcttgtcattgttcagtacattgatgagacatggaataacaaccccatcttgccttctaatccttaccaaacagccttctgctcgtatagggaccaaattcattcataacaacattgtcggtgccgcatcgaatcctcttctcaccgttcaccaaaaacaccctcccaagaatgctggagaaacatctgacggtctgacgtttcttgataatgagatcacagcccacaacttt

SEQ ID NO: 22828 - DNA, 315 bp, Glycine max
  Clone ID: PAT_MRT3847_120615C.1
ttgatgttggccgccctttttttttttttttttataaaagatttatccttctcccatttgccgtcttgaacaatttggaggcagagcacataactttattcagtcactaactgatgaacatgagaatgactttgttaagaaaaaagaatgtacaaaaattggtgaagagacagaatttcagactgattttaactttaaacaacttaaagttctggagacagatgcagaatatacgatgtaatgtacctagagagagggctcaagagacattatgcagtgtgtgtgatgtgaacaaacctattcaattttttaaag

SEQ ID NO: 22829 - DNA, 506 bp, Glycine max
  Clone ID: PAT_MRT3847_120616C.1
gggcgcatatgccatatttatcacacgcatttttattgtatttaaacaaatatgagctggaccactttatagacaccccatgatcaagttgataacttgaataatggaggaacgcttttttgttcttggggaataaacaataacggtttgcaatagtcacatgatgacattttttcattttccaaacataagaaggttacaattggataaaatacttacaaagggggtgaagcataagatttttaccgagagagagaacacttttatatattgtaaggtagaacgaactttgtatatggcattaaccaaatcatcgtattaagctccagcaactttgtttacaaccttgttgaccttcagaattttgaaagggggaaccactttaattcccaactatattgccaagggcctagagtcttggttgcaatgaagctttagaaagacaacattcaaatacttttaagataattattgaaactttggagccatcactttggaagggccac

SEQ ID NO: 22830 - DNA, 268 bp, Glycine max
  Clone ID: PAT_MRT3847_120617C.1
atattagcatgaactctaatatcatggttgtactctttgtaaccgttcaacttcacatttaagctagtaattggtgctttttctattgtacagtcgattagacatttctcatgaactcattacatgaagtttgatgtgagtttctggatgttgttatcacataatacgtcactgatgatgatattagcatctaaatccgtgattcaattgccatattgaatttcactgcagtatatgtatttgccgacccagatgaatagtgtcacta

SEQ ID NO: 22831 - DNA, 171 bp, Glycine max
  Clone ID: PAT_MRT3847_120618C.1
aaccctagcaaacctggtttcaacaggacctttttcggcaacaaccttggtttttaatcggcggctttccaggttgggttcaaaatcctatagactttggcgatggccccgccgcttccggttccgcctttgggcgcgcatggtggtcggggccggcggcaaaggcccccg

SEQ ID NO: 22832 - DNA, 131 bp, Glycine max
  Clone ID: PAT_MRT3847_120619C.1
tgtaattacctaaacggcgtcgctactcccttacccattctctcagccatcgttgttcctttcaaccattctctccctcacctaaatggctcacgcacctcaacctcacgcaccttacctaaattttggtt

SEQ ID NO: 22833 - DNA, 370 bp, Glycine max
  unsure (1)..(370): unsure at all n locations
  Clone ID: PAT_MRT3847_12061C.1
cgtatatctcggaattcggctcgagcacaacccctaatcatctcttccacctcactctccaacgctacttttatatagtccaaagtggagtcncactagcagctctaaagagaaatccactatcncanatccntctccattttcattaactccatcatttacatcttatcacaatgtatcagttattacttcactcacatattcgtattcacaccctcattatacttctacatttttttagacaccttatactactttttttttcttcaatactcccctttcctttaatgctacacccattcctacccctttttttaccccacctattccttaacctactctttaatccccttcttttccccttttttcc

SEQ ID NO: 22834 - DNA, 3555 bp, Glycine max
  Clone ID: PAT_MRT3847_120620C.1
ggtccggattcccgggtcgacccacgcgtccggagagagagagagagagagagttgttgattgatcgagaaaacgaaaatggatgatgaagttgttcagcgagtgttccatgaaggaggacgcgattacttccagcaacagccttcgacttcttcgtcttcctcttccatcctccaatctctccctctccatgtgtcttttgatcatggatactatttggtggtaaaatctatccaagaactccgagagaaaaaagatggccttgttacagttggcattggtggaccaagtggatctggtaaaactagcttaacagaaaaggtggcatctgttattggttgtactgttatatcaatggagaattatcgtgatggagttgatgaagggaatgatgtggattctatagattttgataccctgatcaagaatcttgaggatttgactaaaggcaatgatacatcaatcccagagtttgactatcagcaaaagaggcgtgttggctataaagcaataaagagcccttcatctgtggtggtaatagttgatggcacatatgcattgcatgcaaaactgcggtctttactggatattcgagttgctgtggttggtggtgttcattttagcctgctttctaaagttcgctatgacattggagattcttgttcactggattaccttattgatagcatttttccattatttaggaaacacattgagccagatcttcatcatgcacagatcagaattaataacagctttgtctcatcattcagagaggcagtctacaaggttaaatgcagaagtatgactgaagatggacattcaggttctgcttttcaagaaaatgaagcccaaacagacaattttatcgaaatgtaccttagaccaccttgagctagtgaagaagcaaggataaatgattggatctaagtgcggcagtctggaattagatattatttattacttggtgaccagaggtttgttgacaagaatttcattatcaggcctaaagctgaatttgaggttgttcgaatgacattgggcggattactggttcttgggtacattgatgaggtgagtcataagtgtgcctctacaactgttaataatggcaagatttcactgtttgatgaaattattgatattcttggtgagactttcattgtggttacacgaactaataaactgactgttgtaactaaagcctaaagtataggaattaatgaactttggtttactaaaaaatatctggaaatgtttattgcaataaagagtgttcctcgtcttagtacaccacgacttgggtacatttcaactgcgcccagtagtcaaggaactgtgatggatgtgcgaaaggcaattcgtgttacccctaaccttgttaccgggcctgatgatttacctcagccgtggactcgatctccaacaaaatctaaaatggaacctgttgtggctggatggcatttcatatcttcagattcttccctgcctgacaactcagtcctagacccttcatctttcagggatagtgttaggcttgcttcaatgcctgattcatttgacttggataggggattgcttttggcagttcaagcaatacaagcattgttggagaataaaggtgtcccagtcatagttggaatcggaggtccaagtgggtctgggaagactagtttggctcataaaatggcaaacataattggttgtgaagtagtttcactggaaagctattataaacaagtaaaggattttaaatatgatgacttcagcgcacttgatttatccttgctatcaaagaatattgatgacataagaaatggtcaaagaacaaaagtacctatatttgacttggaaagtggtgctcggagtggcttcaaggaacttgaagtttctgaagattgtggagtgattatatttgaaggcatctatgccctgcatcctgatattcgaatatcacttgacttgtggattgctgttgttggaggtgttcattcacatttgatctcacgagttcaaagggataagagtagagtgggatgttttatttcccaaaatgagatcatgatgacagtgtttcctatgttccagcagctcattgaacctcatcttgttcatgcacatcctttgcctcttaaaattcgaaatgactttgaccctgtgctttctcctgagagttcattatttgtattaaagagtaacaaaaaattcggtgcagaaatttattgatatttatataaggcttcctgggatcccttctaatgggcagttgagagatagtgattgtattcgagtcagaatatgtgaaggcagatttgcattgctgatacgagagcctatcaaagaagggaactttatcattcagcctaaagtggattttgatattggcattagtacggttgctggtcttctcaatcttgggtaccaagcagttgcttatattgaagcgtctgcattcatctatcaggatggaaagattctaattgaggttgatcatctacaagatgtccctggcccatacattcagataaagggtgtcaataaagatgcagtagcagcagcaggttcaatgcttaaattggatggttcatatactactaagagttatcttgaaataattttggaaagactaccagcaatagaaagaacttctggtgggattcattctcagcaatcagcaaggctgctggagattgttgagtttattcaatctcagggatgtagctctgcttcagaatcctcatcaagtagggtagtctctccaattgaaggggttattgaggagatgcaatcaaggattagaaggcttgaaagatggctagcgataaatacggttctatggacatttctgatgtctgccctcgttggttattcactgtatcaaaggaagcgtcaataatgatctttggaaattttcaggatcatgcattgccgttcttgtttagttaccttcgtataccgatcccaattttttaactggccactccataaactaactacagaaactaatcccttgagagtaggttgcattatacattgcggttcgtcatttcaatggttaactgttaattcatccatatgttcataatttggtgaccaaaacgagtgagatatgcagccaccgcccacttcccggctatggaatttgtaaataatgaaagttttatggctcaacacacctatagacgttaatgaccacaagtccacaagcttgtagcctgttccaaggttcaatgtttgctaaaaaagtattgagaggaggaatctgggctgtactgtagaacatgaattgtcattggtcaagattacaatttttcttttaaaaaaacatatgatcatttaagaaagtcatctgatttttttaaaaagtaattcacaccaataagattatttttttttactgaatcacactgataagatttaattttcaattattccttcttactttcatatgcctttttattatacatagagagagaagaaatcaaattataccggtgtaacttcgataattatttcatcatttttataaatctagaatgtgatttttattattct

SEQ ID NO: 22835 - DNA, 346 bp, Glycine max
  Clone ID: PAT_MRT3847_120621C.1
gtctgcattcatctatcaggatggaaagattctaattgaggttgatcatctacaagatgtccctggcccatacattcagataaagggtgctaataaagatgcagtagcagcagcaggttcaatgcttaaattggatggttcatatactactaagggatgtagctctgcttcagattcctcatcaagtagggtagtctctccaattgaaggagttattgaggaaatgcaatcaaagattagaaggcttgaaaggtggctagcgataaacacggttctatggacatttctgatgtctgcccttgttggttattcgctgtatcaaaggaagcgccaataatgatctttg

SEQ ID NO: 22836 - DNA, 486 bp, Glycine max
  Clone ID: PAT_MRT3847_120622C.1
ggtcaccaaattatgtacgtgtgaattaatcaacaattaacctttgaaatgatgaaccacaatgtataatggaacctacactcgagggattagttgctgttgttagtttatgattggacttgccatttaaaaaattgggatcggtatacgaagtaacttaaccagaacggcaaaacatgatcctgaaaatttccaaagatcattattggcgcttccgtgtttatcgctagccacctttcaagccttctaatctttgattgcatttcctcaataactccttcaattggagagactaccctacttgatgaggaatctgaagcagagctacatccctgagattgaataaattcaacaatctctagcagccttgctgattgctgagaatgaatcccaccagaagttctttctatagccggtagtctttccaaaattatttcaagataactcttagtagtatatgaaccatccaatttaagcattgaacct

SEQ ID NO: 22837 - DNA, 1498 bp, Glycine max
  Clone ID: PAT_MRT3847_120623C.1
tttaacaaaagtacctaaattggttgtgaagtagtttcactggaaagctattataaacaaaatattgatgacataagaaatggtcaaagaacaaaagtacctatatttgacttggaaagtggtgctcggagtggcttcaaggaacttgaagtttctgaagattgtggagtgattatatttgaaggcatctatgctctgcatcctgatattcgaatatcccttgacttgtggattgctgttgttggaggtgttcattcacatttgatctcacgtgttcaaagggataagagtagagtggggtgttttatttcccaaaatgagatcatgatgacagtgtttcctatgttccagcagctcattgaacctcatcttgttcatgcacatcttaaaattcgaaatgactttgaccctgtgctttctcctgagagttcattatttgtattaaagagtaacaaaaaagtagcatatcaagatattgttgcaattcttgattcagcaaaattttgcagttcggtgcagaaatttattgatatttatataaggcttcctgggatcccttctaatgggcagttgagagatagtgattgtattcgagtcagaatatgtgaaggcagatttgcattgctgatacgagagcctatcaaagaagggaactttatcattcagcctaaagtggattttgatattggcattagtacggttgctggtcttcttaatcttgggtatcaagcagttgcttatattgaagcgtctgcattcatctatcaggatggaaagattttaattgaggttgatcatctacaagatgtccctggcccatacattcagataaagggtgtcaataaagatgcagtggcagcagcaggttcaatgcttaaattggatggttcatatactactaagagttatcttgaaataattttggaaagactaccagcaatagaaagaacttctggtgggattcattctcagcaatcagcaaggctgctggagattgttgagtttattcaatctcagggatgtagctctgcttcagaatcctcatcaagtagggtagtctctccaattgaaggggttattgaggagatgcaatcaaggattagaaggcttgaaagatggctagcgataaatacggttctatggacatttctgatgtctgccctcgttggttattcactgtatcaaaggaagcgtcaataatgatctttggaaattttcaggatcatgcattgccgttcttgtttagttaccttcgtataccgatcccaattttttaactggccactccataaactaactacagaaactaatcccttgagagtaggttgcattatacattgcggttcgtcatttcaatggttaactgttaattcatccatatgttcataatttggtgaccaaaacgagtgagatatgcagccaccgcctacttcccggctatggaatttgtaagtaatgaaagttttatggctcaacacacctaaagacgttaatgatc

SEQ ID NO: 22838 - DNA, 3132 bp, Glycine max
  Clone ID: PAT_MRT3847_120624C.1
cagctttgtctcatcattcagagaagcagtctacaaggttaaatgcagaagtgagtcttcagatggacattcgggttctgcttttcaaggaaatgaagcccaaacagataattttatcgaaatgtaccttagaccaccttcagctagtgaagaagcaaggataaatgattggatcaaagtgcggcagtctggaattagatattatttatcacttggtgaccagaggattgttgacaagaatttcatcatcaggcctaaagctgaatttgaggttggtcgaatgacattgggtggattattggctcttgggtacattgttgttgttagttacaagcgtgcctccacaactgtcaataatggcaaggtttcaatgtcttttgaaactattgatgttcttggtgagacgttcatggtgatgagaggaactaatagaaagactgtcagaacagaagcattaaggatgggtattaatggaccttggattactaaatcatatctggaaatgattcttcagagaaaaggtgtacctcgtcttagtacaccaccacttgtgtctaatacaactgtggctggtagtcaagaaactgtgatcgctgcaccaaagccaattcgtgttacccctaaccttgttactgggatagatgatttacctcagccgtggactcgatccccgacaaatctaaaatggaacctgttgcggctgaatggcatttcatatcttcagattcttcccagcctgacaactcagtcctagacccttcatctttcagggatagtattaggcttgcttcaatgcctgattcatttgacttggataggggattgcttttggcagttcaagcaatacaagtaaggagcagaaacttgcattgttggagaataaaggtgtaccagtcatagttggaatcggaggtccaagtgggtctgggaagactagtttggctcataaaatggcaaacataattggttgtgaagtagtttcactggaaagctattataaacaagtaaaggattttaaatatgatgacttcagcgcacttgatttatccttgctatcaaagaatattgatgacataagaaatggtcaaagaacaaaagtacctatatttgacttggaaagtggtgctcggagtggcttcaaggaacttgaagtttctgaagattgtggagtgattatatttgaaggcgtctatgccctgcatcctgatattcgaatatcacttgacttgtggattgctgttgtaagaatgagtctccatcttcgaaggccattttctgtttcatctatttttttatttattattgttggggctaggaactagcccctcactttgattttcttatttgaaacaggttggaggtgttcattcacatttgatttcacgagttcaaagggataagagtagagtgggatgttttatttcccaaaatgagatcatgatgacggtgtttcctatgttccagcagcttattgaaccccatcttgttcatgcacattattgtttcactttggataatgttgcttttggagaattgatgcatctatgacacatcatcatttaatgttgactatttggaagcatagaaattacttggttttcaataaccagattttcaacctcgaaaaagtcatggatgaagctttattccatacttggtcatggttaaaatgtatggagaaagacttccatattcatttcaaccattggtctactaacttgaaggaagaactttcttagcgggggttttttgaccttgttgtgcttatatagttgggtttggcagatcactgcctatgtaactacttgttcttttcttcagtacacctagtactgaattatttataatactattctgatttttgctgtgcaaaaaaaatgttgacttgcagcttaaaattcgaaatgactttgaccctgtgctttctcctgagagttcattatttgtattaaagagtaacaaaaaagtagcatatcaagatattgttgcaattctcgattcagcaaaattttgcagttcagtgcagaaatttattgatatttatataaggcttcctgggatcccttctaatgggcagttgagtgatagtgattgtattcgagtcagaatatgtgaaggcagatttgcattgctgatacgagagcctatcaaagaagggaacttcatcattcagcctaaagtggattttgatattagcattagtacggttgctggtcttctcaatcttgggtaccaagcagttgcttatattgaagcgtctgcattcatctatcaggatggaaagattctaattgaggttgatcatctacaagatgtccctggcccatacattcagataaagggtgctaataaagatgcagtagcagcagcaggttcaatgcttaaattggatggttcatatactactaagagttatcttgaaataattttggaaagactaccggctatagaaagaacttctggtgggattcattctcagcaatcagcaaggctgctagagattgttgaatttattcaatctcagggatgtagctctgcttcagattcctcatcaagtagggtagtctctccaattgaaggagttattgaggaaatgcaatcaaagattagaaggcttgaaaggtggctagcgataaacacggttctatggacatttctgatgtctgcccttgttggttattcgctgtatcaaaggaagcgccaataatgatctttggaaattttcaggatcatgttttgccgttctggttaagttacttcgtataccgatcccaattttttaaatggcaagtccaatcataaactaacaacagcaactaatccctcgagtgtaggttccattatacattgtggttcatcatttcaaaggttaattgttgattaattcacacgtacataatttggtgaccaaaacgagtttcagacatgcagccaccgcccacttctccgctatggaatttgtaaataatgaaagtattgactcaacacacctatagacgttaatgaccacaagtccacaagcttgtagcctgttccaaggttcaatgtttgctaaaaaagtattgagaggaggaatctgggctgtactgtagaacatgaattgtcattggtcaagattacaatttttctttt

SEQ ID NO: 22839 - DNA, 359 bp, Glycine max
  Clone ID: PAT_MRT3847_120625C.1
cttccctctcctccgctctcaactccctctcctctctatccctctccacctcctcccgcttcactctcctccgtccaccctccctcctctccaaacctctccccctcctcttcgcaaccaccaccctcaaatccaaaccctccgacgacattgacacatcgttcttcgacaacatcaacccgcaagacgacatcacattcaaccctccggagcccccggagggcttcgtggcgcctccgtccttcgacgactgccccctggagactgaggacgaaatcgccgcagcctacgaggagctctactgacccggctacagcggcgtctcggtcctcggtaacgacgtgtacgtgatggacgcg

SEQ ID NO: 22840 - DNA, 354 bp, Glycine max
  Clone ID: PAT_MRT3847_120626C.1
attgacctcactcatgcatggatcactcgtcgatgctcaaaacaccaaggacatgagcctgcgctagtgccataggtctctgatcctatttgtgccttggtgaccacagccactggaaagtcataagtactgtgccatttacacaacccacgaagcccaaagcctgagattaagttgataggacacgttcatccctgaaaagacaaacttttggactacgcactcattgaacggtcctaaaaacatgggcccttatcctctatgtactgtggcttcatgccaaccgttattgccttcacacgagaattgttcaagctcttcctacaaacgcacaacgcaacttgatttaacaca

SEQ ID NO: 22841 - DNA, 272 bp, Glycine max
  Clone ID: PAT_MRT3847_120627C.1
aataagaattgggtcattggaggggtggaacctcactccctcctagagaacgaaaatgctgtctactaaaaggaaagcaggtcttttcaagtcatattatgcgccgtgtaaatataacaaggaggcttttgattgaacatctccaacctgcacatctggaaaagaccatggatttattctagccccatggggctgaggttacaattttgccggagcctgttccgcacccaactgaagatccggttcccctgcattatccaggtgagaagact

SEQ ID NO: 22842 - DNA, 321 bp, Glycine max
  unsure (1)..(321): unsure at all n locations
  Clone ID: PAT_MRT3847_120628C.1
cttcctttttttttttttttaaagcatggtttcttataatctatatttctttcgcatcatttattcaaagtgcatcaaatgatttatagaaacccccccacttatatttactatccctctatatatagatgatacttgtttacacactctttttttcctaccttaaatcaaatcaacctcttcccttcagcctcttaaaaaagcccaatttttacaacctctaatttcccccctattaaatcaaaggctacttaacccttattatatttattcttttgggaatattaanttatatatatatatatattatatattctcacc

SEQ ID NO: 22843 - DNA, 1215 bp, Glycine max
  Clone ID: PAT_MRT3847_120629C.1
accaggtacagtggcacgtcgccgccgggttgggggttgcccgttgtggttgagtgttcctgagcggtcaggaaacccggttcgacccaggcgtccgcccggatgacggcaaaggaaagtgggtagtccgttgaggttgagggatcctgagttaaattcaattcaaggtggaaggaaggaacgcaacttttcatttgagaatcagccctgtctgtctgtctctctgtgttcgactcgatcgatcacagctagaagatttagtagttcatatcacgctaacggactatccaactaagaaaaaacagagccgccgaatcacaattttgctcgatgcttcttcagatcagattgcttatagatccagtcgtcgattcgtgatctgagctgcagattggcaaataaaaaccctaacatcggtaatcggggaattttgaaggtggctcagcccttgcgtcatgctcttgcgcgtgtttgtcagattgatggtagtagtatgagagatatgcaccggaattctactggtagtactaacactaataagatatcatcatcggcaataaggctgccctcacctcaacaatctctaagacgcttgggattgtgttcccagatagctacgggggagcactcttctcctatcgtcttccctgaaaaacgtggcaaagtcaaggcgacttccaggaagaccagtgtcccccccactaccattcgtccagatgatcaggacataaccaagaattttgagcataggattgacattgcaggggctggaggaggaggaggagatgagaagtctgatttgttaggatatgtcgtattctctggaaaactcattttggataagagaaaacttgctacaaaaaataatgctgctgctgatgctcaacaaacttcttgatattaccaaccaagatgctgtagatgccaaactaacaagcaaggccttggcttggggatcccatgtgctgcatctttatgatgttatctcggtttcttataatgctggtctcagacatttcacagtgcactcctacccattgaaagaagcttcatgtgggctttcttgctttataaaatctcgacgcagtcggactctcttgttgcaacattcaccagattgaaaaaagaaagaaaagtggcttctatcctatatatcaatgatcatgaccctgaccttaaaaccactgctaaaacactcaaattgcttgattcatg

SEQ ID NO: 22844 - DNA, 341 bp, Glycine max
  Clone ID: PAT_MRT3847_12062C.1
gggagcaccggccccacttcaacacctcatcaaacctttccctcaagctgctcgactgcggtgcacctaatactgtctgcccgcaacggagctcgttctatggcggagcttggacttccccaccgcacacgtggctccccggaatgaatcgaactcgctccaagtctggaacctcctggcgaacccaaaccgacccgactccaggactctactctatgcggctaaagccaccgttcttaggcgaaatcgagctcgtctttacgccaccgtctcttactggtccaccggaaacaggtccgacggaaaatttctgagaatccccgaaatgggcaaactttact

SEQ ID NO: 22845 - DNA, 347 bp, Glycine max
  Clone ID: PAT_MRT3847_120630C.1
gaagaccataaaagtgttttatttatagtgatctgtggtacaaaagcgccattttctctcttataattttgagttacattcacaaagaaataagtgtgaggcgcatgaggacttgggcacatcattaatgcgaccaaggagtgaggtgcgtgcgaaagtcaagaatatgcgttgcgacgaaggtgggaatcacaatgcgtagaaaacacaaagcgggtcctcttatttattaagtggataatagacctcattgcttgctttaggcgtgggggtgtggcctctactggggggggctttccataagggggggtcttgtgtgggggcttcttatatgggggcttggaacc

SEQ ID NO: 22846 - DNA, 279 bp, Glycine max
  Clone ID: PAT_MRT3847_120631C.1
ggccaccataatcgacagcaaagccattacacaaaccatccaatctaaaatcgccaacgaagtacaccagctctctcaaaaatacgacaaagttccgggattagcgatagtgatagtagagaacagaaaagattcacagagctatattggaataaagagaaaagcatgcgctgaattaggaatcaaatccttcgatatagaccttgccgaacaagtctgccaagctaaactaatcaaacaagttcaccgggtaaatactaaccctaacgtgcatagtat

SEQ ID NO: 22847 - DNA, 284 bp, Glycine max
  Clone ID: PAT_MRT3847_120632C.1
ggaaccagaaaaggtgaatgcaaatgcattaggggcagttttgtttcttgatcaatgatcacgagtcatttcctgcccaaagaaaaccaggaaggagcagcgcaaccccacaatgccaccacatattttcacccttccatcgtcagaaagtcatgagatcatttaccaaacaaggaacggagaacactttgtctggaacaaaactaattgcagtagtggtccatcgatccttcacgaatattatgagggaaagcctacgatgggatttgcaagtggttaatgtg

SEQ ID NO: 22848 - DNA, 365 bp, Glycine max
  Clone ID: PAT_MRT3847_120633C.1
gatgtaacaggtaaatcgaaattaaaggcgcactaactacatttataaaaagaaaacaatatatatactaagctaacacagataacgatccaataaaaaacagaggcacataaataatttatcacaaccaaagaaataattactggggcttacaagtaaccaaagaatgggaataatttaggaaagaacgtgcatgataattcaagaacaactcatgcaattgaagatacataaacctcaaatggctgaaactgaaccaacaaaggatgattctgataaagagtcaaaatcaaaggcctgtttccttaacgatcgatgggagcaacaatatccacacacgaactatcatcaatagatgtacaaaa

SEQ ID NO: 22849 - DNA, 427 bp, Glycine max
  unsure (1)..(427): unsure at all n locations
  Clone ID: PAT_MRT3847_120634C.1
aaaaaaaaaaaaaaaaaaaaaaaaaaaaacaattaaaaaaaaaaaaaaaaaaaaaaaaaaaaaaggggnggggcccgccgatttaaaaaaaccaaaattaccaacccttgcaatgggggggcccttttttagggtcccgggccttcaatcccatgcacgggcccgtaaatctcttctgtcgggacacgaaaaaccatttccctgcccaactttttacacctgcaggactgggaaaactcgggggttgccaaattaaaggggttggccgcacatcccccttttcccaattggtgtataacctaaaaggccaaaacgacccgccctttcaaaaaatattaaacccggatggggaattgggaccccccctgtggtcccctttaaagggcggggggggaggggcctccccctatggttactttcctttttt

SEQ ID NO: 22850 - DNA, 1402 bp, Glycine max
  Clone ID: PAT_MRT3847_120635C.1
agggtactttcatggctaccaacttcctcattctttcgcctcacttcggtgtgcaaaaggtggaaatcagctgctgcttctgttagtttcaagcttgcctgctcacgagttcctttgcgggatccttggtttttgatggttgctcccaatctcaaccaatctattgtctttgacactgctgaaaacagttggaaaagactcaatcacccgcacttccgctcaaagactctaacattagctgcatgcctgttgcagcctctggtggtctggtttgctaccgcaaactgttgggaaactttgttgtgtgcaatcccgttaccggatcctgtagcgaactccctccattgcattttgccctggaaaaccagtctctcaatgcggttgtgatgagtacaactttcaatgatcaaatgtcctataagattgtgttagtcttcggtgaactccctaaccttttgtttaaagtctacaactctggttctagctgttgggaagatgaggctgcgctgaggaggaatgttgatgacaattccatggattgtgattcaaccgatgatgacaatgttgtgtacttccttagcaaggctggaactgtggtggtgagtagcatgcagagaagcccgtctaagcagtattcgtcggttattactaacaaagacggtcaggagatagtgtattttctcagttcttcggggacggtagtagcttgcaatttgacatcaaggtgcttccttgagtaccctaggttgctgcctgttttcagtgagtactccattgatatcgtggagtgtggtggtgagatggtggttgttttgttatcagaattcttggaaagcacaagtcttagggtgtggaaatacgacgagggccaatcgatgctggcaacagattgctgcaatgcctgcagcaatgtctcaagagtggtatggaaagaaggcagatattaactgcgttggagccagcggtcggatattcatatgcttgaactcccctaagctatgtacttatgttctgtgtgatttggtgaccaacaaatggaccgagttgccgaaatgttgcttgaatggagaagtcatggaattcatgtctgccttttcatttgagccaagaatagaggcttctgtatgacactaaagtaccccagtctggtatattgatcttggttttcatcctttttctgtgttctgttagattaattttcttcccacttgtacttgaatttgtcatccaaaatagctactagggctgattggtatgaaaatagagatggaagctctaaccaaatgattgatatgcgattgctaactgagatattgtaattctctccattgattgttagatgtacactgttttcagtgaatttccaatcgaatgcctgtgttgattattcttaaaattaaaa

SEQ ID NO: 22851 - DNA, 1204 bp, Glycine max
  Clone ID: PAT_MRT3847_120636C.1
accacgccttggtaagggtgcgagaagaagctagcaggggaggacaggtagttggtgtgaggcaatgacgcggcctttcggtgtgaagggggggaggaagcgaaagcacgcggaacccaaatacgacgcccatgacgaagaagaagaagaagaaacgcaaccaaagaaaactgtggtggaggtggagcacaaccaagaagaagaagaagaaactccagcaccagcaccagaggatgatggattgagcggtatcccaattgcgcccagtgcgaacaacactaacaaacccaacgtcatcttcattcttgaaaaagcttctttggaagtcgccaaagtcggcaagacatatcagctcttaaactccgacgaccatgccaatttcctccgcaaaaataacaagaatcccggagattacaggcctgacattactcatcagtcccttctatcaattttggatagcccactaaataaagctgggagattgcgatcagtatacataaggactgataaataaggactgaaaaaggtgttcttatagaggttaagccctttgttcgtattccaagaacattcaaacgctttgctggtgtcatgttggaattgcttcaaaaatggagcatatatgcggttggcaagcgcgagaaacttctccgaaccatcaaaaaccctgtcacgcagtatttgcctatcaactcacgaaaaataggtctatcgtatagttcagaaaagcttgtagatatggatgactatgtatcaactgttcccagcaatatggaccttgtctttgtggtccatgggaagattgaggcagattatacagaagattatgtagcaatttcggggataccctctaagtgctgcttattgtattacaaggattactggcgcccttgagagaaagtggaagattttgtgatttaacaccaccttcagttcatgcctgagacgatttagtaattcgagttccatagtcaatttatgtaatatcagggataggggcctagcagtgatttagaaaatacaatatatgttgatttttttgaggcattgatgtcctggaccagagtgatgtttcaatgtagtacttgaattaaatatgcttaatatattattttgttgaaggatgcttatagaagctaaatctaaatgttgcttactgcgctgagatacgctgcttgggagttactatttttttccttgtccc

SEQ ID NO: 22852 - DNA, 356 bp, Glycine max
  Clone ID: PAT_MRT3847_120637C.1
cccacgcgtccgctagaccatggcattctcgtgagagagacaaaaggggaaaaaattaaggccctctcttctcttaccctacgcacttcccctctcttatcctgcgcactctattattcccattgattccacttcccagtagttagtatcccaaatttccgaggggacccccatccccggcaattcaaccttttttttttcttcagttaaaccgtaaccaacaacaacgttttcatgataaaacgttaaatgtacgctgagacaacttccgcgagtttctctcacccgttacaccaaatggtgtttcccctctccatattcttcttgctgtgtcctgatcttgttggattcgggcc

SEQ ID NO: 22853 - DNA, 935 bp, Glycine max
  Clone ID: PAT_MRT3847_120638C.1
acggctgcgagaagacgacagaaggggaagggcagaaacaaaagcataaccctagctaggacgtgtttggagttggtttgagcgtattgaggcaatgacgcgaccttacggtgtgaaggggggccggaagcgaaagcacgccgaacccaaatacgacgaagaagaccaagaaacgcaaccaaaaaaagctgtggtggaggtggagcacaacaaagaagaagaacaacagcaacaaacaccagagggggatgaattgagcggtatcccaattacgcccagtgagaacaacaccaacaaacccaacgtcatcttcattctagaaaaagcttctttggaagtcgccaaagtcggcaagacatatcagctcttaaactccgacgaccatgccaatttcctccgcaaaaataacaagaatcccggagattacaggcctgacattactcatcagtcccttttatctattttggatagccaactaattgatagctgggagattgcgatcggtatacataaggactgaaaaaggtgttcttatagaggttaaggcctttggtcgtattccaagaacattcaaacgctttgctggtgtcatgttggaactgcttcaaaaattgagcatatctgctgttggcaagcgcgagaaacttctccgaaccatcaaaaaccctgtcacacagtatttgcctatcaactcacgaaaaataggtctatcatatctacaagcttttctgaactatatgatagacctatttttcagaaaagcttgtagatatggatgactacgtatcaactgttaccagcaatatggaccttgtctttgtggttggagcaatggcccatgggaagattgagacagattatacagaagattatgtagcaatttcggggtaccctctaagtgctgcttattgtattacaaggattactggcgccct

SEQ ID NO: 22854 - DNA, 435 bp, Glycine max
  Clone ID: PAT_MRT3847_120639C.1
ctctttcgtccgttttaaacaccttcgcctaggacgcctgcgaggattcgggcaattaacatcaaaatccttgcgaaagctcgtggaaaccagtgggagttatttgactttcaaaccatgctcgaatgatacacctaaggaaaaatgaacagctaattgatgtgcttttagatgatcagaagaggacaagtcaataaagattggttggtatagcattgtattttatgaaggaaaaaggagacaccacagagaacggaaagggggacaaaccacggaccgaggggtagaatttgaaacctgctcctgatattctcttagctgcctcaacagtatagactgggcccgcaatgagggtcccgcgactcccagttatcctccgatggttcctttcgagtgaaaaaaaccttggcttctcatcagctctctttggagaga

SEQ ID NO: 22855 - DNA, 411 bp, Glycine max
  Clone ID: PAT_MRT3847_12063C.1
ctacctaatttttttttggccccaacgcgagggagctattaattctatatacaaagagtgaaatcatgcggaccaaactttgggttttgataccaagcgattgttggtgggagacgctaatccataaggtatgtttaccccgaaccaaataaccctcttctggatagaataaccgttcctgctaccgccgatatgcctttatacatctacagatgaccagggtcttttaatgatccaaccttccttttactggggaggatctagtgaagagagaggatgactattacctgctacgatgcagattgcgggtctctgataaaaggtgtctcaggctggatggcaaaggtgcgacccctgactgggtggaagcgtccaatactggcatgagacggatacgcactgagcatggag

SEQ ID NO: 22856 - DNA, 514 bp, Glycine max
  Clone ID: PAT_MRT3847_120640C.1
ggcttcctaaatgatctattccccatctgttaccactgtcaaccgtgccggtgccgacatgggtgctacattcactgacctcaactccatggctggcttccccatcataaagaccaacaatgacattacctccattgataccaacaatggaagatagcaatgcatacaagtgtggccaccaattggcaataagaaatttgagactctttcctacctgccataccttgatgatgcacaattggcaaaggaagtagaataccttcttaagaagggatggattccttgcttggaattcaagtcggagcacggtttcctgtgccgagagcacaacaagacaccaggatactactatagacgctactgtaccatgtggaagctgcctatcgaagggtgcactgatgctaataatgtggttgaggaggataaacatgataagactgcatagcccaactggttaataagtatattcaggaacgataacgaaatgcaagtgcattgcatcagcgtgaattac

SEQ ID NO: 22857 - DNA, 358 bp, Glycine max
  Clone ID: PAT_MRT3847_120641C.1
ggggaaaaaattttccccccaaaaattcaacaaaaaggggccacccccttaaagaaacccccctaccccaaccagggaaaaacattacaatgggcaaaagtcccccctcaaaaattcaaaaaaaccggaaacccggggcttcgggtttaataaaaaaccttaaaggggcccaaaaattttttcaaattccgcgagggggaaacaaaaattgggggccccaaacccggaaaacccccaaatccccgggccaaggggaccccaaccgggaacccccccaaaccaaggggggccccaggaaccaaggtaaccaaaagggggccacgggttacacacccccaacgggggggcaaaaaggccc

SEQ ID NO: 22858 - DNA, 899 bp, Glycine max
  Clone ID: PAT_MRT3847_120642C.1
cccgggtcgacccacgcgtccgagaactgaatcggaaatggaacgggtcattatgaaaaggtatttagggatgaaagaaccaactaaagtggaattctataaagatcacattttcaatcacatgtcagagttcctttcaaagcaagaagttgtttcagcaattctgcatgacgtacagcatttgattaaacaggatctctctctcaaatcttcattctcttctgcacgatttgttctggcaggcaatggatcttggcaacaaccatctaggtaatatccccccccccccccccttttttttaaagaaaattcaataactctctcaataagatatcttcctttattgtatcaaaaaggccctttctgtgattttgcttctaaatgctcagtaccagtatgggttttgtactaggaagaacaacattaattgcaattctgcaatgtaacatgttctagtttcttaaaattaggaatttaaattcttccaacaaagaaagcaaaacaaatatattttgctcgtaatgtttcctcaactttatttttttaatgggttgacaaatatggatatttaaagtcatttaaataacttgaatatttttattacattataggtatttacattaaaaaaaatggtaggaaacatcttgcatatctgcagagtttgtttctgaatgaatggagtttgtttactgtcctattacaagactgttttgcagtagtaggggatagatttgggatcaaaacatatgtatacttttcttcccatattttcgttcccaatcagacttatgctgcctgattgaggaaccatttttatggtgacttatactgtaatcagtacctctggtacttctttattatatatatatatatatatatatattttatctttgctgatc

SEQ ID NO: 22859 - DNA, 249 bp, Glycine max
  Clone ID: PAT_MRT3847_120643C.1
atttttagctttaaggtatccatctattcaagtgaatattgacaaaaagaaaaaaaaataagagcataaagaaacttctgacgatccttaccggtactgccttaacatccaacacataccacaatagctactataacgtgcggccaccctagactgattcaaatttactatcacaaacatgcgtcattactgttcaaaccaaggtggtcctcaacttaataaactggcataacatcccactttattcat

SEQ ID NO: 22860 - DNA, 337 bp, Glycine max
  Clone ID: PAT_MRT3847_120644C.1
ctcaagcacacacacgacacaaaattctgatagacccgaaagtgcctaagtactaccgtaagactcgctaaattgcggatgtgaagaatgagcatgaacattccagctgcataacacgtggaagggctaattgcatgttaacatataactaccagtgcacatggttgatggaagggtgcaattgctatgagcacagaatgtgaacacaccggaaagtacaggaagatactccgagctccaaaagcagcagcatgaatgtgaatgacaatgaaccctggctgggacggtacgtgctaggcaccattctaagaaatctgactcgcgggaccacgtgctc

SEQ ID NO: 22861 - DNA, 221 bp, Glycine max
  unsure (1)..(221): unsure at all n locations
  Clone ID: PAT_MRT3847_120645C.1
gaagttattagggaagttttaggcccattactgtttgtggtaacaattaatgtctatgtgatatgtatttgagtttttaatttacaagaanagaactaatgatactctattacgcgtcacataaagattaattgaaactgtgatagtctaaactttgcgatgtttactcattaacttaactatgtccgtcatgtagtaatcattggtacatttgttgagaa

SEQ ID NO: 22862 - DNA, 306 bp, Glycine max
  Clone ID: PAT_MRT3847_120646C.1
atttccttaacaaaaaaacaaaaagtctagtatttattaaaaaactacaacaataacaaataagagctacatacaaaattctgggcaccaaaactcaacttcaacaactactaccgctacaccaccaaagcgcccaccgtttaggctcacaagatcgtctacctcttcatcaagaatcctgcccagaatcccaagccctctgctgtgtcgtcctcttctccagacatcaaccaccaactctccaaatactacggtcctgacaaaaggatctacctgccagataatctcttttaccgctctgaggta

SEQ ID NO: 22863 - DNA, 480 bp, Glycine max
  unsure (1)..(480): unsure at all n locations
  Clone ID: PAT_MRT3847_120647C.1
agttccgcccactgcgtcnncgcggacgcgtgggaaaaaaaaaaaaaaaaaaaaaaaaaaaaaaaaaaaaaaaaaaaaaaaaaaaaaaaaaaaaaaaaaaaaaaaagggagaccagatttaaaaaaaaaaaggtgggggcggcctttttaaaagatcctagtttttttatggttgcatcgaaattcttttttttttttttgggttaccaaaattcaattggggggccctttttttttaccgacttgattggaattgccctggggtccccttttttaatgggtttgaaaaacatccccttttggccggttggttttttagaaaaggggcccgccctgtttgccttttcaaacatttcctcaacttgattgtgaaatgggcccctccttgtggttaccctttaagggcggggtgtgtgggggttccccctagcgccacctttatttttgccagggccctaccgcccgttcttttggtttttt

SEQ ID NO: 22864 - DNA, 973 bp, Glycine max
  Clone ID: PAT_MRT3847_120648C.1
ggtgatcgctaaaccatgatttatgattaaaccatattttctatacaagggaaggaaacaaaatacatactcatggagccgagccgagccaccaagaacagtagtatttgtctgcggatggaagaaaagaagaaatctacaaattagaataagtaaaagaatcatttggctgtaagaagtggattcaacttaagaggcctaggtggtgccatggttcttctcttccatagattaatctctttccgtggctgcacattaagattaagcgcagttgcaccaccaagggtaagaggagcagagaaagggataatgatctcatcatccaatctatcaacatcatcatgatccctttcctgatgtgttggcgcaatctgagccttcctatcgaaattcgataaggtttcacgcccacttgcaaatcgcctcatgtgatttaggggcggtgcaggtgctctctcactctccacatccgcatcagactgttttggtttctttgcgtggaacaacatcatcctttgaaacttggaagcgtgtttctttacctcggggtctctgggagtaggcatggacatggacatgttctttgcccctcccttcttgtgcttgatctgtcccatgcaggagattttgggggaagtgggttcttgagtttcaacgccatgaccattctttgcctttcttctggcttcatcgggaatcatggggccagagaagaaccctttgcctccatagtgtttgcacttgtgatccctgcctgggctgaagggagggttttggaatgtcacgctcattgcagcagcttttggcagtattttgaagatcttgttcttcagcttagactttttctctttctctttctccttctccattagcaaagaaataaattgttggaaccaggagagcttgtgttgtatttatatatatgtgcacaactcgagacgagttaaaacttcaaaggaaaacccgtcacatc

SEQ ID NO: 22865 - DNA, 457 bp, Glycine max
  Clone ID: PAT_MRT3847_120649C.1
tctcgatctagaactccaaacttaaaacttttgcttcaaaaacgctcaaacctggatgagggcttttattattttgggttccgtttcccaaacgtggtctatccatgaccaatgcgggttcgtttagcctctccaaatacataacttagacatagccaactgatgaaggaatcagattccctctatttcacatttatttagagccggggacgcgtcttggggggccgttgggcccttagatagagatactgggggggaataccttgaaggaccctccctcctctctttagggctggagctctgtgtaaggcattttaaccggcccatcgcgggtgctcaaagggataacattgtcctgctctataacctacctttccatgtccttaagaatctttacgaacctgctaaaggcctctattggcccggcatcactagatcagaacataccgccctcttt

SEQ ID NO: 22866 - DNA, 189 bp, Glycine max
  unsure (1)..(189): unsure at all n locations
  Clone ID: PAT_MRT3847_12064C.1
gttccgggtcagccccgcgtccggagagtgaacaaatgcgcattgttcttttgtgtgagcattttccactctgaaccatgggcttaaagcttttactgagtactgacgttcggtgttgagttggagttgctttgtggagctgggtgtggggtgctgaacaggagaangaaggcgctggtgaggtgtggg

SEQ ID NO: 22867 - DNA, 226 bp, Glycine max
  unsure (1)..(226): unsure at all n locations
  Clone ID: PAT_MRT3847_120650C.1
ggaagacaacncgacaaaaaggccgnaacagaagcaaaccnaaagaaggcnggcgnccacacangggagcagnnaanncncaagganccacancnnancacnccaaangcaccnncanacaaancagcaangagagagaancngnngaggcaggganacagaanngnnggaancannggagaccaanggagcgancngcnnggagaccacagaggcgaaagcagga

SEQ ID NO: 22868 - DNA, 331 bp, Glycine max
  Clone ID: PAT_MRT3847_120651C.1
ggtagagaaagagagagaaagatgtcgaagcgtggccgtggtggttcggcggggaacaagttccgcatgtcgctgggtcttccagtggcggcgacggcaaactgcgccgacaacacgggggcgaagaacctttccatcatttcggtgaaggggatcaaaggccgttggaaccgtcttccttgggcctgcgttgccaacatggtgatggccaccgtgaaaaagggaaaccccgacctgaggaaaaaggccttgccagctgacatcgttcgccagcacaggccatggcgccaaagggacggtgtatacatgcacttcaaagataacgctggtg

SEQ ID NO: 22869 - DNA, 190 bp, Glycine max
  unsure (1)..(190): unsure at all n locations
  Clone ID: PAT_MRT3847_120652C.1
tactttcacgacacaacacaaaaagcatagtactanacaacaccactntctgtgtctcttcactcnaatggccatggnagcgtctgtanagcncaacaccgtgtctncgtcccagtggntcgntnanaatncttctcncctcgcggtagatctcttntcncngagtctctctnngganccgngntctttt

SEQ ID NO: 22870 - DNA, 1272 bp, Glycine max
  Clone ID: PAT_MRT3847_120653C.1
ggaatacccctcgacctacgcgtccggtttggctcgagcaaatgttcttcctagtcaagtccaaatggtttatctcagaggagtggatctgagaacacaaggctggtttgcactgctatattatgatcgattggtataaggtgaatttactttgtgttctcaggtcacccctttgagccaacctgttgacatataccaaaacatgaatatatccttctcatcttttttatcaccacatcttgttataatgttttcagatttcaggaaatgttgcaggcaggatttgtggatagtatagaaatcaatgctgttatttttacacttcattttctatatttttaatttcctctacacctctcttttattggagaaaaaagagaatagaaaaaaaagtggatttctctacttcttttcaatcaaagggagttgtaggggaaaagtttagaaaatggcgtgtaagaataacatcattgtgtaaatataagtggatgcagaattttgcagtttcaagttgaagagaaaatgacaactagtgcttataacttttttttatcagtaaatgttagtgtgttagtttttgttagaaaggtcacttgagcctacaacctctctcccctcccttctcccttcaccttttccaagcactgagccaatcttatatctccactagtgcttataacttattagcatcagttttaggaatacaaaagaggaagattctgtagtgcgagacacaagacatagccttcctttttctcacttttttttaagttgatgacaatataatagagtttaactatgctataacttgggaagttctttttttctttttttatacaggaaaatcaaggatccttgaatgctaaagcaaaaatgcagttactagctacgagtttccaacaaagtacatgtttgaagttgcccttttgctctttgtaaaagcaaaattgaggaagctagcaattagagtctatggattcagggatatgttgcattgcaatttaggtagttcacattatgcatgacctattaaacatgaggaatacaaatttcataataaaaaaaatcatgaaggaccgtcccgtgcgaacccttgaggggtttgcgaactggagtctctcgctgggggcggcttttccttcaaaatgccattttgcaaagtgtggattggatatgagagaaagtcatgacttgcacacgaatttgaaacttggaagagacttcactggcaatcttaatagaatttcgattattatttcctgtggcagaaac

SEQ ID NO: 22871 - DNA, 393 bp, Glycine max
  Clone ID: PAT_MRT3847_120654C.1
ttttctgtgttttttttttttttttttttttttttttgtttatgatgaatccctatggttttaccctccctgcgacacgatgcatatttttttgaaaaccctatcgggtaaaacgatcacccttgaggtgtgaggcttctgaccccatcgacaacgcgaaggccagggggcaggacaaggaaggcgtccctccggaccaacggcgccttatcttcgccggaggggggctggaggacgggcgcacaatagccggctactacattcagaaggaggggaccctcctcctgggcctttgtgttcgtggaggagcctcgacccgcaagaagaggacctaccccacgccgggggggatcgacctcgggcgcaatatggtttggctcggaattctcccct

SEQ ID NO: 22872 - DNA, 1429 bp, Glycine max
  Clone ID: PAT_MRT3847_120655C.1
ctctcgagccgaatcggctcgagcttcaaatcgattaagttcatagagagaattgaaatatctatttggtaagtgattgagagtttgaatttgtagataataagatgggttcgtcgactaatggtggtgtgccgccagggtttagatttcatccaacggatgaagagctgcttcattactacttgaagaagaaggtgtcctttcagaagtttgacatggatgtcattagagaggtcgacttgaacaagatggagccttgggacttgcaagaaagatgtagaattggatctactccacaaaacgagtggtatttcttcagtcacaaggatagaaagtaccctacaggttcaaggactaatagagcaacgaacgcagggttttggaaagcaacaggaagagacaagtgcattaggaatagcttcaagaagattggaatgagaaaaacccttgtgttttacaaaggaagagctcctcatggacaaaagactgattggatcatgcatgagtaccgcctagaagatggcaatgatcctcaaggaagtgccaatgaagatggctgggtggtgtgcagagtgttcaagaagaagaatttattcaagattgaaaatgaaggtgggtctacacataaaccagatcaccaaatcaacaattcttcaaacactaatgcacggtcctatagagaaaatcactacttactacatcaacagcaaaatcctaggaactcatcagggcttgagcttgataagcctgagctggctctccattacccgccgccacacttgcaaaaccctccatactcactcttccaatcccagcctcttcttcagacccaaaagcctatggtttatgattattcatatacatcagacacccctatcatggcaaagcaactcatgacaaaccctagagactgtgagagcggcagtgatggcctaagatatcaagtttcggagtcaggtatggaagttgggtcgtgtgaaccaaatcaagaaatgggaaccggaagaggtgaaggaataaacgaatggggtgttcttgataggctagtgacctctcatcttgctggaaatgaggactcatccaaaggggtcaggtttgaagaggcaaatccacagtctgtccaccagatcaatcaactttcattgaggggagagatggacttctgggcctatggaaaacaatgattaatttccctttattatagtgaaatttataaacaaattaagtgcattcaaggttggagataattacaaaggctctaaccattttaaaaaggacatatattttgatactgatcgatttaagattgtttgttatgtttttcacttgattagaagacttcattagttgtaatatttcaatccattgtttgtcaagtaccatagtgtcaattgaaaaaaaaatgcaattattgattgtatgataaaaa

SEQ ID NO: 22873 - DNA, 1424 bp, Glycine max
  Clone ID: PAT_MRT3847_120656C.1
cccatataggctcgaggttttttaaactttcttaacgcaacaaacacatagccacatcttctctttctcttcccatggcattctgactcatacccaaattattgattgtttgtctatcgaatcagtgagaaaatggcagtggagctgatggggttcccccaaatggacgaacagaaggcaattgaagaagcagccgccgaaggcctcaagggcatggaacacctcctccgtctcctctcccatcaaccttcccacctccgcactcaccacaccgacgccaccgtttccaacttcaaaaaactcatctcccttctcaaccgccgcaccggccatgcccgtttccgccgcgcacccctcccttccacttccaactctctcgccccatcccctccactggctaacccggtcaccttcgccccttcgcagtcacagagtctaaccctcgatttctcaaaacctaacatgttcaacaccaccaacgccaaatccatggacctcgagttctctaaagaaaccttcagcgtctcctccaactcctccttcatgtcctccgctatcaccggcgacggtagcgtctccaatggcaaactaggatcctccctcttcctcactcctccgccagtctccgccggaaaacctcctctctcgtttgctccgatcaagaagaggtgccacgaccaccgcgagcactccgacgacatctccgggaaactctccggctccagcaagtgccactgcaccaagagaaggaagaatcgagtgaagaaaacggtaagagttccggtgatcagttcgaagatcgccgatattccgccggacgagtactcgtggaggaagtacgggcagaagccgatcaagggatcgccgtacccgagggggtattacaagtgcagtagcgttagagggtgtccggcgaggaaacacgtggagcgtgctccggacgatccgacgatgttgattgtgacatatgaaggggagcaccggcactcgatgcaggagaacatttccgggggagtgggtttgggattcgagtcaacgtgagggtggttgcaatgtaaatctgacattattaaaagaaaagattatattacaggggaatcttaatcttctcccaccaaagtcttcttattcaactttttgaaagtagtttggagccaagtgtgaattagaagggtagtttgtttagtgggaatggtaaaaggtcccaatccaagttgatgcctcggaatgggaaaaatggaatgacgtttaaactccattctcttcccttctttgcgatccacttaattgcgcacacaagcgtttcatttcgtcaagttaatatcttgcaaatcaaattttaaaactagtttcagttcttttttggtaaacccgagtagtaagtctaattaaaaatgtctaagggacatggttttttatccatt

SEQ ID NO: 22874 - DNA, 336 bp, Glycine max
  Clone ID: PAT_MRT3847_120657C.1
tttcttttttttttttttttttttttttttcatcactgtcacttgatttcttctgaagcgggggtagggcccaaggccggccttgttttgaactaaaaaaaagaaccatgctcttaggctgagaacatcataacagaagacgtccttcttatctacacgcgcccgaagaacactgtttattcacggcttgagaacggctttcatgacagggctaagcaaatttgctatgccttactgtttgcaggcctccctgcaaggagatagaaagcaaaggaaacccagggaaacttaggaacttggaccttttaaggcccccattcccataaaactgccttg

SEQ ID NO: 22875 - DNA, 221 bp, Glycine max
  Clone ID: PAT_MRT3847_120658C.1
gggccaaaccattttattttattttgggatcaaaggtgagggccttccatggctttcgcttgtgctttcttttcaattacaagtgttgtcatctgttccccgaggttccggcggaagaatggatcaagcgggtggtttcttaatggaaggaaatttaaggtgtaaaaaggacgagcaacaattggcggacgatctatgggcactacaaagagcgctattgc

SEQ ID NO: 22876 - DNA, 841 bp, Glycine max
  Clone ID: PAT_MRT3847_120659C.1
acgcgtacgtatgcttggatcctctagtgcggccgcttttttttttttttttttttttttttttttgggtaaaatcaagtcccccacgaagacattcataaacagctctaccataattcttagcggataaccccaatttaggtttaatagtacatcctaataggggacgaccatacttgttcaatttatctctctcaacttggatgccatgaggcggaccttggaaagttttaatataagcagtagggattcgcaaatcctccagacgtagagcacgcagggccttgaacccaaatacattaccgacaatggaagtaaacatgttagtaacagaaccttcttcaaaaaggtctaagggataagctacataagcaatatattgattttcttccccagcaacaggttcaaggccgtagcatcgccctttgtaacgatcaagactggtaagcccatcggtccacacagttgtccatgtaccagtagaagattcggcggctaccgcggcacctgcttcttcaggcggaactcctggttgaggagttactcggaatgctgccaagatatcagtatctttggtttcatagtcaggagtataataagtcaatttataatctttaacaccagctttgaacccaacacttgctttagtatctgtttgtggtgacataaatccctccctacaactcatgaattaagaattctcgaaacaacaaggtctactcgacatgacttaggagttaatgaaatctttcatttcacaggaatctttcccaaataataaactaatattatcaattaatccccaaggttcgttattaaacgagccgaattccgaacttac

SEQ ID NO: 22877 - DNA, 339 bp, Glycine max
  Clone ID: PAT_MRT3847_12065C.1
gaggggaacactgctacaaatcgcgatgtgacaactgacggctgtcaacgatcactttagttccctgcccagaggctttggctgtggcatttccttccacccatttccctcattcgcatcaattccagttcattgacgacttgtagatccacaaagcactatctatttcagctgatgatgacgttcactcagcaccgtcaaatcaatctgcattgaacatgcatcgtgttcatgctcatagctatggaactgtatgtactgcaattgacaccaatgtgtgacacttctgatgcagcttggcattgcctcatccatgctgagggcactgtcatattctga

SEQ ID NO: 22878 - DNA, 161 bp, Glycine max
  Clone ID: PAT_MRT3847_120660C.1
ccattgccatgatcgtgcttggctatatcgacttcggggattcatagaccataggtatgcttataatctagttcgacaatattcacgagcgtagtcatcgaaagattcgagaagtgatctgcttatatgaataataggtctttcaagtatgcctggggtat

SEQ ID NO: 22879 - DNA, 262 bp, Glycine max
  Clone ID: PAT_MRT3847_120661C.1
ttcaagaagtgatgtcatgtgacgcttataaatatcgcatcacttgcgttttaatctgatcattcatagggagatataacgattaatatttatttttctcactcatataagagtggtgtttttcactagatatgcttccaatatatgggtgtgtatgtgtgataatttgaccctccttacaaataaaaaaataatttaaatgattttcatttgctttaaaaattaaaataaaaaagtgaatttctcagcaaaaaaaaaaaaa

SEQ ID NO: 22880 - DNA, 507 bp, Glycine max
  Clone ID: PAT_MRT3847_120662C.1
agagcattctcaaattacggtttcgctccttctgccacgtcgcagcgcagagagcttgaaagcagttattgaatctgatggcgaatggtgagggaagcgacattgacgaagtgaactatgaagaggaagaaaacacagcacaggaggaagatgacaatgtcatggaagaagaagaagacgaagaagatgagtacactttcaggttcaaaaacggcatgaaccctttggactttgttgatgacaatgatgattctggcattcaaccctaccagcgattcgtgcgttttgaacaggaagcccttgctgataaaaagcgtaaagcaattgatcactgccatattgaagaaccaccttctaagatggctagggaaggagatgttactggggcaaaaatagctgagataatgagagcaattgattattatggtgagcgcaagagatcgagaaagcctaataagagaggcaggcgaaaaggatcaaagaataaagatgaccctaagctaacac

SEQ ID NO: 22881 - DNA, 431 bp, Glycine max
  Clone ID: PAT_MRT3847_120663C.1
caccaagtacaacggcgaagttacagtgcttactgctccaacttgtcaatctcatcaagagaggaggtgacttgtccaccgcatgtccaacaccacttgtgagtcaagctgatgggctgatgcaaagctcactagctgttgctcaacagcctgtccctgtctttcgacctaatggggtgcatatatacaattaccctactaactacattacttatagtccctatttttcaccattttatgtattacctccagcaatccattaataaacgggtgacggggcatttactcaacaaccacctgcccgcactgtatatacttcacccccaactttttgttccgccggaatgaaatatactctttcacaattcaaacctggtgcaaatgcaggaaacccaactcaccttgttatgccaaatgcccatggtgtatat

SEQ ID NO: 22882 - DNA, 234 bp, Glycine max
  Clone ID: PAT_MRT3847_120664C.1
tgatggcacactgtgctctttctctccttgtatcgaacaagtacagcgaacatgtcttaatacttttgcagcagaagggatgacaaggccatgttgaggtctatcccgaacatcagaatcagccatgccaaacatgccttgtgcttgaaaagaattaagacatgatggcacactgagcacgatacattgctgtgtatggacagcttctgctaacatgtgaaacaccatctatct

SEQ ID NO: 22883 - DNA, 296 bp, Glycine max
  Clone ID: PAT_MRT3847_120665C.1
cccacgcgtccgttctcaacattatggaggacatacatttgattactcgttgttatgacaaatctggctacttaatttgcttaaaaaaaacaataaactaaacatagaaatactacctcctaaactgaaaagagccccgcaattaaaaaaatcaaaccttacagcagcacatacccatcttaacagcttttctatagtgccaacaagattgatccgatcgcccttcccttcacaccggcattccgaataaaacatggtacgcacccaattattttgcattaagctcaatccccgtt

SEQ ID NO: 22884 - DNA, 148 bp, Glycine max
  Clone ID: PAT_MRT3847_120666C.1
ggctcgagctctatggaatcatgtgcaatagacggaattgctccagacctggctgttgccagatgacacgtcaatcactatcccactcgatcggcacactgcctttctgtccctgctcgcatgcacaaagtcagctataagcagctga

SEQ ID NO: 22885 - DNA, 744 bp, Glycine max
  Clone ID: PAT_MRT3847_120667C.1
aattcggctcgagaagaacagttggtgctcttattgggctctatgaacgagcagtaggaatttatgcttcccttgtcaacataaatgcttatcatcaacctggtttaggcaatatggcttgtgggagaggtatgctgaattgtatccaaatgaagacctagtttacactgttggcattagtgactacagaaaagattggttctttgcacaggttaacaggaagaaagacaatggcactgacataggaaccacatggcaaattaatttcaagcttgatagtgtgaataccaactgaacctacacactgcgagtggctctggcatctgtgcattctgctgaattagagtttttgatatataactttaaatcaaatccacctttattttcaagtggagtgattggaaaagagaatgctatagctagacatggaattcacggtctttactggctattcagcattcatatacaaggcacactttttgtgcagggaaacaataccatctttttaacacaaacaagagacactagtccttttataggaattatgtatgactatattcgtctagaatacaaacggtgaaaatttaaattaacgattatactgaagaatattcattagaaaagtaattatttgctaaatggatgccagatgtacatttttggatatacaaatatcagtatcctttatatatagattgctcaactcttttatgtgacgacaagtctgttattgaacttgttagc

SEQ ID NO: 22886 - DNA, 1715 bp, Glycine max
  Clone ID: PAT_MRT3847_120668C.1
ttacggctgcgagaagacgacagaaggggaagaaagtgagggaaaaaagtagagtggtatgtgggttgctgcggcaacaaaaccattcatcaaattccaattccacagacacactacttctcttccgcttcttctgatggcaaaccaagcttcactctccttttcttcttccgtgtctcctgttcacgcgcctctcaagcgcgtgggcacgcacaacggaagctttcattgcgacgaggccctcggctgcttcatgattcgcctcacgaacaaattcaacagcgccgaaatcgttcgctcccgagaccctcaggtgttggaggttctcgatgctgttctcgatgttgggggagtgtatgaccctgcccgagatcggtatgatcatcatcaaaagggatttgaagaagtttttgggcatggtttttccactaaattgagtagtgctggtcttgtttataagcattttggaaaggagattatagccaaagaacttgaggtagatgaggaacaccgagatgtgcatcacatatatttggctgtttacaagagcttcatggaggcaattgatgctatagacaatgggatcaatcagtatgatacagaccagcctccaagatacgtgaataatactcatttatcctcaagagtaggaaggctaaatttggattggacagatcctgatcagtcacctgagaaagaaaatgaggcctttcaacgtgcaatggctcttgctggcagtgagtttctggatagtgttcgatttcatgtcaattcatggttaccagcaaggtcaattgtaatggagaccctagcggctagacatactgttgatcctagtggagaaattctagttttgactaaattttgtccttggaagcttcacttatttgagcttgagggagagttgaaaaatgaccctgctgtcaaatatgttctatatcaggatgaaagaagcaagcattggcgagtgcaggcagttgcagtatctcctgacagttttcagagccgaaaggctctaccctcacagtggcgggggttaagggatgaagaattgtcaaagaagtctggcattcctggatgtgtttttgtgcatatcagcggatttattggtggaaaccaaaactttgatggtgccttggccatggcaaaggctgctttgaagatgtagacgaggatcatatgaaccaagggctatcactgattttgcgcactcattcacagtacactttactgattgcgttgaagaatgcatatgaaccatggggactgggaacagtggcttaaagatggttctatatcaagttcattaactcatttgctgataggtggtctatcttatccaaattttctttcaatagtttaaccaatgtattagttaatgaatttcttgtgtctattatgttgataattgtcattgatcttattgttataagcatcttataacaaagaatttcttgtgtctatttggttcacttgagagagcattagaacttcagaaaaacgataaatcatttctaaaggtattccaaacagatagtcattctttcccgtcttactttttgtcaatttagctactagtttccttggctataagttataacaatatgtctagtagcaccacccctaccccaagcctaaccaaactactttagttgtgattgaatcttttggaaaccatttcaggtatgcaaatacgggaactgaattatttggtt

SEQ ID NO: 22887 - DNA, 154 bp, Glycine max
  Clone ID: PAT_MRT3847_120669C.1
acacacggggggggttgctaacgccaacgaaagatacttaggaaaaggtgcccttaggagaggcaacccccccgtctaagaaattcggcgaaccgggtccccaacaaagttaccgggcccccccaaagggcaacctcgggccaaaaaaaagagg

SEQ ID NO: 22888 - DNA, 396 bp, Glycine max
  Clone ID: PAT_MRT3847_12066C.1
ttttctcgtccgtagatggagaacccacggaggggacgtttagttgttgggctgtggtttaatgatgaatgcgcaaaagatgttatccaaggctggatccttaggtgatgatcattactgccagtgtaaccctttggggaggaatgtgcaaagaggaatcgacttccgatgctcacacaggcgtgggaacaactcttcagtgagggaagacaggatgtgcatgttcacaacgcactgggtaaaaccataattgatggcaacaaaccctcagtacattgactgacaaccaacccattctatcataggttacatgtgggcaggtattgagagaaaccgtgatccgaccttaccagggtgctgcacatgagcgaggacaatgagaccatgaactgatga

SEQ ID NO: 22889 - DNA, 722 bp, Glycine max
  unsure (1)..(722): unsure at all n locations
  Clone ID: PAT_MRT3847_120670C.1
gaattcgacctcgttacccggggatcctctagagtcgacctgcagaagattgaacaagccactataaagaatgttgcattgcaggaactgatacagttgtgtaaacaacaaccagaatcacagacaaattacacaattaagggtaatttgttgtattggaagaatcgggtagtaattcctgaggaaaaagaattgattcaaatgttgctgaaagaatttcataactctcccatagggggcatgctgggataaaaagaactacaactagaattgcaagccaattctactggacatccagcattcagaactacagtggagtaagggagaggggaacattgattntaacaggatatccagcattcagaagaaattaaatgaggtggaggacttagcttctaatcgtattttgactgatcaagagctcaaaatcagaaactcccttcagcaggagttatggaatgtatcaaatgtagtggaatcccttttgagacaaaaatctaggatatcttggctgaaagagggggactgcaattctgggtatttccacagaattattaaatttaggagagctttcaatgctattccangtatctctattgatggggtttgggtccagcaacccaatacagtcaagaatgcagctggtaattatttccagaaccagatttctgaataggaatattctaggccttttttggatgggggttccctttaaagctatt

SEQ ID NO: 22890 - DNA, 568 bp, Glycine max
  Clone ID: PAT_MRT3847_120671C.1
ttttgtttttttttttttttttttttttttttttttttttttttttggaccccttgaaaagttaagcccacattattcattaaaaactttggaaacgggaaaagagtttcaccatctggggctttccgaagcccgaaatccaaaattacaaaaggcaaaacgataaatacggaatgaatatccaataaaattctttcctatgaagaatcaaaattcaaaatcagtctacccgttgatcaactcctgcttttgggggaaacgaaatgcaataaaattctactcccctgagatgaatcaaaatccaaaatcagtctactggttgaacaacttttgcatatgcagtttcaaggggcccttgctctgctttttgaacctccttttaagttttcctgcccttttttgatttgaagtatacactcataaagggcccaacagctccatacttccccctaaaaggctcatataaaccagcatcaaacatcctccaaaagtttttttcggacagttctgacacaccatactggggctgaaaaccatgattttcaatcaacccgttctccattttacc

SEQ ID NO: 22891 - DNA, 1653 bp, Glycine max
  Clone ID: PAT_MRT3847_120672C.1
actctctatacatttcttgttatcttcaactcctccatttgcgcttgcagcaagcaaacacaatggtagaaatgaagggcatatgtaatgtgttgcatgggttgaaaccagtgttgctgatggtgttagtgcaaattgcatatactgctgtcaatgtgcttttcaagctcgccataaacgacggaatgagtgtaaaggttgccacagcatatcgcctcacttttggatctgctttcactgttcctctcgctctcatttctgaaaggaacaaaagaccagagatgacttccacgcgtccgtacggctgcgagaagacgacagaaggggggggaagtttatttcaaaaccttttctatgagtccttggctttaacatcagcaacgtttgcgtccgctctctacaacctcattccagccattacctttgtcttggccatctcctgcggtttcgaaaggttaaatttgagggtggcagcaggaagggccaaggtgttgggaactttacttggaattggtggagcaatgttgttgacctttatcaaaggggcagaaattaatatctggcctttccacatcaaccttatgcatccagatcagcaccaaaacagccacgtggcatcattaaatactgactctggcaataataagttgttgggagcaatttgctccctagcaagctgcttctcttttgctttgtggctcaccattcaggctaagatgagcaaagaatacccatgtcactactcaagcacggctcttatgtctacagcgggagcaatacaagccactgcttttggtttctgttttgagagggatttgacccaatggaagttgggttggaatattcggctactggctgtggcttattcgggaatcgtggcctctggaatagttgtaattataactgcgtggtgcatacagatgagagggcctctgtttgcgtctgttttcaaccctctaatgcttgtgcttgtggctattgccggttctttgatgttgaatgagaacttatacgtaggaagtgtggttggagcagtgctgattgtgtgtgggctgtacatggttctgtggggtaaaagtaaagagatgaaaaatattactcagttagtaccatcagaaaccatccgagaagctgaagccatagaagttgttgtcatgtccatttccacaccaatagattatgaaaaatgtgaccaaaacaaccaaggcgaaaggaatgttgacaaagaagattgtgacgatttgacaaaaaacaaggaagaagatgatattggcatatagggggagaaaaggaatcggccgaagatgatgattgcttgtcctccattaatagttgcctatgcttttgtcttcgattcttttattccacaagtcaatgaactacagtttactcatgatatatgtaattttgtgccataaaaagtttaacaattagatttcagtacagcttcatgaatttccactgccaatcggctcaacttctggctcttcaagatgctaagggccttgtgtaccaaaataaattgctatgggcctgtaggatgacccttctttactttggacttttagcccataaatatgtatttattagagaggtagattttttatttatcaaccaaaataagtaaatgaataaacatacttttttattaag

SEQ ID NO: 22892 - DNA, 1063 bp, Glycine max
  unsure (1)..(1063): unsure at all n locations
  Clone ID: PAT_MRT3847_120673C.1
acgagaatcttctgagcttagagtttagagtataagcctataagccagtttgagcctaccataacatattaacatacccttcactttctatggaaaacaacaccacctcacgctcctctatatgctggaaaatccgtcaagcacttgcaaccaatcctgctttcagagtcattcatcatcgcatcaaacactattaccaagaacctagacctgtccccactcatccaaattctccatcattaacaccctccactcacctccctcaaaatatgatgaaggctaagaatataaaaggtgaaggagaaatccccatcaagtttgataactcaatccccacatccactccaatggtgcacggccaggtatcaaaagttgcttcacctcaagttggaatatctgccaaggttgaacctgaaccatggcatgttcaaggatcaagagttggtgtattcaaaggtgaacataataatggcaaagatacaagtaccacaggccctttgaaggaacagcatggtcttggaatgcaacaaggtaagaaaacagtagtagatatcaatgacactttcactgagtacattgaacgtgctaggcacagaatcagaaccgtgtcaaatgttggtagggggcagagccactctgtgtcagatgaaactagtgggaataagaataacaagatggaaaaccatacagaccaattttctgattttattcagcattctaagaagaagatgagaactactacatcaaatgttggaaagactagtacattgaaaagagggtataagagttaaagatggtgaacattgaaccagggagcatggcaaagaatgttgatcattaataaacgatgttggtgacttgatgttgttcaatgtgtttgttgggtggagtggattcaataataaggccataccaggttttgcaagaagatattttcttctatcgtgcatatcttatttgagattggagagcgtgatagtattaagggaaataatttggatttaatgctttcaaaaaattctcatttcttatgttgaggtcttcaacatttatcnnnnnnntt

SEQ ID NO: 22893 - DNA, 170 bp, Glycine max
  Clone ID: PAT_MRT3847_120674C.1
atattcccaataccttctattgcctcaagatgagggtaaactatttcatcatttctcgcccccactcattgattaaaaaactattcatgttctttaattaaaatatccttaaagataattcttcatttattcctatatggctccttcattgtattcaatgcaaaacattc

SEQ ID NO: 22894 - DNA, 277 bp, Glycine max
  Clone ID: PAT_MRT3847_120675C.1
agctttggcagaaaaaggccttaactctgactaccttgatgggatctctgctcttgagtacttatgcttcactaggtgaacctgctttacaagaagattacaagtctcatacataatagcgagagctatctgtgagtgcctaataacaggcgccatattgatatagtgcgggtcaaaacatgtgctttggtcctctccgatccctaccacaaagctcatgccaggagcaggactcattttagctatcagaaggagtatcttgcttctacgagaggga

SEQ ID NO: 22895 - DNA, 525 bp, Glycine max
  Clone ID: PAT_MRT3847_120676C.1
actagtctcgtttttttttttttggttattgaaggtacatacagccaacttgtgccacatccggccaaggactctatgaagggctagactggttatctagtctcataactaacaagacaagatgaaccaattagctctgattgcgcttccgatcttcaaagatatgaatactgagactattatagtttctataatatctcgtttgtttataggcataaatgagtggtatctgttatttgaagtttgaaccacctataatatcaatcactatgatttatgacatgtaagtacataaaattctgaggagtattatgtacaccccgatgcagtattaaataacatttatatggtttgtgtatgtatagagcggcagatgtagactactccagtgtagaagacaagaatggaaaattatgacaatgtgattaagaaaaaaacaagaaaattatatttattttgtttggctgtaggtatgttacagagtttctctggcggaaagccttgccaactaaatatatagatttc

SEQ ID NO: 22896 - DNA, 333 bp, Glycine max
  Clone ID: PAT_MRT3847_120677C.1
tacggctgcgagaagacgacagaagggcatatcctaaagcaaatttccagacctggtctggcccattggtggaacctatgggggttccactaaggaaaaaaaagaacatgcacgggacggggcacagacaatcaaagaaggattcttatatatagagtgcctcacacagttttacaatatatctaaagaatcgcaatataacaccaattattcataaccagcattgccgaaactaaaaaagtgctgctgacttctttctcatcgacagaggattatcttctatgttgataacacccactaatactttccctccctccaacctttggtttaatc

SEQ ID NO: 22897 - DNA, 717 bp, Glycine max
  unsure (1)..(717): unsure at all n locations
  Clone ID: PAT_MRT3847_120678C.1
atttctcaatcatctctcttttttctcttcccaccttccccacaaagtccttcctccccttttgctttaacaggagtggtaataaatatttatgagttttcaaattttaacaacaatgccataattaaataataatttaaaaaaatcattcatttatttatataataaaaaaattgggttctctttttgtaactattctccttgctcctcttgttcttcttcctccttttactccttcaacaacacaatcatttcaaacacattttttgtatattttgggacaattatttcaaaacacacaacacagcctgagacagacaacaacaacaacatcaacatggtaagataacaaagttggatcaaattccaaataactggttgggtcgggttcgggtttctttggatccgtttctctggttgggtcgggttcgggtttctttggattcagttctctctttcaatcttctcagcaatccatcgttctctaggtagggtgttcctaaggtgaggtctgaatggctgggattgatgataatgttgcccttactggtgattggggtcttgctagcccaagtccaaggacctttttttccagaatgttagaagaagatagtgtgacaagatcaatctcagaacattctggaagtggtagaactggngatcccttttcgggacatcgcgagctagtgagatgaggaaagaaaacatgaaaagata

SEQ ID NO: 22898 - DNA, 161 bp, Glycine max
  Clone ID: PAT_MRT3847_120679C.1
ctgatctgctgaagaaaggcgggtcgctagaagcatctttcaccattagatgactaaagttgtttccgtcccacgtcaagtgttgtgaccgaaaatatccaagatagctgttagatagctgacccgaacctcactatgatgcacgaaggtcacaggtgacc

SEQ ID NO: 22899 - DNA, 513 bp, Glycine max
  unsure (1)..(513): unsure at all n locations
  Clone ID: PAT_MRT3847_12067C.1
ggctcgagcaactttgatattgatggaccgatgtagtggtggttttgttaatttgctatatgtcaatcctgtgttgatcgacagagcaggtaaattttactcaataaaaaaggtttcaacaccttttcgaacctacaaatatgcaatttttgtagtcataatccaggaaatattcaaatatttcatcagtctcctttagataaacatttatttggttccatctaatgttgctatgtaagcaatttgtaacgtggcattcctatgtggcaacacttcgaaggagtcgcataagcatttttttgtaatagaagaataaaaacagaaagtttcaacattattgggattataaacaaaagaaagaaaattacaaagattaaaagtgaaaacaagtagtatatttacaagaatggaaaaggtatttaaaccaccctaaacaatataagaaaaaatggttggacttatagttgtgtatcatgtacactcagacacnatgctaatgaacactaagattgg

SEQ ID NO: 22900 - DNA, 278 bp, Glycine max
  Clone ID: PAT_MRT3847_120680C.1
cggctcgaggctgcgagaagacgacagaagggcttatatataacaacttaaaatttcaggtcaaccaaatctttaaacagctattttcacttctttgacctcaaagcatcaatattaccagtaatattatgaccgagtaaaaatatttgcgggtttcaaaatgtactgtcctttccaaaccaacagtaacaaattaatttaaacttaaaatcatttatccctgtttcctgaatacagtatgatttactctaatattctaatattgattttcagtgggc

SEQ ID NO: 22901 - DNA, 224 bp, Glycine max
  Clone ID: PAT_MRT3847_120681C.1
ctcgagagaaacgttctccgagagctttactcagagtccgaggcgtagatacgacgctctcgggaccacccaactcatcatctgaagtcaagccatggctataattgcacctgagcggtcacagcacgatgctcgtcaatatcattctacaatgtgtgacggactgtcatctgatggacaggactcgcgtcacatcctatgacgacgtctatgatcagttttga

SEQ ID NO: 22902 - DNA, 1579 bp, Glycine max
  Clone ID: PAT_MRT3847_120682C.1
ccacgcgtccggtggaaattatcttggccaatacacagaaggggcagtgaagcaagggctattggatgaagcatccattaacaatgctgtctaaacaattttgcccattgatgcgtcttggtttctttgatggcgatccaagcaagcaaacttatggtaaccttggtccaaatgatgtatgcacttcagagaaccgggagctcgcccgtgaagcagcaagacaagggattgtgttgcttaaaaatagtctgggatcattgcctctcaatgccaaagccattaaatcattggcagttatagggcccaatgctaatgctaccagggtcatgattggaaactacgaaggcattccttgcaactatatatcacccttgcaagcactaacagccttagttcctacgagctatgctgccggctgccccaatgtgcaatgtgcgaatgcagagttagatgatgccacacagatagcagcatctgcagatgcaacagtgattatagttggtgcaagtctagctatagaggcagaaagtcttgacagaattaacattcttcttccaggacaacagcaacttctagtgagtgaagttgctaatgcatccaagggacctgtgattcttgtcataatgtctggtgggggcatggacgtgtcctttgctaaatctaatgataaaatcacaagcatcctttgggttggctaccccggtgaagctggtggagctgccatagctgatgttatttttgggttttataatccaagtggaaggctacccatgacatggtatccacaagcatacgtaaacaaggtaccaatgacaaacatgaacatgagggcagatcctgctacaggttaccctggtagaacatatagattttataaaggggaaactgttttctcctttggagatggaataagcttctcaagtattgagcacaaaattgttaaagcaccacaattggtgtctgttcctctagcagaagatcatgaatgccgttcctcagaatgcatgtcacttgatattgctgatgagcattgccaaaacttggcctttgatattcacctcggggtcaagaacacggggaaaatgagcactagccatgtagtgttactgttctttactcctcctgatgtgcataatgctcctcagaaacacttgttgggttttgagaaagtgcacttgccaggaaaatcagaagcacaggttaggttcaaggtagatgtttgcaaggatttgagtgtggtcgatgagcttggcaacaggaaagttccactgggacaacatctgcttcatgtgggaaacttgaagcatccattgagtctgagggtttgaaacaagtcttcaaatcctcggcactgatttcttttttttgccttcttttatttttgcctttttcctcgctggtttccttaaaagaattcttctaggggaccagaaataagtcagaggtaactgtaacaaaattctctgattggcattatcgtattcaaatcacaaatttggaaacaaaaaaaagttttcgtttctgagaggctctcaaagctataccgtaggtgagcatcgcgcgcaatagctgttcatag

SEQ ID NO: 22903 - DNA, 391 bp, Glycine max
  Clone ID: PAT_MRT3847_120683C.1
cattataccaggaggtggaaccctgcccctacatgcgaagccttatttactacatattctttgttgggcgcactatatctatcatgctttggttaaatgacctgctgcccgattgtgcccttctctgcaaacagaacgtgtatttttgcggtaccataaatgcgggggacatgggggaagtgctgatgccccagataatgagctgtgacactgccaagacacaaggacctggggcagactgcctagctcacacaacttaagcacggaacgccgagggttgtgtgttgagctgctcacacaatcacatctatacccccccctttgcaacatccaagatcatgaatagggcagtaacggcggggccctcctcggaccctgctggaaagcttaa

SEQ ID NO: 22904 - DNA, 1100 bp, Glycine max
  unsure (1)..(1100): unsure at all n locations
  Clone ID: PAT_MRT3847_120684C.1
aaaattaacattcttcttccaggacaacagcaacttctagtgagtgaagttgctaatgcatccaagggacctgtgattcttgtcataatgtctggtgggggcatggacgtgtcctttgctaaatctaatgataaaatcacaagcatcctttggattggctaccctggtgaagctggtggagctgccatagctgatgttatttttgggtcttataatccaagtaagtcattcacagcctcccttgtatnaaaaaaattccaatcctataatgatacttctttgacactgatggataatttncctaatgcaggtggaaggctacccatgacatggtatccgcaatcatacgtaaacaaggtaccaatgacaaacatgaacatgagggcagatcctgctacaggttaccctggtagaacatatagattttataaaggggaaactgttttctcctttggagatggaataagcttctcaagtattgaacacaaaattgttaaagcaccacaattggtgtctgttcctctagcagaagatcatgaatgccgttcctcagaatgcatgtcacttgatgttgctgatgagcattgccaaaacttggccttcgatattcaccttggggttaagaacatggggaaaatgagcagtagccatgtagtgttattgttctttactcctcctgacgtgcataatgctcctcagaaacacttgttgggttttgagaaagtgcacttgccaggaaaatcagaagcacaggttaggttcaaggtagatatttgcaaggatttgagtgtggttgatgaacttggcaataggaaagttccactgggacaacatctgcttcatgtcggaaacttgaagcatcaattaagtgtgagtgtttgaaacaagtcttcaaatcatcttcactattttttttttccttttttcctccctggtttccttaaaagaattcttctagggaaccagaaataagtcggaggaaactgtaacaaaattctctgatttgtattatcatattcaaatcacaaatttggaaacaaaatcaaattttgattagagcccaaaaaaaaaaaaaaaaaaaaaaaaaacggatgcgtggg

SEQ ID NO: 22905 - DNA, 406 bp, Glycine max
  Clone ID: PAT_MRT3847_120685C.1
cgccaactaacctcacagaccgtcaacatgggtaaacgcggactcggaaagcaccagaagcgcctcagcgcgccatcgcactggctcttggacaagctgtccggtgcttatgcccctaaagcatcgcccggtcctcacaagctccgcgactccctgcctctcatcatcttcctccgcaaccgcttgaagtatgccctcaacgcccgtgaggtcaactccatcctcatgcagcgcctcgtcaaggtcgatgccaaggtccgcaccgacagcaccttccccactggcctcatggacgtcatctccatcgagaagaccggcgagaactttcgtctgatctacgacaccaagggacgctttaccgtccaccgcatcaccgatgaggaggcacaatacaagcttggaaaag

SEQ ID NO: 22906 - DNA, 444 bp, Glycine max
  Clone ID: PAT_MRT3847_120686C.1
attaattatttttaatttttttacggacaccattctcgaaaaagatttgggatgtaaaaccccaactgtccatactaaaaataataaacgtaccagagtaggattctatatttgcagaaaaggactaatctaaagttgtaaggaacctgaaaaaatttggtgaaggcactgaaatggaacccaacctcgggcacttcatgcaaaaactaaatcttctgataccaaacaccagaatgctatcaaaactcattgccactattgatatgaacggcgcccgaagggcgcacaaacttgtatagaggagcatcggctatgaaaacaaaacccgagggcgccacatacagcgttccactcagaactttcaatatatcctgaagcgtaggcttatggatatgacacgagagcacatccacatattagactgagctaatatctaactgaatg

SEQ ID NO: 22907 - DNA, 461 bp, Glycine max
  Clone ID: PAT_MRT3847_120687C.1
ggagggaacaaaaatttttttgaccggcccgactttggatttgaactttactttttgggcagcaaataaaaaacaatttagcagaacaggatcaatcaatagtatgtccgggggagtcctttaaccaacactaccaaaaatccccacaggagcattttccatttttaaaaggagggaaccgcttgttatcccaaacaataagcccccttccaacaatattggacaaaatttggatggcatgggggcagcccccacaaaaacggaggttcttgaggattctaagggaaccccttgggggggaacggaggaaaccataagcaattgccaaacgttcgctatgaaattgcagggccttctttttttccccctcataaagggcagggaggacatattttgtatccggcacataacctgtttccctaatttgcccactaaaacctcccaatttctaaggaccctct

SEQ ID NO: 22908 - DNA, 539 bp, Glycine max
  Clone ID: PAT_MRT3847_120688C.1
ctttttagtagagaaaagatgaaatccaaaatgctggttaatcgagttaaaaaataatagataaaggcgtttaagatagttgttatccgactaagagcaactataacgtgttgtttatctcagtttcttagaattaagcaatggtggttaattgattttaggattggaataagtgatcagctgttgcttagcaattttttaacaacaaaaagttgtatttttaataaataatttcaactgggttcatttgagcaactcatcgactcatcatgttggcgaaaaaaaatagtaaaagttcttaagtgtgatgtgtgtaagaacccccaaaaaattcatttcaagtaatttaatgagcaacttaacaatgtagatgctctaaaataaaactgattgatacacttctagtatgaatgcgcaaaacaatgccagatgataataaactataaatttcaggatgaagcactgtaagtgagggaattttctggaaggtcacaaagtatccgtttgttttagattgtttgactctaaaacgatatttg

SEQ ID NO: 22909 - DNA, 603 bp, Glycine max
  Clone ID: PAT_MRT3847_120689C.1
agggaattaaagttgaattaaagttgaataatatctgctgagcattaaaagttccccaaccatgaaggcaatccttgttttcattttactcttggcctctatttttttccttcccagttcaactcttgctcgacaactggaggtggtgacaggcggtacccagaaccctaataatcccgcttttaaatgtagccgcggcggcagttataggccttgcgccccatcgaactcgccaccaagaccaccatgtaatgggtacattaggtcttgccacatcgcatcgccaccaagaccaccatgtaatcagtatagtagggaaggttgcttaccatgaaactaccgccaacagtactataatgatatatgtagtttttaattcttggtacttgctgccatctttttaacactcttcctgtgttaaaactcggtggcatcatatatcatcatctctatattccgtgtggtttggctgaataaattaaagaactgtgctcttattccagtttgcatgcagttgcagtaatcttgtaatgttgtactgagacaaaggcttggccttttgtccaatcaataaattataagaacttgattatctaaaaaaaa

SEQ ID NO: 22910 - DNA, 110 bp, Glycine max
  Clone ID: PAT_MRT3847_12068C.1
cccacgcgtccgacagatttgtatcccgaacttacatagtgagagaaagaggtctcaactgggggcacatatagcggcagagcaagaaacatcctccgacggcaccatta

SEQ ID NO: 22911 - DNA, 265 bp, Glycine max
  Clone ID: PAT_MRT3847_120690C.1
agaggagataaagaagcacccgagacagcaccactgcaacaccgtttcttccaaccccttctttctaccaattattattcctatgtcataacgatggtaaacctacaaaaggttgaacaacatgttacaacagaaggtcaaaggaaaaagaataagaggaagaagcaagttttggttcctcgtcctgcatgctcatgggtgtattttagtaaagagtttatcaaggagtacattgcttcccatccagagtcaccaggccttaaag

SEQ ID NO: 22912 - DNA, 506 bp, Glycine max
  Clone ID: PAT_MRT3847_120691C.1
cccagcaaacattttattttttttattaaatgggggtcaattaacaaccaaacataaccctttttttttttttcagacccataagagaaaaaatggatccccaccccagggggagaatgcaccttgaaaagcagcaaagggctcgtataacttcatattcagggctggaagaccatgctctttgtttttggcttcagggtttcaaagagcccagatgataaataccgctctccaaagctggggaagaccgcattaatgagttttccagcattttcgggccttttggctatcttaatggcagcagctgcagttgccccagatgattttcccaccagaaaaccttttttaaaagaaagaagtttagcagtttcaagggctttttcactggaaattggaacaaccttcctaagtaaaccgacatccaaaacaccgggggtgaagccggccccatttccttggttcttatgagggccaggttttcctccagacagtttgggactttttac

SEQ ID NO: 22913 - DNA, 272 bp, Glycine max
  Clone ID: PAT_MRT3847_120692C.1
caagggcacggcatattgggaagatggcatgggggaacagcggggtgatatgaggaagcaaccttaaacagatggtgtgcgcaccttacagctgttgactgcgtttcatgtgccgacatacgtgactcgctggcagtgactgttcggttgtactgaggagatgtgcacactggtaccaggacgctctcgggaccttttgagagggttatatagcactgaacattgctggccatgaagcacaggcgattgatgagcacatataagatgttctc

SEQ ID NO: 22914 - DNA, 578 bp, Glycine max
  Clone ID: PAT_MRT3847_120693C.1
gccctaacctctctatgcttaatatatcacatacatggggttatagaaggaagagtgcagcacctatgcgtgacagacgacataggaaatagtcttgaagagtaaagcttatcccttactacacagggcgtggaaagacacaaaactacatatctcatggctcaccacatgaagtccatatacgagtccagtcatacccaccaaatcacttcaggaatcggaccaatgacgtgcttactcatagaccatctttaatgcttgacagattctggtgcatcacaaaaaccgtactacccacactcaacggcgttgacttcatcaacgacaccactctacggagacattggctgtccccaaacaaaggaaccactttaaatatcctgcacctgaagctccacaatgggcagggagggagaaggaactactcaagaaatgggcttacatctctgttgatgaagatactagcaaggacttgaccatggtgctcgggcttactcttctctgatgcatgcataagctgacataacctgcttgccagatatatatgcaatctccctagatggaactgatcaacctaa

SEQ ID NO: 22915 - DNA, 209 bp, Glycine max
  Clone ID: PAT_MRT3847_120694C.1
gttatccgtgctgtaggtgtccctcacctggcaagaagtcttactggcaaaaacggaggctaccttgctgggcattgaaggaccaatggatcataaagcttacttgtcataaacctctggacatactctaagacgcgctgctgctacactttccctatgtagtataacctaacggcccgcaaaaaagttaactatttagtgaggcatca

SEQ ID NO: 22916 - DNA, 310 bp, Glycine max
  Clone ID: PAT_MRT3847_120695C.1
aaacaccaactgattccatttttttttttttttttacaaagacatcaaataaatggggctttttttttttttaaaagggaaaacccccggttattgtggaatatttttacaaaaaaattgggaaatggggaaccctggtcctttttttacccccaaccccttagcttggggggggaaccccccactcccaggtagggggaaaaaacaggttactttgccctcccgctgtaaccaacagggatagctttgcaagaaccaccctttcctttttgttaaaaaaaaaaaaaaacctttaccctggtttttaaaa

SEQ ID NO: 22917 - DNA, 458 bp, Glycine max
  Clone ID: PAT_MRT3847_120696C.1
ggacacccaaaatttttttaatactatgcaacatcatggggaaaatttgttttttttcctgggtaggggggggggcattaagtccaacataagctacaaaatatgggtcatgggcctattatccccgggttttttccctgggggggaaaaatatttggttataaaaaaaaacgatttcccccataaattttgtaaaaaggaaactgtttttatttccatttaaaacacacacacaccaggggaagagacttcttgaaaagaggaacattcaaaatggggttttttaatataagcccctggggctgaaaagaaggggatgtttttttattaaaaagggggccttttttggcttaaaactcttcctaaaaaacggggcgccacttgtaaactccttgggtttgggggatttttttccaaaggtcctttggttcctaaattgaggggatttgggtgaaatt

SEQ ID NO: 22918 - DNA, 505 bp, Glycine max
  Clone ID: PAT_MRT3847_120697C.1
cccacgctttcgttttaaaaaaaaaaaaaaaaaaaaaaaaaaaaaaagggaaaaaaaaaaaaaaaaaaaaaaaaaaaaaaaaaaaaaaaaaaaaaaaaaaaaaaaaaaaaaaaaaagggaaaaaaaaaaaaaaaaaaaaaaaatggggggcccttttaaaagaaccaaaattttttttccttgggtgccaaattttaaaatttttttacgggaaattaaaatggatttcaaggggaaaaatttttaaaaatgcaaaaattgtttaaaaccttggggttaatcaaattttaaggccttttgccaaaaaaccccttttaccaaattggtaaaaaataaaaaaagccggccccttttttatttcaaaaaaattcccaatttttaaagggaaattagcacccccctttattgggaaaataaaacgggggaggtttaggttttccccccatttaaccccttaattttgcaaggccccaaggcccttttttttaagttttttacctttcct

SEQ ID NO: 22919 - DNA, 403 bp, Glycine max
  Clone ID: PAT_MRT3847_120698C.1
ctcggattgcgggtccagctctatatgtaataaaggaactgaggtgcaaacttaagcggtatgtatgaattgaaatgacaggatagtgctgtagaaaaaagaagaacccaggcgcctccccattattggagagtggcgacctgagaacttattattgaccgtgacgtgaacgcgtaccatctgtgcgtatagtgagagtgattgtaacttcccggaatcatggacctagctagagcgcgtgacaagtgacactacggtaacaactgcacacatagacgctgcccttagacttaattgtaaacgcctgaggtgccgattgacccagctcacttacacaaattgtgatgtactccctgtgatcttcacggcaaatccatcggtgatcccaaaggactaatgaatc

SEQ ID NO: 22920 - DNA, 745 bp, Glycine max
  Clone ID: PAT_MRT3847_120699C.1
aaaaaaggttagagaatgttgttgtaatttggtctagttaacttggtggctcgctgacgtcacgtggttaagttgagaaacaacaacagagacacggtggtgtactcacggaatgaattggaatcggatcgtgtcgtagccaccgctcctacctggcgccgtctttcactttctgcttctcccatctcccactaaacaaccatggacctggatcctcgccaatacgaaaaccttgctgtaaatgataatgacatccacaacattgttctgtcatatcttatacataattgctacaaagaatcggtagaatcattcattgcttgcacgggagcaaagcagccgacagattatttggaggacatggataaaaggaaaagaatttttcactttgcactagagggaaatgcactcaaggctattgagcttactgaacagctggcaaaggatattctagagaacaataaggatttgcagtttgatctactaagccttcattttgttgagcttgtctgctcaaggaaatgcacagaagctttggagtttgctcagaccaaattgggccctttcggaaaggagcccaaatatatggaaaagcttgaagactttatggcccttcttgcttataaggagccagagaaatccccaatgtttcatctccttagcttagagtatcggcaacaggttgcagatagtttgaatcgagccattcttgacacttgaatcttccaagttcacagcaatggag

SEQ ID NO: 22921 - DNA, 282 bp, Glycine max
  Clone ID: PAT_MRT3847_12069C.1
tgtgtgtatgtgctttggttgtaggaaaacttgaaaattccaaaatccttattttcctatttgagaggctggttcagcagggtgtgtgtgtgtgtgtgtgtgtgtgtgtgtatgaatggtatatttattacattattttgaaagagaattagtgtgttatgtggataatgttatatacagccaaagtggatgtctctatttggcaaggaaggtaggatttctgacactcaggccttaaccaataggttggaagacaagaccaattgaagagttaggaaatgt

SEQ ID NO: 22922 - DNA, 275 bp, Glycine max
  Clone ID: PAT_MRT3847_1206C.1
cgtgaaggaagtctttactacttgaagaaagtaggatacaaccctgacaagattcctgttgttccgatctctggttttgagggagacaacatgaccgagaggtccacaaacacttgactggtacaagggctcaactctgcttgatgcacttgaccagattagtgagcgcaagaagtcctctgacaagcccctcagggttccccttcaggatgtgtacaagattggaggtactggaactgcgccagctggacgtgttgagaccggcgtcttgaagc

SEQ ID NO: 22923 - DNA, 446 bp, Glycine max
  Clone ID: PAT_MRT3847_120700C.1
gaaaaaaatggtgggttttacattttttttcattgcatcctttcctcttcaaagcataccaaatggtggaaagaataggttttcactttttccattgttccctattcctttcatcgatattcactcagctcatttcaaacaaagcataaggtgttactataaaaaaaaaaaattgtttttatcatattcacatttaacttttcaacatcttcaaatcatgtgattacttagtaggatgaaaaataatatataagaaacttgattttcttaaaaaaaatatatcaattgaagaaaaatagaagaaaaaaaatgaatttcttttagaagtcaatttatttttcttttttcttttttttatctctctttaatttaatcaaacaaaggatatatatatatatatatatatatatatatatatatatatatatatatatatatattcaatc

SEQ ID NO: 22924 - DNA, 331 bp, Glycine max
  unsure (1)..(331): unsure at all n locations
  Clone ID: PAT_MRT3847_120701C.1
tcgnctcttgantntcatgcatatgtgtttgnntgctgttacgggatgtagcattgtcacatctttgagggatggaatgcatcttgtaagtnatgatttgtggnctgccangatananagnnngggtctcttctcagcgatttgctggtgtgcacatcantagtgctgggtattctanncancnttgnacancacgangtgcacngcnatgccaagctctgntatgccncggcggacgagagngagacanagcttactatnnncatgtcaaacncccatgtcaggatgggcnnnactttgtagnactaatgtntgtgcgagccngagaggc

SEQ ID NO: 22925 - DNA, 270 bp, Glycine max
  unsure (1)..(270): unsure at all n locations
  Clone ID: PAT_MRT3847_120702C.1
gattttccgcactgatggtatccgnngaacaggacattgtcaagcntgttgacaccttccctggccaatccattgatttctttggngcactgagggncagagtatatgatgatgaagtgaggaagtggattncncgtgntggngttgacagtgtanggaagangttgtgaactcaaaagatggacngccaaccntgagtagcccaagangactctgggagagctctgcngnaagggaacaagctgtnccanaacaagannatggcnaggg

SEQ ID NO: 22926 - DNA, 520 bp, Glycine max
  Clone ID: PAT_MRT3847_120703C.1
ggcactagagagccacgtttgtgtgagatgtgtagccacacccacttgccaacagtccccacattaccgacccttgccatacccaatgcaaaccaaagctctccttcctaagaagaaacctcaaaaatgttccaccggactggctcccggagagtactgatgccctaccaccaccaccaaactgctcatatactgatgctgcgataacgaatacccttagacctatgatgactatatgctgaacaatggaggtataggactctttccaaagttgattgatgaacccaatgctaaatcctctcctgcaaaggaagagccttcacggattctaaccttaaatagagacatgagcctggacagtgtggaagttgactacagcaaagaactctcagctgctgtagatcatcatgcacacctgcaaattgatgcatcaactaatgtgacatgaagcaatatgctaacatatatatcatcaccaacacgacgtgagcaagaaatatgggatagagctaccaaggca

SEQ ID NO: 22927 - DNA, 176 bp, Glycine max
  unsure (1)..(176): unsure at all n locations
  Clone ID: PAT_MRT3847_120704C.1
gtctgatgcacgcgcacagaagcgagtatcctcaagagcggccgcccacgatgttttttattnttaagtgtgcaattgccagacgcacaaaggaaagaccgcaagaacaaaatccaactgcttcacaagcgtagaggtaaaaaatgccaaaacagcaccaaaccctatgaaaacca

SEQ ID NO: 22928 - DNA, 433 bp, Glycine max
  Clone ID: PAT_MRT3847_120705C.1
atatgcccataccacctatgtaaggttacccactcaaaatggaccttggtaagggatctggagagaggcagatcaacttgacaggacgtcagagctggggccacaggtcctgaaccgttgctcacaacgaagatccaacccaattgtcatccctcataccgagagatgatcgctgaactttctacttgtccgatcaccattactccaccatggctcaccgatagaagcacaagtccaggcgcatctgcgagatttcaaagatagaagacccacgcatagatccacaccagaacaatacctaactcagaactcacacatcggcgcttaccatggtcttaccttggagacacaactgactgtccccctgaacacgtaataaaattacgtatggaagcagcatctatgccattaaggaatggtgcgaacccttatc

SEQ ID NO: 22929 - DNA, 272 bp, Glycine max
  Clone ID: PAT_MRT3847_120706C.1
tcttcctatcactcgtccaaatctcatgatgtctacataatcatatcaatcatgctattctgctgttctctatgactatgcatttccatccatagatccctaaatctacatttaaaaaggaaaccccaaatctaatgactaaactatcaatcaatcatattaataatccatcaatcaattatcgaataccatactcaaagacctcaatactatcacacacatctataaccgatacttcatcaaccatatctactaccgttcttttctgaatc

SEQ ID NO: 22930 - DNA, 288 bp, Glycine max
  Clone ID: PAT_MRT3847_120707C.1
gtgacatgaagctgggcaagctggatttgaacaataaccattttatgggtccgattccggatttttaaagcggctactgtgtcgtatgatgttaataatttttgtgtgagcaaaccgggggttccttgcgcgtttgaggtgatggcgttgttagggtttcttggtgggttgaattatcctctgaatttggttgattcgtggactgggaatgatccttgtggggggaattggttgtggataaagtgtaatgctgatggaaaggtgattatgattaattggcctaatttg

SEQ ID NO: 22931 - DNA, 1586 bp, Glycine max
  Clone ID: PAT_MRT3847_120708C.1
ataatgagtaagcatgcttaatataattagcagctccaatgaatgatcacattatttttatatagcaagaggtacctcattcagctcatggattcagctccttctagttcttggctgcaagccttctccttcttagcattggtttggttatttaactgtggatgtgtccatggagcctccccagcagtgaaagtaggtaacttttcaaaggtggaagatgctggaaacttccacatctactatggccagaccttcaaagtcattaagaattctgctgatggccagagctaccttcttctccagaataattcaaggattgcatcaaggactaaatattgcacatcaagaatcaaatcatttgtcattccattgtcaaactattctgttgatacaactttttttccggtctcctttgtagagcttttaggtttagtggagagcttgaaaggcataacctcagactatgtggcttctccatgtgtgttgaaactgtatcaaggaggacagctagaaatgttcaataatagtgattaccaaaagcttgcagagttctcttcatactttcttagtgacactgatcagcagccagcttgcaattttgcaacttttgttccatttatagaggatatccctttgcagagagcagaatggatcaaattcatgggagcttttgcaaatgttgaagctagagccaatcaagtctatacagcagttaaggcaaactatttgtgcttggctaaaattgctacaagtaggacaacattcaagccaacggtagcttggatgaggtataaaaatggtctttggtcttttacacaggaaaagtatcaattgaagtacgtgcaagatgcaggcggagagattttgggtgccaacaagaacacttacaatgtctctgatcctgatgacttggaggaatttcatgccatcctatgtaccgtggaagtagtcattgatgaaacactaacatctgatccagtcaactacaccttttcaacatttatccaaaatctaaacgttgaagatcgttcttgtttttcttttatttcaaacacaagtctatggagatatgacaaaagggtttataattctgtagctcttgactggtataatggagctgtgtcccaacctcaattggcactagcagatcttattgaagttttatttcccactgaaaattacacaatgacctattttaggaacattgcaaagggagaagtacctataaacattggtcccgaaatgtgtgatagggacacatccacagcaatggagcctaccatagtagcatgtggatgattatctttcaagttcaaaaataggtatagtgttataaacaatcaacagtcaaccgtcaacactatttttttttttatttttaatcccaatttttgaatttaggatctatactttgtattttatttttgttattattattttcagtcagcaactagtatctatagtttgacacacatgagatttctacctatttctggtgacaatttaaccatatgtatttgaacaaacatttcatctccttgggttacagaaaggattccattccttaataaataatatcaattagc

SEQ ID NO: 22932 - DNA, 200 bp, Glycine max
  Clone ID: PAT_MRT3847_120709C.1
tgaatatgctagtgtagcttattaactaatttccgatcatatgattagagcaccgttcccattactgttgctacagattgttgtcctggcttcagatgctgtctcacttggcattgctcactgggccaaagagaaccccaaacagaacaggagtctccagagttgcaatatcgagataggatcgtaccggcaacaagcat

SEQ ID NO: 22933 - DNA, 292 bp, Glycine max
  Clone ID: PAT_MRT3847_12070C.1
atcacacaacacagtctttttctgaccctgacatgattattcaccactttaacaaggggggtgtgtatatggctacattggactatccataccccataccggaaactcaagcttttgccatattctcgactagttatcacacacaactggctagatgatacctgctagagatatttctcaagaaaaatatgaataaatgttctattgatatctggaaggagccaaaacattcaaaaaggcattagtatccacatcgaaagaatgacacattctctcgtcagggcacattttt

SEQ ID NO: 22934 - DNA, 209 bp, Glycine max
  Clone ID: PAT_MRT3847_120710C.1
gaatcacgcactatcagtacaacaactcactcacgaagctggacaatttcatgaagcctgccatggcttcctcgtgtgctttctcttccattgcagcttttgccatctacacaccaatttcccataagaatggatcactcttgtgaagcacaaaagcttcttttcttagtgggaggaaactgaatgtgaacaattttaccttaccaatt

SEQ ID NO: 22935 - DNA, 372 bp, Glycine max
  Clone ID: PAT_MRT3847_120711C.1
acaacaaattttatatggggcacaataagagactcaacattacataccacctaacatgataatcattcacaaccagcgataaaatgttctacaaactacataagagcatgtttttaaaaactcccagtaccacatgacaacaaagggtgattggtcttaagttctatgaggtggcaagcatcacaagttctcctaactgtacaaaatttattgtagtttaagaaaaaaatggaccactgataaaacatacaatgcgtctagtaactttcacaacagcgagagagtatggattcagcctaattactaacacctaaataagtggggtgcataaaacgatggctccactttctaactcatataaaacattggttt

SEQ ID NO: 22936 - DNA, 194 bp, Glycine max
  Clone ID: PAT_MRT3847_120712C.1
gttcatttgaaaggaaagcaccacccgaagcgagaggcttaaggccaataattggacacatacacctctaaagtggcgcaaaaacacaccacagaaagtggggccacagggtggacaaatcaggccccgttctcaccgttgcgatagggtgccaacaaaactatggcggggagcaatggggatatggccactct

SEQ ID NO: 22937 - DNA, 239 bp, Glycine max
  unsure (1)..(239): unsure at all n locations
  Clone ID: PAT_MRT3847_120713C.1
nagnntacccgcacgcntacgtaagcncggaattcngctcgaganagnggnctngncnatncnntcccgncngnangngggnggacggtngtcgtannaanngttcggaggggngggatgnggnantgtagggngtggggactntgttnntggtagntgggtngctnggnntgctgggtgtgannttcgangtgcgcnagangtgcnaggcganagcatttnaaggtgttcnnggagnn

SEQ ID NO: 22938 - DNA, 422 bp, Glycine max
  Clone ID: PAT_MRT3847_120714C.1
acgaggttgggtattacttagttcagtttacatctgaggagggctataaaaatgccatgtttaatggatcctagatggttgcagaccactatatcattgtgtagagatggaagccaacttttattcagaatgcaaaaaagatgtaaaaggtagcagaatgggtgcaatttctccttttgccaatgaaactttatcatgatgtgttcctatgaacaacatggtctttactaggtactattctgaatatcgattgatgtacctctattcactccaaagcaagattttctcctacatgcgtagaggttgttctaaacaaaacaaagttggtgtccaagtttgaagcaagatggaatgtgtattttgtggaatagaatgggttgcatttgatttgctttcaatgtggcacatatggccacaaagca

SEQ ID NO: 22939 - DNA, 282 bp, Glycine max
  Clone ID: PAT_MRT3847_120715C.1
cacaaatttatttaaacaactccatacattttccagggggaatgacaaaaaagtgttgacaaatcctgaatttaactccaacttatgccatatcattaaatcaatatctaactccaacctgtttagaccaggcatgcttgcacacaggacaaccttctttttcctcaggatgcagaacgttatgcgagtgagcgtcccccactcgctcacgtcttttctaatcaccaagacagtacatatgctctagaagcacctaattgaacacattcagcacctcattaa

SEQ ID NO: 22940 - DNA, 1086 bp, Glycine max
  Clone ID: PAT_MRT3847_120716C.1
ggaaagcgcatttactagtgtttaccaactccctcacgcccccaaggccaagaaaagaaaacacacacttttttagccttccctctctctctctctttctcttctccattctccatttttttttcttcttatcacgcgtttgtgaccacaaccaagtacgaaagttgagatttttagcatacccatttccacacaatgtccaacaagtccccagttttccccatcccagacccccaacacttcagcgactatggatttgaccctcaaatcaactatttccaggtgttggaagaagccatgaagcacaagcgcgagacagcgagatccatagactccatccacttcaagctccagaagcccatatccaaggacgactcacgtagcaaggcccacaggcccaggaagaagcgctggtggagaagcgccctcctcttcttcaagtggcgctgggcccaccaccaccacaacaacgacgaccacgacatccaccaggcccgggcccgggccttccgggcctcaatttcgggcccggtctactggaccgaggcccgaagcggctccgccaccccctaccgctccaccagccgcccctcctccgggccactcgccggaaccgtaacgccgccggcgaaggatgacgtggacacaccttacttgagtcttagagaactcaacatggagcaacaacaacaactccagcagaggatgtctacctcggccatgcccatatacttggtcacttgaaaaaaaaaaaagaaaaaaaaaaaaagaaaaaatcaaaccaatcacttattagggtatcaccactttcaaattcatgtctcatattgtgtgcaacaagaaaaaaatattggtggctgattggagtggagtagcttggttggttacatgatttagatttattatatttttgggtgggtttatttttatattattattttcttttaacctaagagaagtagtttgttactttgtttgatttgatcctctggaggaaaaggctggatcctccttttggtgcttgttgctcactttttttttttgatatcatgcaactgaacttgcctctcgtgctagcttttgacc

SEQ ID NO: 22941 - DNA, 384 bp, Glycine max
  Clone ID: PAT_MRT3847_120717C.1
taattccttgagtggtgagttatttgctcatgatggtatgccttaccttgacaatttagaggtctttgatgctagtaataatcagttagagggtaatctaccttccttcacgtttgtggtatcccttcggattcttcgccttgcatgcaaccagttgactggtttactgcccgaagctctattgaaggaaagttcaatgatgttgtctgaactggatcttagtcaaaacaagcttgaaggtcccattggaattattacttcggtgactctgcaaaagcttaatttatcttcaaacaaattgtatggccccttacctctcagggtaggccactgttccatcatagatttgagtaataacacactatcaggtaatttctcaaggat

SEQ ID NO: 22942 - DNA, 362 bp, Glycine max
  Clone ID: PAT_MRT3847_120718C.1
ctcacgcgtacggccacgcgtccgtccacgcgtacgcccacgcgttcggccaagtgcagtgcatcatcttgatcgcctacaagcccccaggcttctaagtcattgaaaaatttgcaaagcatctgtagccaccccactttggttgttgtacttaaactacattgccatttgtttttgctttatgagatttcatcatcctgtatttttggtttctgctttcggacttcaatggaaattaatgggtgagaactaatgaataggctattgcgttgagttgctttgtttctcgactaccagaaatgcgatggggcgcgccacttgactcgacctttaagcgtaaagcactggttaggtgcgggccg

SEQ ID NO: 22943 - DNA, 186 bp, Glycine max
  Clone ID: PAT_MRT3847_120719C.1
ccttccctaaatataccttcacattctcctcctctgtctgatactcctctaaaactctactttcatttaaataaaaactttcccctttattatattaaccaccattatatttcttttcaccaaaatcctatcacatcatcttcatatcatcttcctttcctattaccttcttctattttctccatc

SEQ ID NO: 22944 - DNA, 267 bp, Glycine max
  Clone ID: PAT_MRT3847_12071C.1
cttgggagagtttaagagaaatactactatagtataatcttttgacgttgattgaacaggattaaaaaaacagaatgtgtgtgtctccctctctcttcttgtttttgaacgccttcaattcatttggcatcttatgtacattctgcagtgtaaagatcttcttctctctctcttttcagtctttaatttaacgccgattataaagttgtgggttctaggagtaattggtggcgacatttggggaattcttatccgccgcattcttgt

SEQ ID NO: 22945 - DNA, 1302 bp, Glycine max
  Clone ID: PAT_MRT3847_120720C.1
catttatcagagtctcctggtagcctttcctgtcaggagttccagaataaccaacatgataactgcactcatctgcctttccatcctagaagggtagaagtagaattaccagttcgtgtagattttgttgggggttggagtgatacccctccatggagcattgaacgtgctggatgtgttttgaatatggcaataagcttggaaggttttcagccaattggcaccatcatagagacaactaaaacagaaggaatattatttactgatgatgcagagaaccaattatttgttgaagattatacatctatttgtgcaccgtttgatggagatgatccatttcggctggtcaaatctgcattacacgtgactggaattattcatgataacattcttgtagatatgggcatgcacatcaaaacatgggccaatgtcccccggggcagtggattgggtacttctagtatcttggctgctgcagtggtgaaagggcttctctaagtaattgatggggatgatagcactgagaacgttgctagacttgttttagtgttagaacaacttatgggtactggaggtggctggcaggaccaaatagggggtttgtacccagggattaaatgtacttcgagctttcctggaattccactgcggcttcaagttgtccctcttttggcttcacctcagttgatttccgagttgcagcaacggcttcttgtggtatttactggtcaagttcgacttgcacataaggtgctgcagaaggtggttgttagatatcttcgccgggataaccttcttgtgtcgagcatcaagcgccttgctgaactggcgaagattgggagagaagctttgatgaactgtgacgtagatgaacttggtgagatcattctggaggcttggagattgcatcaggaacttgacccttactgcagcaacgagtttattgacagactattttcttttgccactccttactgctgtggctacaagctggttggagctggtggtgggggctttgccctgttacttgcaaaagatgcacagcttgccaaggaactgaggcggagactagaagatgagaaacattttgaagtcaaagtatatgattggcagatattcctatagtgctagaatgagttgtattgttgttgatccaatttattttaccattctttgtatattctacccatatattgaattggggtccgttctcttgagagagattatatctcttaatgtattcttactgaataagatctgttattcttaaggacttaattatgtttatcttatttgtatttt

SEQ ID NO: 22946 - DNA, 367 bp, Glycine max
  Clone ID: PAT_MRT3847_120721C.1
gctcccgtctctgtttgtgctttttgggtttttatattttcatttttattttttaattttgagttcgctagactctgatgctttgggaaaggctcacccacccgtgagcgctgcccacctccaagcctcttcgacggcgacaacaaaactcattggctagctcgctagaaaagtgatgagctcctctaaggctccttttaacccgtgaccctggtggttctgacaacagtgtcatgggcaccgggggtctccaacagtaccccaaaaggacgcttacgatctagctaaccgagctctcaacagccttgaggtagccgcaaggctttcggtgccaatggcagcggagtccgctaccttgtgctacacc

SEQ ID NO: 22947 - DNA, 392 bp, Glycine max
  Clone ID: PAT_MRT3847_120722C.1
cgcttctacaagaccacagtttggtattaatacaactatctaataatgtgtatgattaataaaaaagtgtggatcgcatctaaatttattaaatctattgtcctagagtagttccctacacaaaatataagtaagttcacaaacaatattcaagaataagattctctgatcaaaagagaaaaatatgtctcatgatccccttggtataacgaattaaataagggatcatttgtttcttgaacaattcttttaaaaaaattttctatcggatttttgaatcataagggattttatgatttatgacttggaagatttttaagaattcaatagaataactacattgacttcatccattttccctaaatattaatagactcattaattatttttta

SEQ ID NO: 22948 - DNA, 467 bp, Glycine max
  Clone ID: PAT_MRT3847_120723C.1
cggatattgagaaagcccatacaatcgaacgctgtgaagtgtgagatgcactctatccttctatctctagaacctataattccatgactctgcggcgctaccactgtaacatcaacgaccacagttcctggacatgccctacgcgtgaggtcggacgtgacaagctgtcctatgtcacgataacggatgggtcaatcatcatgactagcgccagcatggccaacctaaacctctcgtccgacatcgaacataaccaattccatgcatctgcttcttgtagcaacgtctgagacgacccatcataccccaatagaagctccctatgctgcgaccctgcgcaaggttactcaggccgatgaccccgcccatgtatccacctacgctaaccgccgcggtgctagaagaaaaggtgttccgtggactgaagaagaacatcagctatacttaattggtcttcagaagctatg

SEQ ID NO: 22949 - DNA, 267 bp, Glycine max
  Clone ID: PAT_MRT3847_120724C.1
ggtgaatcccgtctcctaattcaatcgcttatatgactctaattttttcttttattcgttagctcccactctctgggccgttcattgttttacagtggagcacgtttccattttttatctacctatcttgttctattttggtagcaaaactcttaatactttccctgagtctcatgcttggtggagtccttatttaataaaaaatactcttgctttgtcggaaatttgacaattcttcttgttccgattggagtcttattacaccac

SEQ ID NO: 22950 - DNA, 222 bp, Glycine max
  Clone ID: PAT_MRT3847_120725C.1
cacgcacttgcaacagtacctctgaggtcctttcacaacccttacttctccatataagggtgatcgagtctacctgccgctggaccttggaccgtatatccctccttcacttcaacgtccaagaaatgtcctcttgaatgctacactgattcttaatgtgcttattgactatacatcgctgccaatggcatctacaataaacctagcatcgaagactatatc

SEQ ID NO: 22951 - DNA, 426 bp, Glycine max
  Clone ID: PAT_MRT3847_120726C.1
atttttttatccttgcggctaaaggatttagctgaatatgtttactaccttagcttgcattgtatcttccattgcagatgctccattcttcttctcctttcattgaagagtattgtggttaatatattggatgcctagtttcttatgtgctggcatattgtcacaaatgaggagtacataaactacaaaactgtattttacaaatgtctatggctatagttttggtttattttctttttttggcgttaaacgctctagtcttggtagaggttctaccaatagctattgaagttgatacaataatgtcagcattcttatatgccctccacgaatttcaatttttaatgccttcacatgatctgaaatcatgtcatgatattatagtatacgaatccatatcgaaaggaggcttacatgtgagggaat

SEQ ID NO: 22952 - DNA, 418 bp, Glycine max
  Clone ID: PAT_MRT3847_120727C.1
atgtattcaatacataatcatttgtcaatcggattaaataaattacacactaggacctcatctttttggggccctagcgatttacataagccagcgtcaggaactttatttgtcggaacactaacatttcgaataaagaaaaccactaaaaaggaaggaatagcgagcggaagttaattccccccatgcacgggcaattcgaaccacactgtgatcaatgcaatgtgaagaagaaagaccggagagcctccactagagccaaccctaagccaaagatgatttaagaggatatggtagacttatagtttaagcttagtaggcacattggggagcacctggggctttacttgagcaaacattgtgaagcaagctgagtgagatcggaaggttgtggatgaggcccaaaatggtcgctttg

SEQ ID NO: 22953 - DNA, 543 bp, Glycine max
  Clone ID: PAT_MRT3847_120728C.1
agctcgggaattacatttgtggatgaagataggtttaagagacttatagctggaaattattttatgctcgatatgtccaacaattcaatcaatgaagacatatcgaacgtgatgctgaattctagctttataaagttacgccataataacttctcaggaaggctcccacaattatcaaatgtccaatatgtggatttatcttataactctttcacaggatcaattcctcctgggtggcagaacttgaattatttgttttatattaacttgtggagtaataagttatttggtgaagttcctgtggaactctcaaacttgacgcgattagaagtcatgaacctgggaaaaaatgaattttatggaactattccgatcaacatgccacaaaatttacaagtggtgatattgagatataatcactttgagggtagtattccaccacaactgttcaatctctcttttctagctcacttggatcttgcccacaataagctttcaggatcaatacctcaggttacgtataacattacccaaatgggtagg

SEQ ID NO: 22954 - DNA, 300 bp, Glycine max
  Clone ID: PAT_MRT3847_120729C.1
gtctagtttacaagaacggagcacagacatcaacggaaatattataaggaaaacgcatcggtgagctcatgaatacaaagtgggacatacaatgcacttgcgctcttcaaggagaagggctatatgagaactgggaccggatgtccacagctgtgaaggatatactatatactagatcccactcaatacagactaagaactctattcttgtaacttacaagagagtactgattgcaatggacgaatagtgatgaacataaggccagttctaagatgatgtgatcgataatgacaatgctg

SEQ ID NO: 22955 - DNA, 388 bp, Glycine max
  Clone ID: PAT_MRT3847_12072C.1
ggaggcaaatttctcctctgatattaactctcgctgtagattggaaaacgttacctctactaacacacaatttgttagcggcaaaacctgcaagtctgatttaatcggtgctggtccacatgctgcagaagaggttcctgaaaaagaggatcaagcacaacccaaaacgattgctgccagattgagacacacaatagatcctcaatccaatgaggttcatgctcagatggaaacaaattcgctgaaatagtctcttgatgatgttgaaactcctaaaggttccatgttggatcttaaaatttctcaatctaaaattgcgctccccataaacacagttggaggaaccattctgcggagggatctattggcaaattttttgacagagggc

SEQ ID NO: 22956 - DNA, 348 bp, Glycine max
  Clone ID: PAT_MRT3847_120730C.1
aatactactcacataaccgtgagtagggggaggggagctacaggtgatgcagcccctgagcattaggatgccaaattgaacgatgactgagaaatgaggtgtctatagctaaggcgtgcgatcatgagaaatgataaggaggaaaagaaactgtgacataaaccatgctgaaagccacgaatgggtaactataggggattggaagagagttgagggtgaaaagcaaaagaataaattgttgtatgagggattgaggagccaaacaaagtgattgctgaacgagtggataaggttgctctaccaggtgatgtgtttaggcaaggataacgacctatatgagagggtggt

SEQ ID NO: 22957 - DNA, 335 bp, Glycine max
  Clone ID: PAT_MRT3847_120731C.1
cttgagaggctctcacttatccaatggggctcatggctcgagggccatgatattcacatatgcacaacggtgaagattggctgcattggtgctggatatgtgtaggggtcctactatggcagacattgcactgaaatgcccatccaaagaactcgctgatgttgatatgtataaatccctcattgtaccactgacacagggaccagcttactatctatcaaccaggacctgatggtgctgcgaaaccatgccactgcgagacccttttcttatccctgcagatgataaccctgtatttgtagctcacctagggattgtgtctcgggacgacacaa

SEQ ID NO: 22958 - DNA, 357 bp, Glycine max
  Clone ID: PAT_MRT3847_120732C.1
ggctcgagggatgacagacacattttgttggaagagctacactacctattaagaaagatgggtgcatggttgaccacacaaacgatggaggagagggccttcgcagaggaggtgggaacatagggcatccataggggggttgacatataggaggagcagcaagcaggggagccagaggctctctggacggaagggggctggaccctatgggcgctataactgcaggtggtcgccattggcagccggatggacagacgccaagatcagagtgcccaggcctgaggacagagacagcatatgacaagcgataacccacgcagaaacttgccatacaggccaggtgctggaaatattagt

SEQ ID NO: 22959 - DNA, 1363 bp, Glycine max
  Clone ID: PAT_MRT3847_120733C.1
atctgtcacattatactaaattctctaaataaaatagttgaatacgaatccatcaggagcagctttgaatactcaagaaagaaaatttacatgaaaactcaataggaatattggtcttattacacgaaacttgaaaaaacacagtaaacattgtaattgaacatattcaagctgcttttacataagccaaactaataaaacagtaaccacacaattcttaaaaacatgaatccaaagcagatatgagctgagtagtgttcaattaggatatgagagagatgccagcagccaacaagtcatctgacaaaaccttgtttgcagcatcagagggatgaaaaccatcccaaaatacgtattcagatgcattggcacatgttcctatggacttctgattgcacaatacagatgtttctagcaagcctgttccacagcaagccttccttgcttcaaaaaatccattttcagaaggtttagtgacaaggtcatagagaggttggtagatatcaaggatgaccaatttgagacccgaaagagatttttgcaagctctgagatgtggtatttagcttcttattgaagttaacagaatcattatttagtttaaccacacaacggttgctatcagagccaaagagagtgatggctgctggcagacaacccattggaggtaatgatgtcacaccaatcctccttgctccaagtgcatataaattctgaatgaaagtggcatagctttgcaagagaatgtctgagaattgatcagcagtgtaaaccttgtaaagcagtggatttatataatagttctgaataaagtcactgttcccagcactgatgagatatatagcaccagatataattgatgaagcattaggctgccctactgttcccaccaatatattctggcactctttgtagtgttccagctgttggctcaatggaattgcatgatataacttggctgtgggatcatagtagcctgaagcagcagaggcaaagttggcaccattcaagaggttatttcctttggcctttaagttgaggtaagctggtgggtaagaggtaaatccaaggttttcagctgtgtagtctgatgcaagctttccattgcaaaacctccctgttggattgtgattcttgaagtctcttccataaggagggaagtttgctttaacaatggtgtataagtggttattatttcccacatcaaccacagagtccccaaatatgaacaatgcagggaccagaggctgccctttagccagattgaacactacaaccagaagcaaggaagtgaagaaataactagaagaccccatgcttttgagtttctctgcagcaatgggccgcgttgagagcgccggccc

SEQ ID NO: 22960 - DNA, 690 bp, Glycine max
  Clone ID: PAT_MRT3847_120734C.1
aaactaaattctctaaataaaatagttgaatacaaatccatcaggagcagctttgaatactcaagatagaaattttacatgaaaactcataggaatattggtcttattacacgaaacttgaaaacacacagtaaccattgtaattgaactcaaacgtcttttacataagccaaactgatacaacagtaaccacaaaagcagatatgagcctagaagtgttcaattaggatatgagagagatgccagcagccagcaagtcatcagacaaaaccttgtttgcagcctcagacgggtgaaaaccatcccaaaatacatactcagatgcattggcacatgttcctatggacttctgattgcacaacacagatgtttctagcaagcctgttccacaacaagccttccttgcttcaaaaaatccattttcagaagacttagtgacaaggtcatagagaggttggtagatatcaaggatggccaatttgagaccagaaagcgatttttgcaagctctgagatgtggtgtttagcttcttattgaagttaatagcatcattatttagtttaaccacacattggttgctatcagagccaaagagagtgatggttgctggcaaacaacccattggaggtaatgttgtcacaccaatcttccttgctccaagtgcatatatattctgaatgaaagtgacat

SEQ ID NO: 22961 - DNA, 526 bp, Glycine max
  Clone ID: PAT_MRT3847_120735C.1
tttggagtcgaagacacgtctcaggagtgtaagtaagcatgacctcggcggcgatgacggtggcgtcaatgctgctctgtggtagctgacggagcctcgccatgcccgcggcggcgcgcgcacttcgcatatcgcgagcagcgctcgtcaataaccgcaacaagcaccctgcaagatggtgctgtcggagttcacacaacacttacactgcactcgtcggtgaagctgaattcttaacaaccgacgccggtatcttaaacgccacctcttcttccgatagttttcggaagtatgaccggttgcttccatgtccatcgcacaaaactccaccgagaattgaacacttagttgtatcagaaggaggacctgtgttggaacatatttgcaaggctctggatcttcctcctttgtacgtttcagatctgattcaatttggagctgagtactacgctattgattgtccacagccttctacgaatgccaccgaatagcaaattatggtattcaaagaagtaacggaaccttc

SEQ ID NO: 22962 - DNA, 370 bp, Glycine max
  Clone ID: PAT_MRT3847_120736C.1
ctcaaaggagggtcacaataaggtggccttctttagctacttctacctagcttttaacattggccaactcttctcgaacaccattctggtctattttgaggacgaaggaatgtgggctcttggtttctggctgtctgcaggctccgcctttgctgcattggtcttgtttcttgtatgcaccccaaggtatagacacttcaagcctagtggcaaccctctctccaggttcagccaagtccttgtggctgcatcaaggaaatccaaagttcaaatgtcatcaaacggagaggacttattcaacatggatgcaaaggaggcttccaacaatgccaatagaaagattctccacactcacgggttcaagttcttg

SEQ ID NO: 22963 - DNA, 505 bp, Glycine max
  unsure (1)..(505): unsure at all n locations
  Clone ID: PAT_MRT3847_120737C.1
ccacgcgtccgccctaattggaatcctcaattctatcatggtgactaccattcttcttcactgttccaccttctcgtgtttcaatggaggaagagcaggagcttaagatccccgaaaccatcatctacgacactatcggtcccctcgctctctcanccgtcgacgattctccactttccgaccacctcgaacccatcgccgttttccgcaacgagatttccctcgaaacgccccaacgcgcctcgcccgcctccgccgccgtcgatttcttctcccttgatgtcgccgccgacgcctccgcccgcgaccccttcccccgattgctcgccgctgcccccgaaccgaagacnccagcttccgcgcccgtaccaaacctcgaaaatggctggttccacgggaattgcaaattcaaaaatcccatgcttcaactgcataaaganaaantggacttttgtgcgtttttgtcgccaactggcagaaanaaanctgcacgaaacttggctat

SEQ ID NO: 22964 - DNA, 241 bp, Glycine max
  Clone ID: PAT_MRT3847_120738C.1
gtgtgtatgtgtgtgtgtgtggcagtttttatcttaggtcattcagtaagacgctttgtcagttcgtgtgaggaaagtgtttgacaacgaggtcccacttaaatgactcatgcagaacttacctctactccagctgcagccaggagccaccggatgggctccattctccccctgccatcgaagtagtgaaggactggcttccccggcatggcagcaattgcttgagttctcttgttaaaaa

SEQ ID NO: 22965 - DNA, 397 bp, Glycine max
  Clone ID: PAT_MRT3847_120739C.1
aattatccgatagattagctaactgtacacttgacagcaggctcaaagcgtggacatccgcaaatctggaaaaagtggctctagagcacaataaagcggctatcctcactctgcactctctaggctgatcagactacctatgagactacatctagagctttctctcccaccatatgtcgacatatagtcagactctgcgagtcttaatacctgagtccagaaaactgcctgatgctaagattgtgacacaaggcaacatctacaagaccccacatgcgaaactctattggtcataattgctggggcctaacgatcttgcctgacaattccagacgccgctgcagaccctgaaaaaggccacagctctgacctgctaagggacacccccgcccatggg

SEQ ID NO: 22966 - DNA, 529 bp, Glycine max
  unsure (1)..(529): unsure at all n locations
  Clone ID: PAT_MRT3847_12073C.1
acattcataatgcatttgggtacctgcaaaactattattagacaactaaataactgtactcatttacacaggtttttttccctttatactcaactacgtatatagggagggggtagaaaagaaaggataataagaaaaacaaaaggaaaaaagtaggagagcctatgcctatctgtacaattgttcaaatattgaaatagctagcagaagagtttttccacgtataggtagcatagtcagcaatatttacttccgttagtgtacattgcagagaacatttgatactgaacttaatctgcattgggtaacccacttaattagtcttgttccttgattctgaaaattcttcaatcatgtttcccaatgtaacaatgtcttgcatctttgcacgtttatggagagatggatgagttgaactcttagagaacatggtctgacacactggtgtattaacctcttttctccttctgctctctttatctttagcacctgtggggccaccaaggattctaangtttagcatcaccct

SEQ ID NO: 22967 - DNA, 118 bp, Glycine max
  Clone ID: PAT_MRT3847_120740C.1
ccctacctaagctcgcgattccgctccatgccatgagaccaccgaaggggggagaaaccagatggttgataagtaccaccataatagtctaaccaaggaaggagtaagggtgatggtg

SEQ ID NO: 22968 - DNA, 889 bp, Glycine max
  Clone ID: PAT_MRT3847_120741C.1
gagatattcgttagtttaattagagggaaaatttttaagtatggttgtgacttgtgactgatcttgttttattattcaatgcatggctactttgtttaattgaagctctataacttgagacagctaatatcatttatctgtataattatttgctaaaaagggtatattatagtatccttttgttcctttatatatatatattaccttgtacaaggttttcccatcatcattctatgtcctttcgttatgatccctgaactgaagtctaatcaaaactgattcaacattggcctccctggaaagaggccagactgtgcatagcttccgtgtgtctttggggctgtagctaagtagtaatttactttcatggaatacaagttttttgttttttttcccatgatgttgaagcagatgggagagggtggtgctgcttccaatcctgctttgcaagtgtcggtttcttttggtagatttgagaacgattccttgtcttgggagagatggtcctctttctctccaaacaagtacttggaagaggttgagaagtgtgccacacctggatcagtggcacagaagaaagcctactttgaagcacattacaagaaggttgccgcccggaaagccgaattgctggctcaggagaagcaaagggagcaagattctttcggatcacaagatcatagtggaatagatctaagtggtaacactggtgcagaacatgatgtatccaacaacactcaaggttccaatgaaggggttgagcaagaagccagttctgtttgtgagatccataggactcatgttaatgaatctgtggaggaagtgcagtttcaagagattaccaaagttcgtcagttgaggtcgagaacaaggattaccaaagttcatc

SEQ ID NO: 22969 - DNA, 1391 bp, Glycine max
  Clone ID: PAT_MRT3847_120742C.1
gagatattcgttagtttaattagagggaaaatttttaagtttggttgtgacttgtgactgatcttgttttattattcaatgcatggctactttgtttaattgaagctctataacttgagacagctaatatcatttatctgtataattatttgctaaaaagggtatattatagtatccttttgttcctttatatatatatattaccttgtacaaggttttcccatcatcattctacgtccgctttcgttatgatccctgaactgaagtctaatcaaaactgattaacattggcctccctggaaagaggagtttcctcaatttacacaagcagacaaagggtgtcgttactgtagaaaagtgaagtagaaattgatgtaaaggaaaagaagaaaaaaacagattgacaaagaagctggttcctgagatatccaggaatgattattccccaattgcttctttacaggccagactgtgcatagcttccgtgtgtctttggggctgtagctaagtagtaatttactttcatgggtgaatttacttgtggatgcaacagtgtttgaagataagaagatgggagagggtgctgctgctttcaatcctgctttgcaagtgtctgtttcgtttggtagatttgagaacgattccttgtcttgggagagatggtcctctttctctccaaacaagtacttggaagaggttgagaagtgtgccacacctggatcagtggcccagaagaaagcctactttgaagcacattacaagaaggttgccgcccggaaagccgaattgctggctcaggagaagcaaagggagaaagattctttcggatcagaagaacatagtggaatagatctgagtggtaacactgatgcagatcatgaaatatccaacaacatcaacgctatgatattcttgttcagtaagcaacagcggagcaatcttctagtcaaatataggatcttataaacattgtggggagtagaaggaaggagagtgcatcattgggtgatgtcagttctcttcctcgcacccccctttaggcaatatgttggttagaaaataataatgtataatgtatgtgatgtaaaatgtgcatatatctcttgtaattggttgcattatttttcttctctacctgtcctatgggtgattgatatggtttttaacgtgttgtagaccatgtatgatgtatctctaagagttcaactcacccatctctccattcacatgcaaagatgcaagactttgttacattgggaaacatgattgaagaattttcagaatcaaagaacaagactaattaagtgggttacacaactcaaggttccagtgaaaggggtgagcatgaaaccagttctgctggtgagatccataagactcatgttaatgaa

SEQ ID NO: 22970 - DNA, 1047 bp, Glycine max
  Clone ID: PAT_MRT3847_120743C.1
ccggaattcccggccgggcatctgcgcctgatttctcagttctcacactcattccgtgctctaaatctcaaattctagggttagggttcccaatttctccgccaatcagaagatgagttccaccggtggttctaccaagggcggaaggggcaagcccaaagcctccaaatccgtggtctgcgcctgatttctcagttctctcacacactcattcggtgctccgaatctcagattctagggttagggttcccaatttctccaccgatcagaaaatgagttcaactggtggttctaccaagggcggaaggggcaagcccaaagcctccaaatccgtttcaagatcgcagaaagctggtctccaattccccgttggaagaatcgctcgattccttaaggctgggaaatacgccgagcgtgttggtgctggtgctcctgtgtacctctctgcagtgctcgaatatctcgctgctgaggtttgttttgggtttccgattaggtttagatttgattagtcatcgtgttttttgtcaatctgttttttcttgttttaatttttgttttaagggtctgatttttttttatgttctgattgacctaatttatttttttttcaattgttgatgattgatgtgtttttttttattttttaaggttttggaattggctgggaatgctgctagggataacaagaagaatcgtattgttcctaggcacattcagcttgctgtgaggaacgatgaggaactgagcaagcttttggggtctgttaccattgccaacggaggtgtcttgccgaacattcaccagactctgcttcccaagaaggctggaaaggggaagggcgaaattggatctgcctctcaagagttttagggtttttgttttacccatttggactatagtcctcttttattgcgtttgtaacatacatgtttcggttattttctacatgtcttctctgagaaattaggtgcttctcagtctgatgaactggatggtgtattatcacttttgaatcagatgtgaatgtgaagtgctatttggatt

SEQ ID NO: 22971 - DNA, 189 bp, Glycine max
  Clone ID: PAT_MRT3847_120744C.1
tgggatagaactgacaagggcgatacacctcatttcgcgaagcattagattagacttccagatttaacctccacgatgcagcagcactctgtgttgtactacaaacacataggttatgcacttttctttcttttctcttcatcctcaatccatcatatctattccatttgctcactggagagaatcacg

SEQ ID NO: 22972 - DNA, 303 bp, Glycine max
  Clone ID: PAT_MRT3847_120745C.1
gaggccccagtttttctctaccctggggtgggtcccctataaacataattcctccctttcatctgaggggggcaacaaaacaaccaagggggctccgtaaaaaatattattgtttttaatattctttttttgagaaacccccccccggaaaacccgccccggaggggaattaaaatttctccccccgggagacccccccccgaagacaatttatttatgggggggcccctctcggcacaggatttttttcaagaccgcgcccaactatttgtttgatacccccccccctcctggggggggggg

SEQ ID NO: 22973 - DNA, 225 bp, Glycine max
  Clone ID: PAT_MRT3847_120746C.1
gtttggagtagtagctggtggtcatgcaagtgggagtgctggtggcgatggctattaatataaataaatattcctaaaaacatgatcttacgctatcttgcatggatgtagcatgcaataatatacattaattaaataaattattgaattttatcatgttcatccatatatggatgcaaatataagataatataaattaatgaataaatgtgaattcttgatata

SEQ ID NO: 22974 - DNA, 461 bp, Glycine max
  Clone ID: PAT_MRT3847_120747C.1
atgctatgtacacattgtcagccaagagttgcattacaactgttcacatcatgtgttaatgcatgggctgaaggtcataccatatcagtctcagtgatatagtgtgtgaagaccgagagggacactgtgaacgagccatgtcaaaatcagtgctacgctcccatgtgatatatgattatgcagctccaacttgatactggttctctgtcatcattaattaattgtattatgaaaactataatatcgatataaataatggacccttcgatgaataaaatgattttactaacagatgttaatttaattcagaccgttagaattacacgagtttttttttacaataattatgacaaagctagctcgtcaaagaacatgattaattgaactgcatacacgaaatgcttgatcaggatctggtgtaaaaaaccaattcttattctgattcgggttccaatggaagg

SEQ ID NO: 22975 - DNA, 212 bp, Glycine max
  unsure (1)..(212): unsure at all n locations
  Clone ID: PAT_MRT3847_120748C.1
gcttttaagctctagcagttaactagcaatattagcatttcctagtgaagatggcttccaaaacttgttcctcccttgctcttttcctcgcactcaacctcctctccttttcacttgtctctgcatgcggtagttattcatgccctagtccaaangccaaagnccccaaanaanaaaaggggggggnncccnccccnaaaaaaaacccnccc

SEQ ID NO: 22976 - DNA, 280 bp, Glycine max
  Clone ID: PAT_MRT3847_120749C.1
gctcggaattcttctcgatgctgcgagaagacgacagaaggggtctcacacgcacttccatagaagtttaattatcagcttctgagttctaagctaagtctgcttttattcttttctctcccgatatatatacagtatttgcttatatatatatatatactacttattaggtactgtgattgcagttcctaatgcatgattttacgcggagccaatgagcatttcagtgctcctggttgtatgtgcttcatctggtagtatactcttgctatggtgtcca

SEQ ID NO: 22977 - DNA, 366 bp, Glycine max
  Clone ID: PAT_MRT3847_12074C.1
ggctcgagcttatacgcagaacacttcaaacatattccttaaccgaattaatattatccatttatgggctagagcgaaactctacctctatctatctctcctttaataccacacaaatttaacacactttatttcttctacaccactatcatgaacatcttataacttcaagcacaagttctctgacaatgtctttcatatagcacacaacatatcagggacatatgattaccaccccgaccctgactcacaattttacccaggaagaacaaccacctgttccaccaacctatcgacctgagtactacaatatcttgcctggggattgaatcgccaaatactacgacttgaaaaacgcttatacca

SEQ ID NO: 22978 - DNA, 831 bp, Glycine max
  Clone ID: PAT_MRT3847_120750C.1
gattcaactcaacacttcagatttaggtgcccattttggagattcaacaccgtagcatgttgaagcgtggatacaaaccaaagccatggagtggagctcagaattgccgggtttctgtgttcctcatgttttttacattggttctaatgttagtggttttccttttagtatttcgttatgacagtgatggtgctaatcccattttagcttatgaacttcctaaacaaaaatggaatagctttgactctttggtgcatttgcatccaacaaaagagttccggaatgaaactgatttgatatggcaagtgcctgaatcacctaaaggtgttctctttctggctcatggatgcaatggcagggccatcaacttctgggacaagtcccctaaatgccctgattgcattggtttgcctgaggaacggttgcttgtactccatggtcttgcccaaggttttgctgtcattactatttcaagtgcacaaagatgttggacatttggtaaagaagtgttggttgttaaagacattatagagtggtggattggtagaaagaagcttgagaagcttcctcttgtggctttgggtgcttcttctggagggtatttcgtgtctgtgcttgccaccgccatgaagtttagtagtactgtgctcatgattgctgaggggatgtttgagcaaattgatgttaaaggggactacccgccgaccctttttgttcacatgcccaaagatctttataggcagcagacaatagatgaatatgtggaggttttaaaagataaagggatagaagctggtgttgttgcatgtgttgcagtttacattgtcacca

SEQ ID NO: 22979 - DNA, 496 bp, Glycine max
  Clone ID: PAT_MRT3847_120751C.1
agttgcccaaaggataatggctaatcatgaagcttatgtgaaacgcaatgctaagaaaactaggagtgagcagagatactatgaagagaaaaaatacgtctctggagactagagtgtatataatgatcttttacattagttcggtactgctcttcaagcttgaccctgtcacagagatgccaccactatagtatgaattgaatctatacacactttgtgaaggacattagtacagggtatgtataacataggagtggcgataactcgggaataccgatgtactttaatgtcctgacgttttatttctgttttctgaaaggcaaccatgtggtttgctcaccagttttatgccatttggtttttgctgtggttttgatgtttttagtgtactccaattagagattccttactctgatagtatgtattgtgactatcagaagttatacgcatcagaagggccttgcctttatttatttctattcagcagagttatttg

SEQ ID NO: 22980 - DNA, 443 bp, Glycine max
  Clone ID: PAT_MRT3847_120752C.1
ttttttttttttttttttttttttttttttttttttttttttttttttttttttttttttttttttttttttttttttgggggggaaaatttcttcaaattttttggcgggaacaaaaacttttaaaacccttttttcctttaaactttggggcaaaaaacttttacttccaaaggtaaattcccaacaaggttccccccccaagtccctcaaaaacttattaaaaacccccccacaaaaactaaacgggttaagtttaaaaaaaaaacaaaaaagtccttgccccaaaaattatgggacaaaatttaaagaaaatcttcaaggcccccggggaaaaaaaatcaattcaaccaaggttctatccttttttccccttatttggccctgggcccccaaaaattccttgggtcctaaacaaagcaagggggcctcaacccctttgg

SEQ ID NO: 22981 - DNA, 244 bp, Glycine max
  unsure (1)..(244): unsure at all n locations
  Clone ID: PAT_MRT3847_120753C.1
atttcancatatcaagatgtcagttactaaagagccatctagacagaaactgcgtagacttaagatcctcaattcttactagataaataaaaactctacttataaatactttgacataattcctatagatttacctgatactactattagaaattatcccataatcaatgtggtcagcaatccaattcacaatcacagataactacgtaggctcacctgttcgtaaaaaagcagcaagatgtac

SEQ ID NO: 22982 - DNA, 445 bp, Glycine max
  Clone ID: PAT_MRT3847_120754C.1
aaaccatgaaaacctgaaaaaatgcaaaaaaaaaaaaacaaaaaaacccaaaaagaaggggcgccgggaaacccaaaatgcgaaaccgaacactgaaagagcgaaaggcagaaaggccaccaaggccccaccggtagggtcacacagtcacaacgcccataaccccacaaaaaagggcaaaaggggaaaccggcaaccgggccaaaagagggaacgaacaccggacccacggacccaaaaacacgcctgcccaaggccccgccaagggcccaagccccgggaccccgaaaaggctcaatgccggggtaacggggacacgagaacacagggaaatggggcacagaaccccatatggaacaaaggaaagaccccaaggggcatacaattataaacacccaactgggaatggggactaagcacataaatccggtaacggggtaagaaa

SEQ ID NO: 22983 - DNA, 477 bp, Glycine max
  Clone ID: PAT_MRT3847_120755C.1
agaactagtatgcaaagtacagacaatgagtattacactcaccttctgtataccttgaacagatgaactcttctgcttcagtgttgctgatatagtcaactcagtagcacctcctccaggaacaagttttgaattttttattatgttccttgctacagacatggcatcctgtcatgggaaaaacttcagaaagcaatgatcaaatccacaagctctgggtagaaatcaacactttacctggaggtttctttcaacttcatttaggagatccttgctagcacccctcaatagtacagtgcaagccttgtggttcttgcattcaacaataaatgcaaaatactcatctgcaatcttcttaacttcaaataacccagcaccagtaccaacatcagactactgtaattcatgcggtctgttcacaatgacagcaccacatggctgtgccattctattatatcagttgttctcagccttctg

SEQ ID NO: 22984 - DNA, 146 bp, Glycine max
  Clone ID: PAT_MRT3847_120756C.1
gatgaatatgcagtgtgcttttttaagtcaaagcatggtcaaagcacactggatggtgacagcacacgtacgtagaaaggtgaagttaggatgcagtgtgctttgatgatgctttgacgaatatgcggtgtgcttttttaagtcca

SEQ ID NO: 22985 - DNA, 378 bp, Glycine max
  Clone ID: PAT_MRT3847_120757C.1
aagcaaacctagtctcattgtggatctttgaatgcccatttgttgtgacataaattgcactaaatccttgactacatgccctactagagaatatacttctttcacagatcatcgaaaaaaattgccaagactaccctgtttagatactatggatggctcctttatttaacaaaccgatatctccatgggaccctttaacaaacgagtgtatatgtgctgccaccctactcgaaactaatcataaaacttctgttgtttaaacctgaggaaatgcttacctccaataaacgttacttcacttaaggaggcttgactacttagacatccacttcccaaccctaccactataacgtttattacattttggcagtgcttgaa

SEQ ID NO: 22986 - DNA, 2073 bp, Glycine max
  unsure (1)..(2073): unsure at all n locations
  Clone ID: PAT_MRT3847_120758C.1
ccacgcgtccgctccggagcaacgcggagaagtttgagttccaagcggaagtgtcgcggcttatggatatcatcatcaattctctctacagtaacaaggatatcttcctcagagagttgatttccaatgcttctgatgctttggacaagattaggttcctctccctcacggataaggaggtgttgggagaaggtgataacaccaagcttgatattcagattaagttggacaaggaaaagaaaattctctcaattcgagacagaggtatcggtatgacgaaggaggatttgataaagaatttggggtttgttgagaagatgcaaacaagtggagatctcaatctgattgggcagtttggagtcggcttctactctgtttatcttggggccgactatgtcgaagttattagcaagaataacgatgataagcagtatgtatgggaatcaaaagctgatggagcattcgctatttcagaagatacatggaatgaaccacttggacgaggaactgagattagattacacctcaaggaagaggctggggaatactttggagaagccanacctgaaagaaatgacgactgcgagaagacgacagaagggggaaaaagataggtggccttattgccatgttggcatccttataccttgccgctgatggatgggctactgcggatgatgctccattctcatgggaagatagagatgattctgaggttaaaactgaaccagttttgggtctgaggaaaatgttagtccctattattgctggtattctatctgcactcaggagagtgattgctaggcgtgtttcaatcaagaatcaacttaaaaggcgactccatgctttaactattgcttctgcaacacggctgcgagaagacgacagaaggggggacatgatcataggatcatcatctgaatctgatagcaacacaaagcttcctttttctgcttgggccttcttgagcactattctgtttggaaatattgtgatattttatgccgacagtattgcagaggagagattacacatggttttctcctcaccaaggcacttagcagcagctggtgcgtgcatcatcataatggagaaagtgtacaagatggatttttctctcacaggattcacgatttgctgcttaatattaggttttgggatatatgaagcaacttcattggagcacaatagaaaagattctatccgaaattcagatttatccaatggagaatttgataatcaaatcctgatgtcaccactacctacttgaattgcagacaagctgtattctgctgtaaagatgtgttatccaccacttttgggaagctccagcatctagtttgctatacaccaaattcttgatgattgatctgatatgatctttgggggcttgagaagcacttctaacctaccaagttccttattttgcttcctacaagatcattactagtctggtagtttattgtgtagtttaggagggattgaaatatcatgaaaaaagaagcattattcgtggtcatggtagaagttctttgaattttgttataattgaatcactcatatgagctaactacacattgtaatgacactattgcatatgccaaactgttggtttttccttgtttgtttagaggggatgtccaagatgggatttggtatcatgcttttgcgggattcacctttaggtatgaaatttttacataccccttccccttttttttcaggcttttggtattggaaatgcggccttagtgaatctccgagttttgcagattcatttcggagatgctcggtgatgttagcttttcccgcctaatcattcgagctatatatgttgaatcctttcaaaaaattccccttttataatttctgttcaaggaaataattgtaattggtcaatccagtgtgccatgaatggaagatatggatgatttttaaccaggtagtcaaagccttgatatttagactaatatcccttgaagttttgtcaaatttctcttgatactcttcgtttttttaaaaaaaaaaaaaaaaaaaaaaaaaaaaaaaaaaaaaaaaaaaaaaaaaaaaaag

SEQ ID NO: 22987 - DNA, 1045 bp, Glycine max
  Clone ID: PAT_MRT3847_120759C.1
agcttccttttctgcttgggccttcttgagcactattctgtttggaaatattgtgatattttatgctgacagtattgcagaggacagattacacatggttttctcctcgccaaggcatttagcagcagctggtgcgtgcatggaattattttagaaagcagtttttgaacccaaaaaggatatatgaagcaacttcattggagcacaatagaaaagattctatccgaaattcagatttatccaatggagaatttgatgatgagcaatctcagagctgaagattatatgatttcaaagatatcataattttctgtagtttcttttcttctactaggagtggagtatggccagctaattgctggaaacttcatatgtctgtcaactttttagtgcttaatagtagaaattttttgttatgcaactgagggcttcaaatcatggttgttggacacatgataaggatatgaagctgatcttagatattttttgggaatttgaatagcttatatgccaaggaaatgttaccgtttctgatagcaacctggactatgaggaacatggagaacataacaacaaagtggaccacaacaggcccaataggaccatcagaaagcctacatgcttcagggattttatttgaagccactatcccattccgcaataaaggaatgttttcattctgttatgataattctgttattagtgattagccctacacggccaaagttaattttatctttgtataggagttagaatataaatttaatagagtgagaatgaaatagacacaaaaaatattcagttttgcattggcaatgtggcagagctcgttgatcataaatttcatataggaaaattttgtttcaatcccatttattctttgaataaggaagctaggtgatgttcgaactcgaacagctgaggcatgctcgccatttagagtcgtggcattagttggtttccgagttttgcagattaagtttgtttttcgaacccaatcattcttgtttttacaattaatgttttgttccttttccctttttcc

SEQ ID NO: 22988 - DNA, 230 bp, Glycine max
  unsure (1)..(230): unsure at all n locations
  Clone ID: PAT_MRT3847_12075C.1
tgcggctgcgagaagaccacaaaacgggtccatattaatgctgcatactatggctctcatctaaaatacatagttcaataattaactacgagtatgttangacacttcttgtaacatccatttctttaacaaatttaagagcttctgaattggaattttaaagcaacacaagtttttttctttctttataatgactgcctaatcctttactattggctccctaccttttt

SEQ ID NO: 22989 - DNA, 509 bp, Glycine max
  Clone ID: PAT_MRT3847_120760C.1
cattcccattctcataacataattcttttaagtatcattagggagttcttccagggtctcgacatccgaagcacacggttgagtagctgatggtctctcttccagatcttcacttccatcattgaatggattacgatggtcaccatgttcatgaaatgcaggagaattaccctcaccacgatcacttcctttcccatctcgtgacttcaaaccatcgtttccttgggggttgttggttgatgggttgatgttgttttcctttgccttctttttcctggcagcttttctcttcctagcacctggaggcatggtgtggagagtgaaatgggatggtgggctgctatgctacccctcactattcagtggggacaatgaacacaaaccaaatctacagagattgaaagtgaactgctaatagctatgtatgtatgaatgtttctcttgtgctctgaatatatattgtatgtaatgcagtgacacagcaaagagaattattaggcttgtgaaaa

SEQ ID NO: 22990 - DNA, 373 bp, Glycine max
  unsure (1)..(373): unsure at all n locations
  Clone ID: PAT_MRT3847_120761C.1
catccatgaaacaccattagacaatccacctgattctttgttttttctttgttttttgcgctcttggaatcataaaatttcttgctccccccaaccccactatggcaagccacatagaacccatattatccggaaggaaaaaagaaataaaaaacctcctggggacgggggtgngcctatgnngcatgggggatgctgagaagattccttgatctcatctccagaaggggacgggatggccgatgtgcacatagtggtattgtcacggagaagttgccggatcaccgcccttgctttgaatgactgttcaaccaatgggggaggccaggaaattggcttatcaagcgcccgctggggaccatgtcaaggacga

SEQ ID NO: 22991 - DNA, 266 bp, Glycine max
  Clone ID: PAT_MRT3847_120762C.1
gtgctttatgaaccagaagtgaattaggttcaactggggacaagcttaagaaaaaagattgagattaagccaaaccaaaaataagagtgtgttttgttgacaacttggtgtcttttatcagtgcagcattgctttcttttttcctctgctgtattgtatgctcattctcatgctcgttatcctaaatgattatgatgattatttatgcctcaacttctgactttgattgcagaaaacttcatgactggttaccgtgttgtatttga

SEQ ID NO: 22992 - DNA, 493 bp, Glycine max
  Clone ID: PAT_MRT3847_120763C.1
gctggggcccccgcccggaccgttccggagtggccccacgcgcccgatcgcatggtctttgcgctggactagttctttgagggggcgtgccaggtctgatattaacactatctgctctcaagactgagaataatggtatcctgcttgacaacagcgatgctatgcatttatccaacccgtggctgagcatgagttggatactgtaggtccgatttattggatatatttgtgtactggatggactgccaccccactgcaggatgatcaggctacaattgattgggaaattcactgtgaggaatgtgttcacagcacctattgtgttgggaatccacataatccttttgagataaataggtggatggagaaaacggactttctctcagggcacttcccgaagtgataagcgaatgcctctatctatacggggagggagctgtgcaaagaatgctattctcatgaatatgccaaatgctgttctttcaatgtggag

SEQ ID NO: 22993 - DNA, 1044 bp, Glycine max
  Clone ID: PAT_MRT3847_120764C.1
agcttgcatgcctgcagtttaatctgaacgcctatttgaatttgaaactatttaattctttttatttcttattttaatttttatatacgtgtatttcgaaaatatatttctaaaattaaagtagataacaaaagttcgtctacttattaaacaatatgtttcagataaaagttattatagttatgttttttaaaaaaagttgaataaactgtttcaatactttttcgaaaattaaaaacattcaaaaaacaatatcaatataataatatcatctaatgattcattgaaaagaataatttataaagaattttccataaaaaaattataaagaattattccatactaaatgaagtgagccttgatacaacaataaggatatttggcttccggatttggagggttcaatagtaaaaattgcatctttctgagttgtaacttgtaaggttgcatatatttatcatccacaatgtaagacttggataaaatctgacaccatgtcaacaaaaaaaaaaaaagcaaaagaaaataaagtgatgggtcaaaatctctgatggaaatccaaaaccattgcggcaactcacaggacacttctatttaacatttcagcatatgttattgtgatatgtggctgctttcaaggtaaatctccacttcctccattttgatcatttcctttctcaaaattttgagtgtacaaactatttcttggaactgggggtgtgagttgtggtctgtgaaaaatgtagtgatggtcccatgtatgtcaataaagctccagccaggaatttttttcaagccaagagatctcatatgggtccatgcctcacccacttcttcccacttgtttattgaagcatagcagtgtgctaattgtacaaaattcccagcatccataggcctcagcatgagaatatcattggcaattgtatcaccaagttcattattattatttgctcgacaagcatcaaggattatgcctaaaacatcaagtacaggatctgggaactttttcttgtacacgttatatgcctcctctaccctccc

SEQ ID NO: 22994 - DNA, 650 bp, Glycine max
  Clone ID: PAT_MRT3847_120765C.1
tacggctgcgagaagacgacagaagggcatatgagaatatgacacgtaatagtcataatccaataaaaacgtgacatatgaccgtcaacattatttcgtaacatccaattgtggacaagaagaccaatattaagtgatttgattacatacaaagataaagttcgtgaataattttattaaagggataaaatataagattaaagataaaatgggagatcaaatttataatttttcctttctacaatatctaattttaacaagaaactctaatggaaagaaaattcagaattattacattacaacttaaaaatgaattaaaaacaattgtttaaatgtaatgaagagccttattcgtttaaactagaagcaaattaaagtttaaatcatgtgttattatatggaagtggagagaaatgagccaatcaatcatttccagtggtactgaaaattaatttctgtgtgatatgattgctttgctgacctttaaacaaaggcactacaatttagatggcaactaataacactactctttcccttaacatcaaagcttgtctaagatcctcaaaacaaccaaagaaaagcacaagaaacaaacttcatatacaacgagctatccgatgtgtcaatctctgacagaagccccctccccc

SEQ ID NO: 22995 - DNA, 553 bp, Glycine max
  Clone ID: PAT_MRT3847_120766C.1
cattgaggttatccttgccctcagaacatagggagatgcctaatgggtccttgagattgtttgtcctccaaaaaattacataaaataaaattctgagttccattttgcctttttttttgggcgggtaaagctttaaagtcatagctcctcattttagctctcaatgagcatatctcagtgatcagtcactcaagagcttggtctccctccacttcgaaatttccttgtatttaagtgatgaatcaacactcaggctccaaccccttcaccagggacacatgtaggtaaggtttgtatgctggtgagtcagtcagcacataccacagatcatggtgtaatgctcaaattcattttttatttttcatattgtaaggtagcaacttgatgataaatttgtatatcacttttagtcggtctgtcaacttacattggagttgcaaacctgcatctgcgtgctagaaaatacatgatgtatcacggcggtatatcgttcaagcctaagatattactatcctgtttgtgaatggcataaaaaagacataatattcgtggt

SEQ ID NO: 22996 - DNA, 586 bp, Glycine max
  unsure (1)..(586): unsure at all n locations
  Clone ID: PAT_MRT3847_120767C.1
atacatgatactggataaccaacaaccacatagtaaccncggaccattctcattcgtgtcctaacatgaaaccctaggtatatatatagagtcaaactagtctttatctaaacatgcgtccacacaatacataataaccaaatccattggggaatttgtcatctgcgcttatctgtaataggactccttactatatgctatccatcttgtacaacgcacattccctaatttatactttgcccgcagtaggtacactgcttgactgcgacccaacttggaatctctacttttaccaatgttcctgaaggtgaaggatccttacacaacgacaatggtatatccagcactgtagaaagacattagcagcgtatgaggctggtggcacaacatttgcgactgtgctagaaagggttaagggttttaggccaacattggctaatgtgattgaagggaaggataagtctgttacgctgacacaccctttacagatgaaagagacattgaaatagagtgcggagatgagttgttggacgtatgcggaagcacacataaagttcaagttttcgtctaggcttagatcataaac

SEQ ID NO: 22997 - DNA, 478 bp, Glycine max
  unsure (1)..(478): unsure at all n locations
  Clone ID: PAT_MRT3847_120768C.1
cgcccnnttttttnnttttttttnntttttttttttnnttttttttttttttttttttttttttttttttttttttttaaaaaacgggaccaacttggctacaattttgtttaaagttcaaggggcctaaccaagctggttccgttaaaaactaaaattaaccggggtttttttggaaaaaaacctttttgaaaaaaatttgaaaaacaaacctttttgaaattttttggcaaagtaaagggttggaaaaaaaaaattggggggggtttttaaagaaacaaaaaatcattccctcagccctaattttcttggggttccacaaaaaattcaataggggcttttttactggggggggggagcccaaccgaatcagcttaggggggggaacaagagggttgggaaatggaaaccaaaggcgggattttaaaaattccacctttcccaaggctaaactaacttccttttttttttttaaaaa

SEQ ID NO: 22998 - DNA, 1018 bp, Glycine max
  Clone ID: PAT_MRT3847_120769C.1
gtcggaatccgggtcgaccacgcgtccgcggacgccgtgggtttaggaatgatggtaagattacctgcactagaacttcagatattgatcaatgcagggatatatgtggatataagtgcagttatgccacatcatatagtttgcgcacttaaaaagtacgactggggtgcactatcttttgatataaaggtatgcagaacaaatcatcctaatagatctgcaatgaggggccctggggaggtgcagggatcatttattgctgaagctattatagaaaatgttgcagctacactttcaatggatgtagattctgtcagaagcattaatcttcacacatacaaaagtcttcagtcattctatgagtattctcatggtgaaccttatgagtatacattgccttcaatatggagtaagttagctgtttctgcaaactatgaccagagaaataaattggtgcaagagtttaacagagttaacacctggaagaaaaggggaatctctcgggtaccagttgtaattcaactgatgctaagaccaactcctggtaaagtaagcattttttctgacgggtctatcgttgttgaagttggaggaattgaagtgggtcaaggtctttggacaaaggtgaaacagatggctgcatatgctctgggtgctattcaatgtgatggaactgaaggtcttttggacaaagtacgggttgtgcaatctgatacggtgagcttgactcaaggaggcttcactgcagggagcactacatcagagtcaagctgcgaagcagttaggctttgctgtaatatcttggtagagaggctaaagcctcttaaggaaaagctgcaggaggaaatggactctatcaaatgggaggcccttattctccaggcatacatgcaagctgtgaacttatcagcatcttcattttatgtacctagtaatgattccatgggttaccttagttatggtgctgcagtaagtgaggtggaaatagatcttctgaatggagaaaccagatttttgc

SEQ ID NO: 22999 - DNA, 427 bp, Glycine max
  Clone ID: PAT_MRT3847_12076C.1
gtcgacccacgcgtgcgcaccgcattaacgactcctgatcacaatttaaggggagcttacaccatgtcactcacgacaatccgtggtgctgactagagcgctacctctcttaagttctcctacaactgcccaaatagataccactccaacccctgcaccatcacccgccccacacctggcgaacataagctccctactgtccgtcgccggcccattacagacctttctcaactatctctagcaaacaacagtcatcgaaacctttcaaaaccaaccaaacaacaccaaccagcgcatcaccatcttcctaccgaaggactccgacttctcgtccctcataaaaccgtcactagccaacctgacccaagaccaacttaagtccctccttttaatccatgcattcccgtaagtctacactatttaccat

SEQ ID NO: 23000 - DNA, 281 bp, Glycine max
  unsure (1)..(281): unsure at all n locations
  Clone ID: PAT_MRT3847_120770C.1
gttggcataagtacatagcttgtgcatgntgttgctcacgataagcgtgttcggatctaagtatattacagtatattacttaccaataatgggtttaaattgcggtcgtagttgcgttgccttagttagaaaacctttatattgtgggaaaatgtggctgatgcggccacagttgcggttgcggagaatcaaaataccttaaacgtttactatacctatttaaaaccatgtgaataaaccatagttgcaagagatgtcaattattgcctcttttcctgctt

SEQ ID NO: 23001 - DNA, 188 bp, Glycine max
  Clone ID: PAT_MRT3847_120771C.1
gcaattaacgggagtgtaaaggtgcataccaaattgcaaaacctaggtgatatgctaccacgccttaatataagcgaatttgatatctaccaaccactgtacgaatagtgcacaaaaccttatgaaaacggattttttgaattatggaacgtttggtgtggaacggggtggataaaactatttatttt

SEQ ID NO: 23002 - DNA, 186 bp, Glycine max
  Clone ID: PAT_MRT3847_120772C.1
ccccagactgaatcaaagaacctaacctaactcactctcactacccacatcaaaatacctacacccccgtctccatcttcatccactccactcctccacaccatccactaaaacagtataactcaaagaccctcccatatcaaactatcccccttacccctcacctccacctcataactaaccact

SEQ ID NO: 23003 - DNA, 297 bp, Glycine max
  Clone ID: PAT_MRT3847_120773C.1
aacagggacatttttttgaattcgaaaggttgggaaatttaatagctctgaaaaaatgcgttaaacaatcataatcaaaccccgatcatggtaaaacaactaaaagcgcttttaatccaactaaaacgggtgccacataagcagctgcttagtatctgactgatttagcaacctcgaaagattgtgccacatttttcttaggcgtacctactttaatgccctgtccagaattcacgatatgtttccccatacctgcttttctcacagtgtcatttatccgatcagtgctgaaccctt

SEQ ID NO: 23004 - DNA, 447 bp, Glycine max
  Clone ID: PAT_MRT3847_120774C.1
ggttcgagctaagctcaaggtatatctatatatcttgcttcctaaatctcaatgcttattgttgtatatacataatggttaaatgcttttagaatgcaaattggcaaaggtctaggagaacatttcggaggggctgcttggtgtcataaaaagaagaagaagaggggattgagggagtcatcacttcctttgtttggcgacatgcattgcttaagaagtgtcgctccctcccctttttttgtttggtttgatctaccattaaaatgatctgattgccctttatctagtagagtagatttatctgaaatatttacattatgggtatgtaaattggggggaaatgtaggacgcatgaaccattttatcccctcccgatacttcctataagggagtcatgcaaaatatgtgctttccacagaaaatgtatcctaccttccaactcttcca

SEQ ID NO: 23005 - DNA, 659 bp, Glycine max
  unsure (1)..(659): unsure at all n locations
  Clone ID: PAT_MRT3847_120775C.1
ggtaggaaggtgatagcgacatcaaacaagttcaacaattaaaagaagacgtgaggaagatgattgtatctcctattgataactcgatctcttttaaatcttaatttatcgccttaacccatactttgggtgttacccgaaagcctgaccatgtctaatgtcgaatcatccataaaattgattttattcctgcatgccaaacccatctcataaatcatgataatcatctcaacttcttggccttccatatgggggggcttagtcaacacctatgttccttttcatgcggtgtatttttcaaattcaaggaccaaactggaaagttcaatgaaaggctagcaaatgatatacaaggaatgttgagcttgtatgaagcagcccaactaagatttcatggagaagagatacttgaagaagtacatgatttcactctcacccagttaactaagtcaccaaccacccaattaagccatttccttgctgcacaagtgaaacatagcttatggcaatcacttcgcaagggaatgcctagattggagacaagatattatatgtctttctaccaagatgatccctcacataatgaaagctcgttaacccttgcaaaactagattntaatatgttgcaaaagctacatcaaatagaagtcagtagtatg

SEQ ID NO: 23006 - DNA, 258 bp, Glycine max
  unsure (1)..(258): unsure at all n locations
  Clone ID: PAT_MRT3847_120776C.1
tggcatctccgcancacnnncacccacnaccctgcttagaccaggtcctctctctctctagagannnnnnnnnnnnnnnnnnnnnnnnnnnnnnnnnnttaagcttttaatagtaagacatggntcaacccagttccaangggganntgaataataaccagcagcagggtcaggttcagcaacaacannagcnggtcatggggcggcgggggncaccgtcgttnttnggcgnaattgggggnttntgnngnnccggcc

SEQ ID NO: 23007 - DNA, 779 bp, Glycine max
  Clone ID: PAT_MRT3847_120777C.1
ggctcgagattacaaggagttttttttatatagaattgagaaaggaaacacacacaaactaagcagtagttcagctatttatactgattttttacaaataaacaactcactaatattagtaatttgttacaattgttttaactacaagcttagtttgttagaactattttaattaccaacttaatttgttacttatgtgaaccaacctatcaacaatttgcatatataggatatgattacgaaatttcagacgcattgtacactgtttataaccaaataacccaacaaggtttgatgaaagaaaaggaggagtacaaacaaaagaccaaagttgccaatcccaactgttgttgcctttgtggatcttggtgtgttaatcttatatataatatacacattcactttttaaattttttttattagtgcttaataattaatatccgattgatggtttattagtacaatttttaataattaatggtttattagtataatttttatttaatacaaaataaattattagtataggaatttccattaattctttctaggttggtcgagtatagaaatttccattaactatattctgaattttccttccctttctaaaagatctgcagtttcacacgagtgatcaaaggaatgggaaaaaaatgtaatagaaaattaccttagtttagtatttaatttttgaacaggcaacaactgttcatttcatgaaactcattttgcttaacgtggacaggttcacctagattacctcgatgcaggagcaacat

SEQ ID NO: 23008 - DNA, 931 bp, Glycine max
  Clone ID: PAT_MRT3847_120778C.1
cggctcgactcacgcgtccggaggctctgtgtgagtggttagtctctctctcaattgagacttattcatttcgtgttctctgatctgttgttgcgtaaggtaagcatgttccgttcattgctccgccgcccgttttcgacgacgtcggcgagggcgttgaagcactgcgagaaccacgagtttctctctaagaactcgttcctggggagctgggatgcgccacgggaccccaaggaggcggaggcgaagctggcgcggctgcgaagggaatacgcattgcaagtgaaggaggttcggaaggaatacataagagagatggaggtcatgaagattgagaaggagcgcaaggacgaggctcgcagggaagcactcagagtcgccaacgaagagcgcaagaagctcaaggctcaagccgcgcagctcagagcgcaggaacgcgacatcgaacgacaacagtttcgagaaaccctattaaaagaaagagcagagaaacttgaaaactggaagatgaaagtcaaaatgcatgaagagaagaaggctgagaagaaagagtttctgcaccgacaaagttcggcgtggattgaagaaggcaatcttgagaaaaaagttgtggaagctatggttgaaataatgcatctttgagctccttgcagttctacatttgtattggttgagggctgtgttatctagttagtagaatttggtcctatgtttgaaactgcctcataaaaatagttcttgcatttagagaatcacattcctgctttagcccatagaatacgttgggtgtattcactgttttgcttttgggatcaagttttttacttggcatgagaatattaaaaaagattgatatttgaatccagtagctaataagtgtcaattggctttatctacaaaaaaaaaaaaaaaaaaaaaaaaaaaaaaaaaa

SEQ ID NO: 23009 - DNA, 253 bp, Glycine max
  Clone ID: PAT_MRT3847_120779C.1
tttcagagttatttaatctactgctgccacaagattcatgatcgacatgatcgtcggctttgagattgggtactgttcggaacattctgaatgatcagacatattttggattgtgatctctatgtgactggtggattacgaaaatgctacagttttgtcgttggagagatgaaggggccggcgcctagacaatgcgatagttcatgccatgcttgaaaggatggttcatgccataaagctggagaaatatgaa

SEQ ID NO: 23010 - DNA, 284 bp, Glycine max
  unsure (1)..(284): unsure at all n locations
  Clone ID: PAT_MRT3847_12077C.1
gtttttgtacggagggaaagagtataataaagacttttttaattaattacatgattgtgtgtacacatttcanggataactgcaaatgttctttatgcttttcaaaggatgaatattgtgattatttatttggttatgtgattnttattcccaacattgattntgttttaaatattttagaangcttaatgtcactttcgatccattatgtttcgcagttgtttctcactggtacattaagttaaaaagtgtcattctggtccttcaaatttttacaatgctgc

SEQ ID NO: 23011 - DNA, 529 bp, Glycine max
  Clone ID: PAT_MRT3847_120780C.1
tcacacattgtttctaatagaagtcacatatatgcattgatgcaccgcttcacggttttgtgatttaaagtaaagaatagtgttggtggtggattttatagttgttttttttaacaacaatactcggtgtggtggtgatgaaagttttcattggtgtctcgtgagattataagggacacagagaaatcgtagatcaaagagggtttcaaagctgtgtctctgaaagttgaaggtaggtagacatggatcatctacaacatcaagagatggtagacattgagtcacaaaccgtggaaatccctgacatactccacaaaggcaaacgtcaagtgattcttaagtttgataacgttgtgtataaaattaagaccaagaaaggtggagtatttgtgaagaacaaagagacagatgagaaagagatactgaagggagtgaaaggtggttgttgaacctggtgaaaatgctaccctgttaggtccattctggagtggcaaaacaactgtgctgacagtgttgggcaggaaggctt

SEQ ID NO: 23012 - DNA, 222 bp, Glycine max
  Clone ID: PAT_MRT3847_120781C.1
caacactcaaaagacctccatggcttcctccacagctttcttatcacacctgcatgagtttactcacgccagaacaaccgcatcaccccctttgcctttaattaaatagtactttgttgactgcaagtcaaccttttttcaccctggcctttccctacaaacactcttgcaactttatccaggctttcaggaaagcctaagttgtgatctgttcatgcaagg

SEQ ID NO: 23013 - DNA, 339 bp, Glycine max
  Clone ID: PAT_MRT3847_120782C.1
aatgacagattgatcaaataatcttaaaaattggtattcacttaggcagaacacaatttttattatatcagattaagttgcttaaccagcactaaaaaaaggaagaaaaacaatctgccaatggggataaatgatttattgcgtgccaaaagaaaaagaaacacccagcttgtatatttatttgcagggcagaacctaactttaaataagaaaaagaaggttgttataaacttgtttttatttttaatcaaggaacataggtggaaaaataactccttatttaaatattatattcatgaccccttagaacatcatatgaagggggcctgtagtggaaca

SEQ ID NO: 23014 - DNA, 248 bp, Glycine max
  unsure (1)..(248): unsure at all n locations
  Clone ID: PAT_MRT3847_120783C.1
gtgtgtgtnctgttacncttncctttcctcttganttgggttcgggtgacaacacaaanacaaacacgatggtgtgttgatcagtcncttttctctctctttccatttgatgtctctccccancaaacggtcgggcaccgctggttcctccccgtcgccgccaccccctatgaaaaaggccaagtccctnntcctnnannaaaatnatactccgangtngttctggnnncttcnttcaagactctcga

SEQ ID NO: 23015 - DNA, 349 bp, Glycine max
  Clone ID: PAT_MRT3847_120784C.1
gaaaaagggcattttaattgaaaaccaccttgatgtccactgcagtgtttttatttttacatgaagaactgaaaccccttttttgcccgtggtaacattgtcgtaaatcccacctgtccaactgggagcttttcaaattccagacccctgctcatttatttcttcaggcgtaatatttaacaccgtttccataaatgcttacaagctgttgcttttttgtactttaaggaatttataatgcttccccggtcagttctccttcggtgtccactgaccattgagtagaaattttcttgttttgtggggagtcaggtttcttcacctgcaaactgttcatggaggcaggtgc

SEQ ID NO: 23016 - DNA, 1233 bp, Glycine max
  Clone ID: PAT_MRT3847_120785C.1
tttgaaccctgatcgttgtaatgaaattcatcctcattttctgtagttcttgggaacaaagtatttatcactgactatttggagtagtttgactatggcaagcgcacttaaaattggttctcaattttgggttttgtaatttgcctatcaaatattgttggaagaggtggaggatcatcagctttgacttcttggtttttaagttaatggaatgattttttttttgatgcgataactaattaattctttgggaggatcagaatatccgcaatgctatatacttttggggccgaaatgggaagattgatttagagttattagagacgatggtgttatggcttttttgttggctgtatgaaaaatttgtcggagatggtatacattatattgaagtagttcaatcgttttttctgtaagccctccgatttttttctgaagcataaatccattcttaatgtggattttcaccattttaatgttaaaaacaggactacacaataatgaagagaaacatgtttttaggtgtgtttttggtctggtattctgggtttaatgtttagaattgttttggcaagttactctagtaagcttctaattttattttctaaattcatttgaagttttttatttataagctacaagctattagatttctttattcattttaatctttattaatttactaaaattcttttgtacttttagttcaatcaactagcatacgattcaggtttttagctcttactgtactttttagtttagaagtttttgtttaaatttggtccaaaataagcttttgtttagattttccagcttttacctttggtttataagttttggtaaacttgtaagtcttcgtctaggttgtgtgaaactaagccttaaatacaacacattcaaggatacgttggattttttgatttagaaattatttcgttcatattttacatttaaatttttttaattgtagctaatttcacaaaatattttgaggttaattacagcctagccctgtaagtttgacaaatactaataaatgtctcaagggaaagatgaagaacttaaaatagattttttttaaaaggtgaaaaattatactgtttgtaatttcttttatgctctcgtgatttacacaaatatttttttcttaacatcctataagtttttagttttgccaaactcagtcttaagtgcaacaaattaaaggatatgatgactagttctagatcgcga

SEQ ID NO: 23017 - DNA, 316 bp, Glycine max
  unsure (1)..(316): unsure at all n locations
  Clone ID: PAT_MRT3847_120786C.1
aaaaaaaaaaaaggttaaaggttgggaagggataagacctagagaaaaggacaattgggnaaaagaaaaaatttttttggcaggacccagaccagtaaaggacaggagcccatcgccgccagaagggaccggacggggggggggccccgggaattcaagaccgacccctaccgggggaccagatctccaaatagggaggggaataaaagggggagggaataatggctaaagggggcacctaggaaaaagggctaacccatcaaaattccagacacaatgggagcaggagggatagagagaaaagccgggggggcct

SEQ ID NO: 23018 - DNA, 352 bp, Glycine max
  Clone ID: PAT_MRT3847_120787C.1
cagtatttttggaattttttagcaaatccaggacggaatccaaggggagaacgagggaaacctatttagaatcaccaggagatcttggcagaacctggcactccaaggtttcctgtgcgttttggttttccagatcaaacaggccccatagaaaggataaaaaaggttccagcgcaaattccaaattgtttcaaaagggaaccacctaacaccctttgcggtgcccatcacaatcagcctttctaacgagaaaaaagcctggcctgctgcacaaaaaacaagatcaatgcgcgagaacagggggtttaaaaatacagggcaaaaaacgggttctctatttaccagcgagact

SEQ ID NO: 23019 - DNA, 459 bp, Glycine max
  Clone ID: PAT_MRT3847_120788C.1
gccctactccttcgcccaaggttgattcctttatgcaatgtgctgataaagggattgatgatactagcgtctggattcagcctgttgaagctactgtaagaccaacactatatatctagagatgtgtggagcaatacggacagtcatactgcattatctaaccttactcttacgtattgagtttataccattacaattattcacgttagattacatcaaattgctttacaggtacattacattgaggttctaccattttattgactgtattatttactattgattttttcccctttataatttgtcaacttcttgaaatatacctgttaatgtccctacatacatacatacatatattgtggtttgctcgcgttttttgtgttaaaagggaacaccttatattcaaaatatacttctagattttttcaaacctgaataaatggtacaatgggacggaat

SEQ ID NO: 23020 - DNA, 321 bp, Glycine max
  Clone ID: PAT_MRT3847_120789C.1
aaatataattgttcactggacctccaaatgatcaacgaagggggcccattatcaaaaatctagtcactgcctctccacctaggaatcttctctttgcaccaaaaacattggcactattctgaatgtaacacgcacgtgccatcacaactactcacactgggatcagtacaaccttcaagaacagaaatattaacttgccaagtgtgctttgcctccaattcaggaacggacgaacgcatccctgtacctagcatcctagttagcatttccaagtgctgccttccttaagtgcttgaacatcaacatggacatctcatgaca

SEQ ID NO: 23021 - DNA, 1104 bp, Glycine max
  Clone ID: PAT_MRT3847_12078C.1
gctccaatttcacttcccacagcatcaaaaacaagaaaaaaaaatggccgcaaaagagaacgaggtaacccacaagtttcgctttttccgcgtttacaaagacggcacagtggagctttacaaacccaccatccaaaaggttgcccctttcgatgacccaatcaccggcgttcgctccaaagacgcggtcgtttcaacccacccacccgtttccgttcggatctttttacctccaatatccgacccgacccgaaaattcccgatctttttctatatccacggcggcgggtactgcatgcaatccgctttctccccagactaccacagtctcgtcgccaccactgccgccgaagcaaacgtcattgcagtctccgtggaatacgggttgttcccgacccgacccatacccgcttgctacgaggattcctggaccgcgctcaagtgggtcgcggcgcacgcaactggaaacggatccgagcaatggctcaacaaccacgccgatccagaccgtgttttcatctccggcgacagcgccggcggcaacataacccacacactgctaactcgggtcgggaagttcgggttaccgggcgccagggttgtcggggcggttctggtgcacccgtatttcgcgggcgtgacaaaggacgatgagatgtggatgtacatgtgtccggggaacgagggttcggaggatcctaggatgaaaccgggcgcagaggatctggctcggcttgggtgtgagaaagtgttggtttttgcggctgagaaggacgaattgttccaatgtgggaggaactacgctgaggagcttaaaaagagtgggtgggatggaagcgttgaccttgttgagaattggggtttgggacactgctttcatgttttcaagccccaacatgagaaggcaaaggagatgttgcaaaagattgttaccttcatccaacaagactagatttcttaaaattgaaggtaccttgattttttaggttgttgttatgttttgtaactctagtttggcatgcttttttttttttttattcgtaaaaattggatacaatatcatatgaatttgcaataactaaaaaggtttatcattgccctccc

SEQ ID NO: 23022 - DNA, 446 bp, Glycine max
  Clone ID: PAT_MRT3847_120790C.1
attaggggggcgacccacgcttccgcccactcttacttaaaaaaccaatttcattttttcagtatagttgatccgttaatgtagtgtgaatgttgtattcccattcaaactatcttaacttatatatatacattctttacattcttctatcttgattcaaatttatggtttcgattggtgcaaacccaataatcttaatttacaatttaatatcaaaatgacttttccatctctatcaaaacaaatttaaatttaccctttaatcgtataaaaaactattttaattataatataatactatctcctttaatgaatgaattcttatcgattttctcactatcctaatttattaattatatcttctccatcaaattttttactaattataaacccattactgttttaactacatattcatttgtcaaaaaaattctatctttactaaa

SEQ ID NO: 23023 - DNA, 222 bp, Glycine max
  Clone ID: PAT_MRT3847_120791C.1
cccacgcatccgtacacgcgtgcgcgagaaaacgacagaacgtgggtatgatcatgaagttcaccattacaatgaacagaagcaccacaagcatcttgagcaccttggtgacttaagtgctgcatcgccgcccgggtactccttgcatgataaggacagtgcagagaaccatccactgcatgctctccttcacatgatacagtttcaggtcccagccgcaac

SEQ ID NO: 23024 - DNA, 425 bp, Glycine max
  Clone ID: PAT_MRT3847_120792C.1
gtttgtttctttgtttcagaacgtggcattttgaaactcagcttttactgcagttttttttggttggcaaaactgtttttttttttctcttggattattttgtagacgttgtcaacttgttcactctctagtctccccttgaagcattatgcttgaaggagaattgtattactgtgtataaaacaatgtgggggtcatcgctagcagcattagtatagaatacatggattgatggaaaagaatagaatggaacagaacatggtgaaatgaaatgattataagttttattatttgaattgttaaggagaggaaggaatgcatttcattccattccacaataatcatctttttcttcccgtgtaatttgagggctatgggatgaaacccatgttttttttccttctgatctatcattaaagaggagt

SEQ ID NO: 23025 - DNA, 283 bp, Glycine max
  Clone ID: PAT_MRT3847_120793C.1
tttttaaaagcaaaaaactgaaactttttattattgatatttagaaattaccatagttatgttcaacattgaagcatgaatatgtacacccaacggaaccaaacgcggggttctttttttttttgggggctgaaaactaaaaaaaaatgagcaccatggggggggtgcccccctattaaccacttacaattggcctttaaaagaaacaacctttaaaaataaattaaaaaaagttgataaaaaaaggccccccaaccaggtttattaaaaacttggtggtgac

SEQ ID NO: 23026 - DNA, 660 bp, Glycine max
  unsure (1)..(660): unsure at all n locations
  Clone ID: PAT_MRT3847_120794C.1
cgagctatgacgtcgatgcctcngctcggaattcggctcgaggcttccaaagtttctgaaaaccataaaatttatttccgtaccccggaaaagcctgagtcagtaatcaggttcttcagagaccacggtttttctgactcccaaataaacaatatggttagaagggtacctaggctgatttcctgcaacccttgcaaaagggtattgcccaagtttgaatttttactctcgaaaggtgtttctagctctgaaattgttgacctaattagtaagtaccctcccacgcgtccgcgaagcctgaagaattttatagtgccaacctacgaattggtatatagattcttgcaatctgataagaacactgttgcttgtatgtttgctaattcatctgtctttggtagcggctatcttgtggcacacaacgtcagtgtgatgcttaagaatggattgagtgaatcaaacattgcaagattgcttcggtaccgtagtaaggcggtgttccgtgcaacggatattcttaaagtggtgagggaagtaaaggatttgggatttgatccttcaaaagttgcttttgttatggcattgctagccattaaaacgttacgatcaaaacttgtggaaggagaaagttgacgttttcaagaaatggtgttggtctga

SEQ ID NO: 23027 - DNA, 165 bp, Glycine max
  Clone ID: PAT_MRT3847_120795C.1
gcaagctagctaggttgaaaatagtttggttttgtagtaagtgaggtgaggtgccaaaatggtgaagataactcttggtatttcgatgatctttgtgtgctccttaagctattgaagccagaccgattcggcgtggtgtacacgtaacgctaaagtcactgacac

SEQ ID NO: 23028 - DNA, 279 bp, Glycine max
  unsure (1)..(279): unsure at all n locations
  Clone ID: PAT_MRT3847_120796C.1
gtccaaccccaaattccaatcctggatcaggagaaattatggaaaagaccaaaacacccctattccccttctggngccccacacaccactagtgnngcatggggacttatactccaattcctatcacaaatcaatcnccagtaagagtaactgtgatcaaattcaaccttctaatttttaaattggacccactccaaagaagccaaacttttgcttgtgcttgatgcaggcgcaccacaaatatcagtacggaaaaaggtgatcaagctccttgttgca

SEQ ID NO: 23029 - DNA, 420 bp, Glycine max
  Clone ID: PAT_MRT3847_120797C.1
ctctctaagttcatattatctttgggctctctaaacacaaaggaaaataaaaccatagaggggggccaaaagaccgaagagaccaaagaacaacccgtaacacactcaggaaaagccagaacaaccaaacccaacgtaccaaaccccccattccacacaacagcacccgcggacaagaaccctttggactacactcaccctcccccttggaaaagcggaatcaacgaagcaagggtaaggaccacacttagcccccaagaaccaagggatgccgccatgggacattgggggtaacacacccggccctttggctacccccactgccattgcaaacacaaaccgaaacatggccaaccttacattgatcctctcaagcgcccgcccactgaacgcccacacatcagaaaacttaaggcccac

SEQ ID NO: 23030 - DNA, 240 bp, Glycine max
  Clone ID: PAT_MRT3847_120798C.1
gggcgggataataacaaacaagaacgcacaaaagtaaacgtgcaaccccggtggtatagaatgggacaaaagtacaacatggcacatcgcacaaagaaaaacagtccagggacaatatcaatatggacaaggctagcaactgaccttacctatagctgagtaaaggatgctatgctgcactcctttattcaccaggaaacgcaaataaagccccaaactagggaacggccgaagcttctc

SEQ ID NO: 23031 - DNA, 462 bp, Glycine max
  Clone ID: PAT_MRT3847_12079C.1
gcagggcagattggagtggagcagggcaattttaaggccgttgtatttgctgcattctattattctcttgtgaatgaattacaaaaccaaaaaacacccctttctctaacatatccatcctctcacgcaatgcgaggccacgattggatcaattcctgctttcccgacgagttaatcgttgaaatcttctcccgcctccactccaagtccacccgcgacgcttgctccctcgtttgccgccgctggttccgcctcgagcgccgaacccgaacaaccctccgaatcggcgccacccacctcttcctccaccgtctcccctcccgtttctccaatatcagaaatctctacatcgacgaacgcctttccattcccctccacctcgggaaaagacgcccgaacgacgaagagggcgatctcgattctctctgtttatcaaatgctggtctatctgctcttggcgaa

SEQ ID NO: 23032 - DNA, 780 bp, Glycine max
  Clone ID: PAT_MRT3847_1207C.1
gagtgctaagagtgatgtcttcagttttggagtagtcctgctggaaaatgttatctggcaggagggcttgtggacaagaaatagaccctccaggaaaacccaatttggtggaatgggccaaaccatacttatccaacaaacgcaaacttttgcgtgtgttggataatcgtcttgaaggccaatatgaattagatgaggcatgtaaggtagctaccctctctctgcgatgccttgcaatagaatcaaagttgagaccaaccatggacgaggttgccacggatttggagcagctccaggtcccccatgtgaaacaaaatcgtagaaaaagtgctgatcattttacccatggtagaattgccactgcttctgcttccccgctctcacgtgacattgcaaatacacatccttgaaagctgcatgtttccacatgaactcaaacatgttcatatcatgcacacatgttatctaataggttttacatatcttagtacattgcatgtatatatttcaggttctgtttgttatatatatagtcaaaatggctggaactgcaggtactttcttatgtggctctggttagctcaattttgttgtttttgatatattggtgtaaagtttcctactttattttgttacacttgcaatgtgcagctttcacatagaaattgtagcaaaactagatcctcttgaccttcagtgggaaccttacataattgtcaagattttttgctttttttcggggttgctaaggactagtagatgcaaagttgtgcttgattg

SEQ ID NO: 23033 - DNA, 720 bp, Glycine max
  Clone ID: PAT_MRT3847_120800C.1
tttttttttttttagagaagaaggcttagataattatatgatgcatacattacacacataggacatgattctacgatgaacaattacatttatcaagttgccaatgttacaagcaaaacctaccaacaacacctgatacaaacaggagacaaaccctacatagttctggaggaggaagagacagagcttacttatacactattgacaaaaactgtaatacatacacttcactaatattgagtaattagttttccaattcaagttttgccttggcaagcgcttccttagctgcaatttgctttgcttgtctctcttcactatgcttccttgccacttctgtttgctcagctctttccttcaacgttgcatcagtctccaatatattccttttcaaatcacgaagatgagtctctatcttcaaggtctccaactcacgatgttttaattgtttttgtttttcattgagcatggccttgagattagagacctgttcacagagcaattgtctatgccgatatgatgcttcaagcaaagctttggtcttgacatagtcatcttggagttgaacaaatctcattttctcctcctcaaagagtttaatacgctcctccatagtaagggaattttccatggacctatctatttctgcaattgatgatacaaagttgatatagtccaagacgttatcagaaaaattgtttataatcaacccctataaca

SEQ ID NO: 23034 - DNA, 231 bp, Glycine max
  unsure (1)..(231): unsure at all n locations
  Clone ID: PAT_MRT3847_120801C.1
ngcangcacgcgtacgtaaagcacggattcggctcganggctcgagctcgagccgactctaacaaggatcttcnacntaangncnnnacnggcnnagncctngaanacnagaanaagcagaacanggtccngatgnancatcaagtgaaganatccaagtccatccaagtngtncctctgcttagaggcaaatcttcaactacncacttgaatgtatatccngaagagggg

SEQ ID NO: 23035 - DNA, 1159 bp, Glycine max
  Clone ID: PAT_MRT3847_120802C.1
ccctcccgcgcgcggacgctgcggcaaaatcagaacaaccaccaaagcttccatctgatttgcagagagttttttctcaagggaccaaccaaggacactatagagagagaaagtggttctgttctttctgtgagtaacgtaacatgcaatagatactttatgaatagagagagaaaaaagagttgaagaaagattgttgttcaatttgaaaaatttgcccatcaagtaccctttttctgttttcattttttggttggttttgcttcctatttccaaccctgctcttgattttgcactggtggattgaaggttgtgtcgttcctggatcgttctttttctgttgcggagacatgttggacggtcgttcctgcgttgttccgaggttgttttccggcacttgccaggcggagaacgaatggtcttacatgaagtgctgtgtggagttggacatcgagaatggcatacgcaagatgacaatgctgcaaagcatattgaagagaacgaaacgctgaaatcggaaatgaacaactgcagcaaagcaagggaggaagttgctgctgaagtagagcaagtgagggcagcggaacgcgaggctctcatgaaactcgggattgtgatggaggaggcagataagagcaacaagaaggctgcaagagtggctgagcagctggaggcaacacaagccgcgaactcagaaatggaagcagaactgagaagactgaaggtgcagtctgatcagtggaggaaggctgcagaggcagctgctgttatgatttcaacagggaacaacaatgggaggctcacagagagaactgtgtctttggataacaacaactacaagggctcaccctatgctgaagacatggatgatgacttccagaggaagaaaaatggcaacatgctgaagaagatcggggtcttgtggaagaagcctcaaaaatagctgtgatgatgtctgatttaatgatgtgttctgaaattgtagtccaataaatagtgtgttcatgtcatgtttattactatgtctttcttgcaattttgtctgacccctacattaccctctgcactgcactgtaaatcctgcctccatctgaaactgtgtgtgaactgtacttgaaacattggtgtttagttattgaatgaattaagctcttcacat

SEQ ID NO: 23036 - DNA, 1286 bp, Glycine max
  Clone ID: PAT_MRT3847_120803C.1
ctcgcgccgattcgcctcctgcgcatctgggcaacttattcttccggaggcactaaagcttttgcccttgtacacacttgcattaactaagagtacagggttgcgaactgagggaaagatagatgagcggtcattttggataaactatgtatcctctatctctgcgccattagcaataccacttgtgtatcctaggatgatggctatccatgatcttgactcaaaggaagatgaagactctgttattcctccctttggaacaagtgacaaacctttgcatcaatgcactattttcataccgtaaattttgtgctactgtatcctcatctggacaacttattcttccggtcgcaataaagcttttgcccctgtacacacttgcattaactaagagtacagggttgcgaacagaaggaaagatagatgaacggtcattttggataaactatgtatcctctatctctgctccattagcaataccacttgtgtatcctaggatgatggctatccatgatcttgactcaaaggaagatgatgactctgttattcctccctttcttcctctttctagtgaacacatcagtgatgatggaatatatcttcttgagaatggtcatgattgtttgatatatgttggagactctgtgaatccagacatcgtgcagaaactgtttggtgttgctacagttgacaaagtccctaccctgtttgtattgcagcagtacgacaatccactatcaaagaagttaaatgaagtggtaaatgagatacggcggcaaagatgttcctacttccggttcaagctctgcaggaaaggagatccatcaggaatgctattcttctcgtatatgatagaagacaagagcgcaggtggcttctcctatgtagagtttcttatccatgttcataggcaaattcaaaataaaatgtcatcataacgagtatatggcagcttcatttttgcaagcttttagacctaaatgatagagcaagccccaagtataggtgagattctgcatatttatgtgcattcaattgccttgagtttgacagaggaataccagaagacacaagtttttgttttgttgatgtacatgtataagttaattaatgttggtgatagttggatttttctgaggaagttttttacttttttttgggttttatagttacctgacaaatcaaattttattggcaattgtgttttcatgcgggatattaacaatgtgtctcatttatattttaataaatagagagaggacaaagataagtactccctccattcc

SEQ ID NO: 23037 - DNA, 1086 bp, Glycine max
  unsure (1)..(1086): unsure at all n locations
  Clone ID: PAT_MRT3847_120804C.1
ggctcgagccaaaatcagaactaccaaagcttccatctgatttgcagagagtttttttttttttttttttcttctcaagggaccaacagaggcaaccaaggacactgtagagagaggaaagtggttctgttctttctgtgagtaacataacatgcaatagatactattatgtatagagagagaacagaagagttgaagaaagattgttgttcagttcgaaaaatttgcccatcaagtaccctttttctgttttcattttttggttggttttgcttcctatccaaccctgctcttgattttgctgtggtggattgaaggttgtggcgttcctggatcgttcttctctgtggcggagacatgttggacggtcgttcctgcgttgttccgaggatgttttccggcacttgccaggcagagaacgattggtcttacatgaagtgcttgctggagttggacatcaagaatggcaagcgccctatggagattgatgatgttgaggaggatgagccccaccagccaaggaagtgtactaagaagttggattcttgccatagagttgaaatggctcgaatttcgtttcaacgtcaatctattgaggccaaggattctgttgttccccctatggatcaggataccattgagccattgagtgtttgtcaaggagttgttggagaagaaggagctttgactgaccggctattgtgtgagaaagaacatgagggtgatggtgatttgatggattttggtgaccatcaatctgataaacagcagcaggctcagccgggggatttgtcagatttcggtgttcggctatttgatgaagatcagttgcagcatgatgataatttattgaatttgagtgagcagcaatccgaggggcggcagcagcagcaccaccatggtggggattcttcggattccagttctctcttgccacgcatgaaccgggacagctcaatcacctgtctcagccgctgttcgaggtcagattatggttctctcgccttgctgaatangagctttcggaacataatccgaaggggtgagctctatcaatggaagagactgaatggtatcatggagcac

SEQ ID NO: 23038 - DNA, 2156 bp, Glycine max
  Clone ID: PAT_MRT3847_120805C.1
caacacccaagaattgtgctttagctataataaaaaaaattaagaatgatttaattataaattaagatgtgatctaaggggagataagaccatgtgaggggtcctctctgattttgctccaaaaccttccccttcttctgatttgtagagactaacccaagaaagaaccaaccaaaaacaagtgcttcttagagcttggaactctaggcataattgggattgtatctgaactatattcaggtttaacctcaaaaatttcctctccaattccgatcaaaatcgacgaaacaagggtacttaaccctccaagcagcaaaccctcaccgttgctggaatttcagtgttactgtgtgattctttcaccgtttcactattaatactactctggacattgactctgcatcttctttaagtcaggctactaaatcatcaaaggaaagaagccccaaagtcactgattgcagatcacgcagaagcccagttgttgaggctcttgattcggaaggtggttctggggacttgttagggtgctgctgaggcatttcatcactcatctctgcaaaaggagaaaaaacatctcatcctcctccacctcactagtcaacacgtgtctccaccggcggttaccggtagccggtcaccggcgaaccttttgcagccccaccacaacctcctccgtcaaattttgcacaactcgaaaacacacagatttttttttttttttttaaaaagaaaagacacacagagaacgatgtttagttagttgattaatctattaattaattagtggcgatgggaaaagaaatgaaaattaaggaattatttaattataaattaagatgtgatttaaggggagataaggccatgtgaggggtcctctctgagattttgctccaaaaccttccccttcatctgatttgcagagactaacccaagaaaggaccaaccaaaaccaagtgctttcttggagcttggtagagagagaaagtcccactttctctctcttctcttttttctttctgtgtgtgttgtgtgcgtgcgtgcgtctgagggtacatgcaaaacagtgagtttgagatagagaaagaaggagttcaagattgttgttcaattttgcaaaaactgcccatcaagtacttttgttgttttttttttcgattttgcttcttatccaacccgttcttgatttggaaggtgattccgggaaggaattgttagggtgctgctgaggctgttcatcacctatctttgtggtgttgaatttgccacttctgataaagacagaagaaagcaccggattgaaggttgagttgttgttgttgcttgttgctgcttctgtctcttgttgtggagactatgttggagggtcgttcctgcgtggttccgaggttgtttcccagttcttgccaggcagataacaagtggtctttcatgacatacctgccggacttggacataaagaatggcaagcgccctttagacactgatggggaggaagaaccccagccaaggaaggtgaataggagagtggattctcgccatcatggcgagaccactcggttcttgtttcaaaaacaatcgtgtcatgctgatgattctgttgttccacaaatggatcaggatcggaggaaggattgcgtgttgttgagtaattggcaaagagttgagaagactgatgccttttctgcccagcttttggatgaacgagagccgcattgcgctggagattcattggtggtgtccactgaccttcaatccaataaacaggaggaggatcaatccgaggattcatcagattctggtgttcagcaatccaatgaacagcagatggagcaggaggtggaaggggatttgttggatgccagtgaccagcagccacttgaagatcaggaagaacatcatggtggggattcatcagattccggttctcttttgccctgcatgaactgggacaactcaattgcttgtctcagccgctgctccaggtccgactatggctctctggcctcgctgaataggagctttcggaacacaatccgaagtggtgagctgtacaggtggaggagacttaatgggataatagaacactggatttatttttcctgtgccctccttgaatgggaggcctatgatccaattcgtgaacggtggatgca

SEQ ID NO: 23039 - DNA, 4612 bp, Glycine max
  Clone ID: PAT_MRT3847_120806C.1
cagtgaggcccaactaattaacctgtttctctttactggatataaggcaattaaaccatgcaaacaccaaagacaagaaatggatcctctgatgtggctcaaaaggtgtctccacgtgctgtacgccaactcaagcctactactttggacattgattctgcatcttctttaagcgtccgggggagataagagtgaggggtcctctctgattttgctccaaaaccttccccttcttctgatttgtagagactaacccaagaaagaaccaaccaaaaacaagtgcttcttagagcttggtatagctctctctctctctctctctctttgtgcgtgtgtgtgtgagggtacatgcagagcagtgagtttgagacagagaaagaagcagttcaagattgttgttcaattttgcaaaaaactgcccatcaagtacttttgttgctgttttttttttttttttttcgattttgcttcttatccaacccgaactctaggcataattgggattgtatctgaactatattcaggtttaacctcaaaaatttcctctccaattccgatcaaaatcgacgaaacaagggtacttaaccctccaagcagcaaaccctcaccgttgctggaatttcaggctactaaatcatcaaaggaaagaagccccaaagtcactgattgcagatcacgcagaagcccagttgttgaggctcttgattcggaaggtggctctggggacttgctagggtgctgctgaggcatttcatcactcatctctcagtgtgacacttcacacagacaagaaagcaagacaaaacacatcattaacacacgacacaaacatctcactactcttcattaatataatatagcacatgaacaaagtcattaaagcccctcttgatcattaccgggctgaaagctatgcattcaagacatttggaacaaccaccaaagcttccatctgatttgcagagattttctcaagggacgacactatagagagaaagtggttctgttctttctgtgagtaacgtaacatgcaatagatactttatgaatagagagagaaaaaagagttgaagaaagattgttgttcaatttgaaaaatttgcccatcaagtaccctttttctttcattttttgatccctttttgccaaatcacccaccaaagctacgatttgcagagagttttttctgcactatagagagaaagtggttttctttctgctcttgattttgcactggtggattgaaggttgtgtcgttcctggatcgttctttttctgtggcggagacatgttggacggtcgttcctgcgttgttccgaggatgttttccggcacttgccaggcagagaacgattggtcttacatgaagtgcttgctggagttggacatcaagaatggcaagcgccctatggagattgatgatgttgaggaggatgagccccaccagccaaggaagtgtactaagaagttggattcttgccatagagttgaaatggctcgaatttcgtttcaacgtcaatctattgaggccaaggattctgttgttccccctatggatcaggagaccattgagccactgagtgtttgtcaaggagttgttgaagaagaaggagctttgaccgaccagctattggatgagaaaggagatggttatttgatggattttggtgcaatctgataaacagcagcaggctcagacgggatttattcctcgtgggcagcagccagatgatcaggaagagcatctggtggggattcatcagattctggttctcttttgccccgaatgaatcgggacagctcaatcgcttgtctcagccgctgctccaggtccgactatggctctctggcctcgctgaataggagctttcggaacacaatccgaagtggtgagctgtacaggtggagaagactgaatgggataatagaacactggatttatttttcctgtgccctccttgaatgggaggcctatgatccaattcgcgaacggtggatgcatttaccaaggatggcttctaatgaatgcttcatgtgttcagataaggaatctttagctgtaggaactgaacttcttgtgtttggaagggagatgagatcccatgttatttacagatacagtcttttgactaactcatggacatctggaatgaggatgaatgctccaagatgcttgtttggatctgctagctttggggagattgcaattttagctggtgggtgtgattcagagggacacatccttgactctgctgaattatataattctgagaatcaaacctgggaaatactccctagcatgaaaaagcccaggaagatgtgctctggggtatttatggatggaaagttttatgttataggtgggattggggggaaagaatctaagctcctcacatgtggtgaggagtacaatttacagactaggacatggactgagattcctaacatgtcccccggacgtagtagtaggggtcctgagatgcctgcaacagctgcaccacccggttgtaaatgatgaattatatgctgctgattatgctgacatggaggtaaaaaaatacgacaaggagcgaagtgtgtggtttaccattgggagactacctgagcgagcagtgtcaatgaatggctggggtcttgcattcagggcatgtggagataagcttattgtcatcggtggaccaaggactcatggtgagggttttattgaactcaattcatgggtgcccagtgaagggcctccacagtgggatctactcgccagaaaacgttctggcaactttgtctataattgtgctgtgatgggatgttgaagaattgaattgtgaaggtatcaacacattttgatgcttcaaatccaatgagttgcacaacattgattcatccgttgacacaggattcttgctaattggtactttgccccctttttctatgatatttttctttcaaaggctggggatgatggggaagattcagatattactcaagattagctgaaaagttttatgtggaggtgctcttcagtccttcccccccccatgtttaaaatttcaaccagtattttgttacatttaaattggcatcttcccccatttacattgacctgagatttttcaaactttggtatcatctagcaaaggaatagattaaataattgaagttccatataaacttaggttactggtgttgtttgtttaagtgcttctaagaacacacgactggatacttgattttcatgacataaatttcctagcttgaaggaaagaaataattttctgagtttatttttttcttttttccttttctcaattctgtatcgattcaattttccatttgaattcatggactttgtatcttgaactctctctggtctggaaactggtatatgacccttccatttatttcttaccgcagatataaaatgctatcataaatagaattgtttatctccaaaaaaaaaaaagactactcccgacgcgaacttggatgagaaagaacaactcattagacttagttgaagtatttcagtggagaatctctgcagagagctgatgttatgatttcaacagggaaatgggaggctcacagagagatctgtgtctttggataacaacaactacaagggctcaccctatgctgaagacatggatgatgacttccagaggaagaaaaatggcaacatgctgaagaagatcggggtcttgtggaataagcctcaaaaatagctgtgatgatgtctgatttaatgatgtgttctgaaattgtagtccaataaatagtgtgttcatgtcatgtttattactatgtctttcttgcaattttgtctgacccctacattaccctctgcactgcactgtaaatcctgcctccatctgaaactgtgtgtgaactgtacttgaaacattggtgtttagttattgaatgaattaagctcttcacatgaagcattaaattttcaaaacacattttgatgcttcgagtccaaggagttgcacaacattgattgatccattgacacaggattcttgctaattggtactttgccccccttatttctttctgatatttttctttcaaaggttggggatgatggggacaagattcagatatattattcaagattagctgaaaagttttctggggacgagctcttttgtccttttttttgtttttttttcttccttttatgtttaaaatttcaaccactattttgttacatttaaattggcatcttcccccatttccattgacctgagatttttcaaactttggtatcacgtagcaaagaaatagattaaataattgaagttccatacaaacttaggttactggtgttgtttgtttaagtgcttctaagaacacaactggatacttgcttttcatgacaaattaccgagctcgaaggaatgaaataattttgagatttttttcttccttttttgaattctgtattgattcaattttccatttgaattcatggactttgtatcttgagctctctctggtctggaaactggtatatatgaccattccatttattacttacagcagattgttatcatgagggagcgccctaacaaaatatctgagttggaatctcaaatttctcaacttc

SEQ ID NO: 23040 - DNA, 160 bp, Glycine max
  unsure (1)..(160): unsure at all n locations
  Clone ID: PAT_MRT3847_120807C.1
gntcactttgtctgtccatcaccgtacacacatagtatantcataataacccttttttctnacngaggcncagtgtcactacnncacttttngnttctcaccatggttttggcaagtcctcaaccccncnccccnngcatanagaggccanaattcnntt

SEQ ID NO: 23041 - DNA, 718 bp, Glycine max
  unsure (1)..(718): unsure at all n locations
  Clone ID: PAT_MRT3847_120808C.1
ccaagcgttaaaaggaacatcttaacttctctctcaatcctcatcactcccctccctctcccccctcacaactattttcaccaaaagactgaaaatccctcacttctttagtcatgccacagaactgcatagcaccaaaaccagaattctgcaatagtcataactctgtggaaggtcccccagagatgactgagccacataactcaactgtcctttcctatcccatgcaagccaatgaacaacaacaacaacctttcccaaaactcattatgtaccccataactctgaagtttgaggagttggtttacaaagttaaactagagcagaaaggagggtgctggggaagtacatggacttgcaaggagaagaccatactgaatggaatcactggtgtggtgtgtccaggagaaatactagctatgttggggccatcaggcagtggcaaaaccacacttctcacagcactcggaggccggctcaacggcaaactatccggtaagatcacgtacaacggccaacctttctccggtgccatgaagagaagaacaggttttgtggctcaagatgatgtgctataccctcacctaaccgtcaccgaaactctagtgttcactgcactcctaaggcttccaaacaccttgnaagagacgaaaaagttcagcatgttgagagaagtgatcactgagctaagattgactcgttgcangagcagcatgat

SEQ ID NO: 23042 - DNA, 330 bp, Glycine max
  Clone ID: PAT_MRT3847_120809C.1
ccccacgcgtccggcttgatgttttggatagattatccataccctctgattaggaagctttgaattgtgagttctgttcatttgtgaggcttttacttaatttattgtaaggttgagaagggttttaagctgctaggattgtgataagtgtttcaccaaatgtattagtccttctttctattgaaaaaaatgaggtattatgttagaggcaaagcaataattctcaagattctccgcattgttatgtgccaatacatataggaactgatttgttttatatgggtattctacgtagcatgcttgagtgactcttcaaaaaaaaaaaacaag

SEQ ID NO: 23043 - DNA, 1156 bp, Glycine max
  Clone ID: PAT_MRT3847_12080C.1
gcgagtgcgcgagcctccctctctaccgtcgtcactacttctttaccgcttggggcgtcactctccctctgctttaccttttccatccgtttagagcaacgctcgatctttctcgttacacactcgatccctcgactcggtgctcgttgctcactttctctgttcatcacaatctctctctcactcaaagctgagaacaacaacgaaaaagggtttttggttttgactcgaaggacactctaagtgttgcgtttcattgtctttcacccattggttgtgtttttgtccatagaaaacatcatgaattttgcagcatcattgtgcagaagattgaatatcaaggaactcgcgacaaatgttcctgtgtataaaagcaccagtgatgtttctggagaaggtttgagtttcacgttcaggcgttgggcttccaaaaagactgctggttccacaaagaatggacgggattcaaaacccaagaaccttggagtgaagaaatttggtggggagagggtgatacctggaaatatcattgttcgacagcgtggcactcgttttcatccaggaaactatgttggacttgggaaagatcattctctgtttgcattgaaagagggatgggtgaagtttgaacggaacaagttgactggtcgcaagtgggtgcatgttgagcctaaggaaggtcatgttctccaccctctgtatgcagcagatgcttctgcatctgaactaaaagttgctgtctaagtctcatctgtcatcagtatcccatgatagaaatttttatttgctgacaaaattcagctttaccttcttggcttctgtgaacttctagatgtaaattgaaaaactagtcaggtgttttggtacattggaagcatttaaaagattgagtccagaaggcaagattagttgttacttcagcatgctagagacttgctcctttttgtatttgtcaaattatgcctgattattagactgtaattggttagggcgagtttgatcagatcatgtaggaataaggttcaattttaccaatatgttcaactacatttatgaaagcacttctctacatttatgaaagcatttctacttgacacatcgttaaacttatgtttccgtgtgaccttttcatgaattctcaaaacttatttcactc

SEQ ID NO: 23044 - DNA, 1296 bp, Glycine max
  Clone ID: PAT_MRT3847_120810C.1
aaacggtttgtgtgattgtcacactgcaacaagtggtgttggcgtatgctgctatgctttcttccactctgtcgtttcaaaagtctgttcctttgaattctcaacgttcaggaacatcatttggttcctctttcctattcagcagagagaatggttcagttgttccacctcttgtcgtgtgtcatgctaagaagaaactcagttttatggagcaaattctggattacattgaagggggtccgaaattaaggaagtggtatggtgcacctgatatccttgaaaaagatggtactgccatagaagataatgaggatgattatccggaagatgaagtcagggatgcagtgctggtaacagatggagatagtgagatgggtcagatggtgatattgtcattgattgtgaaaaaagctcgagtaaagacactggttaaggataaaagggttgcacttgaagcctttggaagttatgttgaggagatacaagtgacaaacgatttgtcaagaaagctctgagaggagttcgcacaatcatatgcccaaatgagggatttctttctagcgttggtagccttcaaggggtacaacagtcttatctcagttgtcagtttatggtggtcaaagtggctttcaatccatgatgaaaagcaatgcaaagaaattggctgaacaagatgaatcagtattgaaaacctcaggaattccttacaccataattaggaccggtgcattacaagatacacctggtgggaagcaaggctttacctttgatgagggttgtgcagctagtggaagtattagcaaagaagatgctgcctttgtttgtgtagcagcttttgattgtgtcccacaaactggattcatttttgaggtggccaatggggataacaaagtttcagattggaaagaatgtttggccacattgatggagaaagcaagtcaaaaacttcagtgactattgacagggaatgtgtgtcctccctattgaattcttgatgtgcagaatggtctcaaatgggtttgtttttcatgagaggaaggaaagccttgtgtttttccttaccttaaagtggtcaaaattgctgctttcaggctgtaaccgcatattttgataaccattgttgattagaaggcaagaaattcatgctttctctaatagtaagtgctttcatcctattggatcccttagctagtagatttaagataagtaagcacatgcatgatataagggtttgtattgatttttacacacttttcttgcatggttttttgctcataggttgtgttcaatccttat

SEQ ID NO: 23045 - DNA, 379 bp, Glycine max
  Clone ID: PAT_MRT3847_120811C.1
tttccaattcaatagagagaatggtactgttgttacacctcttgtcgtgtgtcatgctaagaagaaactcagttttatggagcaaattctcgattacattgaaggacgctctaaaattgttgatgatgtggctgcaatcatggtcgcggactgatcttgtttccacctttttgttttccttgttgtgctcattgcctttgattttctgttcattttcagggggtcctaaattaaggaagtggtatggtgcacctgatatccttgaaaaagatggtactgcaatagaagataatgaggatgattatccggaagatgaagtcagggatgcagtgctggtaacagatggagatagtgagatgggtcagatggtgatattgtc

SEQ ID NO: 23046 - DNA, 231 bp, Glycine max
  Clone ID: PAT_MRT3847_120812C.1
ggcacaataaaacacactcatactgaaattacagaaaacagtgaagcaatagaaagaactggcctagaaagtacataaaaagccataaacacatataagacaaacagcggatactacgaagacacaagatctaaacatgaatcgtaaaaacatacacgctttaaataggcccggttcactaccagctgtctgaaaacccctgtataaacctaagcctgcttcgcatggacc

SEQ ID NO: 23047 - DNA, 500 bp, Glycine max
  unsure (1)..(500): unsure at all n locations
  Clone ID: PAT_MRT3847_120813C.1
acgaggctttgtcttgatgaagtgatagtgaaaaaaacagtattacggctcgaggtgctttgaaacaaagctgcgcagtggcaataacgtgtatttggtctctcatccaccttctatggcataaaaagttatacagaaaacatcatactattacttgtcatatacgactgcacctccaagaagatttagatagttagttgtcaatataacttgccttgttattctgttctgtgcttacattcaggactagtaaataatcatttaattaaattattcaaaacagaactattttgttgaatagttcataagagaaggcagcccgatcttggttcactcttacgcccgtaatttttctgttggaagcaatatttcagacaccttgatgtcatcatgccatgacttgagatcgattcaacaaaacaataatgaaggagaaatataaattggcactcnnaaaaaagaaaagcggggaaaaatggatggaaaacgaaaaagaaaaa

SEQ ID NO: 23048 - DNA, 166 bp, Glycine max
  unsure (1)..(166): unsure at all n locations
  Clone ID: PAT_MRT3847_120814C.1
gccaactgaatttcttggaaggccacttntaacgggtgatgatacactttcagggcgccctggcgtgggtcttgagactggtgccaaggtcttgtcttgtttatatgctggaacagattctggcatcactgctcatcattcggagtggggtcatcggaagacactt

SEQ ID NO: 23049 - DNA, 348 bp, Glycine max
  Clone ID: PAT_MRT3847_120815C.1
gccaaaattgatgtggtataacacattcaacatcggttttgtcaaaaacaaatgttatatacaactttcaacattgattttttcataactgatgtagaaaatacttcagaatatgcaattttggccatatttctacatcggtttcaggcagaactaatgtagataataattttcaatatcggtttttaaattaatgttgaaaaatgcctactttcaattacggtcgtttcaatatcgtttttaaaactgatgttgaaactcttccacaacctatgttacaactctttatagtagtgtatgctttgttttaacctactgtccaacatgctatattcattgaacatccac

SEQ ID NO: 23050 - DNA, 409 bp, Glycine max
  unsure (1)..(409): unsure at all n locations
  Clone ID: PAT_MRT3847_120816C.1
tctctatctatatctacatgctatagtttaacaaaatactgggagagcccactccaaattttacatcctacctnacaactaataaacgtgctgctgtcctataatttgaactacttatcactgtcaattttttcatatttctttagaacaccctatcaaactattattgccatacttcttgcctgcttattatactaccttcatgccaataccaccatgttttttgtgacaatttgtttaattaaaaatcttatttcatcatatcatatgttaatgtgacagtggtttatttattttattacatgaccagtgtattatgtctaccttcaatttcatattaagtttgctcatttgtttaaattatttttataaaataatttatttaagtcatttttaacatttattctat

SEQ ID NO: 23051 - DNA, 470 bp, Glycine max
  Clone ID: PAT_MRT3847_120817C.1
ctgcttggggggggggggggggggggggggggggggggggggggggggggcaggcatccttagagagagaaaggccggtaaggtgatgatgtaaggagtagaagcagtaacagaagagttaatacaaatagaaacagaaatttaagaaaaaaattgcaaataaaaagtaccaacgaaaaaattaatcacgatcgggtgatgcaaaatcttgccaacatatttggaacgagggtgcagataggtagtaattataggatagaaataaaggccctgggggccttggcgagccccctggtaatggttgccgacccccgtgaatgggtgccaacattaagcccaatggcaggggccacggcgccaaggctggcccctgtgtttgtggctaaactggaatgcccagccggctacgtggcagaagggccagctagccctgttgcatttgcgcctcacaacttagtgtaggcgatagg

SEQ ID NO: 23052 - DNA, 509 bp, Glycine max
  Clone ID: PAT_MRT3847_120818C.1
gaagtttaggaggagaaggcacgcgatctgtttctacgttcttggctttagttgctcttctcttgttctgtttcctcgctggattctgagctttcaacttttcaaattcaacctcatttttttttctcacatgtctttttcttaaaagaaaatcatattccaaacacatttagatactaaatatgatttattatatttaatctctttatactcaacccattgataaattcaaagtcatttagatccattagtactaaatgagattatagattcacttttattcattttattcgcactgtaaacaaaattcagattacacaaatcgttcatcattacatgaacatacagattctaggttcatatatcatgatgttatacattcaccgatccaaattggtttatgataaaagctttgttattcttgtatttatcattcatttatttccttttaagtggaaagtgatgcaattagttttcgttttcttggtggtctgcttcaaggatgtttc

SEQ ID NO: 23053 - DNA, 2404 bp, Glycine max
  unsure (1)..(2404): unsure at all n locations
  Clone ID: PAT_MRT3847_120819C.1
aagattttaagcgattctcgttcggctcgggatggctggccgctgaaccggaccggttcggcttggagagatcttgttgggctcggaaacacgcatttgcggcggtgatgagagggagctgctgctgctggaaccgtcggacagagcagcggttccgcctcctcgcgatctccaccgttaaatcactcaagatcaagcttctcctcttttgctgcgtcgccttcacgcttctcgccttttccaccagcgcttcttccttcgtcctatggatcaacaaccaaacgccgccgcctccgccacctcgcttccccgattccgggttctatttctttctctttctcttttatacttcattcaactacttaatatgtactccactccgataattccaaaaataatataattaaataattaagatccgttcgtttttggtaacagattctttttcggaaagccggtttcctttgagggatttccatatacgtgctggctacttagattccgtttgattttcttttgtcgttttcttggttcttgcttatgtgaaaaaaaaagaggaaaagagagagataaagaaagggatctttatgtgtataggtttttatttgctaggttaattttggatagaatttgttaccaaatgaacttgttatttggctatagtcgttttggaaacaatctgtttaagtgatcggtgttgtttagatggaatttttgcaagattagacgttgggatcttgaaaaatattgatgtttgggaattctgatgtcactattattattattattattattatttacactttgttcattacctgtattttattgtcaagtgatgagatcattttaatggtatttgggttgataattatgtatcagatggactgtttgatattacgagattcatcatgatgagctttctaagtcacaggatcatctagaattggaaaacgggcgaaccaaaccgaattttgggtttggtggtttagattattaacctagaacctagctcaaaggaatgtttaattcgagtactaacaactccgcccttctttatcatatacccttgatttataacctagtgggatgaagtttggggattgtttttttcactcaagttttgttttcttaaagagtaatgagtttatgttgcttgtgatgttagaggacattgtctttttatattttgttcacaggaaagggtattctatagtaatgaacacatggaagagatatgatcttctaaagcagtccatcaagcattattcatcatgtcctcgacttgaatcagtacatattgtgtggagtgaacctgatcctccatcggatattcttttaaaatttctgcaccacgttgtaaagtccaagtctaaagatggaagatatgtgaaattgaggtttgatatcaacaaggaagacagtttgaacaatagatttaaagaaattaaggatttggagacagatgctgtcttttctattgatgatgatgttatatttccttgctctacggtggaatttgcatttgatgtttggcaaagtgcacctgatacaatggttggatttgtacctcgtgtccattgggtggattcattggaaggtaatgacagcaaatttatatatggcggatggtggtctgtgtggtggacgggtacatatagcatggtgctttccaaggcagcattctttcacaaaaagtatttcaatatctacacaaatgagatgccatcatcaattagagaatatgtaaccaagaacaggaattgtgaagatattgcaatgtctttccttgttgcaaatgctaccggtgcaccccccatatgggttaaaggtaaaatattagagattggatcgactggaatcagtagtttgggaggtcacagtgaaagaagaacagaatgcgtcaacagatttgttgccgcgtatgggcggatgcccttggtatctacttcagttaaggctgttgatagccgcaatatctggttttggtgacgctggaattttgattttccttacatttctagaaattctactgccgtccttttattagctagttgagttactcaattcatgttagtcacagttgtataatatattggatcttatactccattcatgcgttttgccgctaatcgatcaaattccttaggttgatttcttgtattagatatgtaatgcaaggcagcatcgtgtggtgctgtttccccctcaaaatattaagaatttcattgtagaatattattaaagggttattacaccctaagagatgaagctctacctgtgatatagttattatttatattattaattattattattcaaaaaaagaaaaaaaaagaaaagaggtgcgtgccgcttctagaggatcncaaggcttacggtacgcgggtgcagtgcgtacgtcata

SEQ ID NO: 23054 - DNA, 379 bp, Glycine max
  Clone ID: PAT_MRT3847_12081C.1
cttatttttaagaagggttctaagcctgatgatcagatatggttcctggagattgacacccaatatgttaggcaacaacaaaaaattttggggactgaggcaggaggatggagtaaaggtgtgataggcaatgctgagaagcctgcagctattagtggctcttgtggagcatgcaaaggaacactgatgtcaagagcttatgaaggaatcaccatctatgtgatggttgtcatcggagccacaccaaccgcgctacacaaggtgtgggcatagagggtgaatactaccattttactgtgaagagtattgggcaccaagagatcatccattgagcagctaactggttggaatctgatggtggcagtgtggacaccactag

SEQ ID NO: 23055 - DNA, 525 bp, Glycine max
  Clone ID: PAT_MRT3847_120820C.1
ggggaaaaaaaaaaataaagtttctttaaaatccctataaaaggaattggaactttaatcattttcatctggacccaaaattaataacattacaacatgcaaatctaatctggaaccagctgccaaagaagataaaaaaaaaacgcccctggttacttagcccttaaaaggaaactcaatcagccggacatggaaaaacactcaagttaccactcaaaaagagctgggggtaggcctatcctgggcaacattcactttgatagccctcccggccaaactttgaccattaagggcaggaattgcatcattcatatcaggctcactaaacattgggacaaagccaaaacaacgggatcgaccagtctttttggcataaaccacccgagcatcctcaaccttaccatggtcactgaaaatttggtccagccgagcattggcaacttcccatgggaaggggccaacataaactcttaaaccaaaactaaaggaacggggggggcgtggggggcgttcaagctgtgctcc

SEQ ID NO: 23056 - DNA, 287 bp, Glycine max
  Clone ID: PAT_MRT3847_120821C.1
aaccaaaatggaaggttaatattaaaatacaagggtttacccccacgggaagctacacgttattatagggaagtatgcccatcgctcaaccgatttctgatttcatctattggttgcagggatcgcgcctgcaaaacacccagtggacccgaagaaagccaataggggcttggaggtggcaaactttaattaccggtctttgtcagttctacggagtaccttgcacctccaggaagggcattaggcccccttctaatcgagcgtttattaaaaaagactgcgccccc

SEQ ID NO: 23057 - DNA, 350 bp, Glycine max
  Clone ID: PAT_MRT3847_120822C.1
cccgggtcgacccacgcgtacgatttgtaatggcttctgcagatgttgagttccgttgctttggtggtgggctggcttggggcaccgggagacgatgccctggagaaagcctttggaatgtacggggacgtgggtgaatggaaggttatgaacgaccgggagactgggaggggcagaggattggggttggggagcttgggctgggaggggggggtggaagatgcgatggggggaatgaacgggcacgacctgggcgggcggggcgtgggctgggggacgaagggtagacgcggggctactctaagttttggtttgagggggggggtttcgtgagtcggggggggtttcgg

SEQ ID NO: 23058 - DNA, 269 bp, Glycine max
  Clone ID: PAT_MRT3847_120823C.1
ccgcgcgggccccgccccggtatccggggggcgccccacgcgctctcggacgcagggggacccacacaggttgaagatagaacgcacgcttgtggctctagttagaccatgggcagctgcccaagacgaggctggtgctgcctctctctgaaagtctgcagtgcccaaaaacacggggcggatactgaagaaaatacaggctaaaacctgcatacaacataccatgaaacatgctggcccacttgatactgctaatggcgctggcggag

SEQ ID NO: 23059 - DNA, 410 bp, Glycine max
  Clone ID: PAT_MRT3847_120824C.1
cttctaccatttacactagcacgctagctccaaggtgatcggatcctgagttaatggccgatacaatttgcatcagtgctttcatcaccaggactgcattgatcacagacttaactgacgactgcatgctcgacgccttgcatactgtcaagagctaatggaacttaacactaacatcgacgagccaactattgactgagtaactccagaagcatcactaaccgagacagcacgaccctacacacgtgtaaaaaagacaccttacgattcaggtacatgatgcataactcatttatggcgcataagatgcaccatctgacgatatacctggatcttgcttctgatatctacatgtgagtatcacaatacatttgtaatgtcgtatatacggacttttcaaatgctactga

SEQ ID NO: 23060 - DNA, 450 bp, Glycine max
  Clone ID: PAT_MRT3847_120825C.1
acgcaaggtctggtctttcaccaccatcagcagcaacatgcaaatagtaccgacacgtcgaaacgtcggggaattgatggcatgtcaggtagcgccctccagatacagccaacagggcgctacctggagggcccactgcatccggctttttgggcggcgatcagctggcagcagctgctgcacgagccatacaaaaccaagggcggggacggaagaagtctcacgctcagattgatcgaagacgggagcgaaatcgaattctggcacggcgaactcgccttcgcaaaaagttcttcttcgaatcgcttcagaaggaaataatggatttgcagcgtgaaaatctagttctcaaggagctggtcaaggtcaacattagcggggaagaaggaaagaaaatattggaagggtgcaatgccgtcgagaatcttccattgtctgttctggaagctt

SEQ ID NO: 23061 - DNA, 437 bp, Glycine max
  unsure (1)..(437): unsure at all n locations
  Clone ID: PAT_MRT3847_120826C.1
ggtgggttattcttntntttttttttttttttttttttttaaaaaaaaaatccaaccggggatttcattcagcaaatattctaccaatcgaacagcacaaagggaaaattctgtcccaagaatatgatgcaccttgaattcatttttttatatacaaataaggaggtggaaattcaaggggcatcatatccttcgtgttcaagggatctgtatagataaatcaaaaccagttggggggatattcaaggggccaaactcctccaaagcagaatcagaatccacttcattgtattcagaaattggaacaggaagaggttcttcactaaagcacttgccctgaaataactccattggtggggccctcttagcaggaacataaaaaaacaggctttttgactagggaaacctcatcaggggtgcaatttggcatgcatgct

SEQ ID NO: 23062 - DNA, 227 bp, Glycine max
  Clone ID: PAT_MRT3847_120827C.1
gtatttttttatcctacccaacaaaattacgcgtccatacaaataaaccatatttggcctgcataacacctagcaacagaaaatatattggccataaataacatccggggcatagattcataaattccggctgtcaaacaactcaatcaaaggaaggaccatggaaactaggtcttctgaggtagttgttccatgaccagatcccaccttggaccacttataaatac

SEQ ID NO: 23063 - DNA, 612 bp, Glycine max
  Clone ID: PAT_MRT3847_120828C.1
gttaaagaagcttgtggagaagaaggaagaaatcgactcgttggcgcacaagcaggtgcgtcacatcctgtggtctggactaggattcggtgtgatcactgttggactattcttcaggctaacattctgggaattctcatgggatgtaatggaacctatcacatattttaccacttccactggcctagtggtaggctatgcctacttcttgttcacttcaagagaccccacttaccaagacttcatgaagaggctctttttctccaggcagaggaagctgcacatgaggtacaattttgatgttgacagattcaaggagcttcaatgtaagtgcaaaacacccttaaatgccaaaaccattttgaagaatcgcaaagggttggaactggatttggaggatgctttgaacaaagattaacattttttccccaggttgctttataattttattcattaaaagttttaaacaaacaaatcttacagttaacctctgttccccccctattttcacttttgttagggtggagcttactctaactatatattgttctggcttgtatgagccagcattattctctttatatatcatttacataccaaaaagattacatg

SEQ ID NO: 23064 - DNA, 225 bp, Glycine max
  Clone ID: PAT_MRT3847_120829C.1
gaaggatgtcaatgtcaggaacaacatcgtagattctgtggaacaagcagtgtattcagtaacttgatactgccccagtcgagatgaatcccacatgtaatgtttagagatgaattattcacattgaggtgtagggccggttcgtgatgattgctttcgctgtttgcagaatcttgtgtatagtacgccagccgattagaatgtgccttagattgctgtgcgagt

SEQ ID NO: 23065 - DNA, 1345 bp, Glycine max
  Clone ID: PAT_MRT3847_12082C.1
ggctcgagctctttgggggatgccttaagtgaagcctcaacggtggtgtttagtctcacattgtctagagatatagcttaaatagaacttataaagcttggacattcctcttcttataagtcagttttgtggggttgaagtaggtcctaagcccaacttctaacacttattataattctatacgtaaataccttgtaacgatcacaagacaacggaattgtgtgaccaactaattttttatcttgccacaactgattcattctgttgtttggtagttgttatcacaggcaaaccagccataattgattaatttcacattatttgaaattttccagtgttatttatttgtattacggctgcgagaagacgacagaagggggaagagaagaaggctgagaacaacaacgaaaaagggtttttggttttggactctgaaagaaactcaaagtgatgcgtttcatcgttctttcgcccaaaccctaacctcgtcctcgtgcattcattccccgcgatcaggtgtgtttttatccattgcaaacagcatgaattttgcagcatcattgtgcagaagattgaatatcaaggaacttgtgacatatgttcctgtgtatagaagcaccagtggtgtttctggagaaggtttgaatttggcgttcaggcgttgggcttccaaaaagactgctggttccacaaagaatggacgggattcaaaacccaagaaccttggagtgaagaaatttggtggggagagggtgatacctggaaatatcattgttcgacagcgtggcactcgttttcatccaggaaactatgttggacttgggaaagatcattctctgtttgcattgaaagagggatgggtgaagtttgaacggaacaagttgactggtcgcaagtgggtgcatgttgagcctaaggaaggtcatgttctccaccctctgtatgcagcagatgcttctgcatctgaactaaaagttgctgtctaagtctcatctgtcatcagtatcatccatgatagaaatttttatttggtcacaaaattcagctttaccttcttggtttatctgaacttctagatgttcaacctctgccttaatttataccatctttaattgaaaaactaatcagttgttttggtacatcctcttccattggaagcatttaaaagattgagtcccgaaggcaagattagttggtacttcagcatgctggagagttgctcctttttgtatttgtcaaattatgcctgattattagaactgtaattggttagggagagtgcttgatcaaattttgatcggatcatgtaggaataaggttcaattttaccgatatgttcaactac

SEQ ID NO: 23066 - DNA, 640 bp, Glycine max
  unsure (1)..(640): unsure at all n locations
  Clone ID: PAT_MRT3847_120830C.1
atncgggctcggagggtgttccttctacaaaaagcacannatttgttagtggtaaaaacccttcaatatattgtatataannttggtgccctggttcaacattgcgttggagaagaattnnttcctggagagagggagagatcaannngaaaaactcctaaaaaggatttgatgctctagaattgagaaccaaanngaatagatcttctcaatactaanntgaggttcaaggcttcagaaatggaaaccaaannntttgtttanaaattgtcttctttgatgaatnngttgaaacctcnnctaaaggtnnntccatgtnntggatcnnttaaaantnnttctcaaatctttaaannattgctacttttcctcaagaaacaaacagtnntggaggaacccaattctnnngcgtagtgaatctaattgnngcaaattttttgaccagaaagggcaatnntttagaaagcaagtgtnntgatttgcnnagcgcaactcnnatcgtattannaaggaatnngattaaannatggtggcccaaacagttggtatttctctgagaaatacanggtatttagcattggcnctgtgccttatgnnnatagttcttttaagggggccgcgccagttcttgatatttaca

SEQ ID NO: 23067 - DNA, 350 bp, Glycine max
  unsure (1)..(350): unsure at all n locations
  Clone ID: PAT_MRT3847_120831C.1
cgtttcaattcaccggttcacgtcatttcgggtggctgcaattattgttagtatttaatacctcttacctttgccctgtactgaacagagggttgttctttcctcacttantttctcattcaatctcgcaacatacttttccacaaatgatgtattggccagcatttacccataattacattaaactcttaattcacatgatcacctccaacattgacatagacaatacctttttcttcactactacaatagtcaatttttctatcaccatataacatttaatcttttatcataccttacattttctctcttatatattcatttcaaataagaattcttacatttattat

SEQ ID NO: 23068 - DNA, 321 bp, Glycine max
  Clone ID: PAT_MRT3847_120832C.1
gttctacccagagaaaccctaactcatatatttatttttaatattacttctcttctttatcttttaatttaccgatttgtttattgtttcatccctttgtttctacactgatcaatctctgcagcctgcactttgttttgtcactctgagaaggcaaaaggaaaaaaactagaaaccataattatcaatggtcactgctgctaaatcttcaaaccaccactcgccccccagtgctccgtcaccggcgcagcccggagacggcaacagccccaagttcccgcgaaaaaatcttccctcgccgtgggctcaggtagttcgcgg

SEQ ID NO: 23069 - DNA, 264 bp, Glycine max
  Clone ID: PAT_MRT3847_120833C.1
cgttatcctaaatgtgatctattgatgaataatttgagtgaagctttcaatagcactattttagtggcaagggagaaaccaataataacattatttgagtggattaggtcgtatttaatggctaggtttgttacacaataacaaaagctagcaaaatatagtggtgacattatgcctaaacccatgaagaggctagatggggaaattgagcttagtcgtaactggagttcaagtactcttataagatattagagattacccatg

SEQ ID NO: 23070 - DNA, 585 bp, Glycine max
  Clone ID: PAT_MRT3847_120834C.1
ttgcctgctacacgtgtagcagtaccacctgcttgggggggggggggggggggggcaagaaaatgttgaataagggcgaggaagcaaaagatgggataagggtactatagagatatgcttagcaagagaaggggctatctgagaaggagtgggtcttataaataagccacgacgctgtaataaactataaattaataagaagaatacggggacggctaggaagggatataacaaacgaaaggaatcgaagacctaatatagcgcgcgtatcggtagcaccagtaggggagaagcagagctaataggcaaggaaagaggtgtagctaagccagtaggtgccaccaaccttggcacccaaatcgtgcagagtacgctaagaaggcgaaagtagcgaaggtggggctatttaatccagtgggcttgcttttcgcctcgttacgcaggccttacgccaacaacaacgggcccaaggcaacgggtgcgagcaactgcgcaagccccttggctgttaagttcggggtataactttattttggcgcctttaagttgtactcggttaaacatgacacgagaggtgtagcacgg

SEQ ID NO: 23071 - DNA, 1404 bp, Glycine max
  Clone ID: PAT_MRT3847_120835C.1
gcatccacagacacacaggttgcaatttggcgtgattctgcgagaagaaggttagtggttgcttttaggggaacagaacagactcaatggaaggacttaagaactgatctaatgcttgtgccagccgggctaaatcctgaaaggataggcggagatttcaagcaagagattcaagttcacagtggttttctaagtgcgtatgattcagtaaggactaggatcatttctctaattcgacttgcaattggttatgtagatgatcattctgggccgcagcacaaatggcatgtttatgtgactggtcatagtttgggtggtgcactggcaaccttgcttgctcttgaactttcatctaatcaattagctaagcggggagcaatttctattactatgtataacttcggttctcctagggttggtaacaaaagatttgcagaagtttacaatgagagagttaaagatagctggcgagttgtgaatcacagagatattatacccacagttccccgattaaatgggttattgtcatgttgagcgacctgtatttcttgctgcaggggttttaagacatgccctagaaaacaaagatattttgggagatggttatgaaggtgatgttcttggggaatcaacaccagatgttatagtcagtgaatttttgaagggtgagaaggagcttattgagaagttgttacaaactgaaataaatatattccgctcaatcagagatggaagtgctctgatgcagcatatggaggatttctattacatcacgttactagagaatgtaaggtcaaattaccaccaagctgtgtcaaggtcagaacaagatcaaaactatagactataatgatccaacaagggtttgttcttacgaggctggccagcaagtcttccttggccaaccagaagtatacttgtatataaggtgttgagggagaatacatatatttgagatcacatgcaggcttgcagccaattctttactgtgacgaaaatggcagcaatgcagtatgtccagtatagtgtttgcaaatggaaccgaaaagccacgagttactagaggaggactgcaaggagcaaaacttactaacaaattttatagtttaaatattatagttatttgccttatgatgatagaaattgatgttatagcatgcatgtcaaatattcaaagatagaatatatgattcttgttctgatctcaagcatttatagtctcatggataatgtaatttatgttgtaaattatatattgttttttttctttttcttgtgggttacatgttactgttggattgtcttgtattattatataatattggtgaaagatttagttgttgaaagattcagcaattttaagatgatgatctatttattgctggtatttatttggattaaaaa

SEQ ID NO: 23072 - DNA, 125 bp, Glycine max
  Clone ID: PAT_MRT3847_120836C.1
gatttaaaacatgcttaacgcggaatgccaaaaacgatcatccaactgcaaacccaatggtattacatacccatactacagactgatccctaaaacctaggttattacaaaccctatttattatt

SEQ ID NO: 23073 - DNA, 258 bp, Glycine max
  Clone ID: PAT_MRT3847_120837C.1
cacgcgtccgctttgcttgtacgtaaatatagaattattgttgtagagccatttccgttcttgtttctgccttcacttttttgttttgtttcctttggatggaagggatcgaaggaaaatgtatgtggttgacgttgtagacttgtagtcaataagcaattaaggaatatcaggacacatgtattgtatatggatgcataaacacgattggaaaatggctatatcttaaaaaaaaaaataaataaaagaataatactt

SEQ ID NO: 23074 - DNA, 165 bp, Glycine max
  Clone ID: PAT_MRT3847_120838C.1
cccacacgtgcgcacagtgaccaggtagttgtacactgtccacccaccattattatgtcgcggggatacgtaccctcactactgcgcgctggacattctcggtgcctcattccctttgagcacgcgatgttaaggagtagccgcgtgtaagacctgggtaccaga

SEQ ID NO: 23075 - DNA, 375 bp, Glycine max
  unsure (1)..(375): unsure at all n locations
  Clone ID: PAT_MRT3847_120839C.1
agggaanggnnnaaaaaaccttttcctcacctttgtttttcccatccaattatcagcatcgggcgggtttttttgttagaggcacgaacaaacaaaacctttaaatggtcggaagatcaaaaggagaanngccanacnnccccctcccagcaaattaacataaaacacccctctttctctatttcttttattattgggtatgtcttgaagttcctctgaattagaaagcatatatcnnncncngccaggacacaccctcctctatagattccaaaattgctcatttgcgatgctgataaccccctcttttctgttttcacccccaagatttttctgtaaatcacgaatgatatcatcttgcgggaggaatttaga

SEQ ID NO: 23076 - DNA, 558 bp, Glycine max
  unsure (1)..(558): unsure at all n locations
  Clone ID: PAT_MRT3847_12083C.1
gcaaaaggacttgcttacctccatgaagattgtgactcgaagattattcattgtgacatcaaaccagaaaatgtactcctggatgataattttatggtcaaggtttctgattttggtttggctaagctcatgacacgcgaacaaagccatgttttacaacactaagaggcactagaggctaccttgcacctgagtggatcacaaactgtgccatatcagagaaaagtgatgtttatagctatggcatggtgttgctagagatcattggggcgaggaaaaactatgatcccagtgaaacttcagagaaatcccatttcccatcttttgcttttaggatgatggaagaagggaatctgagagagattcttgactcaaaggtggaaacttatgaaaatgatgaaagggttcacattgctgtgaaagttgcattgtggtgcatacaggaagacatgtctcttaagccttncatgaccaaagtggtccaaatgctagagggtttatgcattgttcataagccagncatttgctctgtccttggttctccggtttactcaacta

SEQ ID NO: 23077 - DNA, 440 bp, Glycine max
  Clone ID: PAT_MRT3847_120840C.1
ggctcgagcatataccaacctggctacatatctttcatagggtatgaatatttatatgtctatatcataaggccggtacaatcatgcgggtcttacataaatgtcggctaaggaaattatttcgtgtgttcctctcataccgctggttggtgattacatatgtgtggcggtggacgtcaacaagaagggctaggatcctacacgtaaatctgatgataaatatgtctgaggcatgtgacgttacactgatgaccaaatgctgtgccagtaatccacaagatacgggaagggcttgtacgccgctgatccaaaagattacatagtcaaggcggtgtaagccaccatggacagggtgaccagtgccctcatcatgagtgatcggctcattaacgagtacagaggctacgataacggcaccaacattgacctcgatgattgca

SEQ ID NO: 23078 - DNA, 277 bp, Glycine max
  Clone ID: PAT_MRT3847_120841C.1
gggggtcgagatagaaactcctccttttctccctttttcaaacctccaaaccttccaggaaatagggtttgtacggtggcgagatctccatatattccaccttttctgttgcaaggtctcaatagaaatcataccaacccacgagatgtattattccatcctaactttcctgtagcattaaccaatcattcccatacaaaaacgctagtaatgcatggtccaaattccctactcctgatcacactgaaggaaattcacatacacactgctaaggatc

SEQ ID NO: 23079 - DNA, 569 bp, Glycine max
  Clone ID: PAT_MRT3847_120842C.1
aaaacaaaacactaagaccattacactttacacgggtgcaataccagttctacagtgaagtattttatataaaaaaatactacaataaaacaaataatactaacagagagttttttaaaaatatataagaatttgaaattttgaaacacagaactgacagaagcaattattcaatatgaaacgacaaacagaacctggacagattgagcgacgccatttgcccatttctctatgcacttgaattctgacgagaacacagaacaagatgattgaaatttggaaacaaaagtctgacttagtgtatcagatcagatgaagaagaacacagagagtcacagacaaaatcactcctatagttcctacacaaattcacgtaactccatatccttccaaagctagatagtacaaagtactcacaaaaccgaagtaataacgaaagcataacaacaacaacaacgttgatcatatattatggcttctcaatctaactataataaaattaaatggattaatcaacagtgcgcggggatttgcttgatgaaagcgacgaactgcttaacgaggtccac

SEQ ID NO: 23080 - DNA, 382 bp, Glycine max
  unsure (1)..(382): unsure at all n locations
  Clone ID: PAT_MRT3847_120843C.1
aagnatggtagagggaaagttggnannaggattnaggtttnatntaagagatgaagagnttgggggggattattttttttttttggngnaananaatgatntaattgtnttgatagatgttgattttaanaagtgggaggggggggaggttngtgaaaaagtatgggttggagggaaggagtggtatttttaaatgaaaagaagggggaaggatggaagagggttaggganaagtnggggtagtggggtaaggnattggaagggtanagggaagggaaggggatgatgtgggaagggtaaanaggtagggatggggaagagtggggtgttataatgaggaagggaganggaagggagaaaaaatgaaggggggatggatgag

SEQ ID NO: 23081 - DNA, 305 bp, Glycine max
  Clone ID: PAT_MRT3847_120844C.1
tgactacacagtttcagcaatagctcttcacacctccggcagactgagccatagggaactatggggagtggcgatacgaaagtgcgggctactggggaaccaacaccacagtcagaggagcatgcatttgaaattaatggatcaaaagtgatgcacggtaaactactgccgacaataacctgcggactgcgatatgcattaaatgctggaaagtggacattcaatttggatacttacggtctagaatggtcaatcatgctaactgaaaaactaaatatcgagacttaaaagcagagccagaagaa

SEQ ID NO: 23082 - DNA, 501 bp, Glycine max
  Clone ID: PAT_MRT3847_120845C.1
tattgctcctgcatttgccatgtcatttgcagccatgaatggagctactggcgcctctggccttgacctctcatctattgcacagaacaaccattcaatcatgcagagtaatcataactatcatataatggcagcacaagctgccagtgctcagttgaagaagagttatcatgccgccgaggaagggaaaagtgtagttaatccttctaatctagacgaagatagaaaagcaatatctgctggaaaaattccggcaacaatggggcaatccatggcattcggaaggccaaatgtatctgatccctaataagcgtcgtaatcggccggaacaatggggatggttccctcggcccgaatctaaaccttggttctgcttcttctcgtgcttctgcttctgttatgcctgctgccatcagcactaatgcagccagttctcagcaacaaatgcagcgaaaatagcagcagcaaattcttcagcatcagaagcagaatcaatttgca

SEQ ID NO: 23083 - DNA, 220 bp, Glycine max
  Clone ID: PAT_MRT3847_120846C.1
acataaatagggggtttccacacaatttatttaaaatcaaactattaattgcgactaaatcaggtaaacagttggattcaccatgttcaaataagaatgcttcccttttttgttttttggcatttttataagaacaatcagctacgcccaccaacacggacacactcacgggcattcactcagtcccgtgcctccaagcaatgcagcaggcacgtcaaca

SEQ ID NO: 23084 - DNA, 392 bp, Glycine max
  Clone ID: PAT_MRT3847_120847C.1
ctcactaacaatggacttatatacgagctttagtggatttagtgtatgaatggggaaaaataatgatttttgtatattcatgatatataatttaaactgataagaggaacaaaaattattacttctttataaattaattagatgactatatattagacccttcattgtaactatattaaaaataataataataatttttgattacaatataattacactcatcaatgatttcatgcctaataaactcaattttaatttatgttaaagattgtttggggaaaaaaagagagatagattgagaacaagcattacttagatttattcactgggtagataatgacagtgccgaatcttgattctttaacgatgttcccgaagacaacctctgcgaa

SEQ ID NO: 23085 - DNA, 398 bp, Glycine max
  unsure (1)..(398): unsure at all n locations
  Clone ID: PAT_MRT3847_120848C.1
tttggntctatgggtatcaaaaggtttacaatctagcattcctgttttcttcatgggggagctctgtacccaaattgcaagtgttttgctttattttcctaaaaaattaatgaaattcctcatgtaagtcttatctacaaaaggaaacatctctaaactcaaactaagctaatttttatgggttttcaaaaaaaatattctttttggtttatttttcttcaattttttctttgaaatcatgcacataagttcataaaaaatgaatttatcatggggcaaactagctgtgctcacactgaaggtagttttgctcatgaagatggtaagacccttccttgcaacactggtaaatcttttgggctaagagacttagagaagttgcttttcctcagacaagt

SEQ ID NO: 23086 - DNA, 119 bp, Glycine max
  Clone ID: PAT_MRT3847_120849C.1
ggctcgagcgcagacactgcctgcatttgttaatattgtctttgaaacgtaaggtaagtaccgcgatgttgggcgagacgcttggaataataaaatgggagcgaactccattgttttac

SEQ ID NO: 23087 - DNA, 127 bp, Glycine max
  unsure (1)..(127): unsure at all n locations
  Clone ID: PAT_MRT3847_12084C.1
cacaatcagacacggtcctaagtntacctattgtgattccaacacctctatttatgttcnagacattangtattcnnncaccgttgatgtangcnntgnnggtgnagtaggtccttcantnatangc

SEQ ID NO: 23088 - DNA, 292 bp, Glycine max
  Clone ID: PAT_MRT3847_120850C.1
taacctatactctgatgttgcccagagaatactcactggaaccacttactattatgcttgccctggcggccaccgaactatttcactctatagtcttgccattcacgcccactcaccggccgtatattatcatctcctcgtatgtaacactcctgcccaaccccactactttcgacgctgcaaccatactcttctctacacctggtttcatagcgaatacgtcgacacaaactcgctcttgtatgcatagcactatctgcatagccatcgggacgcactcattaccgaccta

SEQ ID NO: 23089 - DNA, 746 bp, Glycine max
  unsure (1)..(746): unsure at all n locations
  Clone ID: PAT_MRT3847_120851C.1
accaggagagaaaccacctatttcaattttcaccaaacctcttcctctagaaacatcatcaacctctatataaagataattggaagagagaagggagaaggagaaagggaaaagatcataagaagtgatgtcaacaacttcccatcccattgttcaccacagcttattcgatgagcaggaccagatacctacacagatgggtttcttttcctttccaacaaaccttactttccctcctttgggttgccatcaatcctctttgaaagcctttagttccatagcaccttcttcacttgctatatctcaacaagattctgcatcaaatctaacagcagaaaccctattctcaaccactgctcaaaagtcaagagaagacctcacttctagctttggaggaggtcaattcctatccttgcatagatcaagtgtaaatccatgggcattgggagaagtggctgaatgcttcagcagtaaaagaagtggatttgatgatcatcatttccgaatttcagccatgaagatgaagaaaatcaaggcaagaaggaaggtgagagagcctaggttttgcttcaagaccatgagcgatgtggatgtattggacgatggctacaagtggaggaagtacggacagaaagttgtgaagaacacgcagcaccccagctatttccggtcctcacttgatagctgccctcttttggtttcgccggtacgcttgtccttgattaaagaatattaannnnnaaacc

SEQ ID NO: 23090 - DNA, 349 bp, Glycine max
  Clone ID: PAT_MRT3847_120852C.1
aaaaaaatttttttaacaaaaaaaatctttaaaaaaaaaaaaaaaaaaaaaaaaaaaggaaggggaaaaaaaaaaaaaaaaaaaaaaaaaaaaaaaaaaaaataaaaaaaaaaaaaggggggggcccccccttagtaagcttttcaacccggaaattaattctggaccggtccctggaggggtaccaattttccttatagggggccgttttaaagcttggcgaaataatggcaatagttttttccttggtaaaatttttttcccttaaaaattccaaaaaaattacaacccggaaacataaagtttaaaacctggggggcctaatgggggggttaactcaaattaattt

SEQ ID NO: 23091 - DNA, 318 bp, Glycine max
  Clone ID: PAT_MRT3847_120853C.1
caatctcaaatttcatcaccatagataaggaaaaaaacttttggtataccctttttttaccagattaaggcctaaaaggaaaaattacatatcttataacttctcatggattctcattaatatttatatgaaatttttaaataactacatcaattagcttttatcaccattcaccacaaatatgataactagaaactcaacattctgggtgatctaaaaacttcctttaagtaaactgaattactatatcccaccttggatagatcaaaattaatctgtacctacaaaacctcccgtttataaccatacaatctctac

SEQ ID NO: 23092 - DNA, 162 bp, Glycine max
  unsure (1)..(162): unsure at all n locations
  Clone ID: PAT_MRT3847_120854C.1
tttttttttttttttnggacacgttcataattgtgcaaatgtacttgccaaacataatccttttctcattacaatttgcaaagactggtccatggttagcattgcatagttgcacttaatttagcaaccactaacccaacatttacgggaatatttatgaat

SEQ ID NO: 23093 - DNA, 918 bp, Glycine max
  Clone ID: PAT_MRT3847_120855C.1
ggtttgcttcattcaagagtagatcctcttgtgatgttgtcttgtactgtcaccattgcattaatgatagctcgcacaatcatagtaggataaagctttccataccatgcgttgtcaatgagaagggaaatattagtctactactaggtattaaaacttcaactttttgaatgctataactctctcttctcaatctctgaataaagttagaagactgaaaggctcgttagtggtagtggtttcagttctttctacttttaagttcatgtaattttttattttataagttgtatcctgattgctctgtttctctgataatactatgttctagagcacaaaattaatcaaaaggacacattacacattaagttccattcattgataattagtctcattggatatgcttatacatttttttcccgtgctacttagtttattaatatactattatttgttttgtctgatgtgtttttcttgctccaccaggtcaggaattggtactggatctactggtttcacccccaccttatttggcacccttcacaattggaccaatagttctgaagggtgtaaactatgcctctggtggaggtggaatctttgtgaccatcatgatatcgaaactcatagttcagctcactataatatttctcagcattataattttataaagtcctttgttttgtttataaatatttctcctacaaattttggtgttatggttactaacttactattatattaacattcaaccacatgcagaggttattcaacctcatagttagaaaatttgttgtggcaaatgtggggcctactgggtgtataccaagccagaaggacatcaataatgcagttaagtacttaaacaagttagtgtatttttcaaatgcagtcaaatgactgataactgaaagagaa

SEQ ID NO: 23094 - DNA, 312 bp, Glycine max
  Clone ID: PAT_MRT3847_120856C.1
ttcaggtttttttttcaacggttcttcttccttttattagccttggcaaccttggcttccggccgccgggacctgtttgaaacctttttccgcttgccttccgaacctgataccaagaccaccttcaaggcccccggtggggccgacttcttggcgggttcaatgggttctgggaataccaaccttcaggcgatggttggcacgcctctataaaatattgaggaaaggtggtctgaaaaaacaaaataatattggtgttatggatgaagacataggattcaatggggaaaacccaaggcctggagtcatcat

SEQ ID NO: 23095 - DNA, 416 bp, Glycine max
  unsure (1)..(416): unsure at all n locations
  Clone ID: PAT_MRT3847_120857C.1
aaantattaattttggacgggtaccgttttaaattacagaaaaaaatttttattaataataaaaataatcaaggcatttttttttacatttttacattaaaattttatatatttcatataattgttacattttataaaattcttctatacaattatattttataaataaaacaacactaaataaactattattagttaacatcatatttaaaatgctattaattatacaatatatatttaaatataaatgttgatcataaatacattaaataattataaacttaaatattacactaattctgttatatgaataaatatcttttttttccgaagggtacttaattggttgaaaagaatgtttggggaagaataatattgtggggaagctttccaactgtattttaatctttgcatat

SEQ ID NO: 23096 - DNA, 1959 bp, Glycine max
  Clone ID: PAT_MRT3847_120858C.1
gcgctattaatcccaacatttttaccccacccttaaccaaagtaaaagcctaccttgtctccaacatacataggcactgtctctgtttctatttctcactctctgaactctgaacaccgaaaatccgccatggattttcgcatctatggcgtcacgatccttctcttcctcttcccaaccctcacattctcaatctcacagggtcagataaactcaaactcaatccttgtcgctctgttggactcccattacaccgaactcgctgagcttgtggaaaaagccatgcttttgcagactctggagaacactgtcatgaacaacagcaacaacatcacaatcttcgctcccagaaacgaagccctcgaacgcgatctcgaccccgatttcaagcgtttcctcctcgaaccccgcaatctccattccctccaaaccctcctgttgtcccacatcgtccccaaaagaatcaccaaacccgaattcaaaaccgggtcgacccgacacagaactttagcgtctcaccaccacctcactctccaagccctgaatttgactcactggaatgttgagtcttcccgggttattaacccgaattcggtaacccgacccgacggagtgatccacggcatcgacactctcctcatccctcgctcagtccaagacgaattcaaccgtcgccggaatctgatctccatcgccgcggtaaaacccgaaccatccccggaggtcgacccgcgaacccaccggttaaagaaaccggcgccggcatcgccggcgggggccccgccggcgctcccgatctacgacgcgatggcgccggggccatcgcttgcaccggcgccagcgccgggtccgggtgggtctcacaagcacttcaatggggaaaagcaagtaaaagatttcatcgagacgttactccactacggcggctacaacgagatggcggatattctggtaaacctaacgtccctggcgacggagatgggaaggttggtttcggagggttacgttttgacggtgttagctcctaacgacgaggccatggcgaagttagcgacggagcaattaagtgaaccgggttcgcccgaacagattatgtactatcacttgatacccgagtatcagaccgaggagagcatgtacaatgccgtcagaaggttcgggaaggtccgttacgacacgttacggttgccgcacaaggtcacggcgcaggaggctgacggctccgttaagttcggccacggggacacgtctgcttacttgttcgaccccgatatttacacggatggacggatctccgttcagggaattgacggcgttctgtttccgcctcaggaggaagaagccgccgggcccgttacccgagcccagcccgctaaggtcgtcgtcaagcaaagaagaggaaaattgttggaaacagcatgttggatgcttggaagctttggacagaactctagattcatctcttgtcaatgaagagctcttatctggatgctagcaagactagttaagaacgaaaaccctgcacaggaaattccaaagatgtaaaaagtcaacggaatatgaaggccaggttacttgaaatgggttaatagcagcagctgctatggatttggttttcccacgtttttgtgatggtctttttttctttctccttctcgatttttcttcttgtggatttgggtcttggacttgagaacaaaagtttctcaagtctagtgaaaacaatatatagtgcaatttagattcagttaggaggttgtgttggtgggatgagaaggttttatgtaataagatggcagtgaaatctgtgcccgattcagtaagtaattttacaaaaatggaaatacagtaataatcaataaaatgattcttttctgtaaataaaaaatgtaaaaataatcataaaaaaccaaaaaattaccctataatataattatcacccatccatttggaaaaatt

SEQ ID NO: 23097 - DNA, 1280 bp, Glycine max
  unsure (1)..(1280): unsure at all n locations
  Clone ID: PAT_MRT3847_120859C.1
ctggtancgcctgcaggtacccggtnacacggaattcccgggtacgacccacgcgtccgcaaaccctcctgttgtcccacatcgtccccaaaagaatcaccaaacccgaattcaaaaccgggtcgacccgacacagaactttagcgtctcaccaccacctcactctccaagccctgaatttgactcactggaatgttgagtcttcccgggttattaacccgaattcggtaacccgacccgacggagtgatccacggcatcgacactctcctcatccctcgctcagtccaagacgaattcaaccgtcgccggaatctgatctccatcgccgcggtaaaacccgaaccatccccggaggtcgacccgcgaacccaccggttaaagaaaccggcgccggcatcgccggcgggggccccgccggcgctcccgatctacgacgcgatggcgccggggccatcgcttgcaccggcgccagcgccgggtccgggtgggtctcacaagcacttcaatggggaaaagcaagtaaaagatttcatcgagacgttactccactacggcggctacaacgagatggcggatattctggtaaacctaacgtccctggcgacggagatgggaaggttggtttcggagggttacgttttgacggtgttagctcctaacgacgaggccatggcgaagttagcgacggagcaattaagtgaaccgggttcgcccgaacagattatgtactatcacttgatacccgagtatcagaccgaggagagcatgtacaatgccgtcagaaggttcgggaaggtccgttacgacacgttacggttgccgcacaaggtcacggcgcaggaggctgacggctccgttaagttcggccacggggacacgtctgcttacttgttcgaccccgatatttacacggatggacggatctccgttcagggaattgacggcgttctgtttccgcctcaggaggaagaagccgccgggcccgttacccgagcccagcccgctaaggtcgtcgtcaagcaaagaagaggaaaattgttggaaacagcatgttggatgcttggaagctttggacagaactctagattcatctcttgtcaatgaagagctcttatctggatgctagcaagactagttaagaacgaaaaccgtgagattctaatttgatatctgaatgatgttacgtgataactagcttaagcccattaatcagatcttgttaacttgaataaaggattaattataataaagagtgtttatgttttccttgctcctgcc

SEQ ID NO: 23098 - DNA, 550 bp, Glycine max
  Clone ID: PAT_MRT3847_12085C.1
cttgggggggggggggggggcaatagcacaataccggtaaggggtagagcgctaagctaatagaaaacctaagctgcaagctaaggctacgtaagaagcatgagcaggtgggaacatggctgtggcggttacgctagtgcgagcggggctgcggtaaggttgataagtgaaatacaatacgggagtgggcttaagcttaagacgagtaaacgaataaaaaataacaaacaaaataaccccgtaacgagtagcagtgtagacagtcagtttgtatagtaggtaaacgagccgggaggagaaactaagaagaactgtgatatacactactaggggccacgtagacagatagaggtagtatggttatggtggcaagttattagctggcttcaatggcttagctgggttagctggcttcaatggcttagctgggttagctggcaatggattcgctttcgctgctggcaaggggttagcgcctagcgcactattagcgctagaggccttagagcaattagcccacttagcacacatagccgcactattagaacta

SEQ ID NO: 23099 - DNA, 646 bp, Glycine max
  Clone ID: PAT_MRT3847_120860C.1
aattcggctcgagcggatctccgttcagggaattgacggcgttctctttccgcctcaggaggaagatgctgggcccgttacccgatccaagcccgctaaggtcgtcgttaagcaaagaagaggtaaattgttggaaacagcatgttggatgcttggaagctttggacagaactctagattcatctcttgtcaataaagagctcttatctggatgctagcaagactagttaagaacaaaaatactgcacaggaaattccacagatgtaaaaagtcaacggagtatgaaggccagcttacttgaaatgggttaatagcagctgctatggatttggttttcccacgtttttgtgatgctcttttttctttctcctcgatttttctccttgtggatttgggtcttggactagagaacaaaagtttctcgagtctagtaaaaaacaatatatagtgcactgagcatattataatgcaatttagcttcagttagtagtgctgctacaaatcgttaggaggttgtgttggtgggatgagaaggttttatgtaataagatggcagtgaaatctgtgcccgattcagtgagtaactttactcaaaaaaatgcaaaaggaaatacagtaataatcaataaaatgattcttttttgt

SEQ ID NO: 23100 - DNA, 803 bp, Glycine max
  Clone ID: PAT_MRT3847_120861C.1
gggcaaaaacaatcatgacaagattacagtttcaaaattcagcaattcagagccttacattattatgcaactcatacatagttatgcattcaataattaagtgctgaaatacagcaaggtatgcagcactaacgcagcaggaatcagatgccatatctcccaccaaaaagaaacaagagaaagggtgacaaaacccagaagaatccaaagctgttaataagctcaagaatattcagctattgcctattgcttcttgtcttccgctttccttggtttggtagggagtgcgatttgggagagctcctcgtcggggatgataaccggccagggttcccctgcttcgcgaaacatctgctccgtctcgaggtgctgacccttttccagaatcaagtttcttatgctctgagccggcgtcgccgtcgcgtcgaacacttcctcgacgccgttaacgaatgtcaccgttatctgcggcgcgcgctcttccctcacgcgcttcacgtccacttcgcacgtcgggttcgactccttcgccctccgtgaattgcattgcgccagaaactctatacacgatgccgttcgcgggtccaacgcgttgaactcgattttcactctcgacaagaatttcaacattttcgcgtaatgaacccaaaaagcttaatcttgagatggtgaagaaaacgtaagaagagaaaccgatacaactttctgggagcgatgatgggtttagggtttcgtatttccagttctctttttttcatcccttcgtttgtgggattttactatctctaattaataattactgt

SEQ ID NO: 23101 - DNA, 465 bp, Glycine max
  Clone ID: PAT_MRT3847_120862C.1
acggctgcgagaagacgacagaaggggagatagatatgtgacactagccctggagaagtgttgcgtgtattagagatatgagatattgcctcacttgaattttgaatttagaataagttttagataatgtttttgttattgttgcagattttatcttttatattttgtgtttgttaattaatttaaataaatatgatagaagatagattaagttgtttaggattttcagattggttagtaagcctatatataggccatctcactttatgaataatattggttattttcctatgttgttaatttctcttatttttctgcaagttctccctatttctatattttattttacaaaatatttccaacaacatgaactatggtacactttggtatgttgtatgcatacaagtatgcagtacaggacttttcttggtatgaagtacaaggcatagatttacttggctattt

SEQ ID NO: 23102 - DNA, 739 bp, Glycine max
  Clone ID: PAT_MRT3847_120863C.1
caaagcaagcctacgctctgtatacattagcatgggataacaccaccaggattctgatcctattgtgttggcttcgggatcggagtaatgattaccagggacagtcgggggcattcgtatttcatagtcaaaggtgaaatttttggatttatgaaagacgaacaactgcgaaagcatttgccaaggatgttttctttaatcaagaacgaaagttgggggctcgaagacgatcaaataccgtcctagtttcaaccataaacgatgccgcccagggatcagcggatgttgcttttaggactccgctggccccttatgagaaatcaaagtctttgggttccggggggagtatggtcccaaggctgaaacttaaaggaattgacggaagggcattttgtgagggaatgtccggatgttggggaaaggaaatgagtgagaatgtgttatgttatgatttcttctgttgaattgtgagtatgttacagtcatcagttggggttggttacatggattctgttatttttgtttctagccattggcattaatttgcttccaaaaaaaaatacacaaaaaaaaaaaaaaaaaaaaaaaaaaaaaaaaaaaataaataaatataaaataaaaaaaaaaaaataaagtaagaaaaaaaaaaaagaaataaaaaaaggggcggcctttttaaaggatccaggtttacttacccgtgcttgcaactgattacctcttttatagggtcccctaa

SEQ ID NO: 23103 - DNA, 1737 bp, Glycine max
  Clone ID: PAT_MRT3847_120864C.1
ctggcattttcttcctttgcatttcaccaagacgactcctcccagatagtcttcccaccacaatcgaaatacttgcttgttgacttggcgaattatcctaatcagttcccttctcagtattatgaaccttatatgaaaaactcacatttcctgtttttactgttttgttatcgctctttcttctttctcctttctctttatattcccttccttccccgtctccgtctcacacacaataccctttattgttattcatggaattgggtttcagttctctaatcgtgatgtgaaaaaattcacaaagcatttgagtagcttctctgttgctgaaggacattgtgtcgaggttggaaatctatcatgggattcatggtttgagcgtttggaacaacaggcttagagtgtttgtgttcagatagcatttgagaagcatcaataggaatgatggatctttcttggacgttctaaatgaattatagtttgttgggctgttgtggaagattgtgtaggtggaccacctgtgtaaaactttatctctttagctggccctcacgttcgttctccttctgttcttctaggctgttcaggtatcttctacattcctgcagacaccctcatctaggcagaggtttacagtaacaatatttaacaactattggctccttttggttacctaatgctatcgattgccatttcaaaaaatgtagatttcttccagtgcttaacaatgaaataccagataagagaaattctacttacaaggaaagatttagtagcttgcagaatttggtacttatcatgtttgagcacgacactgttttaataccaaaggaaacttcctggtttggatattacccagatggctacttcaagccagttttaccaccacaatcaacagaactctacattgaggattggataggcttaagaactctagatgaagctgggagagttcacttcattagtgttccaggagatcatcttggaatctcccaagaggatatgaaaaagcatatagtgtcatattcgaaggagcacatattcctgttttaataccaaaggaaacttcctggtttggatattacccagatggctacttcaagccagttttaccaccacaatcaacagaactctacattgaggattggataggcttaagaactctagatgaagctggaaaagttcacttcattagtgttccaggaaatcatcttggaatctcccaagaggatatgaaaaagcatgtagtgccatatttgaaggatcacatattcgtacaagatagtatcaataaggctaggttcaggttgcgaggagttaatcagaaagttattcaaagtaatatgatggaacaatctcaaaaggaggaggtggaaccatcatcctccccattacttgatggatcattgccatactggtggcctacaccattcaagactttccttggtgaattgattggcattaatgaagaggaatctatacaaaggaaataatcccattacacgttattgtgaaactaaatctattaaattgaatataatgtgtttggactgattaaaagatttatcagatagatatagaaaaatagtattatatgttgatattagtttagttgataaatatcagaatgctttagttggaagtcttaggttctattttctttggtgaaaactcatgaacacctaattttgtttggcttccttatgttctccttgtttccttttatttcaaaaaaaa

SEQ ID NO: 23104 - DNA, 495 bp, Glycine max
  Clone ID: PAT_MRT3847_120865C.1
cagcttttgccttcagaccttctaatccctctattaagacaacctcttcactcggtttctacatggaacagtctcctcctttaaagctaaaacagtgtgaccaaccccatcttgcttgtcaagcaacaacacaggatgatgcagtttctctaaggaatgatgagtcacctgttcatggactaactgaagtggttgttggggttctgggaggagggcaacttggtcgaatgatatgtcaagctgcttctcagatggccattaaagtcatggttttggatccacaggagaattgccctgctagttccctttcttatgatcatatggttggaagctttgatgacagcactacagtggaggaatttgccaagagatgtggagtattgactgttgaaattgaacatgtcgatgttgatacattggaaaaacttgagaaacaaggagttgactgtcagcccaaagcctctacagtaagaattattcaggataagtatcagc

SEQ ID NO: 23105 - DNA, 329 bp, Glycine max
  Clone ID: PAT_MRT3847_120866C.1
ggctcgagctaagatgtagcatccatcttagatggttttgtcgcacaacaagaaagggttatttgcactatcgcgcggtcactccacgcgaagagatcatgtacatggcgaagctcgtggtcccggcccagcgctacgaggagatggtggggtacaaggaaataggactccgccttaaactagagcgaggaactgaccgtggaggagcgcaacctcctcttcgtggactcaggaacgtaatctgggctcgtcgtgccttctggcgcatcatcacctccactgtccagaagggggagagccgtggggacgaggaacctcttctgcaactt

SEQ ID NO: 23106 - DNA, 481 bp, Glycine max
  Clone ID: PAT_MRT3847_120867C.1
ttcccgtcatcactgtatgacgtcctccttctttgggggggggggggggacacacaacacaataaggcacttcgcaggtagagaagggaattggagaaagaagaagaataagaagaacaggcatgtgatgggtttggggtattaggagtaattagtgggtatggcttagagaataacaccagttgaaatacaagtataaagaagttgatagtcacctgcgcagccgaaactagatgcaaatgcgaagttttaacctgaagataagagaatagggagtgattagtggtatacagatatagtatgggaaatatgcgtagtaggccgaaaagtaagttcggcggcgtacgttgaacaagacgtggggggtatagggaggtagatattgcttatagaagtaggtagtaatcgtacgtaccgtgttatggaaaaacgctaacaagacgtaggataaacgttgcgcggcctctgaggagaccccaat

SEQ ID NO: 23107 - DNA, 452 bp, Glycine max
  Clone ID: PAT_MRT3847_120868C.1
ggatctggcaacaatcaatcaaatcatattgcagaaactagagacagagattcattttctagggcccgcaacaatgatgctgaattagacaaccaacctaagagaagtgatagaaaagagatgacaaagcggtggcatgatgatgatgatgataaatttgagggaagagaaaataacagtagaagagaagaaaagagatcaagaaggcatgaagatgatgacaaatttgaggggagagaaaataacagtaaaagagaactgaatagatcaagaaggcatgaagatgatgacaaatttgatgggagagaaaataacagtagaagagaagaaaagagatcaagaaggcatgaagatgatgaatttgaacataagtttagagaatatcgatacaagagagaagaaaaaggatcaagaagggatgattatgatggtatgaagcttgagccaaaaga

SEQ ID NO: 23108 - DNA, 232 bp, Glycine max
  Clone ID: PAT_MRT3847_120869C.1
atgttatagtattctacacaccggggggacaacaaacacaatacaacaacaacacagacaagaggtggacgactagaatccaaatacatgaaacacaagagaaacttgtacatacacaggtttctctaacaccacaataatcatcaaaggtacaatgcagctcaaactccccagatcccaaagtgattgaggagagtgaaggaaagctggtacaagtgttcggacgcgtggg

SEQ ID NO: 23109 - DNA, 249 bp, Glycine max
  Clone ID: PAT_MRT3847_12086C.1
gcgacagggggcgcatgtcagtacattgctcgagaatactaggcgcagtgtgatgaaaacgaaagttcttgttaattccacagattcgctttcggcagcatggaagggccaagccaacaatatgtgccttctgaacatgaacaccaactgttgggcaatgcttcaaaaagtgaaaaactcactttgtagacacactccaaagaagcacctgataaggagcttgctgactaccgatctaaactagaggct

SEQ ID NO: 23110 - DNA, 208 bp, Glycine max
  Clone ID: PAT_MRT3847_120870C.1
ggccaagcgaggggactccgcactacaagcaggagcttctttcatgcgatccacctagattttgcaattcaagtcttgttaggccatatcctaagcttgtggttcgtaacctgccggagttaataacggaactgctgcctttaagctgaaattacggacttggctcactagtgagctgatactacccaaattgcaagctatgcccttg

SEQ ID NO: 23111 - DNA, 253 bp, Glycine max
  unsure (1)..(253): unsure at all n locations
  Clone ID: PAT_MRT3847_120871C.1
gggcgtcaaaggttttggcgaaggaggcatcgcttccatcattgcaggatgcgccacacacccacttgatctcatcaagggccgcatgccgcttcagggcgaaaacaatttgcccaaaccggctcaaaatctccgacccgnactcgccttccaaaccgggtcgcccgcccacgcggcagcggcttttccgcacccccgcgggggtcccatcgcgggngcggcccgccccggccagcagcacgcctcgcggccc

SEQ ID NO: 23112 - DNA, 416 bp, Glycine max
  Clone ID: PAT_MRT3847_120872C.1
tgctttgatgcaatgggagtgtttgagaactccacactctctctgtggtgtcatagcaatcagcactgcttgcaattggccaaagaacatatgggaagtgtgagggagacagcttcgttcttgttgggtttaatcagtgtcattgtttgggttgttgctgagatacctcaaatactcacaaactatagaacaaagtctgctgagggtctctctgtcactttcttgatcacatggataattggagatctattcaacctctctggatgcctgctgggaacctgcaactcttcctactcaattatacatggcaatgctctataccattataacaattgcacttggtgcacaaaccattactatggacacatatatcctcaactaaaatacaagaggcagctcaagattgagacattcac

SEQ ID NO: 23113 - DNA, 811 bp, Glycine max
  Clone ID: PAT_MRT3847_120873C.1
ggctcgagtggtagtttggtacacaacttcacatgttcttacagtttgcgtccgcaaaccaaaaaggctagctagggtttgagatcagatcagggtgtaagaaaaatcacgcgtccgcaatcacttattaacctagaaattgttatccgtttgtttccgatgcaagaaatgttacacagcaacacattcatcattcacctcctttcgtgacaaatcgctcttaccgattaacaaaatctcgtgtaccagagtcaccaccgacatgggttcgggttcggtccactggaacgtattcgacggcgtgaagataatcacggcgacgccggaggcgctcatggcggagatcgactccgcgatctcgaatctggaatactcacgtgccaccgctctcctggaggccgacgagggatacgacgcgcacatggccgacgaagcctacaaggcgggctgcgccgccctggcccgcggcaagctcgacgaggctctccgatctctgaacctctctctctcgaagtgcccccccgataagaccgccgctctctctaaactcaactcgctcatcaccctcacttctcaccaccttcttcaagtctcttccacatgacaccgcgtgcctactgtcgccgcgctctcgcgttccttcttcaagtgtaaaaattctatcaagttgataatgtttttctatgccaccgttgttctgtgtctccatctgtcccggttctgtgcaggcttctgttcattctccttgtttcagcctaaaaaaaaagaagaaaaaaaacaaaaaaaaaaaaaaaaaaaaaagaaaaaaaag

SEQ ID NO: 23114 - DNA, 382 bp, Glycine max
  unsure (1)..(382): unsure at all n locations
  Clone ID: PAT_MRT3847_120874C.1
cttgnnttttttnnnnacgactatcaaaatttataacaaagcaccacagaaaccggggacaaccggggaacacaaaaaaccccaaagcccccccaaacacaaccagacagcaaaacgcaacccaaacacagaaacccacaggcaaaaaacccaaaaacacaacaaagcgcacgccaacaaccgaacaaacaacccacagcacgggacaaaaaccaccaaaaagccgacaacaaagaaaaagaaaagacccaaaacaaccccgcggccaaacaccaccagcacagagaggacaacgaacactcgaagggcaagccccggcgaaaagcccagacacaccacagcaggagcggcaaccgacgccggcaccaacaaacccaccacc

SEQ ID NO: 23115 - DNA, 582 bp, Glycine max
  Clone ID: PAT_MRT3847_120875C.1
tggtaaggaagttggtcgtggttgttctcgaacgtcaattggggatgcgaggtacaaagggtggctcgaaaagagtatcgattctgaaacgatggagaaaaaaggggttgtaacggttacgcgccttttcggaccgaacgcaccgttttattggtttgtcttttgaaccgtcaaaagttgtgtcccattgtttccttcctccaatataacgttgacaacttcaatttacagtgaaacgcgctctttcctttctacaggcttgatcattgcagaacttggccataaaattctgataaatttctcaaatggatcacgggaatcatcttcttgtttttactttgctctctttcttattaagaggtgagtcatggggttggttttcatcatctaaggagactccctctagtggcaagactcatgccgccaatgaaggcaattttagtgctgagttctctatcgagtccttcaacgaccataagggagtgaagttgatcgaaaatgctaagaagagaatgattagcttaaactcatgtgggaaaatgcttaccaacatctttttgctggatgttctgaaatcttggc

SEQ ID NO: 23116 - DNA, 231 bp, Glycine max
  Clone ID: PAT_MRT3847_120876C.1
tttttgatgaactaacatagctactattaattaaataaatactacagttaccacatttataaacaacgccagaatcaattaccaatttttttgcatccctatcaatattcattggagacttaataactatatgattgaccaaagaatataaagatttttacaaggatgcttattatttaatatccaatttatcatatacaccaagggttgaatcatgttctgctgtcaagc

SEQ ID NO: 23117 - DNA, 289 bp, Glycine max
  Clone ID: PAT_MRT3847_120877C.1
cacatctccaacaacttcatgaccctctccaacatcatacgcacccctcattcttggcatctggggcggcaatggaccagggaaaggtttatactgtgatcctgtcttcagccaatatacttatgaagcctatcatgaagactgcattgacagcaagaaagtggtaatgcacgtaaggccgcgtaactgaatatgtaacaaaaccgcgaagctgggtacgtgaacataaaagctgagagtgtgcactatattcatcaaccagctacaagcaagagctgatgaccctgct

SEQ ID NO: 23118 - DNA, 862 bp, Glycine max
  unsure (1)..(862): unsure at all n locations
  Clone ID: PAT_MRT3847_120878C.1
cacgcgtccgactatctctagatattgacactataactaagctgagattcacgaagactactcctaactatacggcaccagaccaagtgtatcgatccttaaggaatatgggacctgatagctctaagaacttgaggttcaacctcacatggcagcttcccattgattctggcttcacctacttgctaaggttacacttttgcgagcttgacccgggggttaacaagcctggtgacctgagcttctacatcttcgttatgatcagttggttgaagatggncagatgttctcggttggagcgatgaacagaaggggtcccagtggttagacagtatgcagttttcattcaagggaatcagcatcaaagggcatatctttcactcaaaatgcatcctaaccctacaagcttggccaaggacgcaaaactaaatggaattgaacttttcaaaatcaacgactcaacaggtaatctcgccggaccaaacccagaccctcttcgtgcacaaacccccgaggttccccatcatagctcagagaagaaaagcaacggcaccacgagaaccctatttgccgccatcgcaggtgcagtttccggagttgttttgctctcccttattgtcgttttcttcctcgtcaaacgcaagaagaacgtcgccgttgacgacaaaaaagaaggaacttctcgcggaagtggctcatcatcgctaccaaccaacctctgccgttatttctcaattgcagaagtaagagctgccaccaacaacttcgacaaactcttcatggttggagcgggaggcttcggcaacgtgtacaaaggctacatcgacgacggtgcaacatgtgtcgcaatcaaaaggctcaa

SEQ ID NO: 23119 - DNA, 617 bp, Glycine max
  unsure (1)..(617): unsure at all n locations
  Clone ID: PAT_MRT3847_120879C.1
ggtgccaaaatatcatttaagaaaatgtntaatataactcttttaacattgattttaaaaatatccaaactaggattttattagattttttttatattttatgtcctttttcatgtctcctgtatttaataagatgttcacaattgaaatgagtgttagaatatattttatgaaaatgatatcataaatccttaacatttgactagtaccacatgtatttagaatacatgttagccaagcattgagttgcatgtgtgtccatctgaatgaatatgaattgtataaatgtggtttgaatgaatgctatgtatccaagtgtgtgtttctacttgaccttcattttcatactcgttaacacatagtgaaatgtatctcactctcttttctttgttgtgctttacgtttgtgttaaatgaaactttgcaggtgaggttaagctagatcatggaaataatgcaagaggagaggcatagggttcgttatgagtatttttactttatgttttgttttatcggttataagttctgataaaaatttaaaaacccaatttatataaaaatatatatgaaatcatcttgacaaacttattgatgacantagcagttaataaattatta

SEQ ID NO: 23120 - DNA, 481 bp, Glycine max
  Clone ID: PAT_MRT3847_12087C.1
acggggggggaaaaccaaggggagccttcctgggagagaatcaccggtttaaggggtggaccatttttttggttgaaaagaaggaaaaatttttagggccccccaacctgatttgggggaacctttcgtgggggctttttaagaccagggtgggacctttatgaagaccctttactttgggagccagtctttttaaaaattgatggcgcgcaaaaaagcaaaactgcccccaataacactgcttttttgtgcagagataagttcctgagccacctgggcttgttctcataaactcatcatgggacttttcctttggacttttctttgggcccccgataggagcaaaagctggtgggaacagaggtgggtcttaagccttctcaggtgtgccctacttgcttttctttttttgccacttttctccccacttacttgggcaataatgccattaaggtgatccaacggggaccagaaatggggg

SEQ ID NO: 23121 - DNA, 207 bp, Glycine max
  Clone ID: PAT_MRT3847_120880C.1
gactgcaaccgagtaattggaaacaccatgaacttaaagctttcgggatatgtgatcaatgtaaatgtgtgtaagatctaacgggttgtgctcaactaaagatgatcctgcaagagtgtacttactgccagttatatgaaccatctgtagatgaaaggtatccctgtttgatgcacattcacatgtgaagttgtgactatgacaaat

SEQ ID NO: 23122 - DNA, 840 bp, Glycine max
  Clone ID: PAT_MRT3847_120881C.1
cgcatgccgcgtactaactggaatcggtcgaaaatcagaaaagctattgttgatttccatggtgaaatggttctcttagtcaactacagcaacatcaattacacagggttggcaaaaattctgaagaaatacgacaagaggacaggggggcttctgcgtttgccgttcatccagaaagtgttggagcagccctttttcacaacagatttgatttcaaagctcgtgaaggagtgcgagagcataattgatgcagtgttcccggccgaggaagaagctgaaagagcaaaggaagcaaaagaggcgataactgtggcaggaaaagggattttcagaaacacggttgcagctttgcttacactgcaagaaatcagaaaaggtagctccacagagagccctttttctctgcctccactcaatttgccggactctgatctcatccaatcaatacagctcaatgcttgcagttcctattgtctagggaaaatgatgatgtaactagatgaaaaatagttaccacagtatggtcggaaaatagatagttatagtagtgtgtttggatttctgttccaacacctcaaacgcccgttcatttcaatccatgcatagagaagcttttctgtttgggtacattgcaacgtgtgcggatagttattcaaacacatccacagtgttacaatgggatgtaatagtaatacagtttgccagtaattagtgagttaaccaaactatatatccttttgatgaagtaacacatcagttacttgaaatgagtaactagccatttcaatgcacgaaaaaaaaaaaaaaaacgaaaaaaaaaaaagcggccgctctagagga

SEQ ID NO: 23123 - DNA, 188 bp, Glycine max
  Clone ID: PAT_MRT3847_120882C.1
ggctcgagataaaatcctcttaacaagttgttgctgctgcgttgagcatcagtttacagctatcgaagatggctcctcccagaggtcgtggtggtggaagtggtggtggccatggtggctatgttccctaagaactactcttcaatgcacaatagatgtgcaagtgtcccctttcgcgtatcaagaat

SEQ ID NO: 23124 - DNA, 1045 bp, Glycine max
  Clone ID: PAT_MRT3847_120883C.1
ggctcgagcagttcaagaatagaaggagcatgtccatcaccaccttccttctcctcctcctcctctcgccggcgatcaccgccaccccgacggcgtacgagatgctggagagctttcactttccggcgggtattctccccaagggagtgaccggttacgagctggatccgtccagcggcaaattcagcgccgatctgaacggttcgtgcagtttctccctcgaaggttcgtaccagttgagctaccagaaaaccatcaccggctacgtatccgaaggcaggctcaccgaactccgcgggattagcgtgaagatcctcttcttctggctcaacattctcgacgtcgttcgcgtcggcgaagacctcgatttctccgtcggcgtcgcctccgcttcctttcccctcgataacttcttcgtctccccgcagtgtggttgcggcttggattgcgatgattttcgaattaggaaactcgatttgggaaaccgaaaaccctccctttcctctgtgtagaaatcaagttcaattaaactctcctttatttaattatgattattatctgtggacgcttgtgctctatgatatctcttgttagatgttgattttattagtactaatatatattattatcgtatgacatattatatttattgttgccgcctgaaagcagcacgattgattttcgattttcctcatgatggaagaaaatagtaatttataggtattagataatttataagaacttgtgtaagtgcattattccgatcctggactcaccagacaaaataaataaatgcgatagggcgatattggtgcttagtttctcgttctctctggtccatttggttcaaattagtgcaaaagatggtttgggattagccagaatagaaatggctaaatggggcacttgttactgtcattgatcagtattaggctattattagcttcatagagtgccaatattctctcttgccttttggttatctggaaagtcatttaagatgtcttgtcaattgtcatgaataattggaatattaatgcaatta

SEQ ID NO: 23125 - DNA, 425 bp, Glycine max
  Clone ID: PAT_MRT3847_120884C.1
taaacccggaactcgggtcgaggagagaagcgatgaaacccatgtttcacggctctgttttgacagcagattatcacactctatgtaattcttaaagattgggagggacggaaaatttatacttagcccagattacatgaccttatatgaatgagagctgtactatatccaaatacatgcttctgtcaatgaagctcttctgagtatttagaacgcgagcactctaaacatactgaatgaaactccatgagacatgagggtttggtttctgtctcaatgactagattcttactcatgctcaagatcaatcagatgtttcgaaaaaattgctattttatagaatccattgtagagggttgttgataccatgaaccaaccacttcttgttcaattattttattatctattaaatttacattggacat

SEQ ID NO: 23126 - DNA, 433 bp, Glycine max
  Clone ID: PAT_MRT3847_120885C.1
accagaaaatgtaattttgttagatcttcctgttcctcctcccattcttcttcctccttttttctttttcttttcctcctaaatctgtctctctctgtctctatatatacacacacacgacaccaacacccacattagattcttttgatgactgttattgttcgtgaacgacaaagatggtaaaggatgatgagtgggtgtggggggcgatgacaaacgacaccgttgtggtggagattctgctaaaagcaaaccatacatttcacacaaatcttagtagcttataccttaatttctcgtttctggggtcaaacacgtcgcgctcaagatcaagactaactatctccttctcttgctatgacgccgcattttccactagatgcagcccaaccattcccctcttttggagcgctgatgatagttacgaagactg

SEQ ID NO: 23127 - DNA, 384 bp, Glycine max
  unsure (1)..(384): unsure at all n locations
  Clone ID: PAT_MRT3847_120886C.1
ggctcgagaataactcgaaattgtaggcgccgttgtcttcttcactggaaccaatcagatactagcgaggggtaggaaaccaatggtaccaccctgaccttctgagtgcggcgctccctcagtgaatgcctcaccaancatgaccctccaatgccgctcaggtgttcgaaaaagatgcgcaagaggaccgcgaagtacacactgtacaggatgaggtcgccgaggcaccatagacaactgcggaccatgctggcgctgctcacgaatatgaagaccgccttgaccaatggcagctccaccggcaactgcatgaccaagactgcgacgcgttttacaagttattggaacacgttagctttgaccatgtactcatacttctctgag

SEQ ID NO: 23128 - DNA, 672 bp, Glycine max
  Clone ID: PAT_MRT3847_120887C.1
ggctcgagaattcatcacttgttatattttgtccttggatcttgcagctacacatgggggctaggaaatatgggccagcttgggcattcttcactccagtacggggataaagagttactgccaaggagggtggttacccttgatggtattttcataaaggacgtggcatgtggcggtgtacacacatgttctgtaactcagggaggagcactttatgcctggggtggtggtcggtctgggcagctagggcttggcccccaaactggattattctcgtgtggtttaaatgactctcagacatttttccgaaacatattagttttaaaaattccagttttagttgttcctaaaggtgtgcggtattctgccaccgggctctctatgactcttatctctatgagtgattgtcgaattcatggatggggttacaataattatggtcaggcagcatatgcgagatgtccatatccttttgactcatgtgtagttgactggtgtgttctagctgctggtggtggtcattcagctgtgttgacttatgcttattcattaaagcgcttgtgcgtgtctgtgcgtgcggctggcgcccctgtgtctagtgctgctctgcgtgccctcactgcttgtcgtactgcatcagggccgttgccccgcctttgtggaagacttaaa

SEQ ID NO: 23129 - DNA, 289 bp, Glycine max
  Clone ID: PAT_MRT3847_120888C.1
ctattctttctgtgaatgagcgaaagatggctttaacgcaggaccccaaaaaccgagagacaaacatgcttgacatagatcttgggatatgcaatcaccggatatatatccaaatgaacaagccgattatttggctaacttaccaaaaaaagcagttttgagcaatacagaatcgagaaacacggagatccgcatatcacaaaaaacaatatcaacgtaacgtaagcaaacactgaaacggaatcttggatttaaaccatgatacgctcatcaacaaaaaacaagaagg

SEQ ID NO: 23130 - DNA, 267 bp, Glycine max
  unsure (1)..(267): unsure at all n locations
  Clone ID: PAT_MRT3847_120889C.1
ggggggctaaagctttaaaatcttttttattaaaacaacccaaaaaaagcctaacccaaggccctggggaccttagttcccaaaccctggttcgggggggggggattccaaagctggaattccctcccaaaaccaacccataccggattggcagggnacaaagccgacccacccgctgcgcccattgggagttccttggatctaaggggaatttgccatagccctttctacatcaacgtgcgccccggagcccccgggggggggggg

SEQ ID NO: 23131 - DNA, 454 bp, Glycine max
  Clone ID: PAT_MRT3847_12088C.1
agtaagtgagtggtaaaaaggggatgtaaaattactttgtgaaaatagaccagcctctccactctccagcaataacaaaataaagggaaaaaaaaaaaccaatcacacagttggagcatgaaccagctctatgtcctgttcaaattttatcatgttaaataaaaaatttaccaggctaaatcaatcaaaccatgatccagaggcatcaccaattgaatcttggatttagttttcaaaacattgcagtaaacagggtgttgggttatgtcactttctcttattctgttttttcttataaatacaaatccttgagactagccaagctttcaaaagtcaatggacaaggcaatggctgtgatcctgaaatatttcctatcagtcaggataaatgtcagtaatagaaaaggaagcagcagaaaggtcacttatggcgggggaaagtaaaagaattgaa

SEQ ID NO: 23132 - DNA, 494 bp, Glycine max
  Clone ID: PAT_MRT3847_120890C.1
ctcattgatgctgaaaaaaagcttgaagagttgaccaacgagcaagaaactctcattgatgtattcgctgaagagagggacagacgtgatgctgaagagaaaaaattgagaaataagctcgaggaggcatcaaatactatcaaagagttgcttgaaaagatacggaagcttgaaaggaagtcttcaagcggcaaactagatcgataaaagccttgttactgcattttgagtgttatatctacgtggtgccgggagcctatattttttgctgtgctgttcattgtttgtatagttacacgatagaactctgttcccttcgttaaactttgaagtttgaactgttgttgaaatccaatcccttcgttcaccatgctgttgtaggtaagagttttttgattggaggtcggagtcttgggtgaatttttccactttttttgagacaatttgattagcgggcagaggaagttgattattatacgaagtcttattgaacc

SEQ ID NO: 23133 - DNA, 300 bp, Glycine max
  Clone ID: PAT_MRT3847_120891C.1
tagaggagcggccttggttttttttttgttttttttttggaaccccaggtttttggggaacaagggcgcctatttttttaaagccgcgaaagaaaaaacaacccacgggaagtgcttttacagggctggggggacccacaaggggaacaaggtaaagggaagctggtgcccctattggaaccgatcttattacttatagatggaagggagccagcctcactaggggggaggggaagggactcctgagggcaggacagggtcttagagaactgaaggggcccgctttcgctcgtggggccg

SEQ ID NO: 23134 - DNA, 414 bp, Glycine max
  Clone ID: PAT_MRT3847_120892C.1
ggagagattgcaaaggaaggaggaggacattttaggggaagtgttgcatgctctgcagcatgagaaagacaggtgtaaatctcttgaaactcagctcattgatgctgaaaaaaagcttgaagagttgaacaacgagcaagaaactctcattgatgtattcgctgaagagagggacagacgtgatgctgaagagaaaaaattgagaaataagctcgaggttttactcttgcctaatgcactttcaaaatcaggaggcatcaaatactatcaaagagttgcttgaaaagatacggaagcttgaaaggaagtcttcaagcggcatactagatcgataaaagccttgttactgcattttgagtgttatatctacgtggtgccgggagcctattttttttgctgtgctgttcattggtt

SEQ ID NO: 23135 - DNA, 261 bp, Glycine max
  Clone ID: PAT_MRT3847_120893C.1
cacgtttcccttttctttctgttgagaacccctgctattcttccactcaggggtcccactcgttggtaggagaataggtggtgtttccggcaacgtgcttttttggacacaaaccttcgccggaaccctgaattaagcacttaatgtgaattctgagatacaataacaataacaatgtcttctcctcataactcttctcctgatgactctagccctgataatgcaacacctgataactccacccctgatgactctgacaac

SEQ ID NO: 23136 - DNA, 789 bp, Glycine max
  Clone ID: PAT_MRT3847_120894C.1
ccacgcgtccgacaagattaaagctgtattcaaactgcaatttcaggcaactcaggtgccaaatatgaaaaagtcagtactgatggtagctttggtgccggataatgttgggaagccgacggtgaaattagagaaagttgctgtccaggatggaacctgtttatgggagaatccaatctttgaatcagttaaactcgttaaggacacaaaatctggaaaacttcaggagaaaatctaccattttgttgtctcaactggatcttcaaaatctggctttcttggagaatcctcgattgactttgcggattttgctgcagaaactgagccactgactgtttccctacctctgaagtttgcaaattcaggcgcaatcctacatgtgacaattcagaatgtggaaggggtacatagagatcaaagcagtttcagaaatggggaagataattggaatggaagctcaagacacctactgagcatttgcagtacagatgaaggttctcataatgctgataaagattttccccagctattaccacccttgagacaaaattcaatgccatcaagaggaactattgaaaccattgcaacaagagctcaaatgcatcatatggggccaacgggttcagcatcagataggagtttaggtgactactggagaaaaagcctggaagatactcttcctcgagaaagattacaagagccttcagataatgtcactgagaacctcaaaagtgaagttgcttctcttaagaggaaagtggaagaatcagaacatgagttacaatcgct

SEQ ID NO: 23137 - DNA, 1973 bp, Glycine max
  Clone ID: PAT_MRT3847_120895C.1
ggctcgaggtacaattgtggggtcacattctcaaggacgcgctttgcatgctgtgcacattttggtgaaggaagttagatctgtgggagaatgtcgtcgtcggaggcgcagggagcggcgcagaggcgatatttgacagtggggtggtgccgtcgtctctcgtcgagattgcacccattcttcgcgttgctaatgaggttgagaagactcatcctagagttgcttatctctgccggtgttatgcgttcgagaaagctcatagactggatcctacttcaagtggtcgtgatgttcggcaattcaaaactgcccttcttcaacgtttggaaagagaaaacgatccaacattgaaaggaagagtaaagaaaagtgatgctcatgagatgcagagtttttatcagcattactacaaaaaatatatccaagctttacaaaatgctgctgataaagctgatcgtgcgcagcttaccaaggcatatcagacagccaatgttctttttgaggtttttgaaggctgttaacatgacgcaatctatggaagtggatcgtgagattttggagactcaagataaagttgctgagaaaacagagatcttagttccttacaatattcttcctctttatcctgatagtgcaaatcaggcaataatgagatttcctgagatccaagctgctgtatatgctcttcataacacaaggggtctagcctggcctaaggactacaagaaaaaaaaagatgaagacattctggattggcttggggtattgtttggatttcagaagcacaatgtatcaaatcagagagagcatttgatcttattgcttgcaaatgtgcacataagacaatttcccaagcctgatcaacagccaaaggggcggggggaggaaggaatttaacacttgattatttctatcctattggacgagcgtgcacttacagaagtgatgaagaaactttttaagaattacaaaaagtggtgcaagtatttaggtcggaatagtagcctttggttgccaaccatacagcaagaagtgcagcagcgtaaattactctatatgggtctgtatcttctaatatggggtgaagctgccaacctaagattcattccagaatgcctttgctatatctatcaccatatgcctttgagttgtacggtatgcttgctggcaatgttagtccaatgacaggagagaatgtcaagccagcctatggaggtgaagatgaggctttcttaaggaagctgcacggagcaaaaagggtaggtcaaagcattcacaatggaggaactatgatgatttaaatgaatatttctggtcagctgattgttttcagcttggctggccgatgcgtgctgatgctgatttcttttgcctgccagttgagcagctaaattttgacaaatctaacggcacctaaattagtggtggacaaattggtgagactgcagcgaaggtttctttggggagcagggcttgaccaaaataagatcgcatggattaggtgggacacggtgacatcacctaaagaaaatggaggtctggacattaaggatatcaccaatttcaacatagcattgcttggtaaatggaggtggggtctgatgcaaaacaaaggagaactttgggctagagtggtgcagtctaagtatggcggatggcagggcatgttggcagcagatagaccaggtttagaatcagtttggtggagagacttgaagaagaccctcgttcactcccctcagggtcagattattaatagtggtatgcagtggaaggtgggctgtggggatcaaactaaattttgggaggacaagtgggtatgtggggaaatgtctctggcagaaaaattccccaagttgtattcaatttccttacagcagcagaatttcatccaacagatgggaagcctcaaagacaatgggtgggaatggaattttacttggagaaggctatgtttttgatatgaaattgat

SEQ ID NO: 23138 - DNA, 524 bp, Glycine max
  Clone ID: PAT_MRT3847_120896C.1
cgtcgcatgcacgcgtacgtaagctcggaattcggctcgagcggacgctcaagatgtcgaagcgaggacgtggtgggtcctccggagcgaaattccggatttccctgggtcttccggtaggagctgtgatcaactgtgctgacaacacaggagccaaaaacctgtatatcatctctgtgaagggaatcaagggacggctgaacagacttcctgctgctggtgtgggcgacatggtgatggccacagttaagaaaggcaaaccagaactaaggaaaaaggtacatcctgcagtggtgattcgacaacgaaagtcatatcgaagaaaagacggggtgttcctttattttgaagataatgcaggggtcatagtaaacaataaaggcgagatgaaaggttctgctatcacaggtccagttgcaaaggagtgtgcagacttgtggcccaggattgcatccaatgcaggaagcattgcctgattctccagtgtgtttgtaaaatatattcattaaagtcttctctctgag

SEQ ID NO: 23139 - DNA, 957 bp, Glycine max
  Clone ID: PAT_MRT3847_120897C.1
ttaggcattgcatggaatggtgctgaaagttcagaaatcttttgtctatcccagactatcttctcatctccaattttaaagataacatattctgaagcatcgttcccattcatcgaagctctatcttgggaactcacattctcatcaaaaggaatatgagattctacatctatgggtccaaattccttttcacatttaccacaagctgtgagcaactgagcaactaattcttctccttgcttctcatacttcagccatgccccaaatataattttctcatgaacagtgtttgctctctgccaagctgaccggaggcttctacgcatcagtttgacatcccccaggcccttaaagacctggtattgtaacaaaaacagatttgattgttcctgtggaggacaagattcaagttcttcatggatttgagctaagacttccacataatcaacaggtttgaagaatgggagtatcggtgactgtgggaccttgattagggattctattgatgcagaagaggactgtgatgacaatctgggaagcttccctctttcaacttggagccaggactgtggattcaaagcactatggtgtgcttctttacacgattctgcggtgaagaaagtcctcatagggcataagaggcaaaacaagtcccagatctccactataataccactgtatgcttcctcttcaaaatcaaacctttacaaattgaagccaaagaaaaggagcagacctgtggcttcaatctgcagaaccaaatgaaaggttcggagcatgagatgaagggcatagagatcaaatcaaagtgagggggaatctaactgaaaattttcgactttaactaacttttactttttcctttggttggtgaaagggaaagtgaattacttttcccttctttccgttgtagttggagaccatagaagttgcagctactgttggttggaagttgaa

SEQ ID NO: 23140 - DNA, 401 bp, Glycine max
  Clone ID: PAT_MRT3847_120898C.1
aattcggctcgaggaaggttcatatgagtggctgaaaccatgaatgcatttaagatcagatacagataccgtgtgaattagagtctctcggccttattcttatcatgaaagattgttatgctcttatcagtttcaaataggtaaaaagtgtacctcacaggtttccaaataagctttttttgtcaagttcatgtgcgaataagttgacaggacaattgctagttgctacagcctacagcttatagatgagctagtacggtaggcggtggagctgctggtttcagcttgatttttcgaataccctcatctggtagtaatgccatgggggctacaatccgtagcagctcaaaattcttgcattcaaagggatttttgttaactctttctgaagtacagtacta

SEQ ID NO: 23141 - DNA, 362 bp, Glycine max
  Clone ID: PAT_MRT3847_120899C.1
agagggggggaaacgaaaaaatatgaagtattagtttatcctttgacacttgaatttgattttggcttcaaacatctaattttattggacacagaatatgggggggtttttttaggggggataaaaaccatggaaatccctggaccttttttgcaatgcccgcaaaggcctttccttgagggaaagcttgagccatttctaattaactaggctgcctggagccatttccagatataagttccggccccttatggggggcaacctttaacctttttgaattaaaacttgccaccgccaaatgggtatccatgggggacaaaaataaccccgggggaacaagctgagtaaaagatgtcaacggg

SEQ ID NO: 23142 - DNA, 133 bp, Glycine max
  Clone ID: PAT_MRT3847_12089C.1
catttggatagcagacctggtgaacgaggttacaagatttgaaacccacatacatatactaacccacttctgtgaatactggtacaaaaaaagtgaactgtaaatccaatccaaatctgaatgggtcatgaac

SEQ ID NO: 23143 - DNA, 1843 bp, Glycine max
  Clone ID: PAT_MRT3847_1208C.1
gaaaccgcatccctttctcctaccttcgtcctctatcccctgacttaactttgctaccaaacaggtttttcttggccttttcttttcttcatcctgcatgttttgccttcttcccaattcaggaatatcctttctcctaccttcttcctctatcccctgacttaactttgctaccaaacaggcaacaaggctcaaggaactagtattgtttctatcatgggagtttgtttgagcacccaaattaaagctgggttaaattcaaagcatgttagtgccgatgcaaaagatcacagcagtccaattagcaataaaattacaaaagatgtcagcacaccaatcagtaaagtctcagaggtatcagtgcctcagactcctcggattgagggtgagatcttgcagtcatccaatctgaagaactttagtttgacagaactcacagctgccacaagaaatttccgtaaagacagtgttttaggaggagaaggtgattttggatcagttttcaagggctggattgataatcaatcactggctgctgccaaacctggcactggcgttgttgttgcagtgaaaagacttagtctggatagcttccaaggtcagaaggattggttggatgaagtaaactatctaggccagctttctcatcctcatctagtgaaattaattgggtattgctttgaagatgaagaccgacttctggtctatgaatttatgcctcgtggtagcttggagtatcacttgttcatgagaggctcgtattttcaacctctttcttggggtctccgtttgaaagttgctcttggcgctgccaaagggcttgcatttcttcacagtgctgaaacaaaagtgatataccgagatttcaagacctcaaatgtcttgctggattcaaattataatgcaaagcttgctgatttggggctggcaaaggacagaccaacacgtgagaaaagtcatgtctccaccagggtaatgggaacctatggatatgcagctcctgaatatcaaaccacaggaaatctgagtgccaagagtgatgtcttcagttttggagtagtcctgctggaaatgttatctggcaggagggctgtggacaagaatagaccatcaggacaacacaatttggtggaatgggccaaaccatacttagccaacaaacacaaacttttgcgtgtgttggataatcgccttgaaggccaatatgcattagatgaggcatgtaaggtggctaccctctctctgcgatgccttgcaacagaatccaagttgagaccaaccatggacgaggttgtcacggatttggagcagctgcaggttccccatgtgaatcaaaatcgttctgtgaatgcctctcgcggtcgtagaaaaagtgctgatgattttactcatggtagaatcgccacagcttctgtttccccgctctcacatgacattgcaaatacacgtccttgaaagctgatgcatgtttccacatgaactcaaacacgttcatatcatgcacacatgctatctaataggttttacgtatgtatatatttcaggttctgtttgtaatatgtagtcaaaatagctggaactactgcaggtactgtcttatttggctctggttagctcaattttgttgttttttatattggtataaagttttccaactttattttgttacacttgcaatgtgcagttttcacatatatagaacttgaagcaaaacttatagttaagtttcctactttattttgttacacttgcaatgtgcagctttcacatagaaattgtagcaaaactagatcctcttgaccctcagtgtgaaccttacttccttgtcaagattttttgctta

SEQ ID NO: 23144 - DNA, 617 bp, Glycine max
  Clone ID: PAT_MRT3847_120900C.1
aagatagaagagtgtagtagcaagcgaggcaatcgtggaggaggatgaacaagacgatggaagagaacgagaaagcgtttaatgttaatggaagggaagtgatacctctcctcgccccattcaaaatgggaaaattcaatctatctcacaggattgttctggcaccgttaacaagaacgaggtcatacaacttcatggctcagcctcatgctgctttgtattattctcaaagaacaacaaagggtggatttttgattggggaagcctcgggggtgtcagacactgcacaagggtacccaaatacaccaggaatttggacaagagaacaagtggaagcatggaaaccaattgtgagagccgttcatgaaaatgggggcatattcttttgccaactctggcacgccggaagagtctccaactatgtataccagccaaatggggagcccccaatttcaagcacgaacaaggcggttcaaggtagcagcacccaatacccacctccacgtcgtctaagaaccgatgaaatccctgagattgtcaatgacttcagaatggcagtcaaaaatgccatagaagcatgttttgacggcgtagatatacatggagctaatggatac

SEQ ID NO: 23145 - DNA, 274 bp, Glycine max
  Clone ID: PAT_MRT3847_120901C.1
aattgtgagcagcaagatgtgtgtgtaggagcgaccctcggctttgcgagggactgaaaagaagtacaagggtggtgggcgacctgattggagtaaggttatgacccaagtcaagagagatcttagagaacctgctagggctcacattatattttagtctgtctccaaagacatggtaactgattccttttatcaaaagtgagaccaggagttcaagctacaagtcttttacttagacttggatgttagtgatagatatcactatacaaggcat

SEQ ID NO: 23146 - DNA, 168 bp, Glycine max
  Clone ID: PAT_MRT3847_120902C.1
atgcggcgtacgtaacgctcgaattcactcgatctctaacatcaataattttaacagatcaccatatcagaaagaaatcatacacagttggggagccaacactcatccaaatatcagcccatcttcaaacccacatcaacacccattataagccctactcgaacccaa

SEQ ID NO: 23147 - DNA, 513 bp, Glycine max
  Clone ID: PAT_MRT3847_120903C.1
ccacgcgtgcgcccacaccccccgagctgagcttagctccactccagctccaatcacagtcgtgaccagagcgcgagagctagctagagggccgtgaaaatgccgatcaataggatcgccctggggagccaccaggaggtgtaccacccgggcgccctcaaggcggcgttcgctgagttcatctccaccctcatcttcgtcttcgccggccagggctccggcatggccttcagcaagctgaccggcggcggcccgacgaccccggcgggcctgatcgcggcggcggtggcgcacgcgttcgcgctgttcgtggcggtgtcggtgggcgcgaacatctcgggcgggcacgtgaacccggccgtgaccttcggcgccttcgtgggcggcaacatcaccctgttccgggggctcctgtactgggtggcgcagctgctggggtccaccgtggcgtgcttcctgctccgcttctcgacgggcgggcaggccacgggcaccttcgggctgacgggcgtg

SEQ ID NO: 23148 - DNA, 277 bp, Glycine max
  Clone ID: PAT_MRT3847_120905C.1
ccccctccaaaaaaaagctggggttgtgggcataacaaatggaaccaactcactcatcatgaattctgattgtaagaccgcattctttttaagaaaaccctgcatgttacaagccccctctgccaacttcgccaccttgctgtacgtcatgcccatccgcacataacccacaccatatgtgggggaaaaatatggaaaattaaattcttagtgtcgctttttcacacccaccaccatatcttcttgtgaccaattactgctaactgtgcccacttct

SEQ ID NO: 23149 - DNA, 235 bp, Glycine max
  Clone ID: PAT_MRT3847_120906C.1
ctggaggggctggcgtttgcacacccggtggctcgtctctaatacgcgatctctccatatcatgcacttattacgtttgaccgccttttgttcccagtacacggacaggagagactcaatgtcgctgatcatctacttctgcttgtacgctaatacagacattgaactacaggatatacctctacgatcgttggcattggcacttcggaggaccattgactccaaaggactgtag

SEQ ID NO: 23150 - DNA, 520 bp, Glycine max
  unsure (1)..(520): unsure at all n locations
  Clone ID: PAT_MRT3847_120907C.1
cccggaccggctttaattggccggcttagtgggacaaatggtcctttctctcacaacctttttttaccccaccttctattatgggataagcggggttttttttttgggaggccccataggctgttgaccgattctcttttttgggtcggggggatccccccattgttggaagcctttttaacccttttcctttcggggggggggttggctttcctcaggaattaggaggggttgttccccccctctaaccctggcggcggacccggttgccttaccccttcaaattctggacttcggcccccccaaaaccctgggttgcttggggaatgggaggtttcnttaaggcatagccttctcctctggctggcttgggaggttctgggggggaaccccgggggggcaaaagccttttcaatcccggacctttgggccgggggacccgtccttgccggagctgggcttttttcaaaggccgtttttttaagggcttcttggcgccagggggggcccgccccgttgt

SEQ ID NO: 23151 - DNA, 283 bp, Glycine max
  Clone ID: PAT_MRT3847_120908C.1
aaaaaatctcaagccaaaagcatatatattttattggattagaaagcgcacctgtacatgaaaaacacaaaatcctagcttatgaaccccgttgtaaactttatcaccaggcgcactcttggcataggcatcattaacattatttacatgatcctttatgcatgccttaccggcacaagcacataaatgcattactccattaatgcatcacacgggactctatttgaaaagggatcttctactttgtagctgcaaggacagttgatccttccaccttggaaaa

SEQ ID NO: 23152 - DNA, 701 bp, Glycine max
  Clone ID: PAT_MRT3847_120909C.1
ttatatgaacaactcaaatatttaatatcccttccctttaccatattaacctccatgatacacatctaatggcaattctcaattttacaataaaagagatatatgtatatatatatattatactgaattcaaaaagaaaatacagagacttgaaattaataataaagaatgctataaggtaaaacagttaagtctagtgacataatggagtgaaagaatgtacaagaatcatctcctattttctcctggggaaaggaaaaataagcagaaaaaaaaaaattcatattctgttaacaaaatgtcaagggatgctgctgctgcatacttttcttcttcacatgccatctttggaaggaagatcatggtatgtttgagtaagtgttaagttcccttctcgctcgtttgactcgataagcatcaacacaacttcccgcatcgatggcctcttggtaggagacacacttgtgcacagtaaagcaagcttcaaaacagggagcatgtgattcacagtggtttggtcttcaagatctacgcggctgtcgagcatctctggtgtcaatgtgttgttgtggtcccggatatggttcctcacccatgtgacaaggtcaccaccttgctctagtggctgaactggtgttcttccagttagcaattccaatagcacaacaccaaagctataagtgtccctcgtgccgaattcc

SEQ ID NO: 23153 - DNA, 403 bp, Glycine max
  Clone ID: PAT_MRT3847_12090C.1
acggttatgactccttcttatacgactttatcttattctcatatagatatataatggggcattggtatcacctgaaagggtcttgctcataaagaaacttaaaatacagaaacgcctgcaagtgcggcaactacttataaagctgtaagatgtacccaaacttgagctacaccgagtcaaccaccacctataccttagtcatgggaatggcaccaattaaagctcaattagagagtgctgaaatgcgtgtattcgctaagaacgacggctgcaaatgtagagctaactgcacctgcaacccatgcacttgcaagtgatgtgttgaacaactaaagcttcaaacagagatggcccttataaataatgataaaaactatgtgtagtttcaaaaattcaaaattat

SEQ ID NO: 23154 - DNA, 313 bp, Glycine max
  unsure (1)..(313): unsure at all n locations
  Clone ID: PAT_MRT3847_120910C.1
ctngnagncantaagnatnngnttcgacgngannncngattggncagtaccantgaaaatcatctctggnatcattccttgcannaannttgngaagaagcttctggtaaacncttntccnntacttagagatnctggtaatgggggagtttttgttggcnatgttgnttnagcattcanaacttnaagtgtgcttgangnccanngtngacncacncnnnagatataaantatnccantacagatttcgcnntgtgcnaattcngcgcnggctgatagaagtcanatgctctgcggcngtcnntagnagaca

SEQ ID NO: 23155 - DNA, 817 bp, Glycine max
  unsure (1)..(817): unsure at all n locations
  Clone ID: PAT_MRT3847_120911C.1
cggtccggattcccgggtcgacccacgcgtccgcagattctgctgaaaccacaaaagataaaggtcagggttccttggatgagggatccctggatctggggatttgtgattcaattggtagtgtgaaaaaaaggaagctgaaggggtatcaggatgctcaaacttacagccctggtaacccttgcctgcaggagagcaaaacttctgagcatgagtttagtaattccaggaaggaaaagaaggcaaaaaattctaaatatgaaggcaaagaatcaaatgccagtaaaggaagtggtagatctgacaaaaaagttagtcatacaaagacccagaaattcaggcaaaagcctgagagcagtttgtcacaacggagcttggatggactggactgttcaaaaagggacttggggtctgtacaggcttctgttgctgccacttcaagctcttctaaggtttctggctctcataaaaccaaagccagcttccaggaagtgaaaggctcacctgtggaatcagtttcttcatcacctataagaatttcaaatgcagataagtttacaaacaaggaaattattgggaaagatgattctcatgatattgctgctgcggatagtccacgaagatgctccggtcgtgaggatgatggtgagaatgatcgatctggaacagctaggaaggataaatctttcaccatttcccataggtcagattttcaggacaagggtgttaatcacctgtcagatactaaacttaaagctcaacaactggttattgtaccgnatggtggtgntgacactatagtcccagatgggacaca

SEQ ID NO: 23156 - DNA, 285 bp, Glycine max
  Clone ID: PAT_MRT3847_120912C.1
gcactgctctcactctcttcgcttcgtcgcccttactaccgtcgccaaccgccgcaaccttaactctcttctctccaggaacagtataatctatcttttgatagttgttgcaatttcaagatttcagcatgttgttatgctctccttaatctcttagtagggacacaattaatttctttttgtaattggttggcatcatacaagatgagcaaatctaatcggtcaaaggagaagcatggaaaaagccattggctttctgagcataattgtgatgaagagagtgca

SEQ ID NO: 23157 - DNA, 850 bp, Glycine max
  unsure (1)..(850): unsure at all n locations
  Clone ID: PAT_MRT3847_120913C.1
cacgcgtccgctctctctctcactgagctcgatctctcgggcgcgtcgaattcgaaatctgatctccgacgattgatcccggtagaggctagtacactctccaatctgcaaaaatgcctctcagactcgaaatcaagcgcaagcttgcgcaaagatcagagagagtgaaatgtgtggatctacatccaacagagccatggattctggctagtttatactctggaactgtctgtatctggaactaccagtctcagaccatggcaaaatcttttgaggttaccgagttaccagttagatcggccaagtttattgcacgcaaacagtgggttgttgctggagcagatgatatgtttatccgtgtatataattacaacacaatggataaagtcaaagtatttgaagcacatactgattacattaggtgtgtggcagttcatcctacccttccttatgtgctttcatcatctgatgatatgctcataaagctttgggattgggaaaaaggctggatctgtacccagatatttgaaggtcattctcattatgtcatgcaagtaacatttaatcccaaagacacaaacacctttgcaagtgcatctcttgatcggacaataaagatttggaatcttggctctcctgaccctaattttactttggatgctcatcagaaaggagtgaattgtgttgattattttacaggtggtgacaaaccatatctaatcactggttctgatgatcacactgctaaggtatgggattatcagaccanaagttgtgtccagaccctagaaggtcacacacacaatgtatctgctgtatgctttcatcctgaacttcctataatcattac

SEQ ID NO: 23158 - DNA, 2550 bp, Glycine max
  Clone ID: PAT_MRT3847_120914C.1
ccctttcgccgtttcgcgtccgcccacgcgtccggccacgcgttcgatcatattggctcgaccaactctgcactgcaaacctcgtcacgttcctctctctctgagctcgatctatcgggctcttcgaattcggttcccgatttccgacccataaaagctagcaagttccttcacttcaatcttcagaaatgcctctcagactcgaaatcaagcgaaagcttgcccaaagatcagagagagtaaagtctgtggatctacatccaacagaaccatggattctagcaagtttgtactctggaactgtctgtatctggaactaccaatctcagaccatggccaagtcttttgaggttactgagttaccagttaggtcagccaagtttattgcacgcaaacagtgggttgttgcaggggcagatgatatgtttattcgtgtatataattacaacacaatggataaagttaaagtatttgaggcacatacagattacattaggtgtgtggcagttcatcctacccttccatatgtgttgtcatcatctgatgatatgctcataaagctttgggattgggaaaagggctggatctgtacccagatatttgagggacattctcattatgtcatgcaagtgacattcccacgcgtccgcacaaacacctttgccagtgcatctcttgatcgcaccataaagatttggaatcttggctctcctgaccccaattttacgttggatgcccatcaaaaaggagtgaattgtgttgattactttacaggtggtgacaaaccttacctgataactggttctgatgatcacactgccaaggtatgggactatcaaaccaaaagttgtgtccagactctagaaggtcacacacacaatgtatctgctgtatgctttcatcctgaactacctataatcattactggctctgaggatggcacagtgcgcatttggcattcaacaacttataggcttgagaacacattgaactatggtcttgaaagagtttgggctattggatatctgaagggttcacgccgggttgtgataggctatgatgaaggtactattatggtcaaacttggccgagaagaacctgtagccagcatggataacagtgggaaaataatttgggctaagcataatgaaattcaaactgtcaatataagaagtgtacgagcagatgtggagattgctgatggagaaaggctaccattggctgttaaggagttgggcacctgtgatctctatccacaaagtttaaggcacaatccgaatgggaggtttgttgttgtttgtggagatggggagtatattatatacactgggttggcatggagaaatagatcatttggttcagcactggaatttgtttggtcttcagatggggagtatgctgtaagagaaagtacatcgaaggtcaaaattttcagcaaaaatttccaggaaaagaagagtatccgaccaactttttcagctgaacgaatatttggtggcactgtattggcaatgtgctcaaatgatttcatctgcttttatgattgggctgaatgcaggttgattcgtcgtattgatgttaatgttaaaaacctctactgggctgatagtggtgatctagtgacgattgctagtgatacatcattctatatcctgaagtacaatcatgatgttgttgcatcatatttagatagtggagggcctgtagatgagcaaggtgttgaagatgcctttgagctccttcatgaaatgaatgaacgtgtcaggacagggatctgggttggggattgttttatctacagcaattcttcttggaggcttaactattatgttggtggtgagggtactacaagaaatcatttggaccgtgatatcgacttattgcaatagctttgcagccaacgtacctctttacagagtttgcagatgccagcattaagaaggtgtcctactactccatacttcagcaaattattgttgagggattggcgagctatctcttcataaatgtcaatcaacttctgatattgttctagctgagcagcaaactgggcaactttttgtttgcattggttcgcagaagttgtcacttcttcattttgaaaaaaatcagctgatttttcatagtaaacaagagcctgctcaatattctgttcaccctcgtacaattcagcaatttccgtttatattagtctttttgtagcaatgtgcagcatcgacatgggcctgtgcagcttcatgcttgctttccaacttcaaatgacaacttgccaacttcaggtatgtcgctccagccttgtcccatgatttggcgagcttgaagcaattggcggctttatcgaagagatcggcggcatcttcatacttggagccaaacaagccccaaccgctgagcttcttctcagcctttttctcgaattcctctcccttcgataactgatcggccattttcctccgatcgaaacaaagcaattgaagatggattgattgatcgaattcagtgcgttgcaggaacaagaagaagaagaagaagaagattccggacgcgtgg

SEQ ID NO: 23159 - DNA, 350 bp, Glycine max
  Clone ID: PAT_MRT3847_120915C.1
ataatagtctccaaactgatggatatgagggtgactttgaataagaggtccaaatacaaaaatgtaaaaacacaaaattaaacaacattctttataatggctagtgttaatatataaactcctaaaggtctcatgttaggatatcaaatattaacatgcttatccggaagttgattctatctcaattatatgaacttgtatgagctcctatttctttaagatatgtttctctttcatttaatcttttccaatcatttccaatcttcgttgtcgattttttctattttttcgatatatatgttgataatatagtatcacacctctttatcattttttctatattaattatt

SEQ ID NO: 23160 - DNA, 215 bp, Glycine max
  Clone ID: PAT_MRT3847_120916C.1
gggaaggggggaaataaaccatggtgggtttttatggggacaaaattaatcaaggccccccctcccaggaaaggggttaaaatttggaaagggtcttgtaaccctaaagaaaaatagtccccaaaactataaaaacattactttttaaaaaaattaggctttttccaattaatcctccggaaaaaccaaaaaaaaggggggggggggggggggcc

SEQ ID NO: 23161 - DNA, 663 bp, Glycine max
  Clone ID: PAT_MRT3847_120917C.1
cactaaccaagaaatgaattttgcagcgaaaagcctgtaggattcaccccaaattccggtgtcatatgctaacttgctcccatatctacttgataacgcaatggtagccatagcccctgctaggttccctcaaacccccatttttttgaggatatgactcgaacgcaacatgtgcatatcatggaggagcctcggggcattccattgagcattgtatgaccccgaagcataaagtgtgaagtctaattgatacgggctggctgaaatttgaggagaatcgcttgttgaatcctaacattgacaagcaacaccatacatggggcaattttggaagctgttgttatgactcatcaggattttcaagtttatgccattattataaaccacagttacaatgctaaatgatatggataaaatggacatccttgtctctctcatcctctcaaaaacacatctttgcttattcaacttccaccggaatgtgagtgtaagccattggtctgtttgctctagcaacctgcgctcctgagtgttgacttccaagaccgttcaatcagagattactcatcttgcacattggtgggggtgtcgtaaaacgacgagtaaagtaaaaaaaaaaagaagaagaaaaaagagggggcatttgattgactgtgttttcaa

SEQ ID NO: 23162 - DNA, 255 bp, Glycine max
  Clone ID: PAT_MRT3847_120918C.1
gctttggttctgaatctgaggaagacatgggtggtggcttatactctgatgaggatggtgacttaaatgaagaatattcatttaggaaaaataaagggaacaaaggtgatccttgcagacaaaataaggggaatagacacgattctggaagaaggaactttaccaaagacaggaagtcaggatctattggtggtcgccgagcaaatatgctcagtgatgattttgctggatcatcccagcagtcttataggaaca

SEQ ID NO: 23163 - DNA, 157 bp, Glycine max
  unsure (1)..(157): unsure at all n locations
  Clone ID: PAT_MRT3847_120919C.1
gacgaagctngatcctcagagcggtcgttaactccttaataataccccacccaccgcgcaccggggcaataatgatgtcattttatccatatattaaatccttacccctactggcgcctatcgcagccgtaccctactcgcgcttctcgcaaccgaa

SEQ ID NO: 23164 - DNA, 361 bp, Glycine max
  Clone ID: PAT_MRT3847_12091C.1
ggctcgagcttgaagttaacgtcggcgtgggattcgggttggcccacctggctaagaattaagacgtttcagtatcatggttgctttgtgcatactgtgacttgtcttctgtgaatcagtgaatacatgtcattctaggctcagacgaacatttgtacatttaccatgctgctgtatatactgtgaacagttattgacatgtgggcatttgtggttgttgcatgggttgtgtcagtgcactacgtcttggagacacaagtgtccttgggtaggtttttggagatctcactgtatcaagggttgaacgagatgctggagacacagactgtggcacactaatacctggtcatggctattcctc

SEQ ID NO: 23165 - DNA, 279 bp, Glycine max
  Clone ID: PAT_MRT3847_120920C.1
atcaccaatggcagtggcgaatctgcagagactggcctcgtgagtgcaccgtctccgctccgtctcgttcttctccaaatccctgatctccgcgcacctgcatctcttcctcctcctcgaagacggtcgcggaccgcatcactgcggctggtcggcgatcgaccttcgcgggtaaagaagcacgaggtggttggactggtcggccagaccctgatgaatgcgctgataaacacgggactggtcgaaccggagtcccaccgcctggaggagatcgacgcc

SEQ ID NO: 23166 - DNA, 382 bp, Glycine max
  Clone ID: PAT_MRT3847_120921C.1
ggacgcttggttttacctttttaattttttaccggcacacgcgggggtcaaccctggaaatttaggacgggtacttgaaggcggaccaatttaccgtaaaaggagttttttttaagcagggggaaaccagggacaaagccgctcccgggggaaaatggaaacccgatcaaaattccccaaaacttcctaccgcggaagcataaatggaaaagccgggggggcctaaggggggacttaacaaaaataaaatccggtggcgcccactgcccgatttacagggggaaaacctggggagaggttgattaaataaatcgcccaacgccgggggaaaggcgactagcgaaacgggccccagggggttttttttttccacctgggaaac

SEQ ID NO: 23167 - DNA, 324 bp, Glycine max
  Clone ID: PAT_MRT3847_120922C.1
gttcaagcaaggtcagctgtgcaagcattgcttgtccgtggtgagaggagctactaccgacatctctcaacggcgggtatcgtggaacatagacaccatcacggtggctgagcgtttgtaagctctcactggcggaggatgtccactcttccataggtaaaggatcagcactcataggacaaatagaacgaggccaacgacaccactgactctggtgttacgagttaatggggaatcacaacgcccaaggttaggaatgaggactgtacagactggccgtcgaactgctttatgccatgggattgttaccactctgttgtgtca

SEQ ID NO: 23168 - DNA, 223 bp, Glycine max
  Clone ID: PAT_MRT3847_120923C.1
gagggttttcctcatgtgctttcacgcaaaaatggcgaggaaggcataaggggatttatctctggggatggtgaagagatgacattaattccaggtaccagtgttaaagaggcttacaacaagcgaatagttaaacttgagaaaagtgttcctacattaattgagcatgaatgtcccaaggctgtgaaacttcctacgtcgcaaaatttttgaccaaccgaag

SEQ ID NO: 23169 - DNA, 461 bp, Glycine max
  Clone ID: PAT_MRT3847_120924C.1
ggatgcatcacggtttttactgttaacttgctgcgcggaggtcgacatacgaatgcgtatcacttggaaatacatgaacacatgttgaaggtgtctagaaactgcagcccaggccccattgacgtaatgctggttgcaagaacacagattaattcttcttcagccgagctcaagcattagacggaaccagttcatgacgacgtattgactgttatacaaaatacaaagcagcaagcatcggattcgaaggtcgtctcttacacctcgtctgcagtcacttcgcctcagcgccgctacaaatgtgcttttggatttacctcttaagatggctcacgtacttgaacgtcaagtagatagcaagctgcaccaccaaccaaattaccatcagacccaccatgaaatcgtacttgctgtcagggcggaagtcgtaaatgttttcaatatacttgggcaccgtcatc

SEQ ID NO: 23170 - DNA, 555 bp, Glycine max
  unsure (1)..(555): unsure at all n locations
  Clone ID: PAT_MRT3847_120925C.1
gttttttttttttttttttttttttcttttttgtttttttttcttgtgggtggctgatttgcttaacaaatagtaaaggttacagttcagaaacactcacatacaatcacatttataacatacatatccatatagaatataaataagggagaaaatggcacaacatatatcctatatctaattgatacaacaatgagtaaacaatactacagatacatctggagaaatgacacgtggaaaacctaacaaacagatttgccaactaacacctagtaccaaccaaagagtgcaactgttgagtcaaaaccatcgtgtgacactcatctgaccatcagagttgtctttgtaagttaattgtcagctgtcagtcaagcatgagtgagagcctaaatgagcttgactctgcataacatcaaataattcacagggaatatgtttagcatgcagcctcagcatttgattggcttaggttagactccttttcaggcaaggatctttgtcatcagcagatgagttcctagagtcttgaacattgntaaaagaagcaatattctt

SEQ ID NO: 23171 - DNA, 214 bp, Glycine max
  Clone ID: PAT_MRT3847_120926C.1
cagacgaaacgaataatatggtctataactagttgcatgaatgagatttactttctatgcaacatggcagacaatcggactgaatttatacgccttatgcaccccgtccgaactgggctcaaacgatacagattgcctaactcacatggggaggatatatgcgtattatagaattgacggaccagcttgaagaacatcagctctatgtttattt

SEQ ID NO: 23172 - DNA, 412 bp, Glycine max
  Clone ID: PAT_MRT3847_120927C.1
cgggtcgacccacgcgtccaaacagccgccagaagagcacagaaagggagataggtggaggagtatatcaaggctcgataccatgcatatctacatgacgattaataacgtctgtgggtctgcactagtgatggtggcagtgcagcctctggtgaaggtcactcgcacggcataggctgtcacttgtaccccagtgtagctgacatccttgtatgggggcagatacttcctctcatccaccagtcaggattttgttaccacaacgtcacggaacctcagcgttgcctctgtagtcacttcatacagtccaagtctaacgccatacgccatttcacctggctccagaagggttgctaactcatgtcaggtactcttgccaccttgttatttaccgatatctcatctcagacat

SEQ ID NO: 23173 - DNA, 1545 bp, Glycine max
  Clone ID: PAT_MRT3847_120928C.1
aattcggctcggacctacgcaacaataatctcaccgggaaaatcccgcaaatggggacccttttgaaccagggtcccaccgcgttttctggtaaccctggactgtgcggtttcccattgcagagtgcttgccctgaagcgcaaaagcctgggattttcgctaaccctgaagatggtttccctcagaaccccaatgcgcttcacccggatggaaattatgagagagtgaagcagcacggtggtgggtccgttgctgttcttgttatctccgggctctccgtcgcggttggcgcggtttcgctgtcgttgtgggttttccggcgaagatgggggggtgaggaagggaaattggtgggtccaaaattggaggataacgtggatgcgggagaggggcaagagggtaaatttgctgtggtggatgaagggtttgagttagagttggaggatttgctgagggcttctgcgtatgttgttgggaagagcaggagtgggattgtgtataaggttgtcggtgtcggaaaagggttgtcctccgcggcggcgaatgtggtggctgttcgaaggctgagcgagggtgatgccacgtggcggttcaaggagtttgagtctgaggttgaggccattgccagggttcgtcaccccaatgtcgttcctttgagagcttattactttgcgcgtgatgagaagctgattatcactgatttcattcgcaatggaagcttgcacacagccttacatggtgggccttccaattcattgccaccattatcatgggcagtaaggttaaaaattgctcaagaagcggcaagaggcttgatgtatatacacgagttcagtggtcgcaaatatatccatggcaacataaagtcaactaaaatcttgctggatgatgagctccatccatacgtctcaggttttggacttactcggctgggtttgggcccgacaaagtctgccacaatggcaccaaaacgaaacagcttgaaccaatcttctataaccactgcaatgagttcaaaggttgcagcttccttgaaccactacttggcacccgaggtgcgcaatactggtggcaaattcactcagaaatgtgatgtatattcttttggtatagtgctgttagaacttttgacaggtagaatgccagattttggagcagaaaatgatcataaggtactagagagttttgtaaggaaagcattcaaggaggagaagccattatctgatatcatagatccagcacttatccctgaagtttatgctaaaaagcaagtcattgttgcattccatattgctctaaactgcactgaacttgatccagagttgcgacctagaatgaaaaccgtgtcagagaaccttgatcacatcaaaatacagtgagaaacaagagatgtcttagtgtagtggggttgattttgtaactcacgggctagtagatgtatctctttcttccatttctcaatggaaattgtttcctttcacctttatttaaaatcaaggaacggcccaaattgattggtgtggtaaatattttccttctttttta

SEQ ID NO: 23174 - DNA, 313 bp, Glycine max
  Clone ID: PAT_MRT3847_120929C.1
aaaaaaaaaaaaaaaaaaattaaaaaaaaaaaaaaaaaaaaaaaaaaaaaaaaaaaaaaaaaaaaaaaaaaaaaaaaaaaaaaaaaaaaaaaaaataaaaaaaaaaaaaaaaaaaaaaaaatacaaaagaaaaaaagaaaaaaaaataaaaaagaaaaaagaaaacggggtcgcctgctatacggttaccagatgtagcgaaggcgaagtcgtacttataactgtttggtgtgggccaccgaagttagattgatatgcacgagtattaaaaaacatatccagggaaactgatagatatcggaaattattcatt

SEQ ID NO: 23175 - DNA, 1151 bp, Glycine max
  Clone ID: PAT_MRT3847_12092C.1
caggacacggctctgacgcatcggtgacagtccagaattgggaaggaaggggttattcagtcgtgaatgttcagtgcaaagatcgaaccaagctattatttgacattgtatgcaatttgacagacatggaatatgttgtattccatgcaactattaacactgatggtgaccgagcttacttggaattttatataagtacggctgcgagaagacgacagaagggagaaccagaacgtcaacgtgtaattcaatgcttaaaagctgctgtagagagaagagcatctgagggtgttcgattagagttatgcacagaagacaggcaggggcttctagcagaagtggtgagaacattccgagagaatgggctcaatgtgaccagggctgagatatctaccatagggaatatggctaaaaatatattctatgtaacggatgcgattggaaatccagctgattccaaaattatcgaatctgttaggcagaaaattgggttaagcaatttagaggtgaaggagttgccattgataaatcatcaggaggcagagagagaggatcaagcggttggaatgggtggggcagtgttgttgtccattgggagccttgtgagaaggaatctgtaccatttgggactaatcaaatcctgttcttaaatcagagggtagagcacaagaatttaggagtgagtttgttctatgtatgcaacatgtgtagcataatattctttgcttcagatttgggctttgtgtacataaaaagtttaaaggtggaatttggtgatagttgttgttctagttggttgggttgggtttggggtaggtggaaaacggatagttagatgcacagctgtagcagattggggtgccccaccattttaaatgctcctttgaatcggaacagattttggttattgcagaaagatgttcacgtcggtgggaaggttgtgagattaaatagtatggaattggattcttgttggcagaggcacaagtgtttaggtaaagacagaacaaattgggttcgttgttcgtttagcacttagctcatgtgtacatatccactttctcccatgtttatcaatatcaattttttatttcaacccgcaaaaaaaaaaaaaaaaaaaaaaaaaaaaagcggccgctctagaggatcca

SEQ ID NO: 23176 - DNA, 652 bp, Glycine max
  Clone ID: PAT_MRT3847_120930C.1
gaattcgagctctttacccggggatcctctagagtcgacctgcagggccactctagccaaagctttcatcttaccctcggcataacctccttctactggtgggtcgcaagatttcactaacgcacccagatccatttttgtctttctctttaagccatgcgaccatgctgagatgcaggttttccactccattatcagtggcatcaacatcctttgttacgctttttgcagtgaccatttgcaaaacaaccattccatagctgtagacatcaactttggacgtgatagatagattaaaaacccactcatgagccacgtaacctcttgatcctcgtatccttgaaatattagagtatgtactagtatcatttctgtttctcatgatcagcttggacatcccaaaatccgccaccttcagatgatagttagaatctagaagtatgctttgtggctttacatcgcagagcagaatacactccaaacactcctcatgaatataagctagacctcttgcagtacctaaggctatgtcaaacctttgtggtccaatccaaagcattggacttgatattttgtgctagagatccattctacatgtactcatacaccaatagccttgtgttttatctcagcacaatatccccacatctca

SEQ ID NO: 23177 - DNA, 516 bp, Glycine max
  Clone ID: PAT_MRT3847_120931C.1
ctggttctgctttctctctgttgcttcgattcattcacacaactcaaccatgactttcactaatggcgatgcagctgctgcctccctcaacaaggtccccacggtcaacttcaccaagctcttcattggcggacacttcgttcactctgtgtcaggaaagacatttgagacaatagatccaagaacaggagatgttatagcgaggatcagcgagggagataaagaagacattgacattgctgttaaagcagcacgtcatgcatttgacaatggtccatggcctcgccttcccggctctgagagaggaagaattttgctgaaatgggcagagctaatagaggaaaacgcagaagaacttgcggcactagatgccattgatgcggggaagttgtaccatatgtgtaggaatttggaagttccagcagcagcaaacactcttcgttactatgcaggtgctagcgataagattcatggcgaggtgttgaaaatgtccggagacttccatgcctatacatt

SEQ ID NO: 23178 - DNA, 373 bp, Glycine max
  Clone ID: PAT_MRT3847_120932C.1
aattttctcattttagaagcgcacttcacaaaaagacagccgatggaaccattctcattaccgaactcctgggtaaatatttgaccgaaggcaaattcagagcaagagctgatgagcaccactctcatcggatgataggaacgaggaaaacggcggccacaggtgaaagtcctgggaacacaggcttatgattagcctacactatgaatcactccttctggaggggtgccatctgtgatgttaacacactgaggtctcatgactgagaactatggaaggatgcttgaacaaaatcatagactatgtcattcaaaacaaacacatgtgctgaaggaagaagtttgctatgactgaaacgcaccgtatataatgg

SEQ ID NO: 23179 - DNA, 414 bp, Glycine max
  unsure (1)..(414): unsure at all n locations
  Clone ID: PAT_MRT3847_120933C.1
ctatccatcaggtttcttgagaccgattctctgaccataccatgtccgtgataaacctcttaaagtagacataggctagataggaagaacttgtagctagaataatgatgctcgctctatgaacatatctcaagcctctagagactcaaaccttgttagaaaggggacatgctggtctccaaactagtcctgacctgcatacccccaagcccaagagatggctcaaagctttacaaaaccgaccaagacatgcgatcccaccttataaaactctgcggggaagccgagggacacctacagagcctctactgagccatcctatgctgatacgacaaacccattaaacaccctaatatgcgccaccgtgatcctaactacactcaaacttggacaccccggnnncactatccttag

SEQ ID NO: 23180 - DNA, 425 bp, Glycine max
  Clone ID: PAT_MRT3847_120934C.1
ggaatttccggggcggaccaccccgtccaaccaatagttttttccttagaacctaaggatttgttggataggccatccttaggggcattatatccgcccttttaaattaattagcagaaggggggttgcgaattaaaccatagccttttgtgcattgtgtgttcccaacaccgcagtttagcctttgggggcatcagcaatcccatggggatcagaatttcattcagcatttgaggatcaggggcatcaggcttaggctagcaggcaatgatttggcttttttcccagcaaatttaatgctccaaacccctaaccaggatgcccataaacctccaccttaattaaactaaatattaacttaatgggcacctaaagagtaccatggggggggggcatccttttttggcaggggatctatgtcattt

SEQ ID NO: 23181 - DNA, 369 bp, Glycine max
  unsure (1)..(369): unsure at all n locations
  Clone ID: PAT_MRT3847_120935C.1
gtcattcgcccgccaaaaaggagggcgntttgagccaaatttgaggcttttccccacaagtcggcgcagattggagagattcaggaaaaagtcgcctcgaaatttccacaagaggaatttcttacagcaaggtcaactcaggtgcgacctgcaacaactctagaggctgacgggtgtccatatccgtatgctatggtacacgacagttcagtgtctacaataccaggcgatcctgtcattggtgctaaggcgacaaccataaacaatatgtgtgcatatgggctcaatcccggtatgtcaggttcccgttttttgggcaccattcctcaggctatatcacaccggactgtgtggaatgaaatggcaaca

SEQ ID NO: 23182 - DNA, 728 bp, Glycine max
  Clone ID: PAT_MRT3847_120936C.1
gtaagctcggaattcggctcgagctcgagccgaatcggctcgagcaaattttctttcaaacaaacgcagtttctctctctctctctcgtagttcaattcaattcaattcaatatgatgcagagactctcttctgccactactactactactactcgctctgccttgctgcgctacggtggcggcgcacttcgccgggacgtgcttgctcccatttcctcttctcacttagcagctaagtcacaggcgggtgaaaatgacaccaaagcagctagatggttttctattatgagctctgatagatccacatttgattcctcaaacttgaaaagggatttgttctttggcaaacgatatgaatcaactgctgcagaatcttcttcctcagcagccgccgagagatatgagtaccaagctgaggttagtcgcctcatggacctcattgttaacagtttatatagtaacaaggaagtgtttcttagggagcttatcagcaatgcaagtgatgctttggataagctgcggtttctgagtgtaacagagcctggactgttgaaggaggcagttgattttgatatccgaattcaagctgataaggataatgggatcatcagtattactgatacaggcattggtatgactaggcaagaactagttgattgtcttgggactatcgctcaaagtggaactgcaaagtttttgaaggctctaaaggatagcaaggatgctg

SEQ ID NO: 23183 - DNA, 571 bp, Glycine max
  Clone ID: PAT_MRT3847_120937C.1
ctgagttcaaaggctaccacaatggcaattctgaacctcgtggctttggtatgtgatatttcatttcatttaatttggtacaggttttgactctaaacttgattacagtttgagtttgttatcctaaatatatgctgaatcactgaccattattcttgcctccgtatattgttgcaatgtttaggtccttatttgatgctttgagttaacatgtttcatgattacctttagttgtaaacaccttttattaaaattttctcttgtacaccatggcacagttgtgtgtttgcttcctttaaacaggaaatgtcaagagaggcattgatttcattaaatgatgaacttagtaggccgtaatttttgaaatgtttggagtaactaaacaatgttagatcatgtgaaaatatccaaaacagttttatcttgagcacaccttagattaccctttgggattattttctgcatttccttgttttcggatagccagtttgcattccttttaagtttctgtgcagtacctgaagaatgcagatggactgtaagttgaaaaagttaatttttcctggtcact

SEQ ID NO: 23184 - DNA, 303 bp, Glycine max
  Clone ID: PAT_MRT3847_120938C.1
ccctgctgaattcggtcgaggccaattcattcagagttggctggcctcaacgacgcgaaaatccttcgagtttaggtgaggccatcggatccgcggaccatccagaagccagcccggcttgaaaaaaaaaactctgacgcccggattctttgtcgattcggccgtggaacggagacatgtcggttcactacctgcgtctgtgcgcgcgcgagagttgttgtgcagagtgccagcgaaggttgccgtgcgagcctgagcgaaggagaacgacgcggcgcggggctgagggttaatttgggaatg

SEQ ID NO: 23185 - DNA, 623 bp, Glycine max
  Clone ID: PAT_MRT3847_120939C.1
gtctcttagaaggagtctcatgctttttattgagagcaaacttattatttgtgtttgcatatttctcaagtaaccgtcataaatcaatgctcaaggtgtcgacggcgcctccctcatgggtggcatctccgccggtgcagtctcatattccatcgccttatggagcggcgtcgccgcctttaccatttgggactggccatgagacgaacattacattccttttttttttgtagctttgggaaacaaagttttgaacttgttctcctatttgaaaatttgttttacttatttgtttttttagttaatgtaatgaatattaatggctaggggagttcgtgctaagaaaatattttggcatttatttttcataatcattttgaatgagttcattattttgctaaggttttcatgctcttaataacaagaacaacagcttcttcctcttgaggcaaagtaatcactggaaatttagaggacctgcatttcacgaaatgttcactgtggtctcatgcaaaacatgctttgttttgttttagctaatgtttctgtaagaaaaagacgagtgaaagacaatagggcatgatatggattccttatttcaaatgagtcaaagttctctgatc

SEQ ID NO: 23186 - DNA, 1160 bp, Glycine max
  Clone ID: PAT_MRT3847_12093C.1
agcagtgccaaacaacaacattctttcattgcctcgcctgcattcgcagcctgctggaatctttactgcggattcatatccacacgccgggcagtttttggttccctttcatcgtaatgtcttgacttgggaacatgccatgggaatctgctcctaattttcgtaagctactggatcttttcaatgccatgggctccatgtatgctgctgttctccttattggcattaagaatgctaatgcagtgcagccagtggttgctgttgagcgaacagtcttttatagggaaaaagcagccggaatgtattcagctttaccgtatgcttttgctcaggttctaattgagctcccatatgttctagtacaagctgtggtatatggcattataatttatgccatgattggttttgagtggactgtaactaaagttttctggtacctattcttcatgtacttcaccttcctgaccttcacctactatggcatgatgtcagtagcagtgaccccaaaccaacacatttcttctatagtttcctctgcattctatgcagtgtggaatctcttctcaggattcatagtcccacgaccgagaattccagtgtggtggagatggtgcagttgggcaaatcctgtagcatggagtttgtatggattggtggcttcacaatatggagatataaagcaaagcatggaatccagcgacgggagaacgacagtggaaggctttgtaagaagctactttggtttcaagcatgattttctgggagtggttgcagctgtgattgttgcattcccagtagtctttgcattggtctttgccatatcagtgaagatgttcaatttccaacggcgttaagatcgaacgtgttcaagtagtttgtacagggtgtttcatgtaatgtaacatgttgagagaagatatccacatagcttttttttattcttttatttaccaattaaattaaacttatcatagtcgaaatccactaggatctgtcaacagtagtggagaaatttagttagttttcatgagatcatagatttaaatctcattggcatatcactgtaaaaaaaagtgtatcatatttgatgatattaatatatgtaacacttgatatagttagtaaatgcatatgttatttcgttctttttcttcttaata

SEQ ID NO: 23187 - DNA, 691 bp, Glycine max
  Clone ID: PAT_MRT3847_120940C.1
ctcgagccgctcgagccgattcggctcgagtcaggggcgaaggagagctactgaggtttacatgccagaaaacatgtcagagaatatttattcggatggaggaaggtatttgatccccaggcaagatcctttgactgcggtaaatatgactgattgggctgctaataatgctcgcatagcagggccttcccaatctcacttgaacactggagattttattgatcatcattggtttcctgctgatcatcaagttcgtggtggtggctggaatggatctgatggtggtggtctttcaagtcaaagtcttggcactggagcaagcgctgatcagagtttatttagtattctgtcagagtgtgaccaattgcattcaggtacaccaagggtgaacacggttgcaccaccggcttctcatccattagattacttcactggacgtgaagcacctagtggcctggtgcctgatgatatggcatggatgagcttgccacgtcagaattcttcaatacatgaccaaatgggaaagccatacttaaggtcatggaaccggtaatgaacgttttacccaatattagcgaggtaatcttgtctgcaagacagtgagaagaaatgcacatttgtccatgtgatagaattttgacttaagcaagatctacagaagctggggcattcataccctgaaatgagagag

SEQ ID NO: 23188 - DNA, 2182 bp, Glycine max
  Clone ID: PAT_MRT3847_120941C.1
ctcgcgccgcccgtcccggtgcggctcgaggctggggacacagggagtgaacttaaggatcaggatggagtgaactcagggagtgaactacaggatcacgatgaggtgaactcagggagtgaacttcaggatcaggatgaggacaaccttggctcaggggacaagctaaaggataagaatgaggataacatgagttcagaatgtgagcctcaggagcagaatgaggataatgtgacctcagggagcgaacttcaggatcagggtgaggataatgtcgactcgggtgatgagcttcaggatcatgtgaataatggaggtctgaatgatcagccttacttgaaagaagatgagcattctttttctttgtacccagtgtaccgctcccagaacatttcctatgttagaggtgatgatgagttcaaccgaatgagtgtagattcagaaaggaatattcttttatcaaaatcaaataatacttcatcgattagtggtgatcatgagttcaaccgaatgaatgtggattcagaaaagaatcttcttttatcaaaatcaaataatacttcattgaataaagatgagtattcaaggaatatgaacactcaggatgtgtctattgatgaagaagcacctttcacttccagtggtgatgtctggcaaggagttgaaatgccacattcatactatgattctgctgtgacccacgagtacgcagccagtgggttatcactggctaatcctcaagtcagtcaagagcagccaactcgtatgattgatcttgaagctgatttgcgtcgagaagagacaggcaaagagttgttaagtaggcaattagataatggaaccttcagttcataccaaagccaggatcgaagtgtcttacttcaatcactcttcaaaggagagggattgttaccttatcatcatgatcagaaagaagctgagttagatatccaaacttcaaacaatgttatgatggggggtggccaattttccagtcatttcaaggagccattgcaaacgtcgctgacattggaccaggggcgaaggagagctactgaggtttacatgccagaaaacatgtcagagaatatttattcggatgaaggaaggtatttaatccccagacaagatccattgatccccaggcaagatccattgatccccacgcaagatccattgatccccaggcaagatcctttgatccccaggcaagatccattggtccccaggcaagatcctttggctgcagtaaatatgactgattgggctgctaataatgctcgcatagcagggccttcccaatctcacttaaatactggagattttattggtcatcattggtttcctgctgatcatcaagttcgtggtggtggctggaatggatctgatggtggtggtctttcaaatcaaagtcttggccctggagcaagctctgatcagagtttatttagtattctgtcagagtgtgaccaattgcattcaggtagcctttatgattcagttagaaatactgaccagtttcttgcacccagaacttatggattagttgatgcaggtacaccaagggtgaacacggttgcaccaccggcttctcgtccattagattacttcaccagacgtgaagcacctagtggcctggtgcctgatgatacggtatggatgagcttgccgccacatcagaattcttcattacatgatcaaatcagaaagccatacttaaggtcatggaaccggtaatgaacgttttacccaatattagcgaggtaatcttgactgcaagaccgtgagaagaaatgcaaatttgtccatgtgatagaattttgacttaaacaagatccacagaagctggggtatacataccctgagacgagagagataggtttctgtacatacctataccgaggccaactcaacaccatgtacatatctagatattagatggcaggaaagaaaccaagtgattaagataaacttcaagaatttcaggttattaggtaaattacatatttattattttttttcctttgcttctagagagacattctttaataattttggaagataagaaatgctgggggctggtgccactttttgagttttgagttacctttattctgggttctttttcatagttttggtcaatatatcaaatgctaaaaaaatgttttttctcgttggttat

SEQ ID NO: 23189 - DNA, 302 bp, Glycine max
  Clone ID: PAT_MRT3847_120942C.1
actcgagccgaatcggctcgaggcgagaagacgacagaagggtcaataaaactcctataacaagaataatcacaaaactctaaaaaatcaacaatgtgagacagcatcatacctagtttatagttcaatctatcatatctgtgttcactgcatacactaccttgttggcaataataagctgaattataagaactaattaatataacagaataaaatcaagcatcaaagagtgttaaacttaaacataagataacaccacagctcagttccccattctgttttaccctcataatcacagctgg

SEQ ID NO: 23190 - DNA, 521 bp, Glycine max
  Clone ID: PAT_MRT3847_120943C.1
ggcgaaggtgagctactgaggtttacatgccagaaaacatgtcagagaatatttattcggatggaggaaggtatttgatccccaggcaagatcctttgactgcggtaaatatgactgattgggctgctaataatgctcgcatagcagggccttcccaatctcacttgaacactggagattttattgatcatcattggttccctgctgatcatcaagttcgtggtggtggctggaatggatctgatggtggtggtctttcaagtcaaagtcttggcactggagcaagagctgatcagagtttatttagtattctgtcagagtgtgaccaattgcattcaggtagcccttatgattcagttagaaatactaaccagtttcttgcaccgagaacttatggattagcagatgcaggtacaccaagggtaaacacggttgcaccaccggcttctcatccattagattacttcaccagacgtgaagcacctagtggcctggtgcctgatgatacggtatggatgagc

SEQ ID NO: 23191 - DNA, 382 bp, Glycine max
  Clone ID: PAT_MRT3847_120944C.1
taaaccacttccacaagtacttgtcctccatggccattatggtggtagtgtaggtgaactccctatttatgaggcttatacaattgacgggccctattttataaggatctacaaaatggttgagatagaaactgccaaagacatcctagaacttgaacttgagttaaagatacctgttaaaggtacacatctttatgcataaactgaacatggcaaagatctacggagtacaaacgttgtgaaaggtacttcaacaaaattgtaaatacgattgaaccatgatctatcctactaccaaggaaaaaagcttgatacaaaaagacctgactattatggatatgacatctcaagaactgtgctattgtttttcttcataggagat

SEQ ID NO: 23192 - DNA, 189 bp, Glycine max
  unsure (1)..(189): unsure at all n locations
  Clone ID: PAT_MRT3847_120945C.1
aagacattgtatgttggcaagnnagacaaaaggttcatntcagcactctagcttcttgggtggaggagccacatcttctgctgggagactagtgttgaaaatggtgtcttgaaggctgtttggcctcacagtggtcattatcgtccgacagaagaanatttnanggattattcatccttcaggagaaca

SEQ ID NO: 23193 - DNA, 455 bp, Glycine max
  Clone ID: PAT_MRT3847_120946C.1
ttcactcttccgctagttcccacatcctctggatgaagtctttagcatttcacaagagaaagtgtgtgtgtgtgtgcatatgttgtccctgaaaaatggttccaaaatttggtggtggagtggatgatggagggactgggcgcggaactaggcctatctgaacatcaccctcctttccttttgaaactgataccaactgttgggagtcaccttctttcaactttgttatggtcaggattgtgtctcttgattttggagtttatagtcatgtagtttcttggtcttgtgtcttctataactgtgatagctcataagggtccaaccttctctgtggtgcaaatggttcaaaagaaatgatcgtgtaatagatgctcttttgacttctggcaatgggcagtgagtttcaaactcaaagttctttcagacgggtgatcttattacttgcccttggttta

SEQ ID NO: 23194 - DNA, 379 bp, Glycine max
  Clone ID: PAT_MRT3847_120947C.1
acgccctatttgattcctatcctttccattgatttggttgttttttgcgtaatatattaatattggggcattggggtgtatggctattacctgcatcgcttggaagtatttactgcattttggacagatctagatagcttcaattatcatctgcgagcagacgtccaaagaacgcaccgatgaggacacacaggaggcggaataagaccgggccagaaatggtgatgtaaaagcagatgcattggcaacgagtggagctactaactccagctgcgaggaacatacaggtaaacacctggatatgtaattatggggacgaaaagcttatacagactgtgaagaaaccatgcccctttcagatacttgccactaacaccga

SEQ ID NO: 23195 - DNA, 482 bp, Glycine max
  Clone ID: PAT_MRT3847_120948C.1
cagagtcttctggtcagcgtaaggactaaggagaggaaatggcattctcgtaacccagaaaacaacaacagaacattacacacccctttggtttgtgtttttcaaacacagcaatgacagagtcggcagggccaagtgtgagtttgaaacttgttgtgttagtagctattctagtcgtctccgcgttgctgattctgcttctgatcttcttcctctgcttccgcaagaagcggaacctggcggccaaacacagctcagggagcatccctctggtgtccaaggagatcaccatggtcaaggcctcggatccgaagaagatggaggaggcggaggtcaaggttgaaattggtggggcccagcaccaccaaagcagcgaactagtgtcgggggaggatcccgatatagggtggggccgctggtacaccatttgggaagtggaactcgccacgcacgggtttgcgaaaggaaatgttattggaaga

SEQ ID NO: 23196 - DNA, 321 bp, Glycine max
  Clone ID: PAT_MRT3847_120949C.1
ggtgggagacaaattgaaggaaagggatattttgtttgattagtttaaaataataaaaaagtccacttataaaataatatcaacatgcttaaataaatatggatatattgctgcataatgaaaagctgtttttttggcctttcaatttaaagagacttactcctctttgcaactatattttgcttaagcttgaaaataaaaagaaaacctgttaaagctatatttaaaaaaagtgaaatgaatcatacattgtttgactcaagaataatttttagaaaaaaaaatgttttctatcctctctcattcgagatatgaattata

SEQ ID NO: 23197 - DNA, 512 bp, Glycine max
  Clone ID: PAT_MRT3847_12094C.1
ctttttctcctgcagacatgggctctggcaagccgagaggtctcggagccgcgcgcaagctgcgcaactatcgccgcgttcagcgctggaacgataagaactatgctaaggccaaccttggctacgcctacaaggctaaccctcttggtggctcttcccacgctaagggcatcgtgcttgagaagctcggtatcgagtctaagcagcccaactcggccgtgcgcaaggctgtccgtgttcagctgatcaaaaacggcaagaagatcactgcttttgtgccccgcgacggttgcttgaactacattgatgagaacgatgaggtgctcattgctggcttcggtcgcaagggtcacgccgtcggtgatatcccaggagttcgtttcaaggttgttaaggtgtcgaacgtcgctctttctgctctgtaccgcggcaagaaggagaagcctcgttcttacattaactatcttgcctgtgccaaataaaaccacaccaaggaccctacggactcgagc

SEQ ID NO: 23198 - DNA, 188 bp, Glycine max
  Clone ID: PAT_MRT3847_120950C.1
ggtaatcttttttattaatttaaaacagttcatgttcatcacgttattctttttttaattatttgaaattttcggaagcgcatccacaaataatttcagtgctaggacagatcggcctaagcagtgaccaaaataatttacaaagtggtgggaaacagggggccgaatcacacagaggaaaatgaaga

SEQ ID NO: 23199 - DNA, 129 bp, Glycine max
  Clone ID: PAT_MRT3847_120951C.1
ctatgccctaactaggtgctactttgctatggtgactcatctgcatgcacacatcgaatgatcgatataaatcctaatgttatcgtggacattgctcttctacagccatctatcaatgttgtgattacc

SEQ ID NO: 23200 - DNA, 320 bp, Glycine max
  Clone ID: PAT_MRT3847_120952C.1
tggggttctaatatgtgattgtatgttgttgtcactcgttcttcttcttttgatgttcagtgtatgtatttgtttttactctcatctgaaaatatcttgccacagtggtaactgtggttgcggaagctcctgcaagtgccgcaacggctgctgatgctgcaagatgtagccagacttgagctacactgaatcaacaaacagtgagaccttggtcatgggagtagtacctgttaaggctcaatttgagggtgctgaaataggtgtgcccgctgagaacgatagatgcaaatgtggagcagactgcacgtgacaatccctgc

SEQ ID NO: 23201 - DNA, 421 bp, Glycine max
  Clone ID: PAT_MRT3847_120953C.1
ggctcgagctcgagccgaatcggctcgagatttattttatcagattttgtcattgtagactgtttgaagaatcgtggagtgtttatagtttggtgacaaatttggggatgtatcatgtaaatggagccagaagccagattaaaatctactggtgtttccctgctcgcacagaagctcgaaatacgcttcctaatcactttatgcaatgtctgaaacagaagctctgatctgacggctgcgcattgtgtataaaagtggaggcgcgagtctcaatgttgttgcccataaatatgggcgggccctgaataatatgtttctgaccccaaaaatgattgttggccggcgccccagggggtcccctcaccatctcatattgaacgatcatgtgccataggacttctaagatactgtctctttgggc

SEQ ID NO: 23202 - DNA, 820 bp, Glycine max
  Clone ID: PAT_MRT3847_120954C.1
tccgtatatgtccccatccctgttttggtgcatcttaggtcacaaattctagcatatgcagtaaactttgatttcttctccttctgctcttgtttttgtgtataccataagagcaataaagctgcaaaatggacattaaaggatctaatgaatggtctgagaaaaacaaaatcaaatttacaatgtcaacaaaaaccagcatctcaatttccaaccccacctatgaacacttgcaagtatagaccaaaatatgtaaagaatcctaattgcctctgaaaactgttataactgctatgctaccaaggtttaaggtcccccacagggccagcagtccaattcaaggccttctcccctggtttcaagaatacacttctgtcgtgtggcaatttacgtgcaaggccatttaaaacttgatggaaagcatctcccggttgcgctggttgtgggaacagcatagcttgcttcatagaagggttggcaagcaatctctgtttcctcaagataacttctggtggaatagatgtgagtatagtatctaactgagggacatccttctcatcaacaaatacacctatctcttcccatgggattgcatcagcaaatggcagcacaatatcatctgcaatgataactgggatgcagccaaataccacagcttcaaccagtcttgggctccaaggggcccatccaagtggacacaaacagaacacagctcgttgcatgtcctcgtagtatgttgttggatgctctgtggaaatgtcaaacagtggattgtccttaaagttctcccacactgctgctctgcctcgtgccgaattcc

SEQ ID NO: 23203 - DNA, 148 bp, Glycine max
  unsure (1)..(148): unsure at all n locations
  Clone ID: PAT_MRT3847_120955C.1
ctgggctggttcagtcaaaggaggatgctcagggctgaaagcccttgattgggcaattgaggaaaaattgaagtcaggtatgcatggtttcccatatgaccagttggaggggggggggggcccctnccaacaatttttacaaatgatc

SEQ ID NO: 23204 - DNA, 132 bp, Glycine max
  Clone ID: PAT_MRT3847_120956C.1
accgagcgacggtagttgcttcatggtacgtgctgatggatcaatgattgcacgaggccttagacaaatatgcagcggactgcaggcctgaggctgataagatcacgactggagctatgatgcttgatgggg

SEQ ID NO: 23205 - DNA, 239 bp, Glycine max
  Clone ID: PAT_MRT3847_120957C.1
gtgaacattggcgaccgtcctctgcatgaaacccaccttgcctgggttggaggagtcccaagaacagattcatgagataaggatcaccctttcttccagagctcgtctaaaaccttcgagaacgcgtgtagcagcttggttcatagtacacaagtcaagcgcctcacggtttaaggacctgttaagatccccactaaaggtgttcacattactagcaacaattacccctgtggtggagg

SEQ ID NO: 23206 - DNA, 302 bp, Glycine max
  Clone ID: PAT_MRT3847_120958C.1
acggctgcgagaagacgacagaagggccctccgtacaaaaactactcaaatatcagaaactgatagagaagggaagaagcaaatctgagagaacaaatatgcttagagtgaaatgtacttactcctgaataaatgattctccaaacttcctttttgcatgaactcataaaccagaagcctgtttttactttccaggcattagccattaggtttcaccaaatttacatgctgaagctgtccaagataattcacttcttgctgccagcaaaaagatagtaaaatcagtcatcagtagcaagaaa

SEQ ID NO: 23207 - DNA, 467 bp, Glycine max
  Clone ID: PAT_MRT3847_120959C.1
gaagagcaactgaaccaccaccattgtttaggcatgtcctctcaacgtggtggtgacacttttacaactcaacagtcagcagcagacgtggttgccttaatcttttgtcaaaagaatgttaacaatggcaaaaggatttgctcgtaagaatttaatggaagattatactggaagttaaaaaggaaaatacttgcggtgaaatttgttctggtcattggaagaacaagaaagaaaaaaaacgtggttattaaaacctttttttttttacaataaacgtgaattcacatacccatagacttgtagagctaagttctgccgtgaatgaaaggcagagttgcagattaatcatggaatccttggcacaagtgttcaagttggcaatgtgccatattttggtacaattttgatacaatttggctttgcaggaatgtccataatttgtaaattcaccgaggatcaagggctta

SEQ ID NO: 23208 - DNA, 288 bp, Glycine max
  Clone ID: PAT_MRT3847_12095C.1
ggtatctatggacatgcctccacatggtcatgcacttgcttctgatggagaaatggaactgaactcaaacccaggccctacaattccacaggttgaatgtcttgtcactggacatgaatctgtctcacctcaagaaaaactgactcaacctccaagtcccttactgatggagcatagttctgatgataaaacacttcatgcactgtatcaccaatgtggtgtctatggacagttctaatagacactaagatacctctgatggagaactggaacagagttctaccccag

SEQ ID NO: 23209 - DNA, 205 bp, Glycine max
  Clone ID: PAT_MRT3847_120960C.1
gcacaaatggggcccaagacgttctcataataataattccagtgacctccatccccataagcatcattcccatgaacagcatccccacggacaccatccccatgcacaccatcctcatgaacatgatacccatagacagcatccccatggacaccacccccaatggaaaccatcctcatggacacaccccccatggacaacatcc

SEQ ID NO: 23210 - DNA, 482 bp, Glycine max
  Clone ID: PAT_MRT3847_120961C.1
ccacgcgtccgcccactcgtccggcggcattaggaaactcaagattccctggtaaggctgttggtgtaaatctgcctgcgggatcagctcctgcggcagctgctcctgcggatgaggctgaggacgatgatgaccttgatctttttggtgatgaaactgaggaggacaagaaggcagctgatgagcgtgccgccgctgccaaggcctcttctaaaaagaaagaaagtggtaaatcctccgtccttatggatgtcaaaccatgggacgatgagactgatatgaagaagctggaggaggctgtccgcagtgtccagatggagggtctgacttggggagcatcaaagcttgtgcctgttggatacggcatcaagaagatgactatcatgttgacaattgtcgacgatcttgtgtccatcgacactctaattgaggaccaccttacgcaagagcccatcaatgagtacgttcagagttgcgacatt

SEQ ID NO: 23211 - DNA, 204 bp, Glycine max
  Clone ID: PAT_MRT3847_120962C.1
tgtgagagcgtgacatggaccactgtcggtataaacattggcgacacgtgttaatctgataaggcacgataacattgggcgattggattgaatagaacctcaaaaaaactgcggtgggtctataagattcaagcttaccatcgcgtgcatgcaacgtcatagctcttttatagtgtcaactaaattcagactactggtgcggtg

SEQ ID NO: 23212 - DNA, 272 bp, Glycine max
  unsure (1)..(272): unsure at all n locations
  Clone ID: PAT_MRT3847_120963C.1
gcgtgcggttccacgtgctggagnatactgccccgcgtgcagctcgtacaacacccgggagacgaaggctatgtgccccaggatctgaggcgaaccagatgctatgtcaaaatgccagggagataccgtccaacgactggtggagatcatcagtcagcatgactctgctgcgcttaatgtcaaaggctagcgcgtgaccaaacctggttgtccagccgtcgagctagtgctgtccatgcacacctgtggatcgggcgcggctcaggtatagt

SEQ ID NO: 23213 - DNA, 1072 bp, Glycine max
  Clone ID: PAT_MRT3847_120964C.1
cgacgggctcggaattcggctcgagcactgcaacaataacaatcaaagaaaagaaaccttctcagacacacaacaaaaataacatggaaatggaatcgaaagactatgccttcagcggcaagataatgctaatcgccattgtggttctcttcatcgttatcatcataatgctttgcctccacgtctacgtccggcggcgcctcgtaaacgctcgccgccggccacagctccgccgcagtaaccgcccgcagttcgtgttctacatggaccccgccgcccgcattgccctcaccaggcgggggcttcacccctccgtgatctccacgctcccgatgttcaccttctccgccacaaacaacccaacggaatgcgcggtttgtttatcagagttcgagaacggggaaacgggtcgggtattgcccaaatgcaatcacagtttccatactgagtgcatcgacatgtggtttcagtctcatgccacgtgtccgctttgcagggaacccgtagaggctatacccgagcgagaaacccgatccgaggtggctgttattgtgtgcgacaccgaaccggttcgggaagaggtgaaccggtctggaccggtgggtgcttcttcttctgctgctgctacttcgttgcatattgagaacttggggtgcgaggatgggtgtgaatcggagtcatcgtttcgttcgccggtgagtcgtatattgtcgttcaagaggattctgagtagagagaagaaaggaagcgttgtaggagtgtgcagctccatgaccgagttagacgtagaacaacgtggagagtgtgactcggtgagttgatggcagcgacaacgtgaaatcgaaattggaatgagtctgagattgaggaggaatttacgctgcggcagagtttgcagaggtgacatgacacacaacactgtcgagtgtcgacgtaatatctgatatgtaccataccttgtacagtcaaaagagaatgacaggttaaaagattcttttattttatttaattttaaagtttgtgtttttgccattttctttaaatttaatagaagaaaatgaatttttgtttt

SEQ ID NO: 23214 - DNA, 504 bp, Glycine max
  Clone ID: PAT_MRT3847_120965C.1
cccgtagaggctatacccgagcgagaaacccgatccgaggtggctgttattgtgtgcgacaacgaaccggttcgggaagaggtgaaccggtctggaccggtgggtgcttcttcttctccttctgctgcttcgttgcatattgagagcttggggtgcgagtctgggtgtgagtcgggatcgtcgtttcgtttgccggtgagtcgtatattgtcgtttaagagggttctgagtagagagaagaaagaaagcgtcgggggaggatgcagctccatgaccgacttagacgtagaacaacgacgagagtgtgactcggtgagttgatggcggcgacaacgtggaatcgaaattaaatgggtccgaaattcacgctacgccagagtttccagaggtgacgtgccacaacactgtcaagtgtcgacgtgatatgtaccagaccatgtacattgtacggtcaaaagatcaaaagagaatgacaaattaaaagattattttattttattttta

SEQ ID NO: 23215 - DNA, 320 bp, Glycine max
  Clone ID: PAT_MRT3847_120966C.1
gggaaacaagggaaccaatggcacgcaattccttgggtcaaaaaatacgagttttttgcgtaaatttatccaactatcttttaatatgtaatcacacataatatgttttttgcattcaaacgataaaaattagtccaataaattaccaatcaataattaattttaattgtgctaaaaacttttatctaacattcttactgcctattaaataatccagtggattactatgaaggtgctaccattaatttttgacatacaatacaacactgcttactatgtatatagcgataactgattcttaatacaatttcattcttttt

SEQ ID NO: 23216 - DNA, 315 bp, Glycine max
  Clone ID: PAT_MRT3847_120967C.1
tgatcagcaactacaacgtgagaaacatggcttccttaagctccttagtgctgctccttgcagctctaattctatcccctcaagttcttgcaaactatgagaatcccccagtgtacaagccttccactgagaaaccaccagtttataagcccccaattgggaagccctcttgttaccaaccttcaagtggaaacccccccatttataaaccctccattgagaaaccacccatgtacaagccccccagtgggaaacccccaatggtccaacccccaattgaaaaacccccaatgtgcaagccccccatttagaaac

SEQ ID NO: 23217 - DNA, 411 bp, Glycine max
  Clone ID: PAT_MRT3847_120968C.1
gtaaaggggaaaaaattggtctgcttgaaataaccagtctaggggttcaaatccatcaaatgaagctagttatagttaaggggggcgatttggggtaaaggaaaaaaagggatatgggttggtggtaatgggaggttttggttgtaatgtaaaagtggaaagggttgaagggctgaagggctgaagggcctggggtaaaaggaatagacgtgcccagttggggtggagggcgaataaccgctaaaaagggttgagaaattaaatcagagaccatggaagatgaagtatgggtaataaggatgaaacctggaggaatgggggtagattggggtgttgttgtgatgcccatggtggtggagacaaatccctgcatggtctggttgggtttggaagaggaggtcctttgggaag

SEQ ID NO: 23218 - DNA, 607 bp, Glycine max
  Clone ID: PAT_MRT3847_120969C.1
aataccatcaccatcccttcccttagttgtctcctttttattgtaatctatctccaaaaaagccctttttaatttcctaagatcatcatcacttcccttcgctccccctccttcctttcacttggggcttctccatcctcccagtacaatggacgaacagctgaggatactaaaagtcattgttgtgcaaggcaaaagattagtgatccgggatttcaagagcagtgacccttatgttgttgtcaagctggggaatcagaccgcaaagaccagggtcattcgttgttgcctgaatcctgtatggaatgaagagctgaatttcactctgacagaacctttgggagttctcaatttggaagtatttgataaagatctttggaaggctgatgacaagatgggaaatagttacctgaaccttcagccattaatctctgcagccagattaagagatattttaaaggtgtcctctggtgagactacattgaggaaggtgacaccggatagtgaaaattgtcttgcccgtgaaagtagcatcaattgtgttaatggcgaagtgctacaaaatgtttggctaaggcttcgtggggtcgagtctggggagctaaac

SEQ ID NO: 23219 - DNA, 458 bp, Glycine max
  Clone ID: PAT_MRT3847_12096C.1
gtgctgtaaaacaagacttaacaaccagctattgcacagggcattaacaaactgttttacacatgtaactgcagaatcgtaggatataatacacaccctttactaatttataaacacagaaccatttattgagcacgcttttaaacctgaatagggtgccaaaaaagagctaccatttttgaggagaacaagcacactggcaccatcaccccttgagattcgtcatacttcaacaaagtacgttgggagcaaccaatactgagcattgctggtggaaaatgagatctttaagggaggcctactgagaaaagggttcaccaccagcggggcagggggttggacagaccaaaggaatccttaaaaaggtgtaaggataattttttgggccagaagaccctatggactgggatgggcaatgaacccctaaggaaggggaggcccctcttgccttggggaaa

SEQ ID NO: 23220 - DNA, 790 bp, Glycine max
  unsure (1)..(790): unsure at all n locations
  Clone ID: PAT_MRT3847_120970C.1
tttccgaaacgngagtttattaaaaaacaaatctaccaaacaggcccgtaaatgtcatatacaatttcgaccctcttcttttgtgcttcgccatcgcaaagtttgtggttttagtttctgaatcaatttcgaagtcatccaaccagccactggattcttggagagcatggacactcagaaaagtcaacctgagaagcagtcttcatccactgcaactgccccatctgttacttcatgtcgaaagaagaagaatgaagaagctgctttcttggacgatttgaaggaccacattgatgagtttattaatgcttctatggatgaacacaaaacttgttttaagaaaacaattcagaagatgtttggtatgtccaaggctgttgcagaaggtcagtccaatgcttccaaagaagttgaaagttctctgcctcttcagacaactgtacaagactagatttcttgcttttgaaccactaggttttaaccgaggcgtgtggttataccacccagatatttagttatattaggctatttgaaactaaattttgtttgtgaaaactacattcatgggttgttttttgtttttactagtatggtttctatgcttaagtattgttgaattatggtagctgatccaatttctaaagtgagtcccacccatcaactcctgtacccttttccattccactgatgtaggatgttgacgcatcccaatgtaggatgttgacattgccccaaaacttggaaaacatatttttctaaataaaaaaaattgctacccgtctgcactaac

SEQ ID NO: 23221 - DNA, 390 bp, Glycine max
  Clone ID: PAT_MRT3847_120971C.1
cctatcaattgggggagctttaattttttttatatataaaacaacagatatccaaattttaactaaaggattaaccaaaataaaatttaataaacaaaattatggggaagggggggggacctagtaggaaaaaaaggggccaaacctacaaatttacagcctttttgtttgaagggatttccctggaaaccttttttgcaaaaacatttccaacccgatggggaaaatagggaaaaggggacattagggtaactgcagttggagctgccatcggaccggaattcagggaaggaattggggggcgtggaaatcggaatctcccattaaagcaccggaggaacatttttttgtttctttaggcccccaaaaagggaaacccagtaacgggaa

SEQ ID NO: 23222 - DNA, 321 bp, Glycine max
  Clone ID: PAT_MRT3847_120972C.1
gattgaaaccaaaagaacagcttctccaacaacatcttctcagagtaatgcgaatactggaggcattggatgaaaaaggctgtcgtatccccctaacctctggggattctgaacttgctgagaaattagccagaatatctagaaagctgagacgatctggatcggaactgtctagagtagtacaagtcctactaagtgtatctcatgttaaagctaagaacaacggacttggtatctccgtatagcgtccagggtcatccatcattcatgaacagagtcttggtgatctatgctaagtgtcactgcatcaactggacgcca

SEQ ID NO: 23223 - DNA, 450 bp, Glycine max
  unsure (1)..(450): unsure at all n locations
  Clone ID: PAT_MRT3847_120973C.1
aataaacacacacacaaatatcaaatggctttctttatctttctcacctacccaactttgcccttcttcttactcctcaccagcgcctccatctaccntaccttgatcgaattcgacgaatattacactacccaccaattaggcccattccgccaaccacataaatgccatactgagtttcagcaagagcaacacctaatagcttgccagcaatgtatccgccagcaacttgctgtatcacccttcagctaaaaccattgtggttctcagcactgtccgactctactcaagcaatgctgcaacgagctttaccaggaagaccaagtatgccttttccctactttgaaacaagcatccaaatcatttatggtccatgtacagcactgaccatatcagtccactcgcatttaccagatcgctaagaacttctcaacttttgcaacattaaac

SEQ ID NO: 23224 - DNA, 776 bp, Glycine max
  Clone ID: PAT_MRT3847_120974C.1
tctccatgcttactcgcactcttgaaaggaaatacatgtttctcatctgtaacgccatccttgctcttctagccatgtcacctcattttgacttacgggtttctgaagaaccacttggtgcttttcgcttgctagagaatgctcctcttatggttgaagaagaagcaaaaaggcatgaagaatatcctgatcaacatatatcacaagctgaagaaaacgaaggaagactagttagtaaagtttctaatgcagaagaagaaggagcaggaggaggcacaggaagtagtactggagttattgtagcacaagatgatgatgaattagtagcagaaacagcagtggaaatggaaacaaacgaagaactggcaaatacagatgaactcaacagaaagattgaagaattcataaggaaaatgaaggaggagatgaggattgaggcacaaaaacaaccaattgcagtctagtacatgcatgattacgcatctgcatgttatgttgtaaagcacgatgaataactaattagtgctttagtcttacttttaaaatgacaaagccttatggtgtggtccttttttaatcatttttatttgtatgttagcacgtacatctttttcctcctagtttctttctttttcaatctgttaagctctatcatgctgctttcgtttttttgtttaaattatattgtattcccttctcttcttgccttctagctttattaccccttagctactttttattaatttttatattcactaccttgaatgaaaaaaaaa

SEQ ID NO: 23225 - DNA, 993 bp, Glycine max
  Clone ID: PAT_MRT3847_120975C.1
gcttgtggctgctataagtattgtagtgaggtgcttcctcatcttgccgtgtgtctgagagagtccctttttcttttctactcgttctcctcatcttgttgtgcgtgtgtgttagagagagttagagaatgggaaattgccaagccgttgacactgcaactctagtgattcagcaacccaatgggaaagtagaaaggttgtattggcctgtaagtgctagtgaagtgatgaagaccaaccctgatcactatgttgctcttcttatctccaccacattgtgctcatccaaggacaatgaaaatcgctcaaataagagtgacaacaccaacaccaccaaccctgttcgccttacccgcatcaagcttctcaagccaacagatacccttgtgcttggccaagtttatagactaatctcagctcaagaggttatgaagggtctttgggcaaagaaacaagcaaagatgaagagaaacttgtcagattcagcacaaaagccaaatctgatgaaggaaaggacagacaaatcagcaagggggtctgaaccggaggacaaccaggaaaccaaagctgaaagacacgggtcaaggacagcatcaactaataatgcttctagtgccacagctaagtcaagaacatggcaaccctctttacaaagcatctcagaggcagccagctgatctgtgttttcaatctttaccacatgtgatgtgagggacagaggagcattgagagacactcaaaccaccaaatacaaattaatcccgctccatgattgcttagatctgtggaaattaaaattaaattaaatatatagtacattcagggaagccagaaaaaaaacttaagagagatgaaaacattcccttcggttgaacaactgggttcatgcataataattgtgtatagtaaaggttgacatattgaacattaattaatgtattcagatattactttttagcgaaatcagtcttcatcatcaaaaaaaaaaaaaaa

SEQ ID NO: 23226 - DNA, 240 bp, Glycine max
  Clone ID: PAT_MRT3847_120976C.1
attatatactcatgcttcttattgctgttttaccaatcactgcttagttcaaaccaaggatggacttccgacggcgatgtttacaggcatgtttcgccggaagatggtggggccccgaatttacacgtgcttgctgttgatgacagcacacctgcaccggaaggtgatcgaccgggtgctcaaaatgtggcctcgccaagcgacatcgggggaaactggaaggaggtctctacagtatct

SEQ ID NO: 23227 - DNA, 1147 bp, Glycine max
  Clone ID: PAT_MRT3847_120977C.1
aataaaattctgtattttttttttatcattatcagacacaaacaaaatatgaacctaatatctgtacataaaaaaggataaacaatataattcatcacttctaaaaaaattaccaggagatcatatatcaaagaaaaactaaaaagaaaggggggaaattaaaaaggaagaatcaacatctgagttgatcaaagatacttgtaaaatagcaaaatttcatcatgcaagctataatcatgaacaacaatatttagcttgtttagtagcagtaacttcatcagctatatgaatctccttcccactaggaagatttaatgctgtgccattcattttggtttccaaacttttctggcttatgatgtcatgaatcttagtgatcatttccaagaatgcttcatcaacattcagattctgcaaagcagaggtttccatgaagcataactcttctgtttctgcaaacacttttccttcttctctctcaacttgccttgattgatccaaatcagatttgtttcccaccaaaacaaccaccatgtcttctcctccaaactctctcaactcatgaagccattttcctacattcacaaaagttgctctcttggttatgtcatacactagcattgcccccaaggctcctctgtagtatgagcttgtgatagctctaaacctctcttggccggcagtgtcccatatttgtgctttgatgagcttgtccctgaccttgatgtttctgtatgcaaattccacacctatggttggcttggaatccaacctgaattcatcttttgcaaaccttgatatcaaatttgacttcccaactcctgagtccccaattagaacagccttgaacaagtaatcacactgctcatcaaatgcatcagccacagccatatatgaaaattccaatgactcttaatttgtctctcaacccttcttcctccctttcaaagaggagagtcaaattaatcaaaaagaaacaaagctattgagaaggtgaggtgagaaagaattgataaactcttgaagccaaataatattttggataattaatgaaactatatagcactgacaagggagaaggctgttaataaacggggtgcagagtcatgtcatgatcatatatttatacacggttagagagaaaaat

SEQ ID NO: 23228 - DNA, 272 bp, Glycine max
  Clone ID: PAT_MRT3847_120978C.1
atgctagtctacgttatcagttatgtatgtttctgtgtgtgttccatatatcttgcaaggcaactgcaagctggcagatcgacatatcttttctttttttcatggtactgcattgtacgtgtttgtttgaaaaaaataatatatgcatgcgtgttgtgttaaaaaaaaaaaaaaaaaaatccaaaaaaaaaaaaaaaaaaaaaaaaaaaaaaaaaaaaaaaaaaaaaaaggggggggcccccctttttgttccccccccccggggttttttt

SEQ ID NO: 23229 - DNA, 1177 bp, Glycine max
  Clone ID: PAT_MRT3847_120979C.1
ctgacgctaggcggcacgccattagcccgctccttaccttcattactcgcctcccctcccctgctgggaagactcaatatgtcaaatgggcatggcaagaaggggttggcttaagctcatctaacgattctttcttctttgatccatcaatccgtagttatttcaagaattatgtcaagacaattttgacaaggaagaatactataactggaattgaatatagaaatgaccccaccatttttggttgggaattgattaacgaacctcggtgcctaactgatccttctggtgatactctccaagattggatagaggaaatgtcagcttttgtcaaattgattgacaagcgccatcttgtgactgttggacttgaaggtttctatggtcctaatgatccgaaaagattgactgtgaaccctgaggattgggcatctagacttggatctgactttataaggaactccaaaatctcaaatattgacttcacctctgtccatatctatcctgatcactggtttcatcatcaggtatttgaagactacatgaagtttgtctccaagtggatgctttcccacatcgaagatggtgataagatattgaacaagccagtcttgttctcggagtatggattgtcagacataaattttacgatgcctgaacgaaaaacaatgtacaaaacaattttagacataagctacaaatctgcaaagagaaacaggtctggagcaggtgctctagtatggcaattcttagttggaggaatgcaggagtttactgatgattttgggatcatcccatgggaaaagacacctatcccttcactatttgttgaacaatcatgcagattgaccaaggtcaagggatggcctcacaaggacacaagttttaaacaattttgttaggaaaagatgtggaaataaaaagcccttgatttgaatggggggagatatatgggttcttttgtggtttaagactgctgaataggtgcatgactagttttgtacaatatgctcttgttttcatcaccaatgataaagttggttagaggcgtatatatagtgtggtaacatagattagatattactataaacagttattttgaatttaaagattgtaatccacatgaacaaaatcaaccatgaagtcttttaagatgagagttgaagttcgctctgcc

SEQ ID NO: 23230 - DNA, 347 bp, Glycine max
  Clone ID: PAT_MRT3847_12097C.1
accacgcgtgcgaccacgcgtccgtgcatgcgtacgaactgataagggtataccaaaggcacagaccgggagagtgcatgaagataaatgctggcaaccaacacatgacgaaacatcaatcggtaacaaaacagtggatgagagtagtcgagaggagagacagactaagcacgacttacagagaagagtaaggtatacgggaaggatggactaaatgatactgacgagactgcagacctaaacaaccatgatactgtgtgacaggaagagatgcctgcatctaacagcgaggagaaactagggattgaggatgatggcaaattatgatcaagaatgatcaaaacaaa

SEQ ID NO: 23231 - DNA, 435 bp, Glycine max
  unsure (1)..(435): unsure at all n locations
  Clone ID: PAT_MRT3847_120980C.1
tcttacanacctttntcntntaaacacttttttacactacgcccttctcccatatcacccgacctttttttaaaagcctacatccgcctcttcatacctacacccaccaaccataactctttctcttcactcaaaaaaacttcctccatacctttaattaccaaaacccttccattctacccttttcacttcttcaatccaccccactctataacttctaattaacaccctatcatactccactcttaattactcacttttatcctcattcaccaacactaaatcctttattttctctcctatcatttcaaaacattttctttttcataacttcaaccctcaaacccttaatcctacatccccacccatctattattctaaaaaaccctttaaattctaatccacaacacattctcatcacctctctcatccatt

SEQ ID NO: 23232 - DNA, 578 bp, Glycine max
  unsure (1)..(578): unsure at all n locations
  Clone ID: PAT_MRT3847_120981C.1
gctggtacanngcctgcaggntacccccgtccgcggggcgcctgaaagcgaaatctcactgccccgaaccaaactcaaaaccctaacaaaccaaaaacagttgctgccatattcaccaatggctttctccaaggcaatgtttctcgccgccgtaatgtcggtgctcgtcgccgtcatctccgccgccgaagctccagctccgagccctacgtctcccgccgccgccgtttcgccgtccttcgtcgccggtgttctcgccgccggagccgctcttgcgttcggatctgctctgcggatctgaacgtagctcatggattttctcgtttacatgcgtggatttttagtagaagcggagatttgagcagcattagtatataactctctctctctctctccctccctctctctctatatatattgatattgctatgtagagattattactacatatgttgatttctggatctatattgcgtttatggtttgagtagtattattgtgagatcattgtttctagtacataattgatttctttatattcgcaatggagattcgtgcttagtttttgttttagcttg

SEQ ID NO: 23233 - DNA, 153 bp, Glycine max
  Clone ID: PAT_MRT3847_120982C.1
gaacaaagggggaacacaattaaccaggaacaatagttaattatatataaacttcacaaaatgatgacaagcaggagaaacaataatgggacaaaacacctaaacacaaaccaaatcggactataaaggagattacagacctcgagccgaatc

SEQ ID NO: 23234 - DNA, 264 bp, Glycine max
  Clone ID: PAT_MRT3847_120983C.1
gtttgagcaggattctaatgcccagattgggttctgctggggcattggcgttgatggttttgtagttatttttggaattctgggcgagcctgcaaaatcaagttgtgctaatatcatttgcaccatttccaactggttatgtaaatttgcaccatttctaagtttgtgctatagggtagtataaggtatctgctctagatcctgctttttgtatctagcactctcaaatttgtgtcggaaatgtgcaatttagagtacttatta

SEQ ID NO: 23235 - DNA, 777 bp, Glycine max
  Clone ID: PAT_MRT3847_120984C.1
cggtccgtaatttaacacaaaaaattaaagttcatcacgcgtccgtacggctgcgagaagcgacagaatgggagtgtaagataacacaaaaaaggttcatagcatcctctgcaaattaatccagttactgttgaagatcgagaatgaagcttgtggtgattgcactactagtgttgatgctggcaagctattctatggctacaaataggatgaaattggtgccaaaattggatgagagatcagaactgggtaatgaatctgatgataatgatcaccaccaaatccctcgaaagaagtatggaaaacctggatctgtcgaacgtacagtgagtgaggagtataatcaccattacatccctcgcaaggactatggcacacctggccagggtggaaattaaatattaaatgtttatttagtactaatgtattaaggatatatatatgcatcataaagctgtatatatgcacaagtgttgcagtgttggatgtgattgagtaatgaatgctagctgagtgtgtgttggtaagatatttatctatgtaagcaattactgagactattatttatcaacttaagtcccggaactacgtttcaccacgtacgatgtacgtgtccacatatattggtatgtaagaatgtgtgagttgtaccctaatgctatgtttgtgattctacatatgtgtgtgtgtgtgtcgcaatcacacaatcggatagttgagttaatagtaaataaaaacaagagttggtttgatcaattctatatttttcggtcttcc

SEQ ID NO: 23236 - DNA, 237 bp, Glycine max
  Clone ID: PAT_MRT3847_120985C.1
tcggcacgaggagaactagtctcgagttttttttttttttttttttttacaataaattgaattctaaatgtcagtccaacctctatctagaggagtagaggtgtaagtgttgggctatatcctgatttttgtcatcgcacagatattgtgaactagttggtctttcgcagtgaccaagctaattagacacataatggtagagttttaaagccttggactaaaaaaaaaaaaaaaaaa

SEQ ID NO: 23237 - DNA, 218 bp, Glycine max
  Clone ID: PAT_MRT3847_120986C.1
ggtatgttacaaacgattcactcactctcactctcacaggcaatttgacgcactcacgctcacacgcagttggtgtcgtagtgggaagcgcacggactcaacgcgaacagttcgggtaaatggtcaaaccggggtagcaggtctgcctctacgaggtgatgctggagttcatggagaagggctccagctccgccgacagcgaggagctgaccgtggac

SEQ ID NO: 23238 - DNA, 463 bp, Glycine max
  Clone ID: PAT_MRT3847_120987C.1
tcgatctatctctcacggatgtactaccgcctgcttggggggggtgggggtgaggtgttggcgggggccggtgtgcgggttatagacgactgaaaacccacaagcaccgccaggatgcacttgaaattttggcccctaaacagcacggcgagtaaggagactagtggaaaatgcataacaggcaggaaagattgagagtagaatggataaggccgggtataaccccatttaggtgttgggtatagtaccatgcactcaacagtgaaataactcagtgcgctacttagccatggcaatcagcgaataatactcccgctgacttgtattagcaccagctaaagactacggttagcaactcaagtgaggctatccaaagcatccgcctgaatttgagctggcctagttgtatgccgtactttggatacgcttaagatagctacattggacagtccataacatttcc

SEQ ID NO: 23239 - DNA, 222 bp, Glycine max
  Clone ID: PAT_MRT3847_120988C.1
cattcttaatgctgctaccaatccttcctcataaccaaccttactttcacaatttaaacattccaaacctagcaacgtaaccaatatcaattgtatccaacactatcaaatctatcccaaaggcaccaaaaaacagcccttcctttatcaaaaatgcatttcattcccttgctgtttgccctttaccttcaatgaaaaactcaaaaaccaccccacatccat

SEQ ID NO: 23240 - DNA, 308 bp, Glycine max
  Clone ID: PAT_MRT3847_120989C.1
agaaaaaaaatggggggaacgccacccgccccaataatctaacaataaccccaaattgccccctaatgaaccaaaaaattccggggggacccgaaaacccaggccccaaaaaaagccaaaaatgccccaattaccccaagggccccccaaaccgggcaccaagttattcacctttttgaacccccgagcagcccaaaccaaaaattgcgggaaaaaaaccttttttcaccccaaaggtttagggggggaaaaacccaaaagtggggccccaaaaaacccacaccccccctttgaaaaccgaatttttc

SEQ ID NO: 23241 - DNA, 184 bp, Glycine max
  Clone ID: PAT_MRT3847_12098C.1
gcacgagaattagtcatgtttgtttcttgcttttttagcctacatatcatatcatcgacgaactattagtaggggaagtgtaagattttgtgagcaagatgtgaaccggagttgtgaggctttaatatcaaggttttaaattattgctttgaataaccactggtttttaattgctctaaaaaaa

SEQ ID NO: 23242 - DNA, 520 bp, Glycine max
  Clone ID: PAT_MRT3847_120990C.1
ggttgcggtaccggttcgtaattggttcccggagctacctgctcactaggtcgcggtcgtcctttttttttaaactaattgttattgttatacaaaatatctgcccttggaaacaaaacctccccttatatttcccaagaatgcatgcaccttttctagttcaaatacagtaataaactccctcgatctcatccacaaaatagtttataaaggcaaggtatagggttaatagcaaattcacgtgaagtggcaaaaaaatctgcttgtccgtagacagggatcgatgtctagaactacatggtccgcttagcacattcgaatactaagctggcctttatgttctgtaaggtccacatgttttgagcccctctgccatcgccggagggagagatggtggagaggctttttcctttagcttgggatggacagagtgtccgagcacccaccttgctgggagaccgagctggtttagacacaggtggggaagaaagacgtgtaactgtgggggtccacgagggtg

SEQ ID NO: 23243 - DNA, 758 bp, Glycine max
  unsure (1)..(758): unsure at all n locations
  Clone ID: PAT_MRT3847_120991C.1
ggctcgagtgcgggtggccttcccttggttgattggattttggaggagttggtgcggcggcaatctagattccagggggttcgttcttccatgaatccatctcccagctcttctagtctttcttccaccctcacatccctcaacaacctaatcactctctcaaaccatgttctctccctcacaccatcaccgccaaccctaaactccaaccttatacaatgccctttcaatccccaccacctccttccccctccctccctcttccttcaccacctccgttgcccttcctctcctcgccctctccccgatctaaacccctctccctctctcacttaccccaaaaccctccacaattctccctccgatcaactctctttctatcttgattctctctccaacttcttctaccgcgattcccccgccgtcgttgctttctcccatgccgactccctcaccagaaccgcctccctcacccttccctcgtttttatctctccaatgcgccgacacatacactcactccatccccgagagcgcttctttccacgcgcccattcttccctctcagtacttctccatcgcgcgtgaactcgactgctggaacgattttcccgctacctactccagttccgttcttcgtgcaattttaggtctcggaattgccaacgaccgtgacttaacggactggatgatagcgaattcgcctcgatacggcgtcgttattgatacctctatgcagcaccatatatntttactatg

SEQ ID NO: 23244 - DNA, 368 bp, Glycine max
  Clone ID: PAT_MRT3847_120992C.1
cgaagacgcacaaccatgtgaaccttgctttttttatatctctataactgactgatggggttcttacacagacggagggctcctattatgagccgcatgcctatcatgcaaaacctggttgtgatgaaactgctattgatattctcattcaaatttattccaatgaaaatgatgcataaccaacacaaacagaaggaatgatgagaatatattttcttaaaacgatggaagatcatcaatataatagcaagtgcacaatttagtataattgcctagcatcaagtgaggacgacgtcatgcatatcactactccaagaagtattggtaattgtattacttcttcatctatatatgagattgatcttgct

SEQ ID NO: 23245 - DNA, 335 bp, Glycine max
  unsure (1)..(335): unsure at all n locations
  Clone ID: PAT_MRT3847_120993C.1
gnacncgtacgtaagctcgganttcggcnccnagngcccntnagncngcgcgtnntgnttcgtgnngcagncacatgggtcggacntggaanagcttcgtncgcganctnagnncggccngcngngcgtcgcgnancngccgcagntgcgncgcnnanggnannngatcgnancgccannctnnnacgtgnggaagccnatcngncgngagnagccctggtngagcgncnccnnntngagtcngagcatnnggnggnngcngngtttnagncnnngancnnngncntntnntcngangnctngtgncncgnacnggnactacgtcgtannnnann

SEQ ID NO: 23246 - DNA, 317 bp, Glycine max
  unsure (1)..(317): unsure at all n locations
  Clone ID: PAT_MRT3847_120994C.1
cctgtctcatctacccataatcttgnatattcactactcataaaaatatcgaaacatttttacaaccttcaccccccncctaacttatgtcattctactttttacactactttttctcatcattaaatatatattaatgttctttttttcatttcatattaactattaaaaacttttatttatataactttatcacatttcatattatttcaactaatctttaattcattttctcattttatatatccatcttatctacacattaatctccttctaccttttacccaaaatatattactcattcaaatattcaaact

SEQ ID NO: 23247 - DNA, 442 bp, Glycine max
  Clone ID: PAT_MRT3847_120995C.1
ccacacgcgtccggttttttcttaactgaaattttgccaaaatgggcaccggattggggtcctttcaacatggggggatccacacgcttggcaaaaaatccggccccttattgcccgtttggttcgggtggggctccgtgggggggggctcgtccgtggaaatcgccagggccgtcctaaaaacccacgggtccaccttggtcggtgggccgaagttcggggggggcaatatcacacctttcaatgactgggacataacttggtcccggacgggcccatactgcttccgggcctgttgatggggcttaagggatttattcatcgttaaacccctccatgattccgaatccattggaaaccaggagcttggtggctctttaaacgaactttttatttccgcaaacaaaccagtttttttatatgaccacttttccagcttttg

SEQ ID NO: 23248 - DNA, 151 bp, Glycine max
  Clone ID: PAT_MRT3847_120996C.1
ctgagcgccaattaaaagaaccccaacctaccgggacggcaataacacgatccgtgcaaaatccttcggagaaaaatttccctccaacaaaaagagcgggaggggcgcctgcaaaacccccaatccccccacctaagactgggaaccctaa

SEQ ID NO: 23249 - DNA, 481 bp, Glycine max
  Clone ID: PAT_MRT3847_120997C.1
tccaaggaaggtttcccgtcatcactgtatgacgtcctcctgtctttggggggggggggggggggggggggtaaaccagaggggaggatgggtaagtgcggtggatagaagaaggggaagccaaaaataaggaggggtggggcctacaagcgagtaagagatgtgtgcatatagggggcgcgcagttataaggtgggttgggcgagtagacgaaagaaaagcgcgatccctgcaagtggtaggcgagataacgtttcggaagatagccccttaagagggtattataagaccttgctatggcgatgagcggatacggaggagggcgtaggttaaagcgtgtggagaggttatgtgggctgggggccgtataccgtgagcttagcgaggacctttggccaaagtgggcaccgagatggcaataattagaacatagccactattaagcagggaatggtaaagaggggggaagatgcaattgaag

SEQ ID NO: 23250 - DNA, 287 bp, Glycine max
  Clone ID: PAT_MRT3847_120998C.1
aggaaaaaaccaaaaataccctaacggggccaacttaaacaaagttaataaaccggggggaactatccaatccgggaagaaatacaagctttttgacaaaaacagagagaactcttaggaaaaaaaaaaaatttggtaaatgcggtcggattaagcccagggccccaaaaaagggtagttaaagggcaaacaaaggggttaacttggtggggtggtacacggccctaggccgcttctttgggcccaaaaaacacgggggggaaataacaccaatgctaatcaggaaa

SEQ ID NO: 23251 - DNA, 374 bp, Glycine max
  Clone ID: PAT_MRT3847_120999C.1
gacattgtgtttagtggaggacacatgaatagagctaggcaataacattcaggggctccgaaaagggggagaatggaggattgccttgagggtccacacttagccaatcatgaaacacagctccaaactcgaaggtggaggacacatgaacagcgctaggtaataacattcatggggctccgaaaaagggggagaatggaggattgccttgagggtccgcacttaggcaatcatgaaacatagctccaaactcgaaggtggaggacacatgaacagcgttcggcaataacattcatggggctccgaaaaaagggggttggagagacctaacggtgcaccgggtttttccacctgaatggcaaacatgctttttg

SEQ ID NO: 23252 - DNA, 255 bp, Glycine max
  Clone ID: PAT_MRT3847_12099C.1
agagtccgtaagatgcaattttaccttttcagatttatcacgaggttaagctcaagtggttcagatcatgtcgaagccccaagaccaaatcatcgcaaggcctgttttcgtatgaatacctcttaaatttgaagaatataattttgtgaacgaaatttactcttgcacaagaggggaataaagctgatctaggtggtagcaggaatgacaaagttacaacacagaaaaccccttccttcaaagagggatggatgg

SEQ ID NO: 23253 - DNA, 867 bp, Glycine max
  Clone ID: PAT_MRT3847_1209C.1
tgttttattttacatctctctctctctctctatatatatatatataatcaacaccatccactactttctcacgcgccattaacaaagatatggtacaaacaaagaagttcagaggagttaggcaacgccagtggggctcctgggtgtcagaaattcgccaccctttactgaagagaagggtgtggctagggacatttgagacagctgaggcagcagcaagggcatatgaccaagcagccattttgatgaatggtcagaatgcaaagaccaatttccccacctcaaagaaccaagctgaagctgatgacaacaacaacactgacactttcttatctccaaaagctctttcagaacttctcagcacaaagctgagaaagtactgcaaagaccctgctccttccctcacttgtctgaggctagatgctgataattcccacattggagtgtggcagaaaggggcaggaccacattctggctccaactgggtcatgaggttagagcttggaaagaaacaaattaccgaggagggtagtgagtcaacggagtcaccacaaagtagtactaatggtgctactgaaaataatgaagtagaagaggaggatagagtggctttgcagatgattgaagaactacttaattggaactagaagaagaagaaaaaaaaaagggaaccttaatccgtgtcatatatagttcttgaatagtagtccttttttcatgctatccttttcaattcgtttacttttgtgctttctgtaaaaaaaatgtttgtcaaagtgctgatatctatatgatgatggccagtttgatagttacttatattatacactttttaagatatattgtgattgatggtaattatgcatc

SEQ ID NO: 23254 - DNA, 414 bp, Glycine max
  Clone ID: PAT_MRT3847_120C.1
tggcttggaacctttgggctgatttatgtgcttgcatggtctgagaagatgatagaaggggactacaagaagaagaagaaaagtaagcaaaaaggccctaagccccaatttacccgccccgtcccactccccctatcccctagacttccccctctctaacctcgagtagaaaatccacacttccgctcgaggccaatcccccctactggcaacttttctttctttcatggactgcgctcccctccctttctaccataccttcccaaagcctaaattatcttcttaattgtatttccccctccgcaggatataatagataataattagagtaagaagaattagcccccgcccgcgcgctcaccctagtcgttaaacacggacaggagtgggtaaacattagtgcccgggaatcgg

SEQ ID NO: 23255 - DNA, 233 bp, Glycine max
  Clone ID: PAT_MRT3847_121000C.1
ccttggtatagcgcagaggcccatccaaggttacacatgttcctgccccggcagaacagctacacttctaccgagaaatgcgcgaaacgcagcgttggctccaacagatgatacacgagcgctcgttggatccagaggatccccgaggctgatcagtgtcgatcaacgacctcctcgtctgagacgatgtcccggcttgaacagcgagtcaagcgacacaatagcaagggtag

SEQ ID NO: 23256 - DNA, 798 bp, Glycine max
  unsure (1)..(798): unsure at all n locations
  Clone ID: PAT_MRT3847_121001C.1
ggcaccaccccgctcctccctccgttgttctccgtccgaaaaacggtgttcctcgacctcgacgaaacgctcgtgcactcgcacccctcgccgccgggggagcgcttcnacttcgtcgtccggccggtcatcgacggcgagcccatggatttctacgtcctgaagcgccccggcgtcgacgagttcctcgagtccctcgccgccaagtacgaggttgtcgttttcaccgcggcgcttaaggagtacgcctccatggtcctggaccggctcgaccggaaccggttcatctcgcaccggctctaccgcgactcgtgccgaaacattgacgggaagctcgtgaaggaccttaacgaaacgggtcgcgacctcaaacgggtcgttatcgtcgacgataacccgaattcgttcgcgaaccaacccgagaacgcgattctgataaggcccttcgtggacgatattctcgaccgggagctttggaaattgagaagcttttttaatgggtcggattgctgtgaatgtgatgatatgagggatgctgttaagcactacgtcactgtgcagcatcgacgttagattgttagattctttttattattatttttttcatgatttatgtctttacttcccctcgtgagttgagaaatcaacaatgagttgtttgttcaatgcctggttgtgagtagggagggaaagtgctgcttattactaattctttagattgaataatcaactttgatttaattgatgtatcagaaaaaaaaaaaaaaaaaaaagatagcacacttccattcattttcc

SEQ ID NO: 23257 - DNA, 1132 bp, Glycine max
  Clone ID: PAT_MRT3847_121002C.1
cccacgcgtccagtgaattagagaaaccaaacctgaatgccgcaccgttcaataatccattcttgaaacaatggctgaggaacatcttcgccctactacgctacttctttttctcgatcttcttccataatcaatcatctcatcctccgcagcattgtcatcgttgttccgctttcgcgttgttgcggttggttgcgatgggcgaggtggggaagatactgtacatagtggtggtcgaggactccgaaaagaaagagtcctttcgctactcgcgtcccgttctgcagagcacgctccagctcatgggatgcaaagcgcgtcacgccttcaagatcagccaaagagtttttgaacaaacaaggaaagagaattctactgatattttgaagctggaagtagaggctttatcaggttttgatgctttcaagaagaattttgtgaagaaagatggtaggagtgtaccatttgagttgtacaaaaggcgcacatctgcatttgttcggagagaaacttttctagatattgcctgtgatgctctggcagagtacaagtatgtgggtcctaaccagagagcagacttggtattagcctgcaggatccgtgaaaggaaagagtcggtgacagtgttactatgtggcactagtggctgcggcaaatctacattgtctgcattgctgggaagtaggttgggaatcacgacagtggtatcgaccgattctattcggcacatgatgagaagttttgctaatgagaaagaaaaccccttgttgtgggcttctacgtaccatgcaggggagtgtttggaccctgttgctgttgcagaagcaaaggctagaaggaaagcaaaaaagctggctggtgtgtcacattcagtttccaaggaagatgtaactgagggtcacaattctagcaaatctgatgttaggacgttggagatgagctctggtcctactgaactgctaagtccaaaacaaatggctattgaaggattcaaggcacagagtgagatggtgattgacagtcttgataggttaatcactgcatgggaagaacgaaaagagtctgttgtcgtggagggagttcatttgagcctcaacttttgtatggggctcatgaaagaacatccttcaat

SEQ ID NO: 23258 - DNA, 2296 bp, Glycine max
  Clone ID: PAT_MRT3847_121003C.1
ctcgtgctttggtctaagagtttctttatttggggggtgtactataattcaaccataacatacccatgtgctcagttctcaagaagactattgttttctctgaaaaagccatagatgggtattaaggaaatactctttcgtgggagctctgaatattaacagagcatcatcggcagatggggtctgaaggtcctgcagcagctgtgacaggtcatgtaacaggtttcaagaaattccatggagtttctgagtatacaacggagacaattgtcaatactgaaatcttagattttcttgcaagattatgtcaagaccctttcttgcctcctctcattaggataactggctttgccaaatttgcaattttttttttgggttcagttacatggggtgctctttttaccttctctaatttgttttccttgtaaaaagccttgaaatttgatggagtatattattgattgctattactctatgcaattcatcaaaatagttttggattgtgagatgatttctatgcatatgatccacctcataggagaatagttaaatttttgtgccacgttttttcacttgccgctcgaggacgacattgacagcggctcctacctttacttttgttattttggaattggtagaaatgttttcttctttctcttttctcttctaaatctaattcgtatcttcgccagttaatagaaactcaactttgagtagataatactgctggatgtctcgtctctaattattgtatttggaaaatagttttgagttgaggatctaatcattaccagatttaatatatttggcaaatggggtctgaaggtcctacgacaccgacaacaacaattcatgtgacaggatttaagaaattccatggagtttcagagaatccaacagaaacaattgccaataatttgacggagtacatgaataagaagggtttgccaaagggtttagttattgggagctgcagcattcttgagactgctggtcaaggagcacttgttccactgtaccagagattacaatccgccgttattgccaaggacactgaatcttcaaattccaatagaattatttggctgcattttggggttaacagtggtgcaacaaggtttgctataagagaatcaagctgtcaatgaggctaattttcgatgccctgatgaaatgggatggaagccccagaaagtccccattgttccttcggatggtggaatttcgcgaacaagggagactacacttcctgttgtggagatcaccaaagccttgacagagaagggatatgaagttatggtatcagatgatgcaggcaggtttgtgtgcaattacgtttactatcattcccttcgctttgccgagcaaaacgggatcaaatcccttttcgtgcacgtgccgctcttcgtgacaataaatgaagagactcaaatgcaattcgcagcttccttgttagaggtgcttgcctctatacctcagtagtaccattacacttggtctcagaccctcaaaagtgggagctcctatatttattctggtgtgattatgcttatgaaagtggatgatggtatcttgaatgagatagttataataaaaatattgtatttaaatggaaacggtttaatgaaaatggcatatgttgtagagggcatttgctctcattggtaaatgtttctgattaaaggttccagcacattgtgatgacagtttgaaatcttcaatgttaaccttgtgaataaattgtcattttctttataaatctgtagtgtaaccttgtgaatccttgttagttttccttatccttaagtctgttcttatttttcgttgtaacttggttatgaatgaattacgtcgatacacgtgtccgagtactaatgattcccaaagtggtttttcggctagatgctcaatggactgatgaagccattaacagttcctattagtagagttctatcattcagatcactaactatttcctctgtttggggatgttcttgggtaggtttgctgtgacagtgtgttgagcttaagtgaaataattaaattagaattatatataacatagcatgttgacttaaagtaaaaaaaaaaaaaaaaaaaactcaagactagttctctctctctctctctaagtgttttctcagttagattctcaatatagactgatgaagctattcacagttctggtagttgaattttatcactcagattactaactacttcctcgccgtttggggaagttcttgggtagttttttttttatcagttcttcttgttgggtaggtttgctgagaca

SEQ ID NO: 23259 - DNA, 579 bp, Glycine max
  Clone ID: PAT_MRT3847_121004C.1
ccacgcgtccgaccgttcaataatccattcttgaaacaatggctgaggaacatcttcgccctactacgctacttctttttctcgatcttcttccataatcaatcatctcatcctccgcagcattgtcatcgttgttccgctttcgcgttgttgcggttaagttcctttctgtgtggggccgggtcgcatgaatgtcggggaggggacattttcttcttttttgtttttgtttttgttttcttacggaggaagttattttcttcttcttcttttttgttgcatgctataaccgtttttttttttttttgaataatcctttgcaggttggttgcgatgggcgaggtggggaagatactgtacatagtggtggtcgaggactccgaaaagaaagagtcctttcgctactcgcgtcccgttctgcagagcacgctccagctcatgggatgcaaagcgcgtcacgccttcaagatcagccaaagagtttttgaacaaacaaggaaagagaattctactgatattttgaacctggaagtaaaggctttatcaggttttgatgctttcaaaaaaaatttgtgaaaa

SEQ ID NO: 23260 - DNA, 1379 bp, Glycine max
  unsure (1)..(1379): unsure at all n locations
  Clone ID: PAT_MRT3847_121005C.1
nnnnnnnnnnnnnnnnnnnnnnnnnnnnnnnnnnnnnntttttttttttttttttttttttttgggtggggtcaaagaaaaacatcagtgatctaatattctctattataatattattgttcagtgaagattcaactcaaccatgataatttgtacgatcatacaggtggaaatggcaagtctagtaaaagaaagaagccaacacaatcttcagaatccaagtctggttgaactgcaaggaaatgcaaacctccacaagctttcttagcagcttcccaagcttcagcttcactagttgtctcaggagttttcttataggtggaatatatataccgggtagaaattccactagaaagaatcaggcgagcacgagcagtatccgcttccaccgcgcaaacctccaatccatttatcaaagctgccaatgctgtagaattagaagacgcaacagacagtcctgggatcaatgtcttgtcatcaatgtcaagacccaataaatcaagatctagcccagaaccacaaactcctctctcaaaggtcgatatctcctctcgaacagctgagtaaggtaattggacaaatgcccatctttccccataaagaatgtcaggaagttccgtggaaaaaaggattatcaagtgccaaaagaggtttggatccttcttgaaatccaggatgttttttatatacggtctcatagcgctcctctagccatagaattattgacacgcaccgtttactaggaacaggccttatgcgaagctcattacacgcatttgtaataattgtctgcatctgcgacctaaagaagcgaatgtttctgggcaacgggacacccaactggtcactaacggcaacaatagcatccttcagcgtaatgctgttaatgacgttgttcgggaaatacttggtgtactgcaacgatagcgtcttgtcgcacacaactaactcccaaatcttcttccctctgacgtcgagaatgggcctggagcagaagtccagctcccactccgtgatgctctcagggtcagtttctgggtccacgtagctcagttccgcagatgggtcatcatcatcatcttcttcttcttcttcttcttctccgagaaccgcttcgggtgcttctttctgggtgctttcggacaccgaacggggtcggaagtggagcagtttggggtggctgttggagggagtggtgcatggaattgtgatgcgttttgatggagtggtgagtttggaatgtttgaacgttggggattttattctaacagggttgaagcttagagtggccatggctgtggtatggtatggttatggttattctgtgtgtaagtgtgatgactgatgagtgttttgagggagagctcgagccgaactcc

SEQ ID NO: 23261 - DNA, 654 bp, Glycine max
  Clone ID: PAT_MRT3847_121006C.1
ggaagtttagaggagtttcaggaagagtttaaggatatcaatcaagaggaacagatttcaaggcttcataaaatgttggccccacatctcctgcgaagagtgaagaaagatgtcatgaaggagctacctcctaaaaaggagcttattctacgtattgaattgagcagcaaacagaaagaatattataaggcaattttgactcgcaattatcagatattaactcgtcgtggtggtgcacagatttctcttatcaatgttgttatggaactgcgtaagctctgttgtcatccttacatgttagaaggagttgaaccagatattgatgacgcaaaagaagcattcaaacagctgctggaatcatcggggaagttgcaattgctggacaagatgatggtgaagcttagagagcaaggacatagagtcctcatatattcccaatttcagcacatgctggacttgcttgaagattactgtgcgtacaagaattggcagtatgaaaggattgatggcaaggttggtggagctgaaagacaagttcggatagatcgattcaacgccaaaaattcttcaagattttgctttcttctttctactagagcttgggggcctggagataaaccttgcaactgctgacacagctattatatatgatag

SEQ ID NO: 23262 - DNA, 445 bp, Glycine max
  Clone ID: PAT_MRT3847_121007C.1
tttttaaagaaaaacatcagtcatctaatattattgttcaatgaagattcaattattcaaccatgatattttgtaggatcatacaggtggaaatggcaagtctagtaaaagaaagaagccaacacaatcttcagaatccaagtctggttggactgcaatgaaatgcaaacctccacaagcttttttagcagcttcccaagcttcagcttcactagttgtctcaggagttttcttataggtagaatagatataccgagtagaaattccagcagaaagaatcaggcgagcacgaggagcatccgcttccaccggggaaacctccaatccatttatcaaagctgccaatgctgtagcattagaagacgcaacggacagtccagggatcaatgtcttgtcatcaatgtcaagacccaataattcaagatctagcccagaaccacaaact

SEQ ID NO: 23263 - DNA, 694 bp, Glycine max
  Clone ID: PAT_MRT3847_121008C.1
ttccgagttggtatctgcttcatcaagacactcaagagcaacaaagtctaaggctacatatagtgacagagaagcaacaccctcttccgaatcgctatctgcctcatcaagacactcaagagcaacaaagtctaaggctacatatagtgacagagaagcaacaccaatctctcaaaagtagcaggttcaagactatggaagactggaagtagtgagaggaaaaaaaaatcattgtgaatagccagattatgctctcatctggtaatccattaggagaagaaagataataaaggttgatttgaaagttttcctgctatttagtacatcctaatccgcagagagaaaaaccaaattgcttatctttttgtctaaaggctgagaagcccggggaaaacccaaaaggaggtttttcttggatgatagaatatgttgagtgtttggtcttctctgaatcatatacatccttatattcgttagttatattgtcagttttgcagattaaaatgaatggacatggaacaaggatataccaatagatgcctatttaacaagattattatgctagcaatcgatgattcttgaagtagaatgtaatcagtgcacttatatacattgaactgctagtgcccagagaaggggattgcaagttattggttttaaaaaaaaaaaaaaaaaaaaaaaaaaaaaaaaaaaa

SEQ ID NO: 23264 - DNA, 785 bp, Glycine max
  Clone ID: PAT_MRT3847_121009C.1
agagcctaacattaaaccaagcaacgctcggttctcttttctctttcaccatatccattgtcccttaagtctaaggcagagtctcccctctgccttagacacaccaataatttgccaagaaaccgaacccaacccaaccgcaacaacaatggcgttccaggatttcgacatgatcaccgagaggcggagaaacgagcagaggctcaagatgaagaagaagatcctcatcagcgtcgtctccgccgtcctcctcgcgtgcgtcgtaggcgccgcggcattcgtcgttgtccaaagaacaggcactaatgcaaagcacgctaccccaatgccacagaacaccgccacgccgcacgtggatcagaactccaggatggtgaaaatgatctgtggatccgcagaatacaaagaaaaatgcgaaagcacgctcgaagaagccctaaagaaggaccccaaattggctcaacccaaggatcttatcatggtgtcaatgattcttgcggagaaggaggttaccaatgccttcgatggaactgcaaagatgatgggcaatgcgtccgaggaagagaagggtgcgtacgaggattgcaagggtttgttcaaggacgccaaggaagagcttgagctgtcgatcaccgaggttggcgacaacgacgcggacaagctctccacaaagggtgctgaactgaacaactggctcagtgcggttatgtcttaccaacaaacctgcattgatggtttccccgagggaagataaggatgatttcaccagcatgtttactaactct

SEQ ID NO: 23265 - DNA, 415 bp, Glycine max
  Clone ID: PAT_MRT3847_12100C.1
gggaatatataaaatagttccatctccatatcttgggggtttcctaataaagaggcaagacccctgttatacaaatcttttcaaacaaaaaaaaccggtactttatgttgtcatactttactaaaacatcttctcaccaaaattataagcatcctatttcgataaaacatgcctaaggcagataaaacattaacaatatgtgttaaaattttttgcatacaaaaaatactctcatctccattctttctaaataaagtatacaccatgagtttttttgttaatccccgaaagtgtaacttctgttttaccctcacgcgttaatctttttagagggttacattttattacaattcttacaatatttaaccctgaaattttaatattttcttcgagctgacaaaatcatatttttggc

SEQ ID NO: 23266 - DNA, 399 bp, Glycine max
  Clone ID: PAT_MRT3847_121010C.1
ctgcgagaagacgacagaagggctcctctatatataaaaaaatatcagatcaaacaccaactaagaatagtactatttttttttatcgcgaaatagaatgatgtacgaattctagtttgaaaacgaaaagaagaaattggagaattgagaaaagatagttatcaggtcgattgcttgtccattcggattgataatttgttagaggtagtattcgaaaattaaagttgaaaaataaattaagaatttcattaaccaattttcagttaagtaatggtttaacatgagttcatattaatataaagatcttatattcatttgaaaagattttaagtttggtttggcagtttgatttttccgcttgggggtggggagggaagtgaaaatttgatttagtttatg

SEQ ID NO: 23267 - DNA, 978 bp, Glycine max
  Clone ID: PAT_MRT3847_121011C.1
tagctgagggagtgtcatctatggtcctcataaagatgcgggagattgcagaggcatatttggaaacacccgtagagaatgcagtggttactgtgcctgcttatttcaatgactctcaacgtaaagccaccatagatgctggtgctattgcaggcctcaatgttatgcggataatcaatgaacccactgctgcagctattgcatatggccttgacaagagaactgattgtgttgaggagcgaaacattttcatctttgaccttggtggtggtacttttgatgtatctctcctcacaattaaggataaggtctttcaagttaaggctactgcaggaaacactcaccttggaggggaggactttgacaaccgaatggtgaactactttgtacaggaattcaagaggaagaacaaagttgacattagtgggaacccaagagccctaaggaggttgagaagtgcatgcgagagggcaaaaaggatactctcatatgcagtgactaccaacattgaggtagatgctttatttcagggtgttgatttttgctcctcaatcactcgtgcaaagtttgaggaaatcaatatggagctctttgaagagtgtatggaaacagttgataggtgtctttctgatgctaacatggacaagagcagtgtacatgatgttgtccttgttggtggttcttctaggattcccaaagtgcaggagctattgcagggcttcttcgatgggaaggttctgtgcaagagcatcaaccctgacgaggctgttgcttatggtgcagctgtgcaggctgctttgttgagtaaaggcattgtgaatgttccaaacttggtcctattggatattacaccactgtctcttggtgtatcggtacaaggagatctcatgagtgtggtgattcctagaaatactaccattcctgtaaggaggacaaaaacatatgttacaactgaagacaaccaatctgctgtcatga

SEQ ID NO: 23268 - DNA, 404 bp, Glycine max
  Clone ID: PAT_MRT3847_121012C.1
gagacgccatgagttccctacctttcactctttactccccatctgcaaaacagtggacaaatggccatagtagcgttatcctcctcccttcgaggaggacgaaacctcttatgctccattccaccaaagccgtcacccgccaccaccgttttacgacaacccacatccaccaattccaattacaaaatacccccctgcccgaataaaccccaaccacccccaccacagaaccctaaccttaaacaccaccgccgctacaagaaccatcggccagttacacatgacggctgcttaatcggctccgacggcacggaccgcgcctgctttatcggggagtactgcgtgtcattacctgctccccggcgcgccgttccattcccaggtcacctactccaagacgccca

SEQ ID NO: 23269 - DNA, 533 bp, Glycine max
  Clone ID: PAT_MRT3847_121013C.1
gggccccaacatttcaaactaaaatttaaaacaaaaaaaacccggccctttatattacctaaacagaaaagggggaatcaaaacaagaatccataacccaacctttaaaaaaaaaacgaccaaaattaaaaaactcccaaaccccccaacaaagggttttattttttccacaggaaaaaacagggcccggcccaaaaacaaaaaaacccaaaacccccccctttttccttaaaggggaaaaatttgggaacctcggaggggggccacgcccacaaaacttttggggctccaaacgccggggatcccgaaaaagaaagggacaaacgtacctcaccaaaagggcctggagccccttttaactcggggaaaaaacgaacttttgggaaaacccgaaaagggccttgggaaagctttgggaaagggggaaaaacggggagggggggccgccccccttgacgcggaggcccatggcaaccccgggaaaggggttttttccaaacaggaggaggggctcgaaggcctaaaaggggggg

SEQ ID NO: 23270 - DNA, 425 bp, Glycine max
  Clone ID: PAT_MRT3847_121014C.1
agaggaggaaaggctttgttataacttaaaaaacctaacccttttgaggctgaaaacataaatttaaagcttaaggcttaaaaaacaagggccaaaattttttttaccctggcccttgaccgtgccataaaaatcaagggcaaaacccctccccctggaaagtttttaatttgaaatggatcagttccccaaacttgtaaattttcaaaagcggagccggcctcaccattactaaaaaccctagttccccttcctccaagggccaaattaacgggttgcactaaaaaaacttctggtggcttgggcaaagaaaggggaggttgcttttgtggctttacaaaacttggaattaaaaccgaggccaggggaggcaccggaacaggatcccttggtttccccccgggggggggaagaggcaaatcaat

SEQ ID NO: 23271 - DNA, 774 bp, Glycine max
  unsure (1)..(774): unsure at all n locations
  Clone ID: PAT_MRT3847_121015C.1
gaattcgagctcgttaccccgggatcctctagagtcgacctgcagttatggtaagagtggtcacagtgcatccttcccttccagagtcactgtgatccaattcgactgaagtgaacggtggatttgaactctgtaaatttcaggcatcagtaaacatttaaatgcaaagggatggacaatccatgaaaataacaagagaaaagggatttatattgggaaatttgagtatgtatgattgaaaaatgaaatccacagaatggaatcacttgttatctctgtcaataacttggacatactttatagaaaactgagtataattacaggaaaattaggatcagtttcgttagaagaaacattttctatttctatttcttgttttcactaaaaatcacaaaaatgttatattattttcaattatcaaatatttatacaagaaatggtgaatacaacaaaatcacatgataaatgcccaatgaattcctacactagtcataaaaaagacaggattgagaaatagaaccgatgcagatacaaagaatttcatctcaccttatatcttgtattaattcgaaaatgaagagcagacaaaaattattcttttcatcaagacctggcgcaagtctctgtattgtntgacctttattcactggaatctgcaaaagatattaaaaacattatttataggaggaaccataaatttaaataatatctaaaagcatatcaataaaactctanatagaanataccgtaagaaaaaagtatggaagaagaaaa

SEQ ID NO: 23272 - DNA, 220 bp, Glycine max
  Clone ID: PAT_MRT3847_121016C.1
gggagaattgaaatcataaataaccctccgtttttttaacaggccccaataggaaccatgcttccatttatatacccagaggaaaaaaacaggaaccctggaccttatccccccattaacccaaacagaccccttgtgctggctaaaggtcgggaagcgaccacctaaattctacgggtggtggataatacgccctgcgccaactaccatgagatttcat

SEQ ID NO: 23273 - DNA, 632 bp, Glycine max
  unsure (1)..(632): unsure at all n locations
  Clone ID: PAT_MRT3847_121017C.1
acttcacattgtgaggatgacatgattaaaaacaaacacatggttaatcttttcttcatggagatcattgttcagtccacacataactgagacctcaaatgttacaagttaaaacaaaacacataagtgcttctcagaaagaagcatagctacactcattcaaggtgtcactgatggtggtatcagtgtcactggtactttgacttttctcattacattgtatgaatggttcacttgctgggactgacatggaaagatttgtgtttggaattgcacaatgcgctttctgcattttggttgtgactgaagagttaggcaaccgcgcaatggtaactgccggttcatggcttgagagccgcctttttagcacctgtgtgcatgtgtgaggcacagtacttctgacccggaagaacaggactcttgcattgccacttgttaccatgtgttcttcgggacctaccggatgctaccatcatttctccggcaccttccggatgcagcgtctatgttggttccgtcattcagacactgggtggggcaaccacaaactgaaacttgaagccatctcgggggggagaagcttattnnnntagagatgccattagtattagtatcaccnncaatgcnnnntt

SEQ ID NO: 23274 - DNA, 341 bp, Glycine max
  Clone ID: PAT_MRT3847_121018C.1
attttatccaattgaaattttaaaaatgaactgggataaacttaagaattccatttttggaattggataagtaaacaatttaattggatttggccaatggtatcacaaaaaatggagtagtaactcccatttcttatttattattgaattaaccccaccacttgcttttttatctaacatttttttttgattttaaaaattttccggaaaaaaattggatctatttttatatgccaatcaatcctcctacctctggtccctgaggttctgcccttcaaaaaaaatatctgggacgtttccgtccaataaaaggtccgggactacaagaagctttttccccc

SEQ ID NO: 23275 - DNA, 301 bp, Glycine max
  Clone ID: PAT_MRT3847_121019C.1
gattatgaggaatggtgacatctacataactaagaactccagtgcaacccaaatttgctagatatcggaagaggctcgtagttcaacatctatgcccctttcccatacactgtgataacggatagatgatcaatccctcatagaaaactgaacccgaaggactcctaatgtgtgagctagtacagcccttgccaaacattgcctttgtggccgttttacttgcacccccagaagagagtgttccaagtcgagccatggagttagctttttcaagcaccatatgggacttttgagcatgctt

SEQ ID NO: 23276 - DNA, 384 bp, Glycine max
  unsure (1)..(384): unsure at all n locations
  Clone ID: PAT_MRT3847_12101C.1
ccgggncgacccacgcgtgacgcacggcctccataagctacaaaaagacgttttagtgtattttattgcatcacacacacggccacatagggaattctcttgcttttatagcaactttttttgcnttgattactcaaacaacacttagtgttcttaggttattattcttgattgacttcctaaaacattctacttttgnnnnnnaattatttgagctcctatcacaatttccctccaacaccttaatggtttcctttgcattaaaacttcacacttcacaactgacacttattttgttcatttgattcgtttaatattctcaaaaacccatcattgattgaacttgcaaactatactcatcggaactagcttttttggttttct

SEQ ID NO: 23277 - DNA, 277 bp, Glycine max
  Clone ID: PAT_MRT3847_121020C.1
tcgagcctatgttctatgaataacaactgtagatcatattgcctagcacgaatgaagtgtctgttgaaagaacattgctctcttgaacatgacgtttaaagcgtttagtggctttccgtggcacaactaatgcatgtgtaactataatgaacttgatattcatttctcatgagatgagaacatcactacctacaaaaattctgtttgtactttaaacgtgctcaagcttgtagcgcaagtcatcaaatgctgggactaatattctatgcttactatt

SEQ ID NO: 23278 - DNA, 501 bp, Glycine max
  Clone ID: PAT_MRT3847_121021C.1
gccaggcgtccggcacgatatcgaagcccagttagagaccgactcacacaccgacatcgtgatcaacatcatgctacaacgcccctcacatcaatgataccatttctgagatccgaaccttagatggacttgcagatggagctggctctgtggctaggaatcagacgaatggagaggagggtgggggggagagaatcaagtctgagatctagtcggtgatgcattgggcattggattgcactcgcgtgtctctgtttctggttacggcaaagggtatgtatagggatggctagagggaggggaggaatgataatagcaagtatggaggcaactatggaataagagaacagatgcgtgatcgggggcgtgtggatggagtgatgaatgaatctggaggcggggcaagaggcggcacatgaagtgaaagaattgtaggaatgattatagctatggcctttgatgatggctttcatgattgatatgccatctgctatggttttg

SEQ ID NO: 23279 - DNA, 205 bp, Glycine max
  Clone ID: PAT_MRT3847_121022C.1
tcctctagagcggccgctttggggttgttttttttttttttttttttggcatcatgggttatacataggaagccacacctaggccctaagtaaacaggaaaaaagtttacatatttagagaactttatagtgcgagcaaatacctgccttgagctctgtagctgatgctattggagccaggtattcaaggacatatatgggaaaa

SEQ ID NO: 23280 - DNA, 131 bp, Glycine max
  Clone ID: PAT_MRT3847_121023C.1
aataaaatcgggttggtaaaataacatcgtggccttgccttcatattaaattagtaaaattatcctctctcacataaatcaatataataccttagcaacaactgtcaattctatcaccttacttctattat

SEQ ID NO: 23281 - DNA, 248 bp, Glycine max
  Clone ID: PAT_MRT3847_121024C.1
ttgggataggacggttcttcttcggtacgagaggaggattttctcgcacccaaaaccagcatgtgacatcgacaagggctcttcgttgaatttgtttctgcggtaagttcctttcattgtgctgttcgtcgtcaatattatacgagggcggtgatgtgttctcgtcatgccaaatcgcttccagatccttcttttaattctctgaattttcaattatatttttacttaacaattcctctcaagtctca

SEQ ID NO: 23282 - DNA, 1309 bp, Glycine max
  Clone ID: PAT_MRT3847_121025C.1
aatcgattctttaatttttttctctctcgagtgttgagttgttaaatatatatatatatataattcattttcgttgtaattaacctatactcatattctgtatagtttctcttggggcctaccttaattttttgcgcgccgacgcgctatatattcatcaattcatggcgtatagaacttcaagtatcacaagtttgttcctgacattggtgctgttaggcacgatattatgtgatgcacaattgtcttctacgttttatgacagtgcatgccccaatgcacttagcaccataagatctgtcattcgttgtgctgtttctgcggagcgccgcatggctgcttctctcattcgccttcattttcacgattgcttcgttcagggctgtgatgcatcaatattgcttgatgatagctccactatcgagagcgaaaagagtgcacttcacaatgctaactcaataaggggatataacatcatcgaccaagcaaaatctgaggtggagaacagtatgtcccggggttgtgtcatgcgctgacattgtagcagtagcagcacctgatgcatcatttgccgtgggtggtccatcatggactgtgaagcttggacgaagagattctaccactgcaagcaaaagttccgctactagtgaccttccacgattcacagacgatcttgacactcttatctctaaattcaataataagggtctcactgccagagacatggttactctatccggtgcccacacaatcggacaagctcaatgcttcacatttcgtggaaggatatacaataatgcaagtgacattgatgcaggatttgctagcactcgtcaacgtggttgtccatccgtcagtaatgatgataatgataagaaattggctgcactagacttggtcacacccaattcatttgacaacaactacttcaagaatttgattcagaagaagggtcttcttcaatcagaccaagttctgtttagtggaggatctacagattctattgtctccgaatacagcaaaaatcctacaacctttaaatccgacttcgcagctgctatgataaaaatgggagatattgaaccattaactggttcagctggaatgataagaaagatttgcagttctgtcaactaagtttttggacatgtcaatcttcattgtgttgtttaaaatttcttaaattatttcatttccgcctaataggtgtcaaatattcttatcaattcctttaattgtatgtagttcctctctgttccattgatcaataaattgtaagtttccttgcctttcttccatttgttcttga

SEQ ID NO: 23283 - DNA, 439 bp, Glycine max
  Clone ID: PAT_MRT3847_121026C.1
ggctcgagcactatcacattgagtcgttcagcacctggcttactgtacctcacacctcatctgatgcatgtgatgactattgaacacctcacatgttcacttgcgctcttactaatggctggcgtacttgctgtgatgccagcttagggcgatcgacttccttaggcgccacagacatgatcggaacttttacatgagtggctagatataccagccggagtcatcttattagcacagacacacgcgtgaacgccagattactgcccagttttgaactcaaacaacggatctaacggggtttagcactatacgactttgcctagccaagccttaaactgggatagctcacacttcctcagcgatgaacagcaagactgaacttatccattatcacgtgctaccaacatccgttgcaatctcttgctttgacactatcagc

SEQ ID NO: 23284 - DNA, 548 bp, Glycine max
  Clone ID: PAT_MRT3847_121027C.1
ctttttaattcttaaatgttaaattttatcaataaggatgtatttctatatatatatataaggaggacacaaatgaagattaaaaaaactgaattatcaaattttaatagaaagctagaaaggagaactgattagaaacattaaacatattttatagttcattattttattctagagaatccaccttttccaaatgaatttcttttcccaatataaatttttcacccaagtacgattaggatgacaagaacaattgcagcaactactattccaactataacccctgtagacatgctgccacttgtagttgtagagacatgagtgacagatatagctgatataagagggccatatgggataaaaattgtcccttttccagcccaataaaatcggattattaaagagttattccttacatgagcaggaaatgaccttgtaatattctttccaactcctcctgcttcatttgcaaaattgaaatcctttatcacctgcacttcctgaatgtaaacataaaatatacccccccctaagctgttatatgtgtt

SEQ ID NO: 23285 - DNA, 622 bp, Glycine max
  Clone ID: PAT_MRT3847_121028C.1
ggcagttgtcggttatgccctttatttaataagccttggattaatcttcaaccaggacaaaaaagtgagaaaggttgtaggttcagcatctaagtttcgaaaaagaaattggctttgcaatgactggactaggtgataacttatacgtgattggaggcttcattggaccagatagatggaattgggacattaagccattatccgaagttgatgttctcccacttggaagtgaaagaccaacttggcgccaagcagctcggatgacacggtgtcatggtactattcttggttgtacgctgctgagaatttaggttttcactttctaggttctagtgtaatttgtgctcgtgggatttggatcgcttcaactagacaaagaatcagttgttcaatggcttccctgttttgtatgtaagctataacatttgtccttgtttttatgtttatcacatgcggtaaagaggtgagtttccgtatctgttctgtttgtagctaaacagttaaggatcaccactaacaagccaacaaattggtgctattcctattccccccttgaaaatttatccctttgccaggaaaaatcaactttatttagctattcatctatttattttcttggttt

SEQ ID NO: 23286 - DNA, 243 bp, Glycine max
  Clone ID: PAT_MRT3847_121029C.1
ggctcgagagggagacaacatgattgagatttcctcaaacttctgctgtgccagggggaccactgtacttgatgcacgataccagattaagtactgactgaagcattgtgacagcaacgctatgcgttgacacttataatgcgactacattggatgcattgcgactgagccacggtgacccgttgagacccggatagtccattctggaagggacatgaccgaataccatactggacatagaac

SEQ ID NO: 23287 - DNA, 571 bp, Glycine max
  Clone ID: PAT_MRT3847_12102C.1
catctaccatcctatcatttattttacccgcctaaacatgaagctattctagttttctctagcatgtgttttcgtttttgcccttctagcttattccctggtttaatcagctatcgtgaatacacattttcagagttcaaaacacgactctcaaacgttgttgcacggagcaagggattgctacagctaatgcgactatgcccagagccaacgataaacgtccaccaaggtggcactgtccttgcccatgtatcgaacgagggaccgtatgatatcactcttcattggcatggagtgctacagctctgctaaacttgagcggacggccctgaatatataacggactgtacaatgaaaccctgaagcaagttcacatctaaattgaacgtgacgcaacatgaaggaacaggatggtggcatgctcatgcgttatatatacgagcaacatgtcatggtgctatcatgattaagcctagctgacggctgtttccatttgctaaaccgtacaagcgaattcctcttatgttacgagatcggtataatgctagagcagaggatactactactgaag

SEQ ID NO: 23288 - DNA, 1672 bp, Glycine max
  Clone ID: PAT_MRT3847_121030C.1
gtacgcttctggcttctcgcgcacctatcttccctcgccgtaggaatgagagcacgggacaccaaattttgcaacttggtttccaattgcgtgcacccatgtcctcttttctctccttatcactctctgcgccctccctccacgattcttccttcctccatggaacaaagctctttcccttttctcgaagagtggcaccacgccgcttcaactcttcctctgccaagtgctccctcgaccacatccccaaacagttcagaaaggaaaatctcaaagatggattgatggaaaactacaagaatgcacctcaatctctatatggcctttctccttcacaaatggacatgttcatgacagaagataatcctatccgtcagcaatctgaaagagttacagaggaaagcatctcgtctgccaagaattatatggataatggtggaatgtggagtctatctggcatgggaaaaagtgatgcttcaaaatacagcatgagtgttagtatgtatcgaggaggtaggggaactggaaggccaaaaactgctccaccagatctgccttctttgctcttggatgctcgaatatgctatctgggtatgccgattgtaccagctgtgacagaacttattgttgctcaatttatgtggttggattatgataaccctagcaaacctatttacctgtatattaattcatctggaactctgaatgagaagaatgagaccgtgggatcagaaactgaggcatattccatagctgatatgatgtcttatgtcaaagcagatgtttatactgtgaattgtggcatggcatttggtcaagcagcaatgcttctgtcgcttggaacaaagggttatcgtgctgtacagccaaattcatctacaaaattatatctcccaaaagtcaatagatcaagtggtgctgttatagacatgtggattaaggcaaaagagctagaggcaaatactgagtattacattgagctgttggcaaaagggacagggaaatcaaaggaagaaattgctaaagatgtccagaggcctaagtatcttcaagcacaggatgctatagactatggaattgctgacaaaataattgattccagttcaagggatgttgcatttgagaagaggaattatgatgaaatgcttgctcaatcaagagctatgaggagacaaggtggtggcaatcctcaagcggctccttcaggatttaggtaatcacacagcataaggccacttattcagctccaaatccaatgccttcaaaggatgctcgcgggttaaatttaagttgacgcctggcataaaggtcaaaaagctatctcacatcaaggccatgtggaaaatttctctggatattgtatgatatctgtatcttggcagttgggcgacttgttcaatacttatatttgaattacttatgcttagtttcaacaactaaagaaagtgaccatatttcttaagttgtaaatatcgaaccattagcaatgtgatggactttatctgatggctgcattctcttcaaccgtttcatttcacattttgaatgagattttatatgtaacccaataatattggatggaaatatgctgattcagagaaacatcatgtttgcatagtagttgacttttttgccttgacattcaaaattatgcagtacttgttttacaatt

SEQ ID NO: 23289 - DNA, 889 bp, Glycine max
  Clone ID: PAT_MRT3847_121031C.1
ctcttgctagttctctatgttctctcaattatttagccattatattctatcaagtatgttggcaaaacacatacaggcaaaagagctagaggcaaatactgagtattacattgagctgttggcaaaagggacagggaaatcaaaggaagaaattgctaaagatgtccagaggcctaagtatcttcaagcacaggatgctatagactatggaattgccgacaaaataattgattcaagttcaagggatgttgcatttgagaagagggtaataattagtgctatttattagtggttattctgatattctcgttaaacatgcgtaatatataatatacttatgattactgtatggatcagaattatgatgaaatgcttgctcaatcaagagctaagaggagacaaggtggtggcaatcctcaagcggctccttcaggatttaggtaatcaaacagcataaggccacttattcggctcctaatccaatgccttcaaaggatgctcgcgggttaaatttaagttgatgcctagtatggaaattttctcacatcaaggccatatggaaattttctctggatagtgtatgaaatccgtatcttggctgtgtggcgacgtgttcaatacttatatttgaaatacctagcttagtttcaacaactaaagaaaatgacctggtttcttaagttgtaaatatcgaaccattagcaatctgatggctgcattctcttcaaatgtttcatttcattttgaatgagattttctttgtaacccaataatattggatggtcttccgatggaaatatgctattcagagaaacatcatgtttgcccagtgcaatccttggaaggctttgaatttgaacccaaaaaaggggccttataccaaaccaag

SEQ ID NO: 23290 - DNA, 353 bp, Glycine max
  Clone ID: PAT_MRT3847_121032C.1
tcgtccttttttttattgcttatatttttaaattgtatatttttatttagattgttttttttttacagaagatctacatgaaccggaaggctttccaacattaattggttgagggaaaaaaattcacctgtgctgggaacatgaacctaaggcatttacaaactttgtaagaagtgcagcagatttacacggaatgccgaatctgtctagcaaaattcaaacccgacatatttcagcgggatataaggagcactggatcagcctgcacaaaagccaatagggactttttaatggctccactggcgggtgcatgaaggccaagcttggctcgcaggtcggtgaccacagtagtg

SEQ ID NO: 23291 - DNA, 1992 bp, Glycine max
  Clone ID: PAT_MRT3847_121033C.1
ggaagtccaagggagaaaacgcaacacattagacgagtacatttctagaattcagaagacgtaatgccctttcgacgtcgtcgagagccaacttgtccagcagtccgattcgatttgattgattgtattacagtgtcattttccttcataaccgatttctattttatgattgtgcgcaacagttcgcagactcacaatggccgcaatatccaactccttatcactgaagcacagtttctctctgagtcgagctcctccttcttcctcttccatcaaattcaaattcagaagatgttacgccgcgttcgccaatgagaatcgcgagtacgtgatcgttggcggcggaaatgccgcgggatatgctgcgcgcactttcgttgagcatggaatggctgatggtcgtctctgtattgtaaccaaagagccgtatgcaccttacgagcgtcccgctctgacgaaagcgtatttgttcccgccggataagaaaccagcacgccttcctggttttcacacttgtgttggatccggtggagagaggcagactccggggtggtataaagagaatgggatagagatgttgtatgaagatccagtaaaagatattgatattgaaaagcatactttgacaacaagttctggaaaacttctgaagtatggttcgcttgttattgctacaggatgtacggcatcaaggtttccagagaaaattgggggaaacctacctggtgttcactatattcgggatgttggagatgccgatgcactaattttatcgttggagaaagcaaaaaaggttgtagttgttggaggtggttatataggaatggaggttgctgctgctgctgttggttggaaacttgatacaacaatcatattcccagaagatcaccttttgcaaagactgtttactccttctcttgcccggagatatgaagaactctatcaaaagaatggagtcaaaatcttgaagggtgcttccataaaaaatttggaagctggttctaatggacatgtagctgctgtgaaacttggagatggatctcttgtggaggcagatacggtaattataggcattggagcaaaacctgctgtgactccctttgagagggtgggcctgaatacagaggttggtggtatacaggttgatggtcagtttcggacaagcactcccggaatctttgctgttggtgatgtagcagctttccctttgaagatttataatcgtatctctcgagtggagcatgtggatcatgcccgtcgctctgcacagcactgtgtgaaagcattactcagtgcacaaactcacacgtatgattatcttccatacttctactcgaggatttttgaatatgaaggaagccctagaaaagtgtggtggcagttctttggagacaatgttggagaaacagttgaaattggaaattttgatcctaaaatatctaccttctggattgaatctggtaagctgaaaggagttcttcttgaaagtgggagccctgaggaatttcaactcctgcctaaacttgccagaagtcagcctctgattgataaagccaaacttcaaaatgcaacatcagtggaggaggccctagagattgctcgggaatccttgcaaggcgaagctgctgtctagtaccgatcttggtaacatcattctgtaatttatcttctcttacggccagattatcagtgactatctgtcatcatctgagtagggattgctccttaagagaataattttcattacattctcagtcacctgacattagtaatggtttttaactggaatgtctaatttggatttgatctggtgccataaggtatccttgaattttctcaataatttaagatagcctttgcctttaaaaaaaaaaaaaaaaaaaaaagaaaaataaaaaaaaaaaaaaaaaaaaaaaaaaaaaaaaaaaaaaaaataaaaaataaaacatggggtgacatataaaaattattaatgattatttttcaggtcta

SEQ ID NO: 23292 - DNA, 364 bp, Glycine max
  Clone ID: PAT_MRT3847_121034C.1
caaggtacgaattctattgcacataacaaagggccacaaaaccgccggttcatggagccaagccatgtttgatatccaccaatggttcatcaacatatagtatcggtaatactaggagcgataagggtcctgttctacgatgacacgctgcttacatatcaaattgggctaaccaacccatattttgtttgctaaaagcaggccttcaacaggccactgccaggcaaagccaccaacctgcggcagttgacaaactcaaacaaattccaagccctgcgttgaaccatctcttctcatatgacacattgatcacaaagctttatcgtgttaccacacataaaagcaccggcgggcctgagactcc

SEQ ID NO: 23293 - DNA, 1525 bp, Glycine max
  unsure (1)..(1525): unsure at all n locations
  Clone ID: PAT_MRT3847_121035C.1
gagctatagccataaggagaaaaactttcaaagaggtgaaagcaaaagagttcttcttttccttttttatatatacttgggtgctaagctgtgtgagttcattgacaagcctgaaatggcaactatgctgacaaaggagcatggtctgaacctcaaggagaccgagctttgcctcggtttgcctggtgggggagccgccgccaccaccaccaccattgctttcactctccgaatggcaaccattctatctccaatccaaaccctcaaattccgttctcccaatcccaaacctctcttctctcccaaaccgcctcccatctccacacctctcaccttccgcgccgataaactcactctcttcgtctcctccgccacctcctccgccaccgtctccaccaacggccctccctctcctccctcccctgctcgctcaaaggttcggcgacacacgatttccgtgttcgtcggcgatgagagcggaatgataaaccggattgctggcgtgttcgcgaggagaggatacaacatcgagtcgctcgccgttggcctcaatgaggacagggcgctcttcaccatcgtcgtgtcagggactgataaggtgctgcgccaagtcatggagcagcttcagaagctcgtcaatgtcttaaaggtagaggatctttcgagggaaccgcaggtggaacgtgaactgatgctcataaaagtgcatgcggatccgaagcaccatgcggagttgaagtggttggtggacatcttcagagctaagattgtggatatctcgcaacattcggtgacaattgaggtcactggagatccagggaagatggctgcggttcaaagaaatttcagcaagtttggaattaaagagatagccagaactggaaagattgcattaagaagggaaaagatgggtgcatctgctccattttggcggtattcagctgcttcttatccagatcttgaaggaagaacacctgttaatgcccttgtgggagcaaaaaatatgaaacctgttgccaaacttgatacacctgtggggggagatgtttatcctatagaaccatcagatggttttacagtcaatcaagttcttgacgctcactggggtgtcctcaatgatgaagataccagtggaattcgatcacacacgttatccatgcttgtgaacgatgctcctggagttctaaacattgttacaggagtttttgctagaagaggctataacattcagagtttagctgtaggacatgcagaagttgaaggactttctcgacttacaactgtggttcctgngacagatgagtncaattagcaagttggtgcagcaactctataagctagtagagctcatgaggggtcgtgatatcacccacttgccatttgctgagcgagaattgatgctaataaagattgctgtaaatgctgctgcacggcgtgatgtccttgatattgctagcattntccgggctaaagctgtcgatgtattctgatcacacaataactctggagcttactgggagatttg

SEQ ID NO: 23294 - DNA, 569 bp, Glycine max
  Clone ID: PAT_MRT3847_121036C.1
ggacctccaatggagaaaacgcaacacattaaacgagtacatttctaaaattcagaagacgtaatgccctttcgacctcttctagagccaccttaacattttccattcaataattaaattatcatcattattataataaactttacctataaacgcatccatgccttccccttcagttcgcagactcacaatggccgcaatatccaactccttatcactgaagcacagtttctctctgagtcgagctcctccttcttcctcttccatcaaattcaaattcagaagatgttacgccgcgttcgccaatgagaatcgcgagtacgtgatcgttggcggcggaaatgccgcgggatatgctgcgcgcactttcgttgagcatggaatggctgatggtcgtctctgtattgtaaccaaagagccgtatgcaccttacgagcgtcccgctctgacaaagcgtatttgttcccgccggataagaaaccagcacgccttcctggttttcacacttgtgttggatcccgtggagagaggcagactccggggtggtataaagagaatgggatagagat

SEQ ID NO: 23295 - DNA, 197 bp, Glycine max
  Clone ID: PAT_MRT3847_121037C.1
tctaccttctaccttttatggccacgtgaaccatggtcctacaggctgctgacaagcttggctgaacagggatccaaggggcgtcggcaggacatgaggaagggttgctggaagggcttggcctcttccttgagaagacagcaaatgtatccaacctacattaagggtagggcatcccctatccctgtcagggggcc

SEQ ID NO: 23296 - DNA, 550 bp, Glycine max
  Clone ID: PAT_MRT3847_121038C.1
cctgactgatattccttgttggagattttttcttttctcatgtggagtataacttcaattgggaagcttactttgtggcttctgctttgaatgttggattactgattgaatacatcctcatttgtcaaggaaaaattggttgatttaaatttagtcctttgtcagtttaaattttttttatactatcatccaatggtatgttgacaaaatattggaagagtttgacctcttggtagttttttctgatagtcagagtcctttaatgatttgtcaacacattatctgacgagtgacaactgtattgagaagttattcatttacagtgtatgaaaattaaatctttctcaagtctattttgctctttgatctatttggtgttgcgaatttgataaataatctctaatctgagtattcattttttaatggttgtcccatcaatttttgaatctcaattgtcaacctatttttcctatatgtatgtatgtagtattatgaacaagctcctccacttttttgtttaaatatttattttgcagtattccaaaatctc

SEQ ID NO: 23297 - DNA, 273 bp, Glycine max
  Clone ID: PAT_MRT3847_121039C.1
ggccaaaagcgaaatccgaaacgagatcgttagagtgatggtttgttgaatgccatggcgagagtgaatcacacgccatcttctcacaaatacgctcaaaagccatcgccttgcgcatactcttccactcaatcgccatcacattcccatatagctaggactagagataagcagatagctcctcaagttgagcctcatgatgatcctaatgctcatgaacagaataagatgcgcactaggtcgctaactgagattcttcatgagaataggaat

SEQ ID NO: 23298 - DNA, 273 bp, Glycine max
  Clone ID: PAT_MRT3847_12103C.1
agaactcgagccgaatcggctcgagctcgcctttcttatgattctgatcttagggatcatgttattgttgacagaggtggtaatcaatcagatttacaggagaaaactgataatattgttaatgcttttattggacaacttgttcctgtgtcatctgaaatcagggagatatcaaattttgaaactggctctcaatctagtcttcatgattcagatgttttagcgggacaatcatctgctcttaaggataagatgcctgtacacacagatgct

SEQ ID NO: 23299 - DNA, 422 bp, Glycine max
  unsure (1)..(422): unsure at all n locations
  Clone ID: PAT_MRT3847_121040C.1
tttttacacaaaattctagcatgataatatatcaactatcaaatttgaaaactcacagaagcaaagtatttggagcagccgctacatgtatgatgttacccaactctttatatctcttaatctatcactaatcatagaacctatccgggggggaatcaaatatacacaatactcaatattaactgctagtcaagccctcacgctagagacttgacagaatgaatgaaataccaaagcaaaacactgtgcaacctacaaaatctattctacaatgaattaacgaaaatgaaaaagaaattaatgcagaaaacctacacaccaccacaaggtgcacaacagaaccttccaagtcggaggaaaaaccactgcaaaggattcaagtggtcctcctcctccactggagtanggagtggagttgggag

SEQ ID NO: 23300 - DNA, 488 bp, Glycine max
  Clone ID: PAT_MRT3847_121041C.1
gcgtcaaggaatctagctcacttaattgagcaaagatgtgtaaattgttgtaaactccctcacactactgtcttcgatttctacaaaccaaaaaaatattgtggtaagttatgttgggagttatttcttttacactatgtgacacggactagaagaataaccatgacaaatacgcatgtcatgacaaacatgacaagccatgttaagcaagaagtcttagaactctccgagtagattgccgttgctcgcacattggcacgaccggtgcttgccaagctatgttcaatagccttctctgtagaatcaagtatcttttcagtattttgcagggactggctcatcgtgagactactctctttgagttgttttgccaaaaccaccatttcatcagtcaaatcttcttgaagctttctgtgcttttcaatgtgtgcatgtgctgtagcatccagtttaataggtgatgtgtggtcagtctcagcaggctcatg

SEQ ID NO: 23301 - DNA, 256 bp, Glycine max
  Clone ID: PAT_MRT3847_121042C.1
ctctgtgggctggtgtttttttttgaatacattttctctccctcccattgttttttttttgtagcaggtacccttaatatattagtgcaccgttaacctttgttgttttgtttaactagacgatcagggctttcttcattattaaaaagccgggaaaaaaggagcgaggcactgaaaaaacctgcccaaggcccaggaccgccccggcatatcatcaaaaaaaaaaaaaaaggctcttgagagtgcgcccctttaa

SEQ ID NO: 23302 - DNA, 1087 bp, Glycine max
  Clone ID: PAT_MRT3847_121043C.1
acgacccacgcgtccgcggcttcgggttgcgttcacattttggattgaactgaacctcactccgttacgtacgaggcatcataggcatagcaatagcattgaagcaacggcggcggcaaccaccgttcaacgccggagataccatctatttctactgtattcttctcactctgatttattctcttcagtgaacactgtagctatgggaatcagtaaaacagaagtgaaacttaaggaggttgcttggagctgctcctcagcagcaaaaccaggcaaaacttgtgcattatgttgcgtgaacaattggaacaattggctgaagaaaggacactggaaggcttaccaaggatttcaaaggctaatgttgaatgattattcagagaagattgaagccattgcttccaaattggttaatcatgtgattgacacacgagtacccgggaaggacttctaaaggaattttgttaaagaaaaacattctgaaattgaggaaaaaaagcagatacttgagaagaaggcctgtacctgcctcaagtatggaagataaagcgcatgagcttgctgagactgaccacacatcacctattaaactggatgctacagcacatgcacacattgaaaagcacagaaagcttctaaaagatatgactgatgagaaggatgttttttggctgaacagctgatttagagtagtctcacgatgagagagtccctgcaaaatactgaaaagtccctgccacaatactcaaaagatccttcaatctcgattgtacgccatttaacatagcttggcaagcaccagtccttccaatgtgcgtgccgccgcaatacttgattctaccgaaaaggctattgagcatagcttggcaagcaccggtcgtgccaatgtgcgagcaacggcaatctactctgagagttcaaagacttcttgcttaacatggcttgtgatgtttgtgctgacatgcgtgtttgtcatgtctattcttctaatccgaatcacatactgtagttcacgtttcaccgggtaaaataaataacttccaatataactttttttctcaatcttattttccttctcctcataatt

SEQ ID NO: 23303 - DNA, 1169 bp, Glycine max
  Clone ID: PAT_MRT3847_121044C.1
cttaaagtctgaaaagagaaacccattaagagtccctactcactgccgctgccgacgaagctcggtcgtctcccgccaccgtcgcacaaggaagcacctccgccgctgcaccatcgcgcctcccactggaggtccgtccgccgccgccgccgccgctggttgtcgcgctagccacaaggccgccgtcgttctggtggttattggttctggttccatctgttagagcattacaagttttattgcttcaggcacgaatcagaaggtatgggaatcagtaaaacagaagtaaacttgaagaggttgcttgcagctgctcttcagcagcaaaaccaggcaaaacttgtgcattatgttgctactttgcgtgaacaattggaacaattggctgaggaaagggcaccggaaggcttaccaaggatttcaaaggctgtgttgaatgattattcagagaagattgaagccattgcttccaaattggttaatcatgtgagtgacccaccagtacccaagaaggacttcgaaaggaattctgttgaagaaaactcttctgaaatagaggaaacaaagcagatactcctttcttctggactgagaagaaggcctgtacctgcctcaagtacggaagatagagcgcacaagcctgctgagactgatcatatatcacctgttaaactggatgctgcagcacatgcacacatttaaaagcacagaaagcttcaagaagatttgactgatgagatggtggttttggcaaaacaactcaaagagagtagtctcacgatgagccagtccctgcaaaatactgaaaaggactcgtctcgaatctcatattttcattcaatcctgcttgtcttactgctaaatggttatatgaattgattgtgggtggctatggcttgctttgcagatacttgtttctacagagaaggctattgagcatagcttggcaagcaccggtcgtgccaacgtgcgagcaacggcaactactcggatagttctaagacttcttgtttaacatggcttgtcatgtttgtcatgacatatgtatttgtcatggttattcttctaatccgtgtcacagtgtaaaagaaatgactttcaatataacttatcccattaataagcttttaccataatttctaatgaagtttattaactgtaatttctgg

SEQ ID NO: 23304 - DNA, 411 bp, Glycine max
  Clone ID: PAT_MRT3847_121045C.1
ggaattcggcacgaggaacattatccacaacttgctgcacttaatttcctcgttcattattaaaaatattatggtttcgctgcatccagagtgaccagacaacaactaaccttacaacccacccggcctatctctcattattaacttttatgtcaccagaatgttgccataagaaaacctgcaagagtcagttctcaatcagcttttctgttgggagaaacatggaagaaaggaagaggaagagaggagcttatggttgagactaaaatactgtgattttcattgggaatccaacagagtcagttctcaaacagcttttctgttgggagaaacatggcacttgctcagagtcagtcctcaatcaacttgttggttatcatcttccccttcatgttcgcttgctcatattga

SEQ ID NO: 23305 - DNA, 944 bp, Glycine max
  Clone ID: PAT_MRT3847_121046C.1
ccacgcgtccgctcaaacccaaagtctgaaatagagaaaccagattgagagtccctactcactgccggcaaacctctaaccaccgtcgaagctcggtcgtcctccggccaccgtcgcacgaagaatcacccccgccgctggttgtcgcgctagccacccggccgccgccgttctggtggttattggttctggttccatctgttagagcattactaattttattgcttcaggcacgaatcagaaggtatgggaatcagtaaaacagaagtaaacttaaagaggttgcttgcagctgctcctcagcagcaaaaccaggcaaaacttgtgcattatgttgctactttgcgtgaacaattggaacaattggctgaagaaaggacaccggaaggcttaccaaggatttcaaaggctgtgttgaatgattattcagagaagattgaagccattgcttccaaattggttaatcgtggtgagtgacccaccagtaaccaagaaggactttgaaagagtacgctgtcaaagaaaactcttctgaaactgagtaatcatagcagatactcctttctgcatgcttgagcacatggcctgattgagaagtagctagcctttcaagatactttgactgatgagatggtagtgttggcaaaacaactcaaagagagtagtctcatgatgagccagtccctgcaaaacactgaaaaggtctcgaaactcatattttcattcaatcctgcttgtctaactgctaaacggttgtatgagatggtgatgctaaatgtatcttattttagcatggtgagagtgaaggaatgggagtgttaataccttgtgagttgtgacagtggtgtggtagtcaatactgttctcatcaaggaaaaagtttcttacaagcaaatcctcttttatccccaatgaagttttattaataaaagtatatttcctct

SEQ ID NO: 23306 - DNA, 255 bp, Glycine max
  Clone ID: PAT_MRT3847_121047C.1
cattaaagctaataaacctagtcggggtttatatcgctactccaataccctataaataaagttctataccttcctcttataaacaattattgtagtttaatttaacctcgagctctttttttacaccatattatgcttctgtttaaaattaaaagaaataaattatatattttggctgcttacacataggagaaaagagcccccaaaattttcaaactttgactgctacagattttcaatatacatggtaaacac

SEQ ID NO: 23307 - DNA, 640 bp, Glycine max
  Clone ID: PAT_MRT3847_121048C.1
atggtaaaagcttattaatgggataagttatattgaaagtcatttcttttacactgtgacacggattagaagaataaccatgacaaatacatatgtcatgacaaacatgacaagccatgttaaacaagaagtcttagaactatccgagtagttgccgttgctcgcacgttggcacgaccggtgcttgccaagctatgctcaatagccttctctgtagaaacaagtatctgcaaagcaagccatagccacccacaatcaattcatataaccatttagcagtaagacaagcaggattgaatgaaaatatgagattcgagacgagtccttttcagtattttgcagggactggctcatcgtgagactactctctttgagttgttttgccaaaaccaccatctcatcagtcaaatcttcttgaagctttctgtgcttttcaatgtgtgcatgtgctgttgcatccagtttaataggtgatgtgtggtcagtctcagcaagctcatgcgctttatcttccgtacttgaggcaggtacaggccttcttctcaagtatctgctttctttcctcaatttcagaatggttttctttaacaaaattcctttagaagtccttctcaggtactcgtgcgtcaatcacatgatt

SEQ ID NO: 23308 - DNA, 226 bp, Glycine max
  Clone ID: PAT_MRT3847_121049C.1
gaacgtccttttattgggcctcactttgaaaacatctcatgtatagcatttcgcgtctctgctgacgccacgtttaaaggggtattgccatcactgtccctcacggatggataagctcgatgtgggataaacgtattatagatgtcgatgttggcggtgatcccggtgtaatgtaatggggggtgacgcggtttatcttggatgtgtatatggggaccggtggcaa

SEQ ID NO: 23309 - DNA, 256 bp, Glycine max
  unsure (1)..(256): unsure at all n locations
  Clone ID: PAT_MRT3847_12104C.1
caaaaagagaggcaacatcttgaagatggatcgccacaaatatgtgaaagtggcctatcatggatttaaagagttgtcaaaagaagataaagttggaacatatganaatactttagtacatgattctttcgtgggccagactatgctctcattgatacacttttttcacttgcggaagcctacttatttgctcagcttgttgattttaaggacggaaatcctggaaagattcaagagcatgtagattatgctcgtc

SEQ ID NO: 23310 - DNA, 574 bp, Glycine max
  unsure (1)..(574): unsure at all n locations
  Clone ID: PAT_MRT3847_121050C.1
cggaaattcccggngtcgacccacgcgtccgcagaaaaggaattagactccaaggcaggccaccagatgcctgatttgtctgaacaaaaatctggtaaactactttcatctactgccaagaaacaacctccatctaactcgaagccagttggagattcaattgcagcaaagccaaagattaaacagcaagatacccatggttttcaggcaaaacaagctaagccaaatgtagtaactaggtggattccttctaacaagggttcttatacaaattcaatgcatgtctattatccaccatcaaggaataatagtgcaccagctgcgctgacaaatttctcctcctcaaaggagaaaatggaagatgccaaaacaagatctttatctgctcctgttgtctctgcagtcgtttctcttgacaagacaaatgacctgaaaagtcggaaggttgccacttcaaaatcttctgcctgtgtggcagcagaaatggatgaaaaatgtgcaccattattatttctggcaattaaagagacattttttcagtcagatactcaagcccaagatcagagctcagagc

SEQ ID NO: 23311 - DNA, 426 bp, Glycine max
  Clone ID: PAT_MRT3847_121051C.1
aaggaagatccattctaattaattttaagctaggtaattacatgaaagtaaagagtaaacaaaagataaaataaaaaggtttggcattaatatgtacttaaggagcccttcacaaattaattacaaagtaatcaatgttctcttctgtttccttatacaatactacgtatataaattaattcagaacactgcatcacttggtccttgtgccaaataatgattttctctatattgttgatccaagaatgctccataacacaattgaagatcatcaacaccatttgcagcttgatattccatttctacatgttgcatcatcccatatccataagggatccatgcattcatcttatcaaagggcaaggaagagatcaattccaggaaacccaatgatcagggacaccgactgacgcggggcgatcttga

SEQ ID NO: 23312 - DNA, 378 bp, Glycine max
  unsure (1)..(378): unsure at all n locations
  Clone ID: PAT_MRT3847_121052C.1
gcactannngaactttacttgtcttcctgtttttcaaaggaaaatntttaaaagggtgaaatacacgtgaattgatgttanncctaataaaagtaggacattaaaacaattctaatccaaaggntgtctttattagttcacataanagttgcagggttgcacctagctgtgtgaatggcttaggaagggtttgaaatgttcnnaattcattgtggatctttgtgttttttgtttgaaatgtttcaatttggcaaggttaaaatcacaaattaatctaattggtcaagatttttaaactaaattctaaaacactcagcttcaaggggtgaaaaattgaaaaagttattataccggcgactatattataccatacaaaat

SEQ ID NO: 23313 - DNA, 353 bp, Glycine max
  Clone ID: PAT_MRT3847_121053C.1
aaattgcataaagagatcgggccatacaaatgaacggatggggtcaagcctaaaaaggccatcatcacactggctaaagcttccaacagaaactggctcaatttgcacttcaaagaaaacaagctaaaaccaaatctctatctagagaaagacccaatggcaggaatcatggacatcatgaggaacatgtatgaggatggggaccaagagataagaaaaccattgcaaaagcatggactgacgctagatcttgaaaaacagctgaccctttaagtagctaccgttgaactaccagaaagaggatcagggcttaattactttttctaaggaaaaagatttgctctatttaatta

SEQ ID NO: 23314 - DNA, 277 bp, Glycine max
  Clone ID: PAT_MRT3847_121054C.1
aatctaacataaacactgtatatcaaaataaataaaaccttttaaactgagggaatcaaattagaaataaaagtaaattttagctacataacataaaacgaaaaatgaaaaatgaaaaatgaaacggatctatcttgttttaagtatcagtccaagcagcaaaaactggcaagtgagacaaagagatagcaggagatggcctcatttgaaccgttggtgagggtaaccaagaggtaacactcgtaccaatggggttcacaatctttgtttccattgg

SEQ ID NO: 23315 - DNA, 142 bp, Glycine max
  Clone ID: PAT_MRT3847_121055C.1
aacatccaaccaaagacaggtgatccaatcctctttaagtattagtccataggtcatacatcaattccggttcacacaacacaaacccataaatagtgttagtgggggacaacttataacacaaattattgtttttccacat

SEQ ID NO: 23316 - DNA, 532 bp, Glycine max
  Clone ID: PAT_MRT3847_121056C.1
ggctcgaggcaaccacattttgcttcttactccttcatgttattaaatttccaccaaagaacatgcagtatcctgtggtagatctcctatcaacaattgatcctacatagtcagcatcagtatatactttcatggataaattttctcctttttaaacaacaatctctttcctggagaagacttcaagtactgaatgatcccattcaaccaagaatgtcaagaagaccatggaagggagtgggtcagaatgctgcaataatacagaggtccattcttggacaagaaagcatgtcaagaagaccatattagggagtgggtcaaaatgctgcgataatacagaggttcattcttggacaagaaaggtgcagttagcaacctttgggggttgcaccaagggagaaacaaaagaggatcactttgtttgtgtgttacatcaagcatgagaaacagaacaatacaatgaagtggtgaatgagagcaagatagggagattatcagaattcttgaagctagagaagaagcttgttttctt

SEQ ID NO: 23317 - DNA, 425 bp, Glycine max
  Clone ID: PAT_MRT3847_121057C.1
acgaggctcctggcagcgagatactgtttgaagacgagtgttgttctctgattatcgttttactagattagcgagcacatgttaattgtgatgatgattttgattcatgaacgatgatgattgtgggttttacagtgtgtgctgcttcaaatttatggactgtgattagaaaattgaatttatgtggcttggctgcactttgaatttgaaggtctcgtattctggtttggtgagctgaaagattgtgctcacatgtgtttgtgaataatcctcaatgaagacagattggagtttggatttcaagaagttcttgggtggttcaataattgaaatatttggtgatttaaaaattataatcaagttgtttgatgaaatacctactagactattgcattgtttaaaaaaatagaaatttttttgatagg

SEQ ID NO: 23318 - DNA, 346 bp, Glycine max
  unsure (1)..(346): unsure at all n locations
  Clone ID: PAT_MRT3847_121058C.1
tggaaaagcaacgtccagaagaagatctgaaaggccgatccttaaaaaaaagggcaagatgctgagccatctattcttaaccgggccagtagttcccaaactggtggaagcctgaagtcaatggaggggggcaagaaagagaagggaaagggccaatttggccccgcagaaaaagaagggcaagaaaacttaagtttaaaaactggtggtggctaaggaaaaataacaggaggatttttatttaagaaaaaggcaaaaacctatgggtggagccggccatgggtttggcttaatgaaaaagacaggaagcttgggtnccccaaaaaacaagatggaaaacattttc

SEQ ID NO: 23319 - DNA, 186 bp, Glycine max
  Clone ID: PAT_MRT3847_121059C.1
attctgtcattgcaaatgcacaaaaactgggtgaagaacgaggtgcaaggtcccgtgcacatgctctagcgcagatcaagtgcattctctcaggctccttcatgccggtctcttatccatcatgagcaggggtggactacattgcacctgactcgagatccagatacttctgcaagatacctcgct

SEQ ID NO: 23320 - DNA, 489 bp, Glycine max
  Clone ID: PAT_MRT3847_12105C.1
aaagtccttctgcaccatctctctctgactctctttcctcttttaccccaaccaaaaagaaacatatccattttcctctttaatttcttcaacttatttactcctatgctcacactgatccattagttaacttctcttaatctctctgtagccacaactacctaccatatttgcttcagaaaaacatggaatttggagagaacaacatgttcagccttaacacccacacaaaagaggaaaatggaaacactggcggtaacagtaacaataacaatattgttaatgtttggtattcatcatgggatgctactactacaactaatgcaccacacaccaccacggccgcggagggctacgccggcggcggtcaccgcctccatcaccaccaactatacggcggcgaagggtgtcacgtgcaggcggaccctcacctcacgtgcttgcatcttggtaaaagacattactttgaggatgctactaacggtgatg

SEQ ID NO: 23321 - DNA, 1369 bp, Glycine max
  Clone ID: PAT_MRT3847_121060C.1
ccacgcgtccgctcgaaggtgggaaggtgaaggtgatgatggaattggaagttgacgagaacgacttgaaagccgccggcgctgaactcttcgccgacggtggccggcgaggcattcgtatcaatggctgggtgatcgagactcggaggcactccatactgaactcttccacattccaagagtgggaacagaaactcgatacgtctcatttaccagaaatggtttttggggaaaacactttgattctaaaacacttgagcagtggaaccaacattcattttaatgcatttgatgctctacgtggctggaaacaggaagcattgccgccagttgaagttcctgcggcggctaaatggaaatttagaagcaagccctctcagcaagtaatactagattacgactatacatttacaacaccttattgtggaagtggcactattgagattgataaagatctgaatgagggagagacttctaaggaaaccagtgatatccattgggaagactgcaaggatcaaattgatgtagttgcacttgcatccaaggagcccatacttttctatgatgaggtagtgttatatgaggatgaactcgctgataatggagtatcacttcttactataaaagtgagagttatgcctagctcttggtttcttctgttgcgtttctggcttagagttgatggagtgttgattagactgagagaaacacgtatgcattgtgtatttggtggaagtacaaatcccattatacttcgagagagttgctggagagaatctacatttcaagctttgtctgcaaaagggcacccttttgattctggtgcgtatggtgatccgagtttcatcagccagaagctccccatcataatgcataagacccaaaagcttgtaatttcctcttaaagttataagactgtaaatccccataatgcaaaagtgtttctgatcaattcttaatatgtattcatcttttaccatggctggttgaaaccataagttgcttattatgagataagctcatagatgcatgctaatcatgttctgttcttgtacgaaaggttggagggagggttggggtgagatctaactaatatgcgagggattcattttacatgaaaaattgagaagtttattacttatatataggttgaagttaattctataattaggaacaaaacttgtacagtcattctaaaggaagcttacagcaataaatctgctattgagaagcatcctctgttgagggtcaggaagaaatacatcaagttgatgaagaaatcacaagtgattttaaggaacaggaggttctataatttatgatacgaacttatgcatttggtcacaattttaactgttaatttctaata

SEQ ID NO: 23322 - DNA, 1700 bp, Glycine max
  Clone ID: PAT_MRT3847_121061C.1
ggctcgagcttgcagtgcttgaaaccgttcaatcagtgaaatggccaaggaagatgtgtttgagttcctcgggaacgttcctctgctacagaggcttcctggctcgtctgtaaggaagatatctgagcttgtgattctcaaacactatgagccgggagagtatgttgttcgtgagggagaacgtggggatggtctttacttcatctgggagggagaggctgaggttgttggctctgttaatgctgacgatgataatcatccagagtttcaattgaaaagatttgactattttggttttggtttatcaaatgaagttcaccatgctgatgttgtagctttgacaaagctatcatgcttggtgctgccccatgagcactcagcattgctgcagccaaagtctatttggagtgcagaaaaatctcatgatacatgctcacttgtggagcatatattgcatttggaccctatagaggtagatatcttccaaggagttacccttccagatgctccaagatttggaaaggtgtttggggggcagatgattggacaggcactggctgcagcttcaaaatctgttgactgtcttaaggttgttcatagtttgcatgcctattttattcttgcgggggatttaaacaatggcgaagactttttggtcgtaagcactgaattttgcccaaaagataaggcaccaatattatatggacatcactaaagccaggagctccttcatgtaatttgatttcagcaaagaattatctaaaagagccttgttataataagctatgggtctgaactcctgcattgcaatagctcctatgcccaactcgaaagcatcacattcaacaatgaatggttttgagaaattaggtgtcactaaacagtgccaattacatatcaaattcaccgtctccgtgatggaaagagcttcgcttcaaggaaagtggatggaattcaaaagggaaatgtcatattcactctgatggcttcatttcaaaaagaagaatcagggatggtccaccaagaggtagctataccatctgtccctgctccagataagcttctgccgatggaagagctacgggagagacgtcttactgaccctcgtttaccaataacctatcggaacaaagtagctacatctcaattcatcccatggcccatagagatacgattatgtgaatatgaaactgcaacaaatatgacaaaatctcctcccagtttgagatactggtttagagccaagggaaaactttcagatgatcaagccttgcataggtgtgtggtggcatatgcttcagatctaatatttcttcaagtaagtttgaatccccaccgtgagaagggtttcaggacacgttctgttagtctggaccactctatgtggtttcaccgatccgtaaaagctgatgactgggtgctatttgcgatctttactcctagtgcccatagtgcacgtgtctttgtcaccggccaaatgttcaatcagaagggagagcttcttgtatcattggttcaagaaggactagccaggaaaattaatcccggaaattcagccattaaatctatgttatgaactgctgaaaaatgcacagattagcatgtatccattttatagttttattttaaaaaaattccatgtatccatcaccataacatcttagtatctaaattatatatgtaaatttttgtattgctct

SEQ ID NO: 23323 - DNA, 358 bp, Glycine max
  Clone ID: PAT_MRT3847_121062C.1
ggtttcaggacacgttctgttagtctggatcactctatgtggtttcatcgatccgtaaaagctgatgactgggtgctattcgcgatctttactccaagtgcctatagtgcacgtgtctttgtcaccggccaaatgttcaatcagaagggagagcttcttgtatcattggttcaagaaggactagccaggaaaattaatcccggaaattcagccattaaatctaagttatgaactgctgaaaaatgcacagattagcatgtatccattttatagttattttagaaaattccacgtatccataacatcttaatatctaaattatatatgtaaatttttgtattgctctaaaaaaaacaag

SEQ ID NO: 23324 - DNA, 349 bp, Glycine max
  Clone ID: PAT_MRT3847_121063C.1
cctggacccgcataccaagcattttgtcagggtttgtggccagctcagccatctcgtgtccaatcacactaatcatgccgtcgaccccaacgtcgccgttcggggacttaaacggtttccggttagggatatacgcgggtggtggcgcaccgtacagctctacacggaccaaaccggggccaacatttcaaaatcggggggggtcggcgaggagaatatcgaccggttctattcccacgggaaatccctgacccgcttatccatacagactgtgataaagagcgccgtcacaggcaaaacgaggccgttgccgatcaaccctaggagtgggttgggcgtgttgctcacg

SEQ ID NO: 23325 - DNA, 233 bp, Glycine max
  Clone ID: PAT_MRT3847_121064C.1
ctctagccaacctaacaaccgctaccaaaaacatgaaaacccagaatgggggagtatctcaatgcctaacgagaaccttgggaccgatgctacaaagcaaagaagaaaactcagtgggctctgcacatactagctgaatcatgttctttcccaatcttacaaacttgactctacactgtgacactatagataccacctcgggaaagatacaacacaaaagggtgactaaaaca

SEQ ID NO: 23326 - DNA, 2210 bp, Glycine max
  Clone ID: PAT_MRT3847_121065C.1
gaagaagaaacagaattgaattgaattgcgtttgcgccattgaaaatcggaagtaatggaattgcattgctccgtgaaaaaattggaaaacgagaaagcgtttgagtttctcggaggcgttcctcttctgcagaggcttccgagctcgtctctgaggaagatagctcaacttgtggatgtcaaacactgtgagccaggagagtatgttgttcgcgagggtgaacctggagatggcgtgtacttcatattggatggagaggtatgcttatatattcatgccatagaccttagagaaacaaaaccagacagccaggtttcattggattgcttgtggatttgtgtagagcagttttggctgaggttcttggatctgctagggccaatgatgaaaatcgaccagagttccaattgaaacaatatgactactttggttatggtttgtcaaacacagttcaccaggcagatgttgttgctttgtctaagctcacatgcttagtgcttccccatgtgcactcaacactgctgcagccaaagtctatctggagagcagaaaattctctccagacatgctcacctgtggagaatatattgcatttggagccccttgagtaataccctggaattcagccttaaattaaagcatttttttattctctttggaaggtagatatcttccaaggagttacccttccagatgctccaagatttggaaaggtgtttggggggcagatgattggacaggcactggctgcagcttcaaaatctgttgactgtcttaaggttgttcatagtttgcatgcctattttattcttgcgggggatttaaacaatggcgaagactttttggtcgtaagcactgaattttgcccaaaagataaggcaccaatattatatggacatcactaaagccaggagctccttcatgtaatttgatttcagcaaagaattatctaaaagagccttgttataataagctatgggtctgaactcctgcattgcaatagctcctatgcccaactcgaaagcatcacattcaacaatgaatggttttgagaaattagtgccaattacatatcaaattcaccgtctccgtgatggaaagagcttcgcttcaaggaaagtggatggaattcaaaagggaaatgtcatattcactctgatggcttcatttcaaaaagaagaatcagggatggtccaccaagaggtagctataccatctgtccctgctccagataagcttctgccgatggaagagctacgggagagacgtcttactgaccctcgtttaccaataacctatcggaacaaagtagctacatctcaattcatcccatggcccatagagatacgattatgtgaatatgaaactgcaacaaatatgacaaaatctcctcccagtttgagatactggtttagagccaagggaaaactttcagatgatcaagccttgcataggtgtgtggtggcatatgcttcagatctaatatttcttcaagtaagtttgaatcccccccgtgagaagggtttcaggacacgttctgttagtctggaccactcgtacgtacctgaatcctacagtatgtggtttcaccgatccgtaaaagctgatgactgggtgctatttgcgatctttactcctagtgcccatagtgcacgtgtctttgtcaccggccaaatgttcaatcagaagggagagcttcttgtatcattggttcaagaaggactagccaggaaaattaatcccggaaattcagccattaaatctatgttatgaactgctgaaaaatgcacagattagcatgtatccattttatagttttattttaaaaaaattccatgtatccatcaccataacatcttagtatctaaattatatatgtaaatttttgtattgctctaaacaggtcccatgatctatctttatggcaatgcctcaaaggctccctgtgcatctatgatctaacatccagtgaaattccccccttttttcttaaaaaaaaaatactgactatcttcaagctctttatgggtcattacctaaactccatgatttgatgtgagctagatcttgttatcatgaattgcatatcccggggctctgttggagaataagctagttttcatgttgtctttctgtaggtttcttccagagactagatcctatagttggtcttttaagataattaacttttgagtaaaaattgttgtgt

SEQ ID NO: 23327 - DNA, 1944 bp, Glycine max
  Clone ID: PAT_MRT3847_121066C.1
cccacgcgtccgtacggctgcgagaagacgacagaagggggagcgtgtcgagcgctaaaaccgaagaagaaacgaaattgaattgaattgaattgcgtttgcgccattgaaaatcggaagtaatggaattgcattgctccgtgaaaaaattggaaaacgagaaagcgtttgagtttctcggaggcgttcctcttctgcagaggcttcctagctcgtctgtgaggaagatagctgaacttgtggttgtcaaacactgtgagccaggagagtatgttgttcgcgagggagaacctggggatggcctttacttcatattggagggagaggctgaggttgttggatctgttagtgcggatgatgaaaatcgtccagagtttcaattgaaacgatatgactattttggttttggtttgtcaaatgaagttcaccatgctgatgttgtagctttgacaaagctatcatgcttggtgctgccccatgagcactcagcattgctgcagccaaagtctatctggagtgcagaaaaatctcatgatacatgctcacttgtggagcatatattgcatttggaacctatagaggtagacatcttccgaggaatcactcctacaaatgctccaacatttgggaaggtatttggtggacaaatagttggacaggcactggctgcagcatcaaaatctgttgattgtcttaaagttgttcatagcttgcatgtctattttcttcttgtgggggattttaacatacccattatatatcaagttaagcgtctccgtgatgggaagagttttgctactaggaaagtggatgcaattcaaaagggaaatgtcatattcactttgctggcttcatttcacaaggaagaagtagggtttcaccaccaggaagtgtctatcccatcagtccctgctccagatacgcttttatcgttggaagagcttcgggaacaacgtcttactgaccctcgtctcccaagaacataccggaacaaggttgctacaattgaattcattccctggcccatagagatacggttctgtgaacctaaaacttcaacaaatcagaccaaatctccccctagtttgagatattggtttagagcaaagggaaaactttcagatgatcaggccttgcataggtgtgtagttgcatatgcttcagatctaatctttcttcaagtgagtttgaaccccaaccgtaagaagggcatgaaggcacgtggtgtgagtctggaccactccatgtggtttcataggcatttaagagctgatgactgggtgctatttgtgatctttagtcctacttcttctaatgcccggggctatgtcactggccaaatgctcaatcagaagggagagcttcttgtgtcagtggttcaagaaggtctaatgagggaagttatttttgcaaattcagccatcaaatttaatctttgaataacgtaaaatgcagaggacatgtggctttcttgttagttctgtcttgttttatagtgcatggtgaggacatctcttttgttttccttctatggtgaaccatataattggtggtgcccagtttatcaccatcatatagtgtatatttatttttaatcaacggttcaaaattgtgattgacaagtaattgatgtgttggatttatttacattaactagttttaagctacaatttactagttttttgcgatctttactcctagtgcccatagtgcacgtgtctttgtcaccggccaaatgttcaatcagaagggagagcttcttgtatcattggttcaagaaggactagccaggaaaattaatcccggaaattcagccattaaatctatgttatgaactgccgaaaatcgcacagaatcccgtgttgccatttcataggtttgttttatatactttccttgttgccctcaccataacatcttagtatctaaattatatatgtaaat

SEQ ID NO: 23328 - DNA, 389 bp, Glycine max
  Clone ID: PAT_MRT3847_121067C.1
tccgtaaattatctccatactctctatgtaaagatgccacaagaactgcctttacactatgattttttccggctgaagtttgcaaatccacttgtggcagtatcttatgcttcaaggtgcagcttaaaactagatccatgactgtttgttgtggagtagaaacgggactaaatactctaatctgtaagcctatccgtttatctgccttggccaagtgttcctgatagtaatcgctgatcagtttccatgcctcgtttgaagggtgaaaaaggtaacgccccaaacggtggaaaactgtgtctttctctggaaacattttggtaacctcctggttgaaaaatgggttcatgaacagagacggcccaaagtattgatcagactgcaaaatc

SEQ ID NO: 23329 - DNA, 266 bp, Glycine max
  Clone ID: PAT_MRT3847_121068C.1
ttggcagcgcagtgacggtctcgatgttgtccgcaatgaggtccctggactggaggctttagcacatgacacgagaccgtcatggcagcgcagccctgccacgtactatcattggcatgagccatgggtactgctgatggcgagggagaaggttcagattaagacgattgacaacgccactgcgaggcaggtcacattctccaagcgtcggagagggctcttctagacagctgaggagctttcggttctaagtgatgctaatgctg

SEQ ID NO: 23330 - DNA, 1503 bp, Glycine max
  Clone ID: PAT_MRT3847_121069C.1
acgtcgctgcagcgtcgtagctcggtcaggcttatggagagagttgtatactccagggaaacaacctgagaaagtgtgcacctcggtcaaaaaacctgccggcactcgtatctgtgacaccgtgttcaattcggatccaaaaatctgatttatcgggtctcttcccaactcccccacctccaaccaacttccaccagtagtaaacagaaatacaagcataagcaaaagaagacccgcgacacatcgcaacatcgtatcatgtctgcaacaaacgtccccaaagtgctgttacaactacaaccaccctccaaatcgaacccactctgcgtgccggtgataggactcggcaccgccgcggtccacaacgacggtgacacggtgaaggctgcagtcatagaggctatcaaactcggttacagacacttcgacaccgcggcacagtacggatcggagcaggctcttggagaagccattgccgaagcacttcgtgttggtctcatagcctcaagagacgagcttttcatcacttccaagttatggtgttgtgataatcatccccatcttgttcttcctgctctacaaaattcgcttcggtctcttaaattagattatttggacctatatttaattcattggccaattactgcaaagcctggaatgtgggagatgccttattctgaagagagccttgttccatttgacttaaagagtgtgtgggcagcaatggaagaatgtcacaaacttggccttaccaaatcaattggagttagcaacttctcttgcaagaaacttgaaaatcttctctcttttgctacaattcctccttctgtcaatcaagtggagatgaatattgcctggcagcaaaagaatcttagagcatactgcaaggcaaagggtataattgtgactgcctactctcctttgggagccaaagggagcaaatgggatatcaatcaaattttggacaatgaattgaccaagcagattgcacaggctcatggcaaaactgcagctcaggtatgtcttagatggttatttgagcaaggtgtgactttcataccaaagagctacaataaagagagattaaaggaaaatttagagatatttgattggtcactcaccaaagatgaccatgaaaagattaatcaagtcaaacaggagcgtatgttcaagtacggaacagcagcattcccgcttcctgatctatttgatggggaaacttagtaatacattatcagcttcaatattccattttccttgggatttaggtttctcgtgtctgtgacacaataaaaggatgaagtgtaatctgtctttagaatacccttaaagaaactcaaaattgaaatcactggtttcactttttgtgggaagtttgtttacagcaatgttatgcttttcttccatgtaattttatgtgctacactgttttatctgttgaaatgtaattgtaattcaagctacaggcatccaataaaaactagactgtttatagtttatcca

SEQ ID NO: 23331 - DNA, 274 bp, Glycine max
  Clone ID: PAT_MRT3847_12106C.1
cgcacacaatacacacattttatttctcagtatcgttcaccacaccgaacctgccaattgcgtcacacccaccataataatatctttattgatctttgcttctttggtaccattgaaaaaacacacacacacaacatcaacaacagaagaccatgtcggagtgcgagcaccacaaggggaagaagaggaagatctttcggcacgcgttctggtgcatagtggtgctcctcatttctcgtgctagactaaaatcgattgatatgggcaatgctta

SEQ ID NO: 23332 - DNA, 276 bp, Glycine max
  Clone ID: PAT_MRT3847_121070C.1
ggctcgagcgactccaaatacaaatcaaccttttgatcatcacacatagcaacaccaaggggcgccaattttaaaagccctcgcccacctaacatatcatgaacatcatatagcccaaaaaaaagacgatacttacttacaatattcactacacccctatcatctcctaacaatacatcctataatcccacataataaaaatttttcatctaccaaacaaacactcatctatgctaacattacaaatataacaaaaaccaataccccttttttcta

SEQ ID NO: 23333 - DNA, 401 bp, Glycine max
  Clone ID: PAT_MRT3847_121071C.1
ccccccaaaaaaaaaaaaccaaattccgggaattaacacccacaaattttaccctcccctcatttccccttgagcgggatcaaaaatacaaaatttgaccaaaaccccccctggaaaaaaaggggaaaaacccccctaaattttcccccctaattttctgtccaggaaaaaaaattctttatcccccctggagggcaaattttcacaaacctaaaaaaaaacttcgtctaaggtcactcaacgagaagttttttttgccccaaacccaccctttcaagcaaatgctttgtccaaccaccttgatttccccattttgcccaaaacaatgcttaacaaccattcccgttaaggcaacctttcccgctaacttttgttcaaattccccacataaaccagggccg

SEQ ID NO: 23334 - DNA, 624 bp, Glycine max
  Clone ID: PAT_MRT3847_121072C.1
atgaaggataagcagaagaagagtttgtcctttgatccatttgctgctttgtctgcctgggttccatccttatttgtgaatccatctgaccatatctgctctgagtatgttggatactttgagcacagaagaaaaatggaggagattggtgcaggaaacattgaaaagttagccactcaaacttcccttaattgtctactgatgggtgtgttggggaaggaatctgatgaacccctgcacctcattccttcagcttctctgacagttaatcatactccttcaaaggatttcaaagaagctcatgggattcaccaatggtggaaacctgacttacgcctagaatccaagctctaccgatactaataattcttgtagttgttgtagtgtgtgtctggaatactagcacaataaggttggattgattatttctttttcccattgaaagcataacaactcattgttgctttcagattttcatgtattttgcgtgatttttgggtactcactgttaatccaaacacgctgatattatgttggtggatgtataattgtatattgacttgaattatgctgtatctggttttccatgtgaagttaattttgtaaatgaacagttcatgttat

SEQ ID NO: 23335 - DNA, 542 bp, Glycine max
  Clone ID: PAT_MRT3847_121073C.1
atttcaatttggtgtgcgattgcttcgtttgcttgattgatgattaattactcgcgtttggtgagtgcaggcatataggaggatttctcatattcgccgtgttggcggcgatgagcaccacctcggaactctggaatttgctcaggtatgctaaacgcaggatcgtcgcgtcgttttgatgtttctgtatagtattgttgttcggtatgagagagaatgaatgaactgattttgtgaatgtgactatggaacgccagatcgtccacggcgctcgggttgtcgacgaccacggcggcggagatgaacgggtctaacagtgacgccttcccggtaatgttttattaaatttatttttaagttcattgcttcgcataataatagcgagtagtgattattggtgcaaaaaaagaagctatagtagtagtgcgattatgactaatttgtttaattgttaaaaaaatatttatttaataaaataagcaaattattctttcatataatatgcttggctaaataagttaatgtttaaaaaacaatttttt

SEQ ID NO: 23336 - DNA, 378 bp, Glycine max
  Clone ID: PAT_MRT3847_121074C.1
cgaaactggttcttactttctccaaacccaaacgtccaccacaggtacgcttgcctctaaactatccactatgcatctaatcctctagctccatccattcattatatgcatgttcgctcagaccatggactgtgcctgaaaccatggataatccagttagctgactgtggatttatgcatgactaacggggatctaatgctgactgattttgtttgaagtttggctttttttatgctcagagttatggttcgtgggataggcttgcatctattgagatgcctaaactgaatagtgttcgcaaggacgaggcttttcatcttcgcgtcatgagctatcaattcggataaggaaggtggccgcctctgtcaaaaagaaag

SEQ ID NO: 23337 - DNA, 248 bp, Glycine max
  Clone ID: PAT_MRT3847_121075C.1
ccacgcgtccggttttgtctgcagatgtgcctttagcattactataatccgaggggcagatcatctgagtgatcatacctatccacagagtgcgaaagagcctcgattatccgtattcagctggaatgaggcccaggatgcgctatgacactgaggctgctgcctagcgaacatccacaggattaattgcgggcatcgctgacgtggatccctgtcagatgggcctgtatctagatggatacgcctaa

SEQ ID NO: 23338 - DNA, 493 bp, Glycine max
  unsure (1)..(493): unsure at all n locations
  Clone ID: PAT_MRT3847_121076C.1
ggggttcctcattttgcaagctttctttggtttcacaccatttttctattgacttcatcacaatataaaagatcattagtgtcggtattatcaccaccatattcttttggacttcctctgctatttctaggtttcgttttatttggctttgattttcttctgcaaccttatctactgcaaagctttgattactgagtctaacttaccctgccacagtttgccttgtttacctgagctctgtttttaactggtctttgatcaaggatggccataaaggcaattgagttgttgaaaggaagcggaaaccatgaagagatatttgaagttcttgcagcagtggctgcatctttgggggatgtaatagatgatgtgaacactttgcaggtaacacctttaaagggggcaatgaccaatgaggtttnttgagggtggatgaaaaccaaacctttgagggcatgtcaaagcatggacagggtccacgccttcttgggag

SEQ ID NO: 23339 - DNA, 301 bp, Glycine max
  Clone ID: PAT_MRT3847_121077C.1
acctttttaattttacttaaaataacacacacgtcacacattattccttcattagagggaggcgtggaaaccctcaaatgcgcagagcatactcaacatgaggggcatgcctaattttctggagaggtccccccaaccaaggggcaaaagaatatctttaagcggttcaggcaaaaaaaaacgccctatcagaagaggtggctgttgccggtggaacaaaaaaagatggcatcgggggccaaccaccaggagcaagggggggggattcacaaagagagggtgaaaaaaaaaaagactgttt

SEQ ID NO: 23340 - DNA, 468 bp, Glycine max
  Clone ID: PAT_MRT3847_121078C.1
ttcttttgctatttctaggtttcgttttatttggctttgattttcttctgcaaccttatctactgcaaagctttgattactgagtctaacttaccctgccacagtttgccttgtttacctggatcatcggttataatgttttctctcaatttggtcatcaagagctctgtttttaactggtctttgatcaaggatggccataaaggcaattgagttgttgaaaggaagcggaaaccatgaagagatatttgaagttcttgcagcagtggctgcatctttgggggatgtaatagatgatgtgaacactttgcaggtaacacctttaaagggggcaatgaccaatgaggtttttgaggtaaattggccaaccaaaagtgatggtcatcaaagaagggttcttgttcgattatatggtgaaggtgtagaggttttcttcaacagggtggatgaaatccaaacctttgagtg

SEQ ID NO: 23341 - DNA, 1556 bp, Glycine max
  Clone ID: PAT_MRT3847_121079C.1
gtttcgttttatttggctttgattttcttctgcaaccttatctcctgcaaagctttgattactgagtctaacttcccctgccacagtttgccttgtttacctggtattctggtctctccatgtgttctgttctattgcaagggatagaagatcttaactctgtttcaatttccctgtttttcttcacaagcagagctctgtttttaactggtctttgatcaaggatggccataaaggcaattgagttgttgaaaggaagcggaaaccatgaagagatatttgaagttcttgcagcagtggctgcatctttgggggatgtaatagatgatgtgaacactttgcaggtaacacctttaaagggggcaatgaccaatgaggtttttgaggtaaattggccaaccaaaagtgatggtcatcaaagaagggttcttgttcgattatatggtgaaggtgttgaggttttcttcaacagggtggatgaaatccaaacctttgagtgcatgtcaaagcatggacagggtccacgccttcttgggaggttcaccactggcagagttgaggagttcattcatgccaaaacactctcagctgcggacctccgtgaccctgaaatatctgctttgatagcatctaagatgagggagtttcacaatcttcatatgcctggtgcaaagaaggctcagctttggcagagaatgaggaagtggcttagtcatgccaaaagtttgtgctcccctaaagaaaccaagaattttggcctggacaatctagatgctgaaataaatatgcttgtggagttgttatctcaaggaaatcaacagattggtttttgtcacaatgatctacaatatggtaacataatgatggatgaagatacaagagcaatcactttaattgactatgaatatgccagttacaatcctattggatatgatctggcaaatcatttctgtgaaatggtggcaaattaccatagtgacgaacctcatgttcttgactacagtaaatatcctggtctggaggagcgtcaaaggtttgtttataattatttgagttctgaaggtaagaaaccaagcaatagtgaagtggatcagctagtgaatcttgcagaaaaatacactcttgcaaaccatctattttggggcttgtggggacttatttcgagtcatgtcaatacaattgactttgactacaaggagtatgcgaggcagagatttcagcaatactggttgaagaagcctactttattggactcaccaagtatcgtttcccaagatgggattgccaatggtgtgaaccattgacatggatgcttcttatgtatttagcatgttcagcttggtatgtgttgactaatatatagaaaggcatgatgtgatgcataaaatttgtaaataatatataactaaaaatgtgtgatttgagaatttttacaacagttatgttagtaatccctccttttgtgataagttgaggaatggaagtgagaattcctagtttgttaatggcttgggaattgcaattaatgggttattattcgcaaaacaattttttta

SEQ ID NO: 23342 - DNA, 426 bp, Glycine max
  Clone ID: PAT_MRT3847_12107C.1
tactcagttaaaaatatacttctgggcaagaatatacagggcgagagggttgcttccacctctttccctaaagaaaattgaagacatctctgagaaataaacattgtaaacagacatgtaaattcatttgaagacactctttctccctatgttttaatgtctttaatattgttgtgaggaccttcaaagtagcactgctgttttgacaatgaaaagatattattgagtttgtggtatacatgacatgagctcttcaaatgttgagttcttatggctgaaggaagcaacatgcaatcagtgatgcatcagaattttggtgaccttaaaggtattgctttaaaatgtttaactcaaaagcaataaaattcccctccttcaagaaaggaaatggagaacatttattgggcacattcatcttgaacatta

SEQ ID NO: 23343 - DNA, 341 bp, Glycine max
  Clone ID: PAT_MRT3847_121080C.1
acccgtacgtatcggtacaagaatacgtcaggatgcgagagtactacataagggcaatgtcgatagcatgtcactaacaactacattcatacaaattcaccattcccattggaaatcattaatggagtgaggcatcaactaacacattacttaaaaaagggcacgataaatcggccttacgctcatgttccatgcttacctaggcatgcacgcgaccaccaagcgcttcaatagagtcacctatgttcacttcactgcggttccatttaaaacatcaagagcgtgaaaatcacgacgtcacccaaattacacgttttgcaccacatcccgcattcaccatc

SEQ ID NO: 23344 - DNA, 2384 bp, Glycine max
  Clone ID: PAT_MRT3847_121081C.1
ctcattttgcaagctttctttggtttcacaccatttttctattgacttcatcacaatataaaagatcattagtgtcggtattatcaccaccatattcttttggacttcctctgctatttctaggtttcgttttatttggctttgattttcttctgcaaccttatctcctgcaaagctttgattactgagtctaacttcccctgccacagtttgccttgtttacctggatcatcggttataatgttttctctcaatttggtcatcaaggtattctggtctctccatgtgttctgttctattgcaagggatagaagatcttaactctgtttcaatttccctgtttttcttcacaagcagagctctgtttttaactggtctttgatcaaggatggccataaaggcaattgagttgttgaaaggaagcggaaaccatgaagagatatttgaagttcttgcagcagtggctgcatctttgggggatgtaatagatgatgtgaacactttgcaggtaacacctttaaagggggcaatgaccaatgaggtttttgaggtaaattggccaaccaaaagtgatggtcatcaaagaagggttcttgttcgattatatggtgaaggtgttgaggttttcttcaacagggtggatgaaatccaaacctttgagtgcatgtcaaagcatggacagggtccacgccttcttgggaggttcaccactggcagagttgaggagttcattcatgccaaaacactctcagctgcggacctccgtgaccctgaaatatctgctttgatagcatctaagatgagggagtttcacaatcttcatatgcctggtgcaaagaaggctcagctttggcagagaatgaggaagtggcttagtcatgccaaaagtttgtgcctcctctaaagaaaccaagaatattggcctggacaatctagatgctgaaataaatatgcttgaggagttgttatctcaaggaaatcaacagattggtttttgtcacaatgatctacaatatggtaacataatgatgaatgaagtaacaagagctatcacattaattgacgatgaataagcaagtaacactctaattggatatgatctggcaaattatttctgtgaaaccgctgcaaaataccacagtgacgaacctcatgttctagactacagtaaatagcctggtctggttcagcgtcaaaggtgtgtttataattatttgagttctgaaagttaggcaactaaaatcttactcccacataccactgaaaataaatattattggctgagatctggatttaggtatctcctatagatcttttctcagctgaaagaataaacttgctgttgctttttgttgatttatgatatttttccagcatctcattatacctttacctccttgctcggacaagggttatccctacatgagctgagaaattttatcattgaggtttccatgcgaattcgaaggcaccgaatccatgttctagtactctacttcctgtccttgctcgatgaggtcgttctatcaatatcctctctccgaatcgatggaaaccctagatctcactcggaaaacccctttcgccttttcggtttgtgtttgttgttacacgtttttagaaagagagagaaagggtaacagtttacactattaatcattctgtccttgctgatatggagcttgcaggcatttctttaacttatttgtagtatattggatgatttatttaatttgcttatgcactcttcagggtaggcacgaatgcaagccccccttatctcttcaacttcaatgttgacgtaattttaagaattgttttactgaccaaagataactcattaaagctttcaatcatgttagaaaaactgaagtcatatcttcaaaacgatgcttctgaatttcatacacgtttaccaattttaattcgaaacttgtgcacaggtaagaaaccaagcaatagtgaagtggatcagctagtgaatcttgcagaaaaatacactcttgcaaaccatctattttggggcttgtggggacttatttcgagtcatgtcaatacaattgactttgactacaaggagtatgcgaggcagagatttcagcaatactggttgaagaagcctactttattggactcaccaagtatcgtttcccaagatgggattgccaatggtgtgaaccattgacatggatgcttcttatgtatttagcatgttcagcttggtatgtgttgactaatatatagaaaggcatgatgtgatgcataaaatttgtaaataatatataactaaaaatgtgtgatttgagaatttttacaacagttatgttagtaatccctccttttgtgataagttgaggaatggaagtgagaattcctagtttgtt

SEQ ID NO: 23345 - DNA, 903 bp, Glycine max
  Clone ID: PAT_MRT3847_121082C.1
attctcggcaccctgttgatagatagctatataggctaataagctattggaatattagaagttgctatagctatagacacataaaatttggggataaggaaagatgagaaaccgtatggaaagattagtagttccatgctctttcagctgtgcttcccattcaagtgtggaattaggtgcacccaaaggaccaaaagaagattcaaaaggcactattgtttcaagaagacaagaaggacaagatagatcaatcatcaaggctaaaatgaagagaggcaagccttctgggtttctggttctaccaaagcccaatgtagctgctggcatacagagaataatcaagggcatcaagagtttatctcaattatttgtttacaagaaggaggatgtggaggaaatggaacctgagatggaaatcgggtatccaacagatgtgaagcatgtgacacatattggaattgatgggtcgaccattacaaataatgtcaagggttgggacaacatgaaggcacctgaattattgtctttgtctccaatttcattcaagcaatttgaattggccatggctagccaagctcaatatcccctcattaacgatcctaattcctcaaaatgtggttagaacacttctgggaatgttggcacttccaacttccaagtcccttcttctaattgtagattaatcatgattgatgacgatgtatttaggagttcatatacaagtgcataaattgaaaattcgtgaatgtttgtaatctctttcactctttgttttgctcggttcttgagatgcctaagcttcattacttcaagtcatccattttaaaaaaaaaaaaaaaaaaaaaaaaaaaaaaaaaaaaaaaaaaacaaaaaaaaaaaaaacaatcaaaaaaaaagaaaggg

SEQ ID NO: 23346 - DNA, 702 bp, Glycine max
  unsure (1)..(702): unsure at all n locations
  Clone ID: PAT_MRT3847_121083C.1
ccnctcataatatagagaatagcagccattggtctcctcaaattttgcgagccaatagttaccaccccaagaaatccagaacaaacatgaaacgaccctttataaaccctttcatgaagaattaactaacaataacaatattcctttttaacgtagagggaggacgatcaagaaataaacttggttcattctccctatagctatcaaataaagaaatattgaagatgggaaactgtggtagcaatcccaaaaccaatgagggtcctgaggcagtgcctgagcctgtgatcgaggaggttaaggttgagcagaaggagagtagtgaagcaaatgttgagaccaagttgaaggatcaaacccccaacgactccgagattaagtctctaggcacattgctcaacgagaaagtagaggaggcaccaaagacagaagaagtaacggctgaacccaagccagaagagcctaaaacagatgaggtaaaggttcaagaagagaagcccaaagcagaagaagcaaaggctgagacctaaagctaataataacgggcaagcgttctaccagagagggcttttatattttaaatatacacatttgttgcttttctgttcaatggtctaagagaatttaactagttctgttatccaaattgactagttggattctggcttcttggtttcatatgcgtttctataaatttcctcc

SEQ ID NO: 23347 - DNA, 417 bp, Glycine max
  Clone ID: PAT_MRT3847_121084C.1
atataaaaaaaaaaaaaaaaaaaaaaaaaaaaaaaaaaaaaaaaaaaaaaaaataaacacaaaaagacaaacaaaaaaataaaaaaaggggaaaaaacagacaaaaaaagagaaaaaaaaaaaaaaaagtaaaataagaaccccaaaacaagtatgaaagagaaattaaggaggagcgagaaaaacccataccaaagggggggatccaaccccgaaaaaaggataaaaacttaaccaaaaaaaaaatgttcattttaaaaaaaaaaagggtgggcgggtaaaaaggggggggatccacacccagggaggaaatgggtaaaacgacaccaaaaaagggtaataaaggccccacagaactgtaaaaagggaaggcatttacgcccaaaacgggacaaaaggggggggcaccccaaaaga

SEQ ID NO: 23348 - DNA, 204 bp, Glycine max
  Clone ID: PAT_MRT3847_121085C.1
gaaagagggagtgattcaaggtttggtgtcgagagatgtgtttccgccatctccgatccgaagcaaagcttatgcaaacgtaattctcacccttttctggttcacctttcccttcccaacaacacccatcaaatccaatctcatatgcacacacagctacttgcagtttcaactaaacccctctatctctcccaataaactaaa

SEQ ID NO: 23349 - DNA, 174 bp, Glycine max
  Clone ID: PAT_MRT3847_121086C.1
agtatcaacaataaacggggttttaggaggattttcatagggggtgaaggtttttccaatttttaaaatattacttgaagggacaaaattgttgttttacaatcgggagggacaccacgcccttttcattagcgttcttttccacattgttgtgtttcctcaaccaaatgatag

SEQ ID NO: 23350 - DNA, 487 bp, Glycine max
  Clone ID: PAT_MRT3847_121087C.1
tctacgcgttcgcccacgcgtacggataagttgacaaccataaacaatatgtgtgcatatgggctcaatcctggtatttcaggtactcgtcttttgggcaccatttcttagtccattacgcatcaaactgtttggaattaaatggcaacagtgaggacaccattgaattttgattctagcaagcagagctttttgacaatttttctattgaccttctttggtggaggaatttttagtggacaaaacttggagattggatcacacttatacaaaattcttcaattagcaacttgtttaaagtacctgtttgaaagaaaggcttgttaaaggttaagaatggaattgtctgggaatgcaacacccaaaaagagcgattgggtcctattggatcaaatatttttaaacaaactatatctatacaaagcattttgatgctgttagttggcaaaaattgtaacacttttctgggaattgttttttcaataaa

SEQ ID NO: 23351 - DNA, 155 bp, Glycine max
  unsure (1)..(155): unsure at all n locations
  Clone ID: PAT_MRT3847_121088C.1
tgacttttttggagtttgatctntgtgaattagagagactttctttattttnttaaaaggagggccggacggcggcttcttaattggggaggaagggttgtccctttggtttaaaaatggttcacgcggggtgaaaaatccattgggttttgggg

SEQ ID NO: 23352 - DNA, 444 bp, Glycine max
  Clone ID: PAT_MRT3847_121089C.1
gcgaggcttttgttctccctcctttccttgttcctcttccgtcctccttcgtttctggtggacgtggaccccacaccggcggcggcactcccacgttaacatacattaatcatgtctgttcaacagccgccatgtgccgccccgctgcaaaacaccacaatggtggctgttgacaaagacaaaaacagtgttcatgctttccgttgggccgttaatcacctcgacaaccccatcatcattgccgtccatgtcaagcacaaaaacttttctcatcatgtcaccaatgtgtttccacccgacgaagaggatgtagccaatattttcaataccttgcgtggaatgtgtacccgcaaagctgtcaagatgaaagaagccgtaatcgatgatagtgatgttgtgagaggacttttagagtatgcaaacaggaatgccatacatagtatc

SEQ ID NO: 23353 - DNA, 343 bp, Glycine max
  Clone ID: PAT_MRT3847_12108C.1
aaaaaaaaccctagtagcatcaacttgttttttttgaaacaaagggggggcctataatagtggtttttaaataattttcaataaaagcattctcggggaaacactttccttttataataataataataataataataataataataataataataataatgcggccgggcggggccatccattaatagttcaaacttcagactttttacactactaaaaatttttttaagaacagtggccacacttttaaaacaattcttttatttctaaaatttttgcacatgctgcaaaaaagcctttataaaaaacatgagacaattttttcaaggtgccctttttaagg

SEQ ID NO: 23354 - DNA, 184 bp, Glycine max
  unsure (1)..(184): unsure at all n locations
  Clone ID: PAT_MRT3847_121090C.1
gnnggcacgcgnacgtaagcacgcgcaancggcacnancaaccacggcaagacaaaangcacaaacccaancccnnaaanacnacaanacaccaancagcganacacggccncaaanaacaacnnnacaccagcancncaanaggancncaacnacnccaaacnaaccanncagaaaagaaacc

SEQ ID NO: 23355 - DNA, 236 bp, Glycine max
  Clone ID: PAT_MRT3847_121091C.1
tacggctgcaagagaacaacaaaagggggactgaggaatttagctacgttcatgggaccatggtacctacatgctggtaacacggacgaaggcttggactcatcactcctggacgatatgataccaatgaaaccaactgctttgagctttctgaaatttctggtcacgttgctgaatacagtgctgatcaatatgacagccggtttattcaacaaaaacttgaaactgctactact

SEQ ID NO: 23356 - DNA, 245 bp, Glycine max
  Clone ID: PAT_MRT3847_121092C.1
cttaactcgcggactgtgcaagtttggtctgtgtgacctgtgtgttgactcgtaagttcgcttactaaatccaaatatatatttttagttaaaaatcgaaagtgtacattgttgtgcatattaaataagcaataacttagataaaaaaaattttactagaataatttttaagtgttatccgtgttgttttttgttaattagaactaataaagttttatcttgagaatatatataatcttttaata

SEQ ID NO: 23357 - DNA, 2081 bp, Glycine max
  unsure (1)..(2081): unsure at all n locations
  Clone ID: PAT_MRT3847_121093C.1
tccgtatattcttgaaagatgatgacctcattgctggggctgtggtagacttcaacaacgactggaatggtttcatgaatgcaagtgacttngagaagtcatttgaagctgcacgtcatggtaagaaggattggaattcaaggaaattagaagctggctcaaacatttatgatgggttgcccgggaagatgattataattgtggagggccaatcggggaatacctccgcaacaaaggaaggttgaggacagtttcagatattgttcaagaggcatctgaaagcaggaataatattgtgacaaacttgactaatgaaattgagataacaaacgaaaaccttgataaaatgcaatataagtttaatgaaaagaccatgtccttgagtaggatgcttgaggagaaagataagcttcacaatgcctttgaagaagaatcaaggaatatgcagcgtagagctcgtaatgaggtacggaggatcttggatgaacaagaaaagctgagtagtgaattggaggaaaaaaagcggaagcttgattcctggagtagagatctaaacaaacgtgaggccctaactgatcaagagaagaagaaactagatgaggacaagaagaagaaagatttgaggaatgaatcactccaattggcttcaaaggaacaaaagatagctgatgagaatgtcttgaggcttgttgaagagcaaaagcgagagaaagaggaggcctataacaagatacttcagttggaaaaacagttagatgccaaacaaaagttggaaatggaaattgaagagttaaaagggaaattgcaagttatgaagcatcttggagatgaagatgatgcagctgttcagaataaaataaaggagatgaatgatgaattgcaagaaaaagtagacaatttggaaaatatggaggccatgaatcaaaccctcatcgtgaaggagcgccaaagtaatgatgaactgcaggaagctcgtaaagaattaataaacgggttagacgatatgctgaatggtcctagaactaatattgggctcaagagaatgggagagcttgatcagaagatttttgtgaataactgcaagaaaagatttcctcttgaagaagctgggaccaaaggtgtcgagctttgctctttgtggcaggagaacgtgaagaattcagcttggcatccatttaaagtggtcacagttgatgataaaccagagaatattataaatgaggaagatgagaagttaagaagcctcaagcaggaatggggggatgagatatattcagctgttgttacagccctaaaagaaataaatgaatacaatgcaagtggtgggtatactgttaaagagctatggaacttcaaataataaataaaggctacattgaaagaagttatcaattatattatggaacatatcaaaccacttaagcgcaagagagcttaggcaaagaaatataggtgtccaatgcctccgatggctcaacggttgtggagctatggaagttcaaggctaataggaaggctccattctaagaaggtatagactatgtttgtgataacattttcacaattaatggatttgaacatctgtaatctggcaaatatccctaaatactaacaatgaatcaattttctgaggttgtgtccgcggattttatgcccatggttggcccatctctatatatataattttagtccatggagcttatatttgtgtggctaaaaaaaaagaatttaaaacatggttgcggatctgtgcccctgacctcctgaccttcgtggcgggtgcagggggggataatgtgtttgtggtccttattttttttttatcagccgtggtcttggtcgcgacttttggcctgtgcggtgttgggtggagtgctctacccattggatgtgcctggctttccttattttctaagctttgcatcaccatctgttagttgctttctgttttattcaataacttcatcaagaggtttttggtttcctagaagttgcctaattttgctatcattgtttattatgaataattttagaagcagaagatgaaaatgaaatggcaatgaatgagaaataaatatacc

SEQ ID NO: 23358 - DNA, 139 bp, Glycine max
  Clone ID: PAT_MRT3847_121094C.1
gagcagatcagggcgaccaccggatttgaagaagtgcatggacgggaagcttcagatcaggctgaatgcaaatcgcatgggtgttggtactctccgtggcttggaccaggttatgaatgtaggtggtagcacactggag

SEQ ID NO: 23359 - DNA, 255 bp, Glycine max
  Clone ID: PAT_MRT3847_121095C.1
aatatgataattgtctaaaaataaaagctatacatgaatagccacagaatagaaaaacttgaattgtatcaaataagaccttcaagtaaccaaataacttatggaatgcttcacggaattaacactcaaacatcaaacttaatcaatcaaggatctatttttgattctaaagagctggaagaagcaattgctctacatggagttaaggatagaaatgatgagggcaaagcatctctattcacatgcagacctgca

SEQ ID NO: 23360 - DNA, 462 bp, Glycine max
  Clone ID: PAT_MRT3847_121096C.1
ctttctccgaggaatcaccgtcgtcgttggtgagcgagggggatgaagatttattagaaccatatgaaactgagatctctctaaaatgcttgcttttgcttcttctctctaaaactgcatccttggaatcaggcgagacagagttttcttcattctcgaaagtcgaaactttcccctcattttcattcttctttcagttatcgccatccttcactctttgcttctaataaactctctatttttgtttcttgaaggaattagggtttttattttcttctttttttctgtgtcgttttggtaattaatctgataaccgatgattttctttggtttcatgcgctggaagtgtttgattaggtttacatgtcatgacattttttttttttgctggtaaactttttagacttgcgtggttgataatcctggttgtatttggctggtgtttgaagttttatggttttt

SEQ ID NO: 23361 - DNA, 3767 bp, Glycine max
  Clone ID: PAT_MRT3847_121097C.1
tttgcttttaattaaattaaattttaacagggtcacacagtgttcgtgggagagtaaagcgtgggttagtgttaaagaagttctgtatttaggaaagtaaactttatcagtaatgtgatgtggaggaatatcttagaagagtctatataagaagaagaagaagaagaagaaacgtagttaaaaagtatcagtccgtttcatctcgctgttcgagattgtgatgtgatattgaatacatttactaaagtctcgagtgtggtctaaaaggttttaaatgaggttagttcaagggatatagaaaggctaagtggttttcacggtatactgatggaattatgtcttcgaggctgtcctcaagggcagttggcgtcttccaaaactataattgatgaattcttgggaacctttgcaaacacatctccacttagtttgaaacagtggtttggtagtgttctctttggagtccttggcatgccaattgcagcagctctaaagatgatccctgtgggatctgtctaaaatcagtgcagacaaattagttagccaggaaaattcgtggatgcctattattttgttggtgaagaccagaagagcagtggctatggacgcaaactttggcttctcagagtgtaagatactcaatggatgggagttcattaggtctgcgagagaattgcattcgctctagttcagcacaatgtacattgttctatgaattgggcagctaccgctagtatatctgctttaatattttttcttcggcactcaaaattttcagtgctgaggccgttggaacaaaattatttaattgttgggaattagtagcaggccaagattttagtcttgaactaactaaaatacaacaagggtgcacaggatggaattggtattgttgcaagcatattgcttgtagtgttcgtcactgccacaagtgactacagacaatcactgcagtttaaggatctggataaagagaagaagaaaattacagttcaggtcacgagaaatagttgtaggcagaagctttcaatgtatgatctgcttcctggtgatattgtccatctaaatattggagatcaggtccctgccgatggcctttttgtgtctggtttctctgtgttaataaatgaatcaagcttgacaggagaaagtgaaccggtgaatgtcagtgaacttaatccttttcttctgtctggaaccaaagttcaagatggatcatgcaagatgcttgtgactactgttggaatgaggacccagtggggtaaactaatggctactctaagtgaagggggagatgatgaaacacctttgcaggtaaagctcaatggtgttgctaccattattgggaaaataggcctctttttcgcagttgtgaccttttctgtgttggtccaagggctttttagccgcaagctgcgagagggatcccaatggatgtggtctggtgacgatgcaatgcaaattgtggaattctttgctattgctgttactattgttgttgtggctgttcctgaaggtttacctttagctgtaacattaagccttgcttttgcaatgaaaaagatgatgaatgataaggcacttgttcgtcacttggctgcttgtgagacaatgggatctgccactactatctgcagtgacaagactggcacactaactactaaccatatgactgttgtaaaagcttatatatgtgggaagattaaagaagtaaatggttctaaggtctactctgatttctcatctgatattcatgattctgctctagcaattctacttgaatcaatatttaacaacactggaggagaagttgtcaaaaacaaagatgagaagattgaaattctaggatcaccgactgagactgcactgttggaatttgggctgtcacttggtggtgatttccataaggaacgacaaaggtcaaaacttgtgaaagttgagccatttaattctataaagaagcgcatgggggtggttctccagcttcctgatggtggtttcagagcacactgcaaaggtgcctctgaaataattctagctgcatgtgacaaagttgtggactcaagtggcgaggttgttgccctcaatgaagactccataaatcacttgaataatatgattgaaacatttgctggtgaagctctccgaacactttgccttgcttacttggatattcatgatgaattttctgttggaactgctattcctactagaggttacacttgtattggaattgtgggtattaaagatccagttcgccctggtgttcgagagtcagtcgccatttgtaggtcagctggtattgctgttaggatggttactggagacaacataaatacagcaaaggctattgctagagaatgtggaattttaacagatggtatcgcaattgaaggccccgagtttcgtgagaagagtgaggaggagttgcttgatatcattccaaaaattcaggtaatggcccgatcttcaccaatggataagcataccctggtgaaacacttgaggacaacatttcaagaggttgtttcagtaactggtgatggtacaaatgatgctccagcacttcatgaagcagatattggacttgcaatgggcattgctggaactgaggtagcaaaagaaagcgctgatgtaataattctagatgataacttttcgactattgtgactgtagctaaatggggccgctcggtctacgtaaacattcagaaatttgtgcagtttcagctaactgtaaatgttgttgctttgatcgtcaatttctcttctgcttgtttgactggaaatgctcccctcactgcggttcaacttctatgggtcaacatgattatggacactcttggagcacttgcactagccactgaacctcctaacgaggagttgatgaaaagaccacctgttggtaggaaaggaaactttatcagtaatgtgatgtggagaaatatcttggggcagtctatatatcaatttgttgtaatatggttcctccagaccagaggaaaagtaacgtttcatcttgatggaccagattctgatctgatattgaatacacttattttcaactcgtttgtgttctgccaggttttcaatgagattagttcgagggatatggagaggataaatgtttttgaaggtatactgaagaattatgtcttcgttgctgtcctcacttccactgtcgtcttccaaattataattgttgaattcttgggcacctttgcaaacacatctccacttagtttgaagcagtggtttggtagtgttctctttggagtccttggcatgccaattgcagcagctctaaagatgatccctgtgggatctgtctgaaatcaatgcagacaaattagttagccaggaaaatttgtggatgcctattattttgttggtgaagaccagaagagcaatgcccagaagtagaaagtgcttctattcaatcctaatgcagtggctattgacgaaaagtttggcttctcagagcctaaggtactcaatggatgggagtttattaggtctgttgtaagagaattgcatttgctcttgttcagcacaatgtacattgttctgtgaattgggcagctcccgctagtgtatctggtttaatattttttttcttcggtactcaacattctcagtgatgaggccgttggaacaaaattatttgattgtttgaaatagcaggtcaagattttaatcttgaactaactaaaatacaaagccgttaaaagatttcaacacagataaaaaaaaaaaaaaaaaaaaag

SEQ ID NO: 23362 - DNA, 164 bp, Glycine max
  unsure (1)..(164): unsure at all n locations
  Clone ID: PAT_MRT3847_121098C.1
gggggngaggaaaaacaattaacaaagcgttttagagcgagtgcatacaagtgctcatttncgagcgcatattttcttttaataaccctttctcttaaaattanagncgaaaatggggagggggaaagagtgggggtcaaanaggggggggaggatattcacca

SEQ ID NO: 23363 - DNA, 1342 bp, Glycine max
  Clone ID: PAT_MRT3847_121099C.1
cactgccgccgcacccccacctctctcgctcctctcgccgcctccatcgccgccccctccggatcccccgacactaggaaaacactcccgcgatgacgacgcgacaaaacaataccaatttgtgattccatggcaaccctcaataacctcacagcagagaaaaagggtactcttaacaacaacacaagaaacggatttcacacaattgaggatcagagaaacaaagacaaccacaacaataacaataacaacggtgatgactgctcaagtgcatcttcaattactgtttccaatgaggaaagtgggaaaagcacgtctcaagaatcgattatggtgcccaacagcaacggtttcatccaccatgttccatgcatttccactctcccttggccttatccttttccctcagcagcacctgctatgtgccctccagggtttcccatgtcattctaccctgcagcattttggaacattccatggtttccctcacaacactcacaccattctgctcctactccaaggtctcccagttccggtcctaattctccaacactagggaaacactcccgcgacgacgacgcggaaaaacaagaccatttgcaagaagaatcaccctccaggcagagaaacgggtctgttctggtcccgaaaacattgagaattgatgacccaagtgaggctgcaaagagttccatatgggcaactttagggatcaggaatgagtgtgtcgctagtggtggcatgttcaagggattccaatcaaagaaagatgacaaaatttttgttgttgaagcctctccagtggagactgctaacccttgcagccttgtctagatcccttaactttcatgagaactcttgaattcagcaatagcagcaacaacaacaactctttgtaagagacggtgaccatctttcagcaatgggtgttttggaattagcctcattgagtttggaatgaagtgaaggttggtagtctcggaagtgaaatgaactaattttctaggaggttttgtttagacgttggtggtgggaagtggtaactaatttttgtctttctttttttatgtccccctatattttttgtttttgcttttgctttttatgtgcttagtttggtgagttttgagttggtgtatatatataaatatatgtgaaaatactgatgggaaaaaaaaaaggttttttccatgtataaaaattcagaggtactgtatttttttatgcaaatgtaaaatattgagacttcctttgttttgtggaaaattcagtgtattttgtggatagttccccatctctctgaatttgaatgtcagtaaaggtatctgttcttttttttttg

SEQ ID NO: 23364 - DNA, 479 bp, Glycine max
  Clone ID: PAT_MRT3847_12109C.1
ttgtttcgtgggcaactatatggcagacttctatggcttgtatgtgactggggccaccaccggcctaaaattggacccttctaagcgtgttgtgtacatcacaccacaagcgttgatgggccatttggaacttctaaaccatgagaatttaattgtgctagatgaatgccatctggctgaaccacattatggcatgctgcgcgaattaattcgcaaatcaaaattgccatcattgtgggtttctgcaaccctgccagaagctctacagtccatttgccaacttgtgatagacattccaattgcaaatttatgggatgtcgattcacaagtggtcaaaagggaaggagaaactttgcaggaggtgctacaagactatgagtcatattgtcgtgatgtagggaaccaactttctcctagtcaaaaggggctcatttttgtgcccactattgctatggcagaaaggctggctgactcgtgca

SEQ ID NO: 23365 - DNA, 196 bp, Glycine max
  Clone ID: PAT_MRT3847_1210C.1
aggggctaaagctccaaacctccaaagaacaaagatccaaacttgagtggagatgtcaggcagagggcggtgacggggaggatggggatggggacgaggaggtggattcaatacattagcctctcaagttccatttgatctatttcctgacgctgatactgtgcctgatgttaaccttgatgatattcatgatgat

SEQ ID NO: 23366 - DNA, 599 bp, Glycine max
  Clone ID: PAT_MRT3847_121100C.1
cgacactaggaaaacactcccgcgatgacgacgcgacaaaacaataccatttgcaagaagaacaaccaccctcaaggcagagaaacggttctgttttggtccccaaaacactgagaattgatgacccaagtgaggctgcaaagagttctatatgggcaactttgggcatcaagaatgagtgtgtcactggtggaggcatgttcaagggattccaatcaaagaaagaagagaaagaccatgttgttgaagcctctcctgtgttgagagctaaccctgcggctttgtctagatcccttaactttcatgagaactcttgaattcagcaatagcagcaacaacaacaacaactctttgtaagagacggtgaccatctttcagcaatgggtgttttggaattagcctcattgagtttggaatgaagtgaaggttggtagtctcggaagtgaaatgaactgtgaaatgaactaatctactaggaggttttgtttagacgttggtggtggggagtggtaactaatttttgtctttctttttttatgtcacactatattttttagtttttgcttttgctttttatgtgcttagtttggtgagttttg

SEQ ID NO: 23367 - DNA, 1003 bp, Glycine max
  Clone ID: PAT_MRT3847_121101C.1
gttaaatttcggtgaaaagtagtcctgctgatgagagtagacacgattgtctcacgtggcttgactcaaagaaagaatcttcggttctctacatttgtttcggaagcctttctctcatctccgacgagcagctttaccagattgctaccggactcgaagggtcagggcattgttttctttgggtggtgcatcgcaaaaacaaagacggagaagaaggagattcttcttcttcttccggaaagtggttgccggcagggtttgaggaaaagatagctaaggagaacagaggcatgctgattaagggatgggcgccgcagccgttgatcctgaaccaccctgcggtgggaggatttttaacgcactgcgggtggaacgcggtggcggaggcgatcagctccggggttccgatggtgacaatgccgggtttcggggaccagtactataacgagaagctgataacggaggtgcacgggttcggggtggaggtgggggcggcggagtggagcatttcgccgtacgaggggaagaagaaggtggtgagtggggagaggatagagagtgccgtgaagaggttgatggatgatggagagaaagggaagagaatgagaagcaaggccaaagagatgcaggagaaggcttggaaagctgttcaagaaggtggttcttcttacgacagtctcacggctctgattcatcatttcaagactcttgtgcctaatcatgatactacgggaaatgggctccatcatgggaatgggaatatcgatcactgaatgaatattacattgattcgagtttcatgtttttgattattagttatttatcaagtgaatgcatgaatgccataattttagggaatcttaatccgggtaactggctagctaccctaaatttcctaaatctatcatccttaatttgtaacaattgataataataaatcaataagatgtatgtcagtggattctgataaaaaaaaaaaaaaaaaaaaaaaaaaaaaataaat

SEQ ID NO: 23368 - DNA, 314 bp, Glycine max
  Clone ID: PAT_MRT3847_121102C.1
ggggggggttaataattttgaatttttcaaaacaacctgaaaaaacattttggttgacaatttgacacttaaaatagtagtagcttataagctttcacctgcccttagggcaacacttagcttaccccataaaggggggtgcatacatgcatgccttctttttttggtctccagttttccattaacaaaatggtttgacacaagtgacattttttcttggggaatgggaaatgccaaaaaagaagggggggcaaaaaaaatgaaaactcttttttttggtcaactttttgccttgccattgggttttggggatg

SEQ ID NO: 23369 - DNA, 366 bp, Glycine max
  Clone ID: PAT_MRT3847_121103C.1
acgcaatgcgtacgtatagcgtgttgtatagagactcgaaattcaatgactgtgcgtggtcagagcgaaggatggaaaacctgcgaacaaataaacccttgcatacatcaaattcgcggtcaaaatagaaaagtccaatagaggtcttctcactagcgtcacctgaatggaaatggaccccctgatagagataagccagcggggtggaggtactctcagtatggaccgctacacttggcagtgctttaacgcaccgatgactgtcgatatcttgattgcctttctcggcacgttcgtcagatagccgcagcaagctgtaaatggtgggctgcccctacgggccaaatttatggctgtaggggacct

SEQ ID NO: 23370 - DNA, 303 bp, Glycine max
  unsure (1)..(303): unsure at all n locations
  Clone ID: PAT_MRT3847_121104C.1
angttgntgnagngtangtaagntngganttagngtngagatngagnngangagngatnanagnttgnagnaaantaggaannggtantgnggtaaatgggtnnttngtttnagaatttgtgnntntattgngntgatntgagtagattnttgagggaanggtaatggtgtgtgtggnggagngangnttngtgantgattttgtgttgagggggnntatgatgngaggtgtngggngattagnngngggatgggggggngnagaagagggaggngnanggggtnaatagtggnnnagtngng

SEQ ID NO: 23371 - DNA, 394 bp, Glycine max
  Clone ID: PAT_MRT3847_121105C.1
catgaagcttggcacaaagctgaagataaatatgttttgagtgcactggccgttgctggtgtggtggcattgataggctcatctgatatcatctcatcaattgatagtcttcctttaattcctgggcttttagacgtcgtatgcattggctacactgggtggtatgcttacaagaacttcgctttcaagccagacaggcaagcttttctactaaaggtaaatgaaacatatatcgaaatacttgaaagcagcttacatagttaggaatcgatgcttatattcttttcacacaaaaaagatctatctttcagtttttattgaaaatgcaaccttgtcacaatcagcttactgaccattactttatcgcatgtgatgtaatttaacctgaaaataa

SEQ ID NO: 23372 - DNA, 590 bp, Glycine max
  Clone ID: PAT_MRT3847_121106C.1
acctgtctccattttttcttccatttccccctatcttccctttgtgtattcatctctcaaacatgatgtcaagctccaaaagatgctgatgtatttgatgtaaattgtccatagatttggtaaaggtgaaggtgatgttttagaatttaatgtggttgaaatttacggccttgttaaaaaaggtatatagtttagttatatggtttacagttaatgagaatagttctgagatctcataagtaataataaacactcatcactcatctcatgtaatgtgtgcaaggaatgtgctacgagttgtgtatcttgcgctgttaaacttgtttattgactagtgatctgtattctgcagtttttcttttccccacatttagctcatttacactgtttgcacagaagaggaaatatgttacaagtttttttttttttattgcgaaaagtttagggaaaggggaagctacaattcctaggccagggcttgccaagggattatggtgttctttataaacagcataccaagatggatgcgtatcaaacctaaggcttgtcaagcaaagtgccttgatccttactagttaaccaacttctgg

SEQ ID NO: 23373 - DNA, 398 bp, Glycine max
  Clone ID: PAT_MRT3847_121107C.1
ccacgcgtccggttctaaagtctccttgacgtttcagattctgaaggctcgcttagtgagattggctcactaagcgcgagttagtgaattttagcttagcgagctgggcgcgctgagctcgagaagagacaaacgactcgctgagcgagcattgcggcacgctgggtgagcacatctctgactaatcctcttctagggtttctcatcacgctaagtgagctgagtgcatcgcttagtgaatgtcacttgctaagtgcatatgcctcgcttagccagacaccaactgcttgaccttctcttcttttagcctgaaactaaagtggtttcaatattaattcacaaaatgagagtatctactgaataaaatcaaactaaacttgaaaatatgtacaattcct

SEQ ID NO: 23374 - DNA, 508 bp, Glycine max
  Clone ID: PAT_MRT3847_121108C.1
acaatgctatatgcaccaccacgcccttgccactgcagctagaacttcaacacagcgcctaatagtgagcaccaaaccaaaccaaattgtatgcaaagcaccacataagcaggttactgttcaagagggtgaggacactactactggcctagtctctcgcacgttggtcctgactgtgctcattggtgctggtgctgttggctctaaggtggcacctgcatgagcaccctatgtacaagctgccaatgtgtctggaataccaaacacaaacacagacttcctttcatacgatgggaatggattcaaactctcactgccctcaaagtgtaacccaaccagagaggtagattgcccagctcacgtactcagatgtgatgacaaatgagattcaaccagctatgatgctgtcatggtcactgcaactgacactaactccatcactgactatgggtcacctcatgagttactatctcaggtgtattacttgcatagcaaacaagccttctat

SEQ ID NO: 23375 - DNA, 1129 bp, Glycine max
  Clone ID: PAT_MRT3847_121109C.1
tacggctgcgagaagacgacagaaggggccaagcaaaaccctaatccctctttcttcctcttcctcagtagtgcgattttcgattctcttctctgcaactatgcctaaccctaaggtcttcttcgacatgaccatcggcggtcaacctgccggccgcatcgtgatggagctctacgccgacgtgactccgagcaccgccgagaacttccgcgcgctctgcaccggcgagaagggcgccgggcggagcggcaagcccctccactacaaaggctcgtccttccaccgcgtgatcccgaacttcatgtgccagggcggcgacttcaccgccggaaacggcaccggaggcgagtcgatctacggcgccaagttcgccgacgagaacttcgtgaagaagcacactggtcccggcatcctctccatggcgaacgccggtcccggaaccaacggatctcagttcttcatctgcacgacgaagacggagtggctcgacggaaagcacgtcgtgttcggacaggtcgtcgaggggatggacgtcgtcaaggagatagagaaggtcggatccagctccggcaggaccgccaagcctgtcgtcgtcgccgactgtggtcaactctcttagatagacgacgttgaccctaggcttttatctctgtgtcggtggctctgaatgtgtcgtttctttcggtgtcgtttttgcctttttttttctctttcccatgtcgtttaggggattgcggtgttatggatatcatttcgaaacccttcccctttgaatccttcctttcctttctaaaatatcagtatcatgtggttcgttcatagagtgaatggagtctgttatgagaaacataaaaaaatatgatgagctaccttcaataaaaattaggacctctattattcgcctagtaattctctttaatcttcgattattatttttatatacgtttagttgtttctgattataaactgtggaaaattggcgttgattaaataccatagtttacgataattagaacctacaactaggaacgttcattggtttgatggattgatttttgtgcagataatacatacgactgtgttatttttgaggaaaaaaaaaaaaaaaaaaaaaactcgagactagttc

SEQ ID NO: 23376 - DNA, 253 bp, Glycine max
  unsure (1)..(253): unsure at all n locations
  Clone ID: PAT_MRT3847_12110C.1
cgcaaccaatgtatccaaactctctttactataatatgttcataaaaagtaaataaaaaaatcttaatataatgatatttgaatttttgtncttgatctagaaattatgacctcgtgaattgacataaaattacaacagaccatactatgcttggaatatattgtcctttttttttatcaaatttctcggggtaaaagtttttttcatttngactatgcatgatcactctgtacctttgcttgttttttgtct

SEQ ID NO: 23377 - DNA, 997 bp, Glycine max
  Clone ID: PAT_MRT3847_121110C.1
gggggcacgcgtccgtacggctgcaagaagacaacggaggggggagcaaaaccctaatccctatttttcttcctcagtagtgtcatttacgcttctcttctctgcagcaactatgcctaaccctaaggtcttcttcgacatgaccatcggcggtcaatctgctggccgcatcgtgatggagctctacgccgacgtcactccccgcaccgccgagaacttccgcgcgctttgcaccggcgagaagggcgtagggcggagcggcaagcccctccactacaagggctcgtccttccaccgcgtgatcccgagtttcatgtgtcagggtggcgacttcaccgccggaaacggaaccggcggcgagtcgatttatggcgccaagttcgccgacgagaacttcgtgaagaagcacaccggtcccggcatcctctccatggcgaacgccggtcccggaaccaacggatctcagttcttcatttgcacggagaagacagagtggctcgacggaaagcatgtcgtgttcggacaggtcatcgaaggattgaacgttgtcaaggacatcgagaaggtcggatccagctccggcaggacctccaagcccgttgtcatcgccaactgcggtcaactctcttagacgacgttgacccgcggctttaatctctgaatctgtgttatttctttcggtgtcgtttttgccttttttttctcttcttttctttctcgtgtcgtcgtttaggggattgtggtgttaaggatatcatttcgaaacccttcccctttccttttcaatatcagtatcatgtggttggttggttggggttcatagagtgagtgaatggagtctgttatgagaagcataaaaaaaacatgatgagctaccttcaataaaattaggacatctataattcgcctaataatactctttgctcttcggtttctatttttcgctgtgttctgaatttatggcacttaaatgttaattagcgtttagcgtttaatt

SEQ ID NO: 23378 - DNA, 509 bp, Glycine max
  Clone ID: PAT_MRT3847_121111C.1
ccacgcgtccggagaaattttaccacaccaaccgcacaagacacaatagggtcagtaatgataatttttactttgagccatatataaatcattctttattttaaatatgagggtttatatttagacatttataacttttaagcaattagttgatgtttctctctttttatctaatcatattatatatatatatatatatatatatattcttctttctcttttttaagatgtcacataattatgaatgtctatgtattcttaaatagatcatcaatattccttttcttatttctcttctcctatgatatcataattctgattatatttatatttttttcttgtacttttcttttctccctaagtattggataatacattgagtctatcaaacattttcctaataatttttatcaagaggtgcattattttcttttttaagcctaagtaagaggaacaaatgaattacactcaattatactcctttctttcgtcatcgactataagaaaaa

SEQ ID NO: 23379 - DNA, 363 bp, Glycine max
  Clone ID: PAT_MRT3847_121112C.1
gttcacagagagaatggctgcggaaaacgttgttgagttcacagacttacccgtcaagaggccaagagaagaagaagaaggaaccaatggcgtctccaacgacgccgtttcagcgctccccaatgaccctcaataccctggcatctctgcggttattcccggggaggcacattccttgaagatggaaaagattttgtttcaagggaagtctgactatcagaatgtcatgtcttccagtcatcaacatatggcaaagttcttgttttggatggagtcattcagcttacagaaagggatgagtgtgcctaccaagagatgatcactcatcttcctctttgctctattccaaatcccaaaaaggtt

SEQ ID NO: 23380 - DNA, 255 bp, Glycine max
  Clone ID: PAT_MRT3847_121113C.1
ttaaacacttatcaaatatgagtacaaataagatgacttgacgaacaatactcctcttctacttcaaatgaacccgcttcacaataagattcaccatctcatacacaatggcaaacccatttccaaatccctcattcctgttcactacatttatgaagtttgcaatgacataaatcccttgttgccttcttacccttaccacatagctcacactaaaatcttggcttattatctttataataatatatatgatct

SEQ ID NO: 23381 - DNA, 1300 bp, Glycine max
  Clone ID: PAT_MRT3847_121114C.1
ggtccctactcagttcacagagaaagatggctgcggaaaacgttgtagagttcacagacttacccgtcaagagacctagagaagaagaagaagaagaacaaaccaatggagtctccaacgacgccgtttcaacgctacccaatgaccctcaataccctggtatctctgctgttattcccggttggttctcagaaatcagcccaatgtggcctggggaggcgcactccttgaaggtggaaaagattttgtttcaagggaagtctgactatcagaatgtcatggtcttccagtcatcaacatatggcaaggttcttgttttggatggagtcattcagctcacagaaagggatgagtgtgcctaccaagagatgatcactcatcttcctctttgctctatttcaaaccccaaaaaggttttggttattggtggaggagatggtggagtcctgcgggaagtagctcgtcatgcctcagtagagaagatagacatttgtgaaatagacaagatggttgtcgatgtctctaaacaatttttccctgatatagcagtaggttttgaggacccacgtgtaacacttactgttggtgatggagttgcattcttgaagaatgttccagaaggaacttacgatgcagttatagtggattcatccgaccctattggccctgctcaagagctgtttgaaaaacccttttttgcgtccgttgcaaaggctcttcgtcctggaggagttgtgtgtactcaagcagaaagtatatggcttcatatgcacatcattgaggacattgtggctaattgtcgccaaatattcaaaggttctatcaactatgcatggaccacagttcctacatacccaagtgggatgattggttttatgctttgctcaactgagggtcctcttgttgatttcaagcatccagtgaatcctataaatgagaatgatagtcagcaatcaagaccattgaaattttacaactctgagattcatacagcggctttctgtttgccatcttttgctaagaggaagattggttctaaaacaaattgaaaatatttttcatgggattgaaggagcaaatgtggctgtcggcattcatccttttactggattggtccatccatcaatgaaaagtgggataagagcttcaagatgacaatgtagagcaacttttatttcatgaaatgagttgtagatgatggattcagttgctagtgatttacattattgacattgtggaacttcgtttagcagtttagcaaacttttgtttgatgcatgtgcttgcccttctccatttat

SEQ ID NO: 23382 - DNA, 175 bp, Glycine max
  Clone ID: PAT_MRT3847_121115C.1
atccccccttccctaagcttgatttctcttgaaggggccgccctttttttttttttttctcttttaggagaaagcagtcaaacgctctgagatgggatactacacgtctctgtcaactccatattgaaagttgtaaactcataagaacaaaaccaccacacatgccgaaggatga

SEQ ID NO: 23383 - DNA, 188 bp, Glycine max
  Clone ID: PAT_MRT3847_121116C.1
agaacatacacattacattactaagctctttgctcattagagtagtagcgatggctagcctcaccgttgcatgtgtggttactgtgatgtgcatggttgcggtggccatgagtgctgaacccatggcacacgccgcaatcacgtgctggacaagtcgactccgacatgcctgacgagcttcagttatc

SEQ ID NO: 23384 - DNA, 1401 bp, Glycine max
  Clone ID: PAT_MRT3847_121117C.1
tccctccccactgaattgagttcacagagagaatggctgcggaaaacgttgttgagttcacagacttacccgtcaagaggccaagagaagaagaagaaggaaccaatggcgtctccaacgacgccgtttcagcgctccccaatgaccctcaataccctggcatctctgcggttattcccggttggttctccgaaatcagcccaatgtggcccggggaggcacattccttgaagatggaaaagattttgtttcaagggaagtctgactatcagaatgtcatggtcttccagtcatcaacatatggcaaagttcttgttttggatggagtcattcagcttacagaaagggatgagtgtgcctaccaagagatgatcactcatcttcctctttgctctattccaaatcccaaaaaggttttggttattggtggaggagatggtggagtgctgcgggaagtagctcgccatgcctcagtagagaagatagacatctgcgaaatagacaagatggttgttgatgtctccaaacaatttttccccgatatagcagtaggttttgaggaccctcgtgtaacacttactgttggtgatggagttgcatttttgaaggatgttccagaaggaacttacgatgcagttatagtggattcatctgaccctattggtcctgctcaagagctgtttgaaaagcccttttttgcgtccgttgcaaaggctctccgtccaggaggtgttgtgtgtactcaagcagaaagtatatggcttcatatgcacatcattgaggacattgtggctaattgtcgccaaatattcaaaggttctgtcaactatgcatggaccacagttcctacatatcctagtgggatgattggttttatgctttgctcaactgagggtcctcttgttgatttcaagcatccagtgaatcctttaagtgagaatgatagtcaacagtcaagaccattgaaattttacaattctgagattcatacagcggctttctgtttgccatcttttgctaagaggaagattggttctaaaacaaattgaaaatatttttcctgggattgaaggagcaaatgtggctgtaggcattcatcctttcactggattggtccatccatcaatgaaccttggaataagttaatatcttcaagatgacattgaagagcaactttacttctatttcatgaaatgagttgaagatgctggattcagttgctagtaatttactttattgacattatggaacttaattagcagtttagcaaactttttgtttaatgcgtatgcttgtttttttatctctttgaaattagttgttcgtaattagtattttagtattttatataattaaaagtttagatttaaatatatttttcatacttagtatatcgatttt

SEQ ID NO: 23385 - DNA, 143 bp, Glycine max
  Clone ID: PAT_MRT3847_121118C.1
ggatcctctttagctttcatcctcctaagcctctgcgagtctctctatcatgccattttaatgcacgtgttacttattaatatgtagaatgtattatgagatgagaaggagaatcgggtcgcgggcgtcgtgagaatactgca

SEQ ID NO: 23386 - DNA, 414 bp, Glycine max
  Clone ID: PAT_MRT3847_121119C.1
tggagatagagttcaacgagctgattatcgaattaagtttctaattatctacaagttcgtttgttacgttcgaactcctagttggaacgtacacattactaaatggaagtgaaaatgctacccatgtgtaatgcttgttttgtcattggtcgccaccaccaattaagtttcctgtgttattctgatttttttcatctttctctctctcgtttactagtagaccaccttttctaatcatttgttatccctacatctatactatcaatgtcatagcatattcggataatggtgaatctaattattatgcctcctttcttcaatcttttttcccgctttgtctgattgtttacatttttcaaatgtgagcccttttaatcaatttttttactagctctcgtgtcagccttctttttt

SEQ ID NO: 23387 - DNA, 850 bp, Glycine max
  Clone ID: PAT_MRT3847_12111C.1
tgcccacgcgtccgacggctgcgagaagacgacagaggagtagagaaccaaagttccaattttttggtttggggatagatagagtgatacacatcacattttctcaaagtaatttattaattaataaataaatggcggcggcggcggcagtgacggtgctactcccacctaggattccgaccgccaccaacgttacccgctgctctgctttgccttctctgcctcctcgcggcaccaacactaaaaccactttgctcttatcttccctcaaccacttctcagtgtcccgaaaatcttctctgcttcagaccagagcttcttcagaggaatcatcctcagtagatgccaatgaggtgttcacagatttgaaggaaaagtgggatgctcttgaaaacaagtccacagtacttttttatggtggtggggctttagttgctgtttggctatcgtcgattcttgtgagcgccatcaactctgttcccttgcttccaaagattatggagttggtggggctagggtacactggatggtttgtctaccgataccttctgtttaagtctagcaggaaggagctagctacagacattgagtcactgaagaagaaaattactggaactgaatagagtggtgttagcaggtaccaagtcaagtttatcttctgtgagcatcatttgtttttgttgtgctgtttatctcatgtataagagtcatatgtatcccttgaagtagaatagaattcctctcaacctgtaatgaacccatttcattgttaaaaataatgtagcaaattttacgtatatggctctgaatggaaaccattatcctttcaaaaaaaaaaaaaaagggcggc

SEQ ID NO: 23388 - DNA, 445 bp, Glycine max
  Clone ID: PAT_MRT3847_121120C.1
aaaaattcttgccaaacattatgctaaaagaggattttgttttgtcttgcttggatgcactttctttaaaaaaatttacacgaccaacatttttaatggggtagattccaacactgtcatgcaaaccgaaaacgtcaatgaatttttggaaaacaggctcctttgctcactccaatattggcggcgatcttattttttgcaacagctgggcttcatttcattccaaaaaacaccttttctcgaatgcttgctggtctttgcgacacacgtcaaattcctttgtctggtggaacatccgcccaacataatcctccatctactttgggcacttttggtgcggatccctcccatagccaaggacgcaactggtgacgtcacgacccttatgcatgcaataataaggggtctgagcctgcttcttgcgcttgataaactccaaattctt

SEQ ID NO: 23389 - DNA, 332 bp, Glycine max
  Clone ID: PAT_MRT3847_121121C.1
ggatacctaccagaaatttctaaattttcctctttggctacattaattcttaccttgacttcaaggaacctatcatgtccccaaaataccaaggtgcaaaatggaagctattctcctgatatcaaatgcactccattcgctgacacctgagaaaggttgagcggtactctatttgaggacttgcctttcagaagagattcctgtttcatacccaacaaaagccgcccttcctgaccttcgcagctctgcgaatcgaccctactggcccacccagacacttccgtgcagaccagggaacagaacaatttagcctgtcccattgatgtgggccc

SEQ ID NO: 23390 - DNA, 146 bp, Glycine max
  Clone ID: PAT_MRT3847_121122C.1
ttgttattttttgtttgacattgttagtgacatgggctattaataggagggccttactacggagcactaaaggctcccaagttacgaaagcgaacactttgcttcactgatgggcagtacacagatgaatgcatatgacacggcca

SEQ ID NO: 23391 - DNA, 151 bp, Glycine max
  Clone ID: PAT_MRT3847_121123C.1
cctttaaaaggcctattatgataacttggaagcccatcactgactagatgctatgtgcatggacaaagtttgtgtatcccaaatagtcaagcacatcttcggagaatattatggctccagctttgaaccagatctgctccttgaagtgcac

SEQ ID NO: 23392 - DNA, 228 bp, Glycine max
  Clone ID: PAT_MRT3847_121124C.1
ggcggttcgagggcaaacttgtaattgtttttggccaactgtaaccttggctgccttgttctgttctatccctgctttgttcaattgttctgggatttaatcccactaaaacaggtcttttattcaaggttttgggctctcttctaagtttaatactttttcttaaaattctaattggtaagaatggtgaccactggccttcccactacctgccatagcatttcaatg

SEQ ID NO: 23393 - DNA, 1011 bp, Glycine max
  Clone ID: PAT_MRT3847_121125C.1
aaaatccctaaacgccatccgaatttcccaattgtggcataggaatgtcctaaaagccatccgaatttcccaattgtggcataggaatgccctcttgttctctatttcaccacacaaattcccaattctaacttggtttttttttgtctctcacacactcctttcaatctccaattaattacttttcttcaatttgaagcgtgtctgaagttggttgaagcattgtgttattgttctggttttggtctccgaggtttgtgtcggattccgatgtattatgtaaaagaagctgcgcatgtcgaccccatgttcgtagctgataacaccaaccccaaggattattacaaagtgctggaggttgaatatgatgcaaccgatgaaaatatcaaattaaattaccgaagactcgcgctgaaatggcatcctgacaagcacggaggagatagtgctgttactgcaaaatttcaagagataaatgaagcttacaatgtattaagtgatcctaccaagcgtttggactatgatttaactgggatatgcgagattgaaaaatatagcttgcaggagtatcttgccagatttaaaagcatgattcttacctgcaatggacttggtatcaatcagacagacagatggtctcagcaattgattgaaaattttgagtccctagataaataaggcatctgaatcacaatttcggccagtggagtgatgaataagaatatctaagcttgtcttttttctttaacatgctcttaaattccaccacactcgatttcactgagttttgaaacctccgtaattgacaatgcaacctggtctgacggtatcatccgtactactgtaacattatgctacatcaatgtgtacgtttagaatgatctgttgtaataaaccttgtacaagttttctttcatgcatcttccctcttagtttgttgactggtcggtaataagttgcatttacctgtatatttaatcaattaatccatttatcattctctatcaaaaa

SEQ ID NO: 23394 - DNA, 370 bp, Glycine max
  Clone ID: PAT_MRT3847_121126C.1
cccacgcgtacgcacggatacacactacgttctatcaaagccagtgctaggatcaatgaggggaatcaacgaatctacctgagggacttgcatattggatgatctaggcaattatgcgtctagacagaaaactgtaccgcagaacaaagcattgcaccagttcccaaagctggtctggtaagtggaaacctaccttatgctaagacctgcacatgagaatactgatatactcagaaatatgcctctacctcgcaattgcttatgcagtttactcttgctgagaaggatattgattaccacaaagtctcccataatggatctgatataaaaactggagatgctcaaaagggcgctcaaccagttgttccca

SEQ ID NO: 23395 - DNA, 386 bp, Glycine max
  Clone ID: PAT_MRT3847_121127C.1
ctgatcgtcctgaggcatcgttgacgaactccgacgacccgttatataaaaccggtcttgcgatatttaatccatctcaatatttgttgcccatcaagaggccgttactatcttcactctagcatccgtgttgtattcgctaaccgggtgcccgatggcaaagagaagcttcgaaatgagattcagcaccccgaaccacgttattcaccatacaaaccgtctcgtgagcctacctcgctacgcgtaagtacaaaattcagcgcagacaaaggtgaacagagaccgtcacctcggcccccaagctatcgtgcaactgatgattgcccacctcacccgttccggcctatcccctcgatccgcgctgatgtcgtcggactcgagaatct

SEQ ID NO: 23396 - DNA, 429 bp, Glycine max
  Clone ID: PAT_MRT3847_121128C.1
ctgaaaagaagttaaagaatgatagaaaatctaaaaatgtctacatagcctgggaagacaatttgtcaacatccttcaaaatttaagatttagggttgacactttagcggccacatttgttcacacataaatagcagtttctgcaatgagaacacacatagttgcctcgcactattaaaggtctatgccttaatggtttgtagaatctgttctggagatatgagcaagcccacagattatttttttgtttttcctgtgggtgtgcatggtttacatgtgatgcaaagttgctgttaagctagcttggcaatcatttggctggcatggacatagcacattgctatttaaagggtaatgctgatgctgtggagttttgtccacatgatccctaccataatgttttagcggtatccacttacacattacaag

SEQ ID NO: 23397 - DNA, 271 bp, Glycine max
  Clone ID: PAT_MRT3847_121129C.1
acaggctcctgcatgagtctgaggggaagactcttatgaagtgaagttgaccctctgagcaacatctaatcctgatactcatagctcattcatgctaactaatatggtctatgacactgaggcctcagtaagaccaaacgttctcgccttctagagcgctcatgaccatgactctctctattttgatgatcatgacatgaatattcctgatcatacaaaggcagctgacaagtccaaaagtaacaatctcaagccgtgcgtactatctact

SEQ ID NO: 23398 - DNA, 1062 bp, Glycine max
  Clone ID: PAT_MRT3847_12112C.1
tacggctgcgagaagacgacataagggtacgggatagatagagtgatacacatcacattttctcaaagtaatttattaagtgacccatacttgaagttgtctggtgtggggatagatagagtgatacatcccaaattttttggtttggggatagatagagtgatacgcgtcacattttcataataataaaaaaatggcagcggcggcggcagtgacggtgctactcccacctaggattccgaccaccaccaacgttacccgctgctctgctttgccttctctccctcctcgcgtctccaacaccaaaaccactttgttctcaccttccctcaacaacttttcagtgtcccgaaaatcttctctgcttcagaccagagcttcttcagaggaatcatcctcagtagatgccaatgaggtgttcacagatttgaaggaaaagtgggatgctcttgaaaacaagtccacagtacttctttatggtggaggggctatagttgctatttggctatcgtcaattcttgtgagcgccatcaactcagttcccttgcttccaaagattatggagttggtagggcttggatacactggatggtttgtctaccgataccttctgtttaagtctagcaggaaggagctagctacagacattgaatcactgaagaagaaaattactggaactgaatagagtggtgttagcaggtatcaagtcaagtttatcttctgagcaccatttgtttttgttgtgctgttatcccctgtataagagtcatatgtatcccttggagtagaatagaattcctctcaacctgtattgcccctgtaatgaacccatttcattgttaaaaataatgtagcaaattttatgtatatggctctgaatggaaaccattatcctttcacttcctcaaaaaaaaaaaaaataaagtcatatattagtatagaacaagaaaatatcatatatcggaacaaaaagaagttaataaaacccgaaataaatcatgtataagagtcatatgtatcccttgaagtagaatagaaaaaaaaaaaaaaaaaaaaaaaaaa

SEQ ID NO: 23399 - DNA, 2108 bp, Glycine max
  Clone ID: PAT_MRT3847_121130C.1
agcgaaaagataggtacaatgcttccatatgttcgctgcccatttcggaggtcgctcagccgcggtcttcgatgccggcgagagccgctggattgcctgctccttcttcctcttagggtgttgcttgcccgctcctgcggtgcccttgctgaatagccgggtttggagcgggtcgggcaaagctgactatgccggatggattttcatgagggagacaatgtggtatctccgggcacattgtgtatcgaggatattcgcggattgacgagtctcaccgggaggttgataggagatctcgtgatttcctcactctctttcggtacatgaatacctgattctatgaccaagcctggaatttacctctgccatggtcttcagttgtaaaggaaacccagatattgaggagtgcatcgcctgatcttattgtgaagacaggtggtcgccttcgagacgggctacgctcgtctgtccggtccaggttttcttcaagtcctcctagagcattgatttggtttatatcccatcaagattcatatcctatttcacctgtgtctcactcttttacaagaggggaaaatatccgaagcatttccaatttagggaagacaatttcacttatagtagaaattccaccaaacaaatctgtgaaacagttgttagaatcacaacatcacacctgtgctggatgccataagcattttgatgatggaaaaactttgatttgggattttgtacagacatttggatgggggaagcctcgactttgtgaatacacaggccagttgttttgctcttcttgtcacacaaatcagaccgcagtcttgccagccagggttttacataattgggatttcacttactatcctgtttctcagctggcaaaatcttatctggattctatatatgaacagcccatgctttgtgtcactgctgttaatcccttccttttgtcaaaggtcccagccttgcttcatattatgagtgtcagaaaaaagataggtacaatgcttccatatgttcgctgcccatttcggaggtctatcaacagaggacttggaaacaggagatatcttcttgaaagcaatgacttttttgctcttagagatttgattgatctttccagaggagtctttgctgcacttcctgtgatggtggaaactttatcaaggaaaatcctggaacacattactgaccaatgccttatatgctgcgatgtgggagacccctgcaatgcccgacaagattgcagtgacccatcttcactcattttcccatttcaggaagacgacattgaaaggtgcaaagcttgtcagttggtgttccataagcgttgctttaaaaaacttgcaaactgtccatgtggggctcaactcagattgaatgagacaaggagcttaactaacagagcaagccaaagaggaggaggtggtgaatcgagaggagctttgaacttgttaggcatgggactgagttctgggttgtcacctaggttcctctctggattatttacgaaagaaaagccagagaagactagggagcataaagacgaaaatattattttgatgggttccttaccaagctcctttatgatcacaacctgtaccgtctatatcttaagttgatcagctataccatccatattacatcttaggatgtttcttcaataatcacaaatgtccatgtattcagtttttgaatttgtcattcgttgtaaaaaagaaatatattcatgtatagtgtgaagtcatgtttcttcaaaaagcattattttcctttacctatgttaaaataggagaagcaaagagaaattgagtctgatggtggttgtgtcggccaaaaagctctttgaaggtgcggcagcgttgactgtgatcagaagaagtcatcgaaaaaaaatcatcagaaaagatgtagcgtgttgaaggctccaccggggataatggacccttggtgagacacggttcttgttatttctctgtcaggttctagatacaatgtttaagaagaatgtgtttgttttgaaggagagaaaaaaatataaaagggatgggatccaagcctcgtatgttttcatttaattaaaaaaaaaaaagggcggctcgtatcga

SEQ ID NO: 23400 - DNA, 914 bp, Glycine max
  Clone ID: PAT_MRT3847_121131C.1
agaaaaaagataggtacaatgcttccatatgttcgctgcccatttcggaggtctatcaacagaggacttggaaacaggagatatcttcttgaaagcaatgacttttttgctcttagagatttgattgatctttccagaggagtctttgctgaatatccgtttttggaactggtctgataaatctctctctgccctatggattttcatgatggagccaatgtagtatcttcatgcacattgtgtatcgaggaaaatcatgatggagccaatgtagtatcttcatgcacattcacttcctgtgatggtggaaactttatcaaggaaaatcctggaacacattactgaccaatgccttatatgctgcgatgtgggagacccctgcaatgcccgacaagattgcagtgacccatcttcactcattttcccatttcaggaagacgacattgaaaggtgcaaagcttgtcagttggtgttccataagcgttgctttaaaaaacttgcaaactgtccctgtgggctccagctcagattgaatgagacaaggagcttaactaacagagcaagccaaagaggaggtggtgaatcaagaggagctttgaacttgctaggcaggggactgagttctgggttgtcacctaggttcctctctggattatttacgaaagaaaagccagagaagactaggcagcataaagacgaaaacattatcttaatgggttccttaccaagcactatatgatcacaacctgtacgtaagtgttatctgtctatatcttacgctgatcagctataccatacattttattacatcttaggatgtttcttcaataatcactaatgtccatgtattcaatttttggatttgtcattctttgtaaaaataaattatgtatagtgtgaaatcatgtttcttc

SEQ ID NO: 23401 - DNA, 179 bp, Glycine max
  Clone ID: PAT_MRT3847_121132C.1
aatccacctaccaagaaagctactacaaccaacgacccaaaatttgacccgctaaattatagctaatgagcttaatatccattgaacactgtcatcaatccataataaagaagggatacaataacatagccacaaaaggcgttaaagacgctcctaacacgaagcgcgtaatatttaat

SEQ ID NO: 23402 - DNA, 141 bp, Glycine max
  Clone ID: PAT_MRT3847_121133C.1
aatccgcaccacaaatgcatatggaataaatccaacaggttttgttaatcatacagcaatccaaagacgacaacggcgaaacctaaacacaccaagaacatagacttccttagcactctgcctaaaacaaaagagctataa

SEQ ID NO: 23403 - DNA, 2077 bp, Glycine max
  Clone ID: PAT_MRT3847_121134C.1
catctctcctcaccgttcttcttctttttctctctctagaattttttttttctctctctctctcccatctctcggaaaatttttcagagcttcctaaagcctttagaattctctggaacctttttgttcgtccgccgaggatcgcaattcctccaaatcgtcgtcactcgtcgcttagttcggttctaactgcatgaactggttcgggaagctggattcatcatcgtcgaacttgaacttcaatcacttcgttacttgtctgttgatttttatcctccatttttcgcctcaatcgctctcttccaccttcgatagtaacactaatctcgaatttaattccgaatatggagtcgagaactaagagtaatccccaattaacaagagctctttgctatgcaaacgatggcaatcagcagggaaggtcaccatctgttattgtcattggtggtggcatggctgggattgctgctgctcgttcgctccatgatgcttcgttacaggttgttctcttagagtcaagggaaagaattggtggccgaattcacactgattactcatttggttttcctgtggacatgggagcatcatggttgcatggagtttccaatgaaaatccactggcttcggtgattgggaggctaggtctacccctttaccgtactagtggggataattccatactctatgaccatgatttggaaagctatggactttttgatatggatgggaaacaggttcctcaagagttggtagcaaaagttggtgaaatatttgaggcaattttgcaggagacagataaaataaggcaagaatccagtgaagacatgtctgtacttcgtggtctttcaatcgttttcgataggaagccagaactgaggttggaggggattgcttataaggtacttcagtggtatttatgtagactggagggctggtttgctgcagacactgatgctatttcactgaaaggatgggaccaggaggtactgctccctggtggtcatggtcttatggtccgtggctacttgcctgttgtaaatagcctagccaagggtcttgatattcgattggggcacagggtcacaaaagtagttaggcgatataatggagtaaaggtaactgtggaaaatgggaaaacgttttttgctgatgctgctgttattgctgtcccacttggggtgcttaaggcgaagaaaatattgtttgagccaaagcttccagactggaaggaagctgccattgctgatcttgggattggacttgagaataaaatcattttacactttgaaaatgtgttttggcctaatgtggagttcttgggagtagttgcagatacaccttatgaatgtagctacttccttaatctccacaaggccacaggtcgtgctgttctcgtttacatgccttctgggcagcttgccaaagacgttgaaaagatgcctgatgaagcagctgtcaacttcgctttcatgcagctcaagaagatttttccagatgcttcttcaccgattcagtatcttgtgtctcgttggggatcagatataaattcactaggttcatatagctatgatgcagttgggaaaccccatgaactatatgagaggttacgggtcccagtagataacttgttctttgcaggggaagcaacaagcatgagctatccaggatctgtccatggggcatactccactggaacgatggctgctgaagattgccggatgcgtgtgctcgagcgatatggagaggttgatttattccagccagtgatgggagaagagggttccatgtctatcccacttcagatatcgcgtctttaatcgtctttgggtcacaactagtggacagaaacacaatctatctatgcttgttcttttgttatcaacctatatataagttatatagcaaatgttttggcaaatagtctttaagagtatatgtccacttgtgaaatcacattttgtgttggatttccttagtcaatgtttccagtaactggtaatgtgaatattgcgcacctaagaggcgttgtcacttctatcagtatacttataataaaattgtgacagcaatttatgtg

SEQ ID NO: 23404 - DNA, 339 bp, Glycine max
  unsure (1)..(339): unsure at all n locations
  Clone ID: PAT_MRT3847_121135C.1
cccacgccgtccgacgnngctgtcgagnaagaaccgacatgaaggggaagtgcgatagcccatnnaaattnnctttgagataaggaaaaaagggggtataattttataatntaatggaataataatatttgggcttaagctataaataacctaaaatattatatacctaagtttaatatataaaaaatcttaggaatatagactatcttttttttaataatttaattgaaaaaaaaaaaaaaaaaaaaaaaaaaaagccggccgttttaaagaatccaaccttactaccccgtgcatccaacgtaatagtttttttttagggtcacctaaatttcaatt

SEQ ID NO: 23405 - DNA, 2304 bp, Glycine max
  Clone ID: PAT_MRT3847_121136C.1
cctacgtgtccgcccacgcgtccgcttctctctctagaatccattttctctctctaaatttttctttctcattttctctctctttcttatctcggaaaatctttctgagctttcaaacgaactttggaattctccagaaccttctcgtttttccgccgaggatcgcgattccgcagaatcgttctcaatcgtcgcttgattcggttcgattccgtggttcgagctgcatgaactggttcgggaagctggattcatcatcgtcgaacttgaacttcaatcacttcgttacgtgtctgttgatttttttcctccatttttcgcctcaatcgcacttctctaccttcgatagtaacagtaatctcgaattttaattccgaatatggaatcgagaactaagagtaatccccaattaactagagctctatgctatggaaacgatggcaagcagcagggaaggtcaccatccgttattgtcattggcggtggcatggctgggattgctgctgctcgtgcactccataatgcttcgtttcaggttgttctcttagagtcaagggatagaattggtggccgaattcacactgattactcatttggttttcctgttgacctgggagcatcatggttgcatggagtttccaacgagaatccgctggcttcggtgattgggaggctaggtctacctctttaccgtactagtggggataactccgtactctatgaccatgatttggaaagctatgcactttttgatatggatgggaaacaagttcctccagagttggtaacaaaagttggtgaaatatttgagacaattttacaggagacagataaaataagacaagaatccagtgaagacatgtctgtacttcgtggtctttccattgtttttgacaggaagccggaattgaggttggaggggcttgcgcataaggtgcttcagtggtacttatgcagaatggagggctggtttgctgcagattctgatactatttcactgaaaggatgggaccaggtagctcctatattgaaagaaataatttgtaaagtcgtctcatagccaggtgcatgagtcttcaacatgcagccttctatgatccataaccatgtaaatgtgtttcctgatctacatataggagaggtgctgctccctggtggtcatggtcttatggtccgtggttacttgcctgttataaataccctagccaagggacttgatattctcttggggcacagggtcacaaaagtagttaggcgatataatggagtaaaggtaacagtggaaagtgggaaaacgttttttgctgatgctgctgttattgctgtcccacttggggtgctcaaggcaaagaaaatattgtttaagccaaagcttccagactggaaggaagctgccattgcggatcttgggattggacttgagaataaaatcattttacactttgaaaatgtgttttggcctaatgtggagttcttgggagtagttgcagatacatcttatggatgtagctacttccttaatctccacaaggccgccggtcatgctgttctggtttacatgccttctgggcagcttgccaaagacgttgaaaagatgtctgatgaagcagccgtcaacttcgctttcatgcagctcaagaagattcttccagatgcttcttcaccgattcagtatcttgtgtctcggtggggatcagatataaattcactaggttcatatagctacgatgcagttgggaaaccccatgaactatatgagaggctacgggtcccagtagataacttgttctttgcaggggaagcaacgagtatgagctatccaggatctgtccatggggcattctccactggaatgatggccgctgaagattgccggatgcgtgtgctccagcgatatggagaggttgatttattccagccagtgatgggagaagaggcttccttgtctatcccacttcagatatctcgtctgtaatcatctttgggtcacaactagtggacagaaacagaatctatgcttgttcttttgttatcaacctataggctatatatagcaaatgttttggcaatagtcttcaagactatgtgtccacttgtgaaatcacattttgtgttgcatttccgtagtcagtgttactggtaatgtgaatattgcgtacctaaggccttgtcacttctatcagtctatatataataaaattgtggcaacaatttatgttttttctcgtcttttagatttcatcttttaacagttgaccctgttagaactctgaataacttaacttaatccgcctattataattt

SEQ ID NO: 23406 - DNA, 426 bp, Glycine max
  Clone ID: PAT_MRT3847_121137C.1
ggctcgagggactgtccatgatgttgttcttgttggtggttccaccacaattcccaaggggcggcagctcctgcaagatttttctaatgggaaggagctctgcaagagcatcaatcctgatgaggctgtggcatatggagctgcatttcaagctgctatcttgagtggtgagggtaatgagaaggttcatgatcttctccttcttgatgtcacccctctctctcttgggttggaaactgctggtggggagatgacagtctttgatccccaggaacactacttatctcaacaaaggaatgaacaggtttttctaaatctatttctgacaaccagcctagtagtgttgcatccaggttttatgaggttagaagaacacggacttcatataccaactggttgggcacaattagaactttctggattcct

SEQ ID NO: 23407 - DNA, 735 bp, Glycine max
  unsure (1)..(735): unsure at all n locations
  Clone ID: PAT_MRT3847_121138C.1
ccacgcgtccgtttggtcccatattatagggtggatctcaaaagatatgaaatatctccctccaagtagtacatatgacttttatcgaatacgacttttcacaaaattctatatgtatatatgatatgatatctagtatggaattatgtttactcacttgaaattgagtatctactcccccccccccccccccccttttcttgctaggattgaaaattttgtattttacatatccatatgattgagtcattgggtttccaaaatagtgtaaagtacttcaaatcattactatttgactcgaacctatcctaaaaagtcgaggcatttcgaattatttattgacacgaacaaagtcaaggaaaacctctgaaattcttttcatattggaccttggaccaatctaattttaattgagttcattaaactaaaattaatttaattcaatgacccaatccaactcataaaaatctaaggcactatacccacatttttcctaagtacaatccataccccccccccccccctctccaaaaccacctttcaattacccactataccttttttcttgcagaagtacacccattttgctttatgcaaatgtatttccaaaattacatatacctattctgaaaatgtatattcgaaattatgtttcatagtttcggagatatacttccagaatagatatatatttttcaataaaatttcacttaagaattaaaatgggttgacang

SEQ ID NO: 23408 - DNA, 1371 bp, Glycine max
  Clone ID: PAT_MRT3847_121139C.1
gtggggtgtataggaatcctgtcatctgaatataccatcatattgcatgattgtgaaaaggtggtcttaacctttttgggatttagggttgaaaaataatgcatattagatagacatgactgaccctaattatatattatagcatcctagctagaaacttcttaaccaacaagtaagcttttttttttctttctttcttttgaattactcttccttctataaattattattatatcactcttctggtgtgtatttacaggaggtactgctccctggtggtcatggtcttatggtccgtggctacttgcctgttgtaaatagcctagccaagggtcttgatattcgattggggcacagggtcacaaaagtagttaggcgatataatggagtaaaggtaactgtggaaaatgggaaaacgttttttgctgatgctgctgttattgctgtcccacttggggtgcttaaggcgaagaaaatattgtttgagccaaagcttccagactggaaggaagctgccattgctgatcttgggattggacttgagaataaaatcattttacactttgaaaatgtgttttggcctaatgtggagttcttgggagtagttgcagatacaccttatgaatgtagctacttccttaatctccacaaggccacaggtcgtgctgttctcgtttacatgccttctgggcagcttgccaaagacgttgaaaagatgcctgatgaagcagctgtcaacttcgctttcatgcagctcaagaagatttttccagatgcttcttcaccgattcagtatcttgtgtctcgttggggatcagatataaattcactaggttcatatagctatgatgcagttgggaaaccccatgaactatatgagaggctacgggtcccagtagataacttgttctttgcaggggaagcaacaagcatgagctatccaggatctgtccatggggcatactccactggaacgatggctgctgaagattgccggatgcgtgtgctcgagcgatatggagaggttgatttattccagccagtgatgggagaagagggttccatgtctatcccgcttcagatatcgcgtctttaatcgtctttgggtcacaactagtggacagaaacacaatctatctatgcttgttcttttgttatcaacctatatataagttatatagcaaatgttttggcaaatagtctttaagagtatatgtccacttgtgaaatcacattttgtgttggatttccttagtcagtgtttccagtaactggtaatgtgaatattgcgcacctaagaggcgttgtcacttctatcagtatacttataataaaattgggacaacaatttatgtgtttttctcgtatttt

SEQ ID NO: 23409 - DNA, 1392 bp, Glycine max
  Clone ID: PAT_MRT3847_12113C.1
cgaggcctgggaaggagcttctttggcctaagttggatattcttcgacgcaaattgaagagtaggggtctatttcaaagtgtggattcattgtgtgccgaaggaaagtttccagaatctttgtttgattctgcaggagagattgacagtgaggatatatttttacggctgcgagaagacgacagaaggggcactaataatgatataattctttgtgatggtgtttgtgatcgtggatttcaccagctctgtttggatcctccgttgttaactgaagacattccacctggcgatgagggttggttatgcccaggatgtgattgcaaagatgactgcatggaccttgttaacgactcctttggaacaagtctttctattagtgacacctgggagagagtctttcctgaagcagcatcatttgctggaaataatatggataacaacttgggacttccttctgatgattctgatgatgatgattataatcctaatggttcagatgatgtgaaaattgaaggggatgagtcaagttctgatgaatctgagtatgcttctgcttctgagaaattggagggtggttcacatgaggatcaatacttgggccttccatctgaagattctgatgatggtgattatgatcctgatgctccagatgttgaatgtaaagtcaatgaagaaagttcaagctctgatttcacttctgactccgaggatcttgctgctgcaattgaggataacacagcacctggacaggatgggctcatcatgttcggcgaacacatttttatttttattgtgaagctcgcaatttgccatgaattttcactcaggttggcaaatggttcgacaatacacgttggagcttccggcattcatcacaaatggaaaccaattctggtagaaatgcttcaccggaagctaccgatggcagggctgaaaatgagggggagaagcaatgtgaatcaatgtctccggaggtcagtggaaaaaactctaaaaccacaagctctagaaaacggaagcatttgtcagaacccctatttgaagcacagctggatatcaatggcttagcaacaagttcaccaaatgttcatcaaacgcaagtaggcaataaaatgaagccaaggaaaaggaaatgatactttatgcaagagccctgtttaaccttttcctaaggcttcaaattacagtatccatccttttgtgagattgagatcccatgaaatgatcggctaggatctcgatggatttgtttccatttaggaaggtaatcataaaatatgtgccattgtattttttaaaaatagctttccaggtattgatctggtgagttgttttagtgttgcctctcttgcaaacactaaactaaaaatagttcagttattagttatcc

SEQ ID NO: 23410 - DNA, 386 bp, Glycine max
  Clone ID: PAT_MRT3847_121140C.1
ccaagaacccttgggtttttttttttttgccacaaattgtatcctggcgcggtttattgacatcaaggacaagcaggagcaggttcactttaataattggccccaccttattaccgaaagtctttaatgcagggaaaaaaaaaaaaaaaacgggggggaaggggagcaatatttcatccatagtaaaaacttccaacataacccaggaaaaaaatggcagcttaaactgactttaaaaaaaaataaaacaagggtgatatgaatcaagggggcgtggaatgaggactaacccaaggccaatggtgttttttaacagaaacagagttttccggaacaattttgggttggaaaacccctgcatactcattgacctgggggggggaaaa

SEQ ID NO: 23411 - DNA, 155 bp, Glycine max
  unsure (1)..(155): unsure at all n locations
  Clone ID: PAT_MRT3847_121141C.1
cgcgtccgcagtattttgtaccacangaaatgggagaaggtagaatgaagcgtgaatatcgtataagctcatataagagatttaaaccaaatgcnaattcattatgaaaaaangccaattatattgctttagcaaagaacaagcaagtagaacgc

SEQ ID NO: 23412 - DNA, 307 bp, Glycine max
  unsure (1)..(307): unsure at all n locations
  Clone ID: PAT_MRT3847_121142C.1
ggcatattactcttttttttacaacatttttaaagttgttgctgatcttcatttgggtactggtggtttccagggatgcatgcctccaaagcttnttatgattactcatgtatgttattcacacaatctgattggtaacattcctaatatttattactatgctgcaaacaacccttctgatgctaccatctccaaacgaatgagcttttctaataccattatctatctgactccttcatcacaaaatgcaattctttacaaaagtcttaattatttaataagctcatatcttcataccattcccttt

SEQ ID NO: 23413 - DNA, 723 bp, Glycine max
  Clone ID: PAT_MRT3847_121143C.1
ggctaccatactcaccagtggagttgatttatcccttttctctatcctagtacatgctggagggcagcaagaggtgcttgtacagttggctgctttcatccccttaatgtatatgtgtatctgtacatattattccttgtttaaaatgggaatgatgatgttttactcactgacaccaaaacaaacaagctcagtaagcctgcttatgatatgctcgatgattgcaagatatgcagcacccatttcatacaactttctcaatctcattaatcttggtgggggtagaaaaacaatttttgaacaaaaaatgggaaagatcaatgacgctgttcccttttttggaaaaggattcaacaaaatttaccccctcatcatggttgtatacacttcactaatagcaagcaatatttttaaccgggtcatcaagtattgtgggaattggaaaatattcaagttcaatgatgatgcagaagatatggatggatttgacccatccggagtaataatattgcagagagaacgttctcttctccaacaagggcacaaagttggtgaacttgtttttcctttggcaaggagtttcagtgtgactatggatgtcgagtccaacagcaaggccatggctctgaatgagagtgccactaccaacatagtggaagagaaaaatgaaggcactcagaaagacatgagcagaaaaattggcagcaaaaagtatgcagcctt

SEQ ID NO: 23414 - DNA, 1746 bp, Glycine max
  Clone ID: PAT_MRT3847_121144C.1
acgaacggctgcgagaagtcgacagaagggggcgagaggagtgaagagaaaggaatggagaaagcggaggagcagcagcagcaaaacgaggaggttttgtcggttgaacttccggcttcttctggtcggaaaaaaactgaaactcaactcctgaaaggcaagagtgagagagaaatggagaatgcggaggagatgatgcagcaaaacgacgaggttttgtcggttgaacttccagctccttccggttggaataaactgtttttccctaagaaactgggaacaccaagaaaaagtgagattgtattcattgctccaactggagaggagatcagtaccaaaaaacaattggagcagtacctaaaggcacatcctggcaatcctgtcatttcagagtttgactggggaactggtgagacccctaggcgatcagcaaggatcagtgagaaggtcaagtcaactccaccagcagatagtgatactccaaagaaacgagctcggaaatcatcaggatcaaagaaggataacaaagaaactgaatctgcatcagaggaaggcaaggcaaagtctgatactgaagatcccaaggctgcagaggaggagaaaaatgaaggaaatgataactctaattctggaggaaagcaacttgagaatggagataaaactgaacaaattgatgaacaggccaagaagccagatgtagatatggaagaaaatgatctgaatgatacaaacaataaattagaaaatgattcagatgaaattaagaacagtcatgtgaacggcgaaaatgtgattgctgaaaggcctgaaggtgaagaagctcaaaagcaagaagttgaaccagcagagaaagttgccgaagaagctgctaatactgcggagactgaaaaatccctactgactgaattagaaaaagaaaagaatgaggagaaaacagatactgcgactctagaggctaatgggggaggcgagaaagagaatcctaatgctgcacaaatgtaatatggttatttggagctgtgcacagtgaaacacttcaacatttgtcataccgttgtgtaagctgcataaatgtaacaccattgccctagtgccccatgacttttgcgatgctattttagttattttgtggccttatggatgactgtagtctcgtatttcatctaaagatttggttgtactttctacctaggattaggaaattaaatgagtcttccttttagtttagattaggacatctgattttacttagtgcagctacgtagattgtagactttctgtgacacatttgtgtttctagtcatttaaatttcacattccccatctaagaatgctctttttatgttaccgaaagtgagtggtaaatgcaggattgaagcagcaatttatcacttcctttcctagttatggcataagcttcatatctaaaggttgtgtttcattagatttcatgtaattcatcagtattcagtcaaaaaaaaaaaaaaaaaaaaaaaaaaaaaaaaaaaaaaaaaaaaaacctctcctctcctctctttttttattattctatgggttgcgctatcaattctacacactccctctatctctttaatgtattagggcgctcagctttatttattttgcctacacctttttggatctcctctcactctcactagtctctagttaaccatctcctttagatttctactggttctgaaaaaacaaacaaagtgcatacacatttcctttcaattctggact

SEQ ID NO: 23415 - DNA, 2504 bp, Glycine max
  Clone ID: PAT_MRT3847_121145C.1
ttatattttttttttttttttttttttttttttggttttttttttttttttcagcaagtttcacagcttcaaccccatctaacaattttcataaatcagggaaaccacacactacgcttactataagaaaatttaaccttttcccaaaacccccaaacttcacctattataaaatttcaccaattcccaaaaccccaaatttaaaccctaaaatccatatggggcaatttgagcccaccactcacactccttaaaaaaaccccaaaacccaaacaccacaaaaactaaccaataccccaaattaaacacttttaggaaaattgattttcttttaatttatgccaacgtttaatatgattttgcactggaatccaaagaagcatactattgaggaaaatagtagggcaaaacaaaataaaaataatgccctattctataccagaatttaacaaagggaaattaccttcttacatctacaaccgatacggcagagatattacacgagaattacatcaaaaccttttacgtataaaatgataatatgccgttccaagaattcagatggccaattctccagttgctgtctgcactaatggtaaatcttgtttatcttggaactttttcattccttcaatcgtttagaattgggcatcctcggggagctcatacgcttgtccatttgctgattagtggcgttaggggtacttgacctagtctcagcatccaaagacttataagcaggaatttaagaagcctgtctaatacagcagtagcagtcgtgaagccagttcactccccattcagtgatttagccttcacattgatgctcagaaacattttctctagacactccatcttctggttgcggttcactggattctggattgatcacatcccacaagaaaccattgtcacatccaagagaaagcttgtcaaaatctttatcgacagctctacattgaggctccacatgtgccacatacttctctgctaaactacgaagagcattctctgcagcttgctgttgagcatcattccttgtcctacccatacccacccccattttattgccagtgaatagtacctccatatgaaaatctgcaagtctttgctggtgcttaaaatagacttaaattcaaccttagagttacaccgcctcccaatttcttgcagcacttgaatagatagaggggataagaagttcatttttccagcttcatgttgaaaatctttgctgttagaagaggcatgattctgagatatcccatactctgatgatagctgagacttagatggaacaatctgcctctgcaaatcagaaacagaagttgcctcttcagcctttagttgtgatgcttgtgggagtaaaacattgggggatgaacctatgacactattagaaaatggtttctgttgagcctgatgcttatcggactttattacattagattctttaacagatgcagaaggccaactattggtctgacttctgctggctatatcatcttctaccaacccacctccaaatggctgcatcaaagatggtgatgcttgattaggtggcctcaatatcagaggaggttcagctgaaatttgacctcttatatctggaccatgcctcatgcctaaaagtccttttctcatgtcataatcacgatcaacagagttgccatcatgcttgacaggaggtccaagcaaaccaggtttctgagaaggaatcagtgttcttgaagatccagggccggtgacatttgaaataataccagcagttggctgagaggtttcatgtctgaattcaacactgtttgtcatgggtcgggtgactaaatcaaccgaaaatttatcatcaggttggcttaaccttcgttccacttctgcaccattgattccttcactgatgggggcattagcattaccattcggtacatcctcagacatcaagtagttgctgacatctggagggagaggtaaaagtccaatatcatcttcaaagaagatttcagcaattctttgtaataaactctcatcaaactctttgaaaaacaacctctgacattgcatgcaacatttcttgctacacataggactgggacagcattggccgtctctgcttgaggagcataataaggagtaaaggcaggcacaacatgaaccctaggctggtccttgtcttcccaaacctttgaccgatcatcaatcaccattgccattttgggatggcacacaccatcttggaaaacatttagtaaggattttcgggagcctgatttgacacaaatcacacgattaatcaacaattatcacaaacctcaggattaatcctcgtggggacaatattcctctcctgcaaccggacaactggccgaaccagtttctcgtggctaccggacagcgggggtgcctcctccatctgaaccttatacaccttcccgttatcaacaacagtgtcactctccgcgtactgcttcagcaacaaccggtcctcgaggtacctcttaagctcc

SEQ ID NO: 23416 - DNA, 321 bp, Glycine max
  unsure (1)..(321): unsure at all n locations
  Clone ID: PAT_MRT3847_121146C.1
tttcgatagcgtacgtnagtcggnattcggctcganntcgagcncgacnncngagncaannnncatcngaacntctntgnacgnnnagncncagngcggcantggganatgtnanacgtttnaggtnctcggggatnaggtgnncacnnaccntaacnanncgtgnntgccnnanntcgngnncnnannnntcanncnnagnanncntngantcnnnntgcnncgngatgcggtgnccagcngntgannnncnnttcagnnnntangcnncttggtnntngtgtagtctnnntgttggnntgtaggngtntgtggaggtan

SEQ ID NO: 23417 - DNA, 263 bp, Glycine max
  Clone ID: PAT_MRT3847_121147C.1
ccacaatcgctatttggctggtatgaaccaacagcaccccatatgagtctatgaaccagggaatatgaggcccaccaagccgcatggggaggcgcataaatcgatgtctaaatgccaaagcctttataaaagcctatagttcaatcaatacacccattatgctgaatgctaacatccgaactcttatgtcgattggtgccatccgtaccctattgtccaaattgttgaagcccaccctactgatgattgctggctatcgaaca

SEQ ID NO: 23418 - DNA, 434 bp, Glycine max
  Clone ID: PAT_MRT3847_121148C.1
tacggctgcgagaagacgacagaagggtataagacccaacttaaactagagagttgttatgggattttctaaaattaatctatttttgttttattatgtgacaagtgaaagtgaaatgcgcaggtatatctcaacttatgctaatttacattgatatatccattttttttttgtaataactcttgtttctcttttgagcttccaaatattgaaactatgctcaaattttataaagcttaaattccctcaaagtcaagatagttattatctccacttagtagaaagtactgaaaatcttcttatctccggggatttttagaggtgtcatagctaagtcataagggcattcaatgtcctttaaaatttgtagtgccaaaaggctccaatttgtcaaacatattatgataccaccatatctttaaggatgatttaca

SEQ ID NO: 23419 - DNA, 634 bp, Glycine max
  Clone ID: PAT_MRT3847_121149C.1
tacgatgcacgcacgcgtacgcttgcttgctatcctgtgagcggcccgcccttttttttttttttttttcttttttttggccccaaatctttcattttctatacgtgaagaaaatcattctcagtagttgcctacgtggagcttgataactatatctatatgttcctcaattatatacaaacatctgtgaattgggtaagaaaaataaagtacacaaactagaagttggaaggaagataccacatgctagtgatgctaccatgcagacatgacatcatttttttcaaccttacaaacttctgatgacatgttctctccatgtcctcgtgagtataggaaaatctggtcaacaaaatatgttctggaagcaagaaaactcccttgctttgtgaaaagcgtttatgcgctcgtgttcaatgtttggggttagaggacttttcagtgtcttcaactggtcacattgttaaaagtttgaatgccatcatccctttctgggtttcttcaacttcctctttaacctcttgatggaccggtcactaaaaccaaatacacctttcattaatgtgtttatatccacagaccgctccttcatcatcatatcatgatacattttgctgccaatctctgctcgtgc

SEQ ID NO: 23420 - DNA, 382 bp, Glycine max
  Clone ID: PAT_MRT3847_12114C.1
gagcatgaggtaaaccgtcaccaagcaggtctcctgagggagcctttggtacggcccagagcgagtcaattacttgggcccattctctggcgagcccccgttctacctaaccggtgagttcccaggcgactacggctgggacactgctgggctttccgcagacccagaaaccttcgccaagaaccgagaactcgaagtgaaccactccaggtgggccatgctctaagcctagtgctgtgtattcccggaattgctgtcccgcagcggggtgaagttccgagaagtcttgtggttcatggccgggtcccagatcttcagcgacggtgggctatactacttggtcagcccatgcctgatccacgcgcaaatcatcttcaccatg

SEQ ID NO: 23421 - DNA, 1011 bp, Glycine max
  unsure (1)..(1011): unsure at all n locations
  Clone ID: PAT_MRT3847_121150C.1
cggnaattcccgggtcgtccgccaccatgtgcggcgccatcgacaccactcccgtccatctccgcaataaccctaaccctaatactaaccctaacttctaccgctgccgctacggctacccttcgttgctacttcaagtcgtgtccgatcataagaagatcttctgggatgtttgtgtcaaggcccccggcggcactgatgactccacgcacttccgcgatagtctcctctaccaccgcctcacctccggcgacgtcgtgtgggacaaggtcatcagcgtccgcggccaccacgtccgcccttatgtcgtcggggattggtgcttccctctgttgccgtttttgcttacaccgttttctccgagtggaatggggactcctgcccagaacctgttcgatggaatgctcatgaagggaaggtctgttgttgtggaagccattgcacttctcaagggaaggtggaagattcttcaggatttgaacaccggcgttcgccacgcgcctcaaaccatcgtggcttgttgtgtgttgcataatctgtgccagattgcgagggaacctgaaccggagctgtggaaggagcctgatgagagtggacctcctcctagagtcatggatagtgagaaatcgttttattactttggggaaaacttgaggcaggccctagctgatgatttgcaccagaaactatcctcaagatagttggaattggatagttacttgctttttactataactgcctcgcaagtaaggggaaggagggttcgatcaaacacacatagtgtgtttttatgagtatgttttagttttgaataatttatgagcttgttggtgttagtaacctggtgtagtagtagaatacatgataaagattggtggtggtggtgtggcgtctaactgtaatggcatagctccagtcttgtggatgtgaatgtgaatgtggagtagtggactactaacattgttctgtattcgtatatgaaatgatatgtttcagactagttttaactct

SEQ ID NO: 23422 - DNA, 603 bp, Glycine max
  Clone ID: PAT_MRT3847_121151C.1
ccgcttttcataagtttgccctctgtctctttcaacctgacatcgtgaaaactgacaaatattgcaactttggacaccatcatggtccactatcaccgctcccatcaacccagaaaggccaacaacacagactccatcatcaaagacgaagagtcacagaacaacatcacgttggattgttcatcctctgcttactacaagagaacaaggcccaagttgttgtcttttctcttcctcatcaccttcctctcttgctgctatgtttttgctcctcttttccttggcccttttttccctctatctctcttgtactctcccgcaactgaaaatgatttgaaacaagatggggttggtgctaatgattctccatgctcttctgtttctactggaactatatgttgtgatagaagtggttatcgttctgatgtctgtgtgatgaaaggtgatataagaacacactctgcttcctcttcggtcttcctctacaattcaaggagcaacagcaatgtttcgagaaattttgaagaagaactccaacatgaaaagatcaagccgtatactagaaaatgggagacaagtgttatggacaccattgatgaatta

SEQ ID NO: 23423 - DNA, 401 bp, Glycine max
  Clone ID: PAT_MRT3847_121152C.1
aaaaaataaacgacaatagccaccctctttgccaagagcacgaatgcaaccacttgtattaggagaatactaatacaaataatctccgcataaagatgatctctatatggacaacgaatgccgagacacggatcccaaagctactagaaacatgggactgggcaaactttaatgatagcgtgggagcctgagattctatcacgtttggggcgacctgcaatagtaccatctatggtggcaacacctagtacccccatattaagaaggacctagcgcgaatagatttcttatcaaaacttagtctggcatgaccctcttatcttgataggctgaacaaatataggatatggctgtgatgggcgatacttgtcctatatgacatcagaccacgcctcataagt

SEQ ID NO: 23424 - DNA, 661 bp, Glycine max
  Clone ID: PAT_MRT3847_121153C.1
atgggaagggcagagatgatttaaaagaaaggggaagggttaagaataatctccaaggaggggcaaatagtaaaaacggagggtatgttttttttggttccgagggatggatggatgaaaaacttccaaaagggcaagaggataaagcagcttttacaaagatttttttacaaccttgaataacctctatcggcttggaattggtccatgatttcatcattgaacttttggaaactatccataaaatggggcatgggttcctcagctggtaaaatagttggccttaaaagaaaaaccccttttttttgaccaaatcctggaccaggaacagtggatatgccagggggttgcaaaagcttgagggagggggaaaaatggggaaccgtgccagcctgtggagcaggcgggaaaggtctggggggggtgcgtgttggggggaggattactgggggcggtgggggggttggcaacgcgctgtggggggggggggggatcgcggggtgggttgggggggggtttgtgtgggggggggtggaaagtgtgagggggggtgggggtggcggggtggtgggtggggattatgggcggcgttgggtggggtgggggtggggtgggggtgggggttgggggggggtgcgtgtggggggtgggggggtggggg

SEQ ID NO: 23425 - DNA, 494 bp, Glycine max
  Clone ID: PAT_MRT3847_121154C.1
accttaccagtgttcttttgtgacgagggattgtaaacctttgtactttctatgcttagttattattgttatcacctgagtgacaggatgcaaggattatcctgttcatgttacttccttaccacatttggacacctttggatgaggtgaaggaagtatttattttagcgttttacaccttgatcatggcgccttctgtgtcggcagctctcaacatatagccggtctggacgattagctgtagcatggctaaaactctgacaaaagcaaaacacacgatgtgacactgaccaatacactgtgacatattatcttgattcttgaccaatgatataccgacgcacttgctttatagtaccagttacaatcaacattgattattttaactagtaacattgactacacatggatattctaaatatgaatgttgctcaattgacatgtgtttagttgcggtctttctctacgacggaagcgttggaaggagctcatta

SEQ ID NO: 23426 - DNA, 277 bp, Glycine max
  Clone ID: PAT_MRT3847_121155C.1
ctcttctctgttctccattattctatgtatgattggttgtttaaaaacccttctagcttattatacatgaatcatgaattgccacctaaatagatataattggatgtttcacagacaaaagatgtactcaaagacaagttctatacaagactaaagtaagtaacatggtatagtatatataccaaatagtatgtaaatttcgacagtatgtaaatttcttatttcaaatttggtgagccatttttctttatgtctaggcttcacgaaggtctccacc

SEQ ID NO: 23427 - DNA, 271 bp, Glycine max
  unsure (1)..(271): unsure at all n locations
  Clone ID: PAT_MRT3847_121156C.1
ctctcttcttccaagtccaaccacncttttgctctagcagtnccatngangcaaggtcaagatccngnatcaacgncntttnggaagaattgtgcccgtgttgggttggcgcagaatntncggtgctggcagagagcangcacggantgctngcggaggcttccgtntnagcncgntgnaaatcgcnncacctgtnttaccatgtgagncncaagcgccnaattgtnagcanttggnagncagtgagcnnatgggctctnttgagaagatt

SEQ ID NO: 23428 - DNA, 258 bp, Glycine max
  Clone ID: PAT_MRT3847_121157C.1
aggggagagagaccgacaatatctagatacttaggaccttctacgcctcatctgggcatctacataaactcaagggcaattatcactacatccttatctttccttttctccttccaatttaagagatccactgagctctgcttgccgtacaacatcatattatcgaaaagggtccttcttcttcaccatattaactgtaacgttgatggtgatacctcggaattcacgagtggaggcatggcatgtggaagataataa

SEQ ID NO: 23429 - DNA, 424 bp, Glycine max
  Clone ID: PAT_MRT3847_121158C.1
ccggggggggggaaaaaaaattcaaaaattttgggcccccaacccaaaaaacccccaagggaaaagggaaccccaaaagtcctggggccagtaaaaaaaccaccaccctggggaaagcccaaagttttttccccggaaccccccacccacccacctggggagaaaacccggggggggaacccccccgggaaagcccctggattattcccccccccccctaaaaaacagtttttttcaaaggaccccccgggccggcctgttttctttggaccaggggagccaaaaaaccaaaaaaaagctcggggcccaaaaaacccccggaaaaaatggcccttggggggcgggagttccggcccaggggggaaattcccgaaccgggggggtccccttcccaggcccctgggaagctcttttttgccaaccc

SEQ ID NO: 23430 - DNA, 230 bp, Glycine max
  unsure (1)..(230): unsure at all n locations
  Clone ID: PAT_MRT3847_121159C.1
atgagatcctatgaaagtaaaaatcttttntatnttacttataaatattactataaatattgggttgaattgagcgggtcgtacttaaataagaatttcttttccttttttcttagtttctatcgaaaaaaaaaagattcgatagaaactaagaaaataaccaaattgattcgccgagaaagaggagagagagggattcgaaccctcgatagttctttgttccgaactat

SEQ ID NO: 23431 - DNA, 550 bp, Glycine max
  unsure (1)..(550): unsure at all n locations
  Clone ID: PAT_MRT3847_12115C.1
tttttttttttttttttttttttttttttttttttttttttttttttttttttttttttttttgttttttttttttttttttttttttttcgcccgggggaaaaaaaggttaaaaggcccccccttttacaattttaaaaaaacccttcttttccaaaataaatcccctggttaaaaagggaatgtttttttaaataaaaaaatgttacccacaaaaaaatttttggacggaaaaaaattccccccccccaaaaattttttttaaaaaaaaaaaaatttttttttttatttttttaaaaaccttaataacatttttttttaaggccttttcgggtccctttcnccacaaatttttaaggaagggccttccccagttttttttatttttttggagcccttgccgcactaaaaaccacactcagggaaaaaacctttccagttataaatggttacatgttgaaaaaattattcacgggcgattaaaaaggagttggaccatcataattttttgatacaaaacaattttccaaagggggtttattgaccggtt

SEQ ID NO: 23432 - DNA, 211 bp, Glycine max
  Clone ID: PAT_MRT3847_121160C.1
agaaagagcatcgaacgctgactgcaatgaatcctttggagccgccgaagctggaaactcacgttgacgatgaaaagaaaaataacttggtacttgagggtgagaccatcagcacgacggttacgggactcacgtactttagtgcgagcagctttactgaggacagaaagaatgtttgctatagttttttcagctattttcttggggatga

SEQ ID NO: 23433 - DNA, 214 bp, Glycine max
  Clone ID: PAT_MRT3847_121161C.1
attatgccgatcagaaacatcaccggcatgaaggacagaagaggcgactcaccccgatcagatgaatgcggctggggctgaaaacatatccaccttaatcttcccgttcgacggtttaagctacggaggcgcctacaacaagctcaccgacaacggtgctgccacccctgccggcctaatctccgcctccatagaccatgcatgagccctctta

SEQ ID NO: 23434 - DNA, 159 bp, Glycine max
  Clone ID: PAT_MRT3847_121162C.1
tttttggcataagatattcatttgttttcgtgcatatggattcctgaagggcaagggacccacttgtttcaccggggatgcaaccaacaatcaagccctaagtggactaagttctcaacattagaaattgtatcgcccaggaggaaaacgaattgcagg

SEQ ID NO: 23435 - DNA, 325 bp, Glycine max
  Clone ID: PAT_MRT3847_121163C.1
aaaaaaattgaaagggtaatgagattcgaaaaccataatgttttataacaagaacctaagcataaagccagagcgaaaccttaaagaaaatccaacattgacgagggggccttatgcggttgcacccggaagggaaatgtcatgtaataagtaataaggggacatttatattccataaaaactgggaatcaaagctcacattccagtaaaagccttctttgggccgatggaagacccagctgggatcactttcaaaacattgaaccttacacttttaaaaaggggcctgcattgaccaagaataacgggattttctttcgagccc

SEQ ID NO: 23436 - DNA, 293 bp, Glycine max
  Clone ID: PAT_MRT3847_121164C.1
aaaaaacaaacatataaaaacaaagttctaaaaataaaaaaaatcaaaaaaaaacacagggatattttaactataaaaatgaccaacagaacctctaaagacaccattttcacaaacatacccttccctaaatcttgctaatttaaagaatcacatcaataaaatttactgtatacactacaacaacttactcacttaaaaatctttcacgatccctcttcaaattaacttccaacctatttcacacttgcaaaaccattgacaattcaaaactcacactcctaacacatttc

SEQ ID NO: 23437 - DNA, 610 bp, Glycine max
  Clone ID: PAT_MRT3847_121165C.1
ggaattttgcaccaggcttgatcctgtcagtggtgagaagattaggaaagtaatgccaattgcaccagaagactcgatcaatatagccggcctctcccaagtacctgacggtgtagcttcgtggcacgttgctgttagcaagtttacagattcacctttgctttctgcagcattgccagtttgggactcttctaataaaagcattgtggcagttgtgggtgtcacaactgcactttacagtgtggggcagctcatgaaagagctagttgagaaacatagtggtcacatgtatttgacctcccaagagggttacttacttgcaacttccacaaatgcacctctactgtcaaatactaccaaacctcctaagcttaagatggctgttgactgtgaaaatgaagtaataagagagggagctcagtggcttcagaaaacctatggaaacaatttccctcaaagtcatgagcttcatgtagagaatgtcaggctaggccgccaacaatattacatcgactcattcttcctgaatttgaagagacttcctctggtgggtgtaatcatcatacctagaaagcatatcatggggcaggcagatgaaagagcctcaaaa

SEQ ID NO: 23438 - DNA, 298 bp, Glycine max
  unsure (1)..(298): unsure at all n locations
  Clone ID: PAT_MRT3847_121166C.1
tacaacccggcgaggcacccccacagggntgcgacttttgaaaggattttgcggtatgatcacgagatggccgatttgcttgacttcttgggagggagtggagctacatgaccgggagatccccagattcatgttttccttcatatttattatatcattgttgatgttatgatatacatttgacttgagagactaatgttggctactgttgcttcgattgtattttgaacagcgcatacattttcgtatggattgttgcgttaatgcttatatcattattatcgatgaagtttatttt

SEQ ID NO: 23439 - DNA, 213 bp, Glycine max
  Clone ID: PAT_MRT3847_121167C.1
aaaaagaaaaattggactttttcaattataacatctgcgaacattcattccaattcaaaatattgcgcctcactgaatttaagcaacatcccatatattccttttcgcctagttttagcggcttcttcagccattcccttgagatattgcttaaattcagggaggcccaatattttgaattataacatctgcgaacattcattccctcgagcc

SEQ ID NO: 23440 - DNA, 2496 bp, Glycine max
  Clone ID: PAT_MRT3847_121168C.1
agagagagagagaggaaggactcagattgcagaaacgcagcagcatcgtgttggagagtgagacggaatgcattagtgaagaccgaggtttctcagaatctcaataacccccttcgttgaaaccaaaacgacgacgcgtcacttcactttgatgtgtctcgtcgtttctactttctgttgattagcctcattcactctctcgctcgcttgcaaccacacccttggatttaatttcattcatggcttcgaccaccacctcctccctctgcacgtggctcgttgctgcttgcatgtcagtcacgtgccacgccgaccgcaccaaaacccctcacgcaatgttccgctcctccaaaaagtctcgctactctcaattcaacgtttgtcgatccactcattctggtaaaacaatggctgtagctttgcaacctacccaagagatcacgacaataaaaaaacctcccacgaagcaaaggcgagtggttgtgacaggattgggtgtggttacaccacttgggcatgagccagatatcttctacaataatttgcttgatggtgctagtggcataagcgagattgaaacatttgattgtgcagaatatccaacaaggattgctggtgaaatcaagtctttctcaactgatggctgggtagcaccaaaactttctaagagaatggataaatttatgctctatatgctgacagctggcaaaaaagccttggttgatggtggaattactgatgatgtaatggatgagttaaataaagataagtgtggagttctgattggctcagcaatgggtggcatgaaggttttcaatgatgccatcgaagctttacgaatctcatataagaagatgaatcctttttgtgtaccttttgcaacaacaaatatgggttctgccatgcttgcaatggatctgggatggatgggccctaattattctatctctacagcttgtgctacaagtaacttttgtatattgaatgcagcaaaccatatcattagaggtgaagctgatgtgatgctttgtggaggctcagatgctgctattataccaattggtttgggaggctttgtggcatgcagggcactctcacaaaggaatactgatcctaccaaagcttcacgcccttgggacattaaccgtgatggatttgtcatgggtgaaggggctggagttttgcttttagaggaactggagcatgctaaggaaagaggtgcaaccatatatgctgaattccttggtggaagtttcacctgtgatgcatatcatgtgactgagccgcgtcctgatggggctggtgttatactgtgcattgaaaaggcattagctcagtctggagtatcaaaagaggatgtgaattacataaatgcacatgccacatccacaccagctggagatcttaaggagtaccaagctctaatgcattgttttggtcaaaaccccgagttaagagtgaattctacaaaatctatgattggtcatctactaggggcagctggcggtgtggaagctgtggccacaatacaggcaattaggacagggtgggttcatcccaatatcaacctagaaaacccagataacggagtggatgctaaagtgcttgttggctcaaagaaagagagactggatgtcaaggcagccttgtcgaattcatttggttttgggggtcacaattcttcaatcatatttgcaccatactagtgaaacagatttcagagcagtactttcttattattataagttactgagtacccagacaatgtttattgcatactaactccagtgttttggttggttgagaatatatgcggtgtggattagttggttggatcagtaactgttgagaaacattgttttttgggatggggttggttgtgtgcctacagaatcagagtgttgatagattatcattatctggtgctcctggtgggagagagtgagtcgctatctatccactaccataaaatcctatctttaccatgaatggctagagtaggagttgacccacttttgatgtaaccgtttaacaaccattttgatgggatggatacagtcttttgttttattcccatgtacaaatagaccctcatggctctgggcattgggcaataaccaaatttcagtgattgtttagcggactcgtcgaatagattatgccttttcagtttcactggaatttatataccctggagggtgatttcaattttatgagggttttgagttttccaaagtggaagtggctatagtctatagatatagggcctgtgtcatccaaagacattttattatattatatctttagacactctggcaacaccaattagaattcatatgttcaacagattccaacatatggcaacagacgttattattcactgcttttcccaacttagtcgccttgcggcgcatccccctttcggccgcgggcgaatttccgaagagcccggaccgatcggcctttctacagttgcgcagcctgaatggcgaatgg

SEQ ID NO: 23441 - DNA, 889 bp, Glycine max
  Clone ID: PAT_MRT3847_121169C.1
ctcagtctggagtatcaaaagaggatgtgaattacataaatgcacatgccacatccacaccagctggagatcttaaggagtaccaagctctaatgcattgttttggtcaaaaccccaagttacgagtgaattctacaaaatctatgattggtcatctactaggggcagctggcgctgtggaagctgtggccacaatacaggcaattaggacagggtgggttcatcccaatatcaacctagaaaagccagataatggagtggatgctaaagtgcttgttggctcaaagaaagagagactggatgtcaaggcagccttgtcgaattcatttggttttgggggtcacaattcttcaatcatatttgcaccttacaagtgaaacagatttcagagcactactttcttattattataaggtactgagtacccagacaatgttattgcatactaactccagtgtttttggttgggtgagaatatatgcggtgtggattagttggttggatcagtatctgttgagaaacattgttttttgggatggggttacagaatcagaatgttgatagattatctggtgctcctggtgagagagagtgagtgagtctctatctatccactgctataaaatcctatctttaccatgaatatgaatggctagagtaggagttgacccacttttgatgtaaccgtttaacaaccattttgatgggatggatacagtcttgttttattcccatgtacaaatagaccctcatggctctgggcattgggcaataaccagtttaagtgattatttagcggactcgtcgaatagatcatgctttttcagtttcactgaaatttatataccctggagggtgatttcaattttatgaggattttgagttttgc

SEQ ID NO: 23442 - DNA, 485 bp, Glycine max
  Clone ID: PAT_MRT3847_12116C.1
ttgggctgatttatgtgcttgattatgtgcttgtttatgtgcttgcatggtccccagaagatgatagaaggggatggtatctcgccctgcctctgcctcggcccacagactcccgtgaaggaggcccatagtgtctaattaaagacgtagaatgaggaaggatagactatcgagtcccataccttcaggaagcgtcttgttataaatagaccgaccattgtcaaggattacgtcctggcctagactaataccgggtacgcggacgagaacggtgctcataacggttaccctcttatccccgtttctcgtggacctacttgcgtctagggcgacgtcgatagcgtctcagattgtccgcggtagaagaagaaagccgaagccaagtaatagcagatatttacgacagcccgccatcctgccacgcaccaaccctcatctccgtcagagacacccgagcatcacgaccgctgccccgagtataaaca

SEQ ID NO: 23443 - DNA, 681 bp, Glycine max
  Clone ID: PAT_MRT3847_121170C.1
ttcttttgtatgtcatgagagagagaaagggagagctgtgagcagtaaggaaggaacgactcatattgcagaaacgcagcagcagcgtgttggagagtataaagagagagacggaacgcattagtgaagactgaggtttctcaaaatctcaataatccctttgttgaaaccaaaacgacgacgcgtcacttcactttcatgtatctgcgtgtctcgtcgtttctacttgctgttgctgttgctgttgttgattagcctcattcactcactcactcactcactcactcgctcgcaaccacaaccttggatttcaattttttttcattcatggcttcgaccaccacctcctccctctgcacgtggctcgtcgctgcttgcatgtcagtcacgtgcgacgccgaccgcaccagaacccctcacgcaatcttccgctcctccaaaaagtctcgcaagtctcaattcaacgtctctcgatccactcattctggtaaaacaatggctgtagctttgcaacctacccaagaggtcacaacaataaaaaaacctcctacaaagcagaggcgagtagttgtgacaggattgggtgtggttacaccacttgggcatgagccagatatcttctacaataatttgcttgatggtgttagtggcataagtgagattgaaacatttgactgtgca

SEQ ID NO: 23444 - DNA, 198 bp, Glycine max
  Clone ID: PAT_MRT3847_121171C.1
gaagtgttcgaagctgcctaaggaatgttgtaggttgtgggaagagtcagggtggggattgacaacgtggatttgcacgcacccaccgaatttggatgtcttgttgtttatgcgttaactgaaaacactacagacgattgcgaacatgggatcgctcttctagctgacttggcccaaaaagttgaccaggttgtctcc

SEQ ID NO: 23445 - DNA, 514 bp, Glycine max
  unsure (1)..(514): unsure at all n locations
  Clone ID: PAT_MRT3847_121172C.1
aattcggctcgaggcagaatatccaacaaggattgctggtgaaatcaagtctttctcaactgatggctgggtagcaccaaaactttctaagagaatggataaatttatgctctatatgctgacagctggcaaaaaagccttggttgatggtggaattactgatgatgtaatggatgagttaaataaagaaaagtgtggagttctgattgggtcagcaatgggtggcatgaagaagcatcataacatctttaagaagttgtgacacctgctggtcgtgtgtatcaaacttgctgtaaaatgcaatcagaaaggagccagaatcgtattatattttgtaattttattgcattgatttgtttactgttttgttgtacttttgtgtattaaacaggttttcaatgatgccatcgaagctntacgaatctcatataagaagatgaatcctttttgtgtaccttttgcaacaacaaatatgggttctgccatgcttgcaatggatctgggatggatgggc

SEQ ID NO: 23446 - DNA, 250 bp, Glycine max
  Clone ID: PAT_MRT3847_121173C.1
cccaaaaaaaaaaaaggggccataaatttgggttagatgccaataaaaagggggagaacccctcccctttttttggcaatgaccttgtttgaccccatccccctttagccaaacaaactctgaacatttttttggtggctggcttccatgaggtgggaaatttctaatcggaggcaatttcttattttagtttttttccaggggggcccctaggggccttttaatgcctaaaacggatgataaaagccct

SEQ ID NO: 23447 - DNA, 192 bp, Glycine max
  Clone ID: PAT_MRT3847_121174C.1
tgaagaagaagaagaagaccaagacgaggatgaggagcaaggacaagggaggccagaaaggggaaggtctgagtcttaaagaggaccacgaagaccttagaattagaacccctttcacttcaactcttaaagggttccaactttttttaaaaacccatattggcaacgttggggtcttcaaaaggtcaacca

SEQ ID NO: 23448 - DNA, 1017 bp, Glycine max
  unsure (1)..(1017): unsure at all n locations
  Clone ID: PAT_MRT3847_121175C.1
agcatatttttatccggaacggaaaatggagacctctctgcgatacggagaagattccaaagctttacgaatccatgcgaagcaaaaactccgaatcgactccaacacctactttcagttgcgcggagagcttgatacaagacttggacaaccaagttcgtccagtgccctcatcagacatttctatccaagtttatcagcaacccttggcgtaggagtgcgttatgataagcgtgacaagttgcgttacactgtgagtgcaaagaaaacatttcctgtcactgttgacggcttgctcaattttaaaatcaagggtggatgtgatgttgacaaagactttaaagagaggaagtccagaggagccgccgagttttcatggaacgtgttcaattttcagaaggaccaagatgttagacttaggattggctacgaagtatttgatcaggttccttacctgcagattagggagaataattggacagtaaatgcagattacaaaggtagatggaacgtgagatatgacttgtgagaagtgcagagagctttttctgtagacgtgttctgcttgtcatttttttgtagacgtgttctgtttctcaccccaaccttgagctccgcccttaaaaaagggaccatgcataaatttatgtttagtcatgcatgcgagttactttgcatgaggaactaaagtgattctgattggttgaaaatgaagttcgcatatgatttaataattttctgtattaaaataaaattcttccctgcgtatgtaggatgaatccacatgtatgactaacttgtgtgctggaattggataaattttcaataaagacttggtagagaatatatgaaataaaaaaaaaaaaaaaaaaaaaaaaaaaaaaaaaaaaaaaaaaaaaaaaaaaaaanaaaaaanaaaaaaaaaaaaaaaaaaaaagaggaaaaaaaaaaaaanaaaggggcccctaggctcccattttttttccttttaggggggggtaaatgggccgttggggg

SEQ ID NO: 23449 - DNA, 254 bp, Glycine max
  unsure (1)..(254): unsure at all n locations
  Clone ID: PAT_MRT3847_121176C.1
actgctgtatttctcatcttcactgacaaagttttgtgagggtgcctgtttacctattttgttggccctattcctcataattataatgtttttttggcactatgcgaccataaaaaaatataattacaatcttcacaccagggtgtcactatattggcttttacccttaggtccacgcttgggaatttttatagtcccagaattaggcctattgttcactgacctcaccactgtgttccnagaaaacttttccc

SEQ ID NO: 23450 - DNA, 608 bp, Glycine max
  Clone ID: PAT_MRT3847_121177C.1
ggggaaaaaaaataataaaataatcaataaccatttagatgaagcattttcgaatgtgtataaacatatcctgataaaaaaaaaaccactaagacgtagaaaaaggtaaaaaaataacctaaaaatgtacaacatatttgatcttgttactgaaatttgtgtaatgtttaacacgggattgtggcactggcacgggaagggaataacttccggtgttttttaacacaccttccgaacgcacctcctttgttattttcacatcaaattcaagaaagagacagaatcaattgatagtagcttctggctggatgataatcggttgtttgaaaatgtgtatccaaacatgcacttaaaggcatttcctcatgtgttgggataataggggacttgacattttatgagaagccaaccttctagccattggcttttgccacccgagtctttctaggaattcctcaatcaacatgctgcaaatggccttttgggatacggccagctcatggtctgggaaaaattcttccaaccgaaagctcaaccaaacgtacagatccaagaccttgtggatggattccaactccttaagagcactggcgtcttgggcactttga

SEQ ID NO: 23451 - DNA, 226 bp, Glycine max
  Clone ID: PAT_MRT3847_121178C.1
tgctgcgagtagacaacacaacggcaagatacgtacacaatacaactacattgactatcgactaggctattacaacagctagggagcctaacacttatatcacagatcatattctttcagtgatgacatagaatacagccgttcttgagcatccaaacttacgtacgcgtacatgccacatctttactgatgtataaaacctcctataatcaattcactaaccgaa

SEQ ID NO: 23452 - DNA, 384 bp, Glycine max
  unsure (1)..(384): unsure at all n locations
  Clone ID: PAT_MRT3847_121179C.1
attcctcatcctttactttccatatcaaagaaaagatcatcgacgtcatatcaaanatacaacatcccaccacttcaatcatctatttcaaancacaatctctccatcattatctcactcttcacctcataaattatatcaacacttttaatcttattcatacaaaaantctccaatcaatccaattctcaaccttatccatnnctatatncatnctctaactctaactttancanttctatctctttcaactacttatcattattatnataaactttatattcatccaaaaccaaaaccatattatattattccttctcccaatttcacccacatttttcaatattaacttcaatttcctttctaaaaaataaaaaataaaac

SEQ ID NO: 23453 - DNA, 256 bp, Glycine max
  Clone ID: PAT_MRT3847_12117C.1
gcatcttatttgtagatataaaacaacttctctggggtatatttgattggtccaaaaacagccccaactatcccggatttatattctggatcggttgcacgtatatttaaaatataaaaatcgtagagaggaaaggctcgttacataaaaaaaatgtcgatttcccatactttattgcgtgtgagagccgaatgcatctgcagattcttatttgtttcgggtcgagggactctacaatgttaaatgtatggaaagt

SEQ ID NO: 23454 - DNA, 507 bp, Glycine max
  unsure (1)..(507): unsure at all n locations
  Clone ID: PAT_MRT3847_121180C.1
agcgcattcaaacaccatctctttagaaatcaaaccaaagcattgatgatgatccatctgcttaccccaagtcagccttntttggaaagcctgtggttggtaaaacaaaaattcgcactgaaggtggaaaaggtagcataacaattaccagaactaaaggttaggcgtaaattgttgactactaacctttggtctcacccatatttaatgtgggattgacttcattttctgtaatatatatctggcagatatagaagttgatactgcaattttttgctcttgttgacatgcatatattacaccgccttagtgtttctttccagtggggtctagataatcttttttgggggtacatgatttttgttttgagccaagaatgtaatgagaatcatagtatttgttttgttagatccatagtatttgttttgagccactattcgtcggctctaaaactgacaaacaatttcagtaagctttgtaattgaagtatacaggttattttaaaaa

SEQ ID NO: 23455 - DNA, 309 bp, Glycine max
  Clone ID: PAT_MRT3847_121181C.1
ggggtgggttttttttcaaaggcacggaaccccaaaatttaaagacggtggctcgtaatttaaacagggggagaaaccgggcccccaaactatgcgggggctaatgtcccttggaggacaaatggatacataacgtccccaagccaagttgcgccttggacaaaaaaagggtttgttcaaaccttttcattgtgccccatccggggggaaaaaaaaaacatgggtcttgtttagcccccggagttgggaacgcccattgtttgtctccttttttggcatgctcggatttcttaccaatgagcaaggggc

SEQ ID NO: 23456 - DNA, 259 bp, Glycine max
  Clone ID: PAT_MRT3847_121182C.1
agccaatttgttaggtcatactatgctactattacaacttttttcagaggatttggttaatgttagaacaaacagttaatttatactgagtaaaaatgaaaaaaagtagaggtgcatgcatctagtgtttaatttcaattaatttattttgtaattcctaacattaaatcaattgttgatgtttagtatagaacaaatctattttcagaataacctaaaacaaatcatcataatcgtttagaaacaccaacacttggag

SEQ ID NO: 23457 - DNA, 246 bp, Glycine max
  Clone ID: PAT_MRT3847_121183C.1
ccatatgtaagaatgtaagttatgttaccacgaaatatctcaaagaaaataattttggctaacgtgtttccaattccataatgtttttggaataaaatttagcttttatgtatagacagtggaaaggtttttttcatttttgttctgtctaagtaaattagaaataaagtttaattcattgatggtgaagaaactttttaattataattgcatgtactatttttttactctttggaacaagggcca

SEQ ID NO: 23458 - DNA, 264 bp, Glycine max
  unsure (1)..(264): unsure at all n locations
  Clone ID: PAT_MRT3847_121184C.1
gcctacgtaaattctgaatcgttgaactttgttttttttttacaccagaatcgttgaacttcaactttgacaaacatgatacccctggcaactattgactggctggctacagtcagcaatttgctatatatatgattttataatatacttcagatctcatcttcgacgaaaactgtagaaaatagtcaagtgtaatttttttaaaaatgcctccaagaaactaaatgcacaagaacaacgttgaagncagactacagcttgtag

SEQ ID NO: 23459 - DNA, 791 bp, Glycine max
  Clone ID: PAT_MRT3847_121185C.1
cacaactctctctctctctctcactccacttcacttctgccacctatgaagtttctttaatttgtgcatattccatcactctctctctcttcttctctgccagtttatgtacactaactcaatacacaacactcattaacatttcttttcctcatggaacttgagatacgtgcttgtctcttgttgtttctctttagtctcttctcatgctctcaagcctacactttctatgttggtgggaaagatgggtgggttttgtacccttctgagaattacaatcattgggctgaaaggatgaggttccaagtcagtgatactcttgtttttaagtacaagaagggctcggatactgtgttggtggtgaacaaggatgattatgagaaatgtaacaagaagaacccgatcaagaagtttgaggatagtgaatcggagtttcagtttgatcgatcgggtccattttacttcattagtgggaaagatggtaattgtgaaaagggtcagaaattgattattgtggtgttggctgtgaaaaacccccctccttattatcctccaacacctccaaacactccctatgttccaattactcctccaaaagccccttatgttccaacccctcctcaaactcctccaaaaattccttatcccccttatgttccaacccctccaaaaaccccttttcctattcacagtcctccctatgttcctcctaaagcaccttcacctactaatcatcctccatttattccaactcccccgaaataaaaaaaaaatacctctaatcattattt

SEQ ID NO: 23460 - DNA, 484 bp, Glycine max
  Clone ID: PAT_MRT3847_121186C.1
ctacgtcgttcgtccacgcgttcgtatgatggctgaaaaaaaaaaaatgacattttatatctgcattttttagaaatgcttgcccacctgatttaagaagcaacatgagtcggcctccactcgtataataaactaaaatttcttgtccatgtttctcttaaatacgattcacttgatctagcgggacaacgaatagtttacaaattcgtgcactgtctgcaacactttgacttaaatactttttcaaagacttgcctgctctcaaacacaaatctttcatagctgtttgtttaacctgtaagagtactaaataattacacatgtgatgagctatataaactacacccacgcacaaaatcagtggaacttggtcatcctggggaagacttgaaagcaccttgagcaatttcttaagcttgttgcattataaaaggttcccaaatcacgttgccgaatgagaaggaaggtgcttacttcaccttct

SEQ ID NO: 23461 - DNA, 291 bp, Glycine max
  Clone ID: PAT_MRT3847_121187C.1
gaattcggcacgagaaaaaggatcagccatctgttgtgctccaattaaccagacggctgaagaagattttgtgtctagagtttatacatggttgtaggccaattgtttgttttgtacaatactaaatatctccatttttaaagttatgtggatacaaaattgtagcggtctgcttacctgggacattccttgcccttcaacaaaactgttggcgtgttgttggcttggatatttactgggcactgagcaggcaataaatgagtagaaagcgacgttcaatggaaaaaaaaa

SEQ ID NO: 23462 - DNA, 224 bp, Glycine max
  Clone ID: PAT_MRT3847_121188C.1
gatcaaaaaaattctcttttttatatattatttcagagcgcgcggggataaaaaataaaaacacgcctacatccaaccataatatattcacctttaatgtaatcaaaaacgtttaaaactttatggatcttatattatataaacatatacatataggctgatattttttggtctatagtcccaaaatataaacaactctaattaaaggatacttctacctatag

SEQ ID NO: 23463 - DNA, 514 bp, Glycine max
  Clone ID: PAT_MRT3847_121189C.1
ccggggcatccttacgcctaaccaacataataatgccatagtcgtcaactcgcagctcatttcatcgttagagaggcaatctaagccttaaaaagaataaaatataaaataaaaaataaataaataaatacctcggtttcactttctccacttcctttcggttcacgggaaatctaaccaaccaggtaagaaaaattctgcaatcctatattacatcattttgaaaatcggatcctctctcaactctaaagtagttctttcttgcacgatttgtgacagttttcattttcattttcttccactgttgccacagatctagtttcagttcgatgccataaattctctctctctctctctctgtctctctctctacgatgtgaatcttcgttccaaacatgtcattttcttacaaccctgtctatctatctaccacagtatctcgaacaggatctatctgccattgtttcaaacaagattgtctcgaacaatattgttttgaataagattttgcctt

SEQ ID NO: 23464 - DNA, 334 bp, Glycine max
  Clone ID: PAT_MRT3847_12118C.1
gataaaacttggtgaaatttattacaaatgatacggtgagaaaaccactttacactggcacggggaagctactcctataaacaaaggcgaatgggccccctatcaatttacccggtatcctccgaattctaaaataataacccccatccacaaagttttaacactacccaatacaaggaaccgagtttgggagcgaataaccacctaaaagtaccttttaatgcccgaacttaggttgagaaaagattgtccgattaaactttacgaaactgatggcataaagtaacatttgttgccctaaaccctttgccggcattttattcaacaattaaca

SEQ ID NO: 23465 - DNA, 199 bp, Glycine max
  unsure (1)..(199): unsure at all n locations
  Clone ID: PAT_MRT3847_121190C.1
cnttcttttttttttttttttttttttaaattattcattttggaagcctaaaaaaaaccttactaacgaaagcttgcccagctaaagggggaaaatactgactactcactcggggatactggacgtcgtatcacaaaacactgcctgggaaaataaaatctggtccccgcttaaaaatcccgctttccattccaatttc

SEQ ID NO: 23466 - DNA, 192 bp, Glycine max
  Clone ID: PAT_MRT3847_121191C.1
aaccaatatgtgaactctggataccatcaaagaagttgttactacagggggggggggcaagcatgaacagacgattgggttagacgaaaagataaaggaggatcttattggtatcggatcgggagctgatgatccaaagacaggtgctcgatcgggaaagggagagggacttgcagaaccagaatatggtat

SEQ ID NO: 23467 - DNA, 314 bp, Glycine max
  Clone ID: PAT_MRT3847_121192C.1
cccaagcattgaagcaacggcggtttaattcaccgaccaacgccggagatgcgagctatttctaccgaatgctgggacatttattatacaattaagttgtaggagaacaattggacactggctgagaaggacactgaggctacaaggattcaaagacttgtggaatgagattcaagaaatgagcctgctccaatggtaaacaaggatgaccagacaccgagaggaggccaacgatatcggaacgaaaccatactgaaatgaggaaagaaagcgatactgagaagaagcccgaccggcctaagtacggaagataa

SEQ ID NO: 23468 - DNA, 210 bp, Glycine max
  Clone ID: PAT_MRT3847_121193C.1
ttcagccgggcatcctgttctcctgagtcgtcagtttgcagagaggccaagaaagggcttgctgagagatgggccgtgatgtcaaatgagggttctcaaggacaaaggcatgtgcgtagaagctctaccgtgggtgagatgcttgctctttcgggtgtagggagatctgtaatatctgagcttgggggtattcatgaagaacgggagcca

SEQ ID NO: 23469 - DNA, 299 bp, Glycine max
  Clone ID: PAT_MRT3847_121194C.1
ggcttctttcacatggagcagacaaaaagcatatggtctcccgtcacagatccaagaagtggtttcaaccgggaatccaaaagtttccaaaggcacaagccccctcaccgtttcactccccccacagtcaccgtcgtcacagccgcattctcactccatccacggcgcaactcccagttccagggtccctccaacgccattaacgacactgccaaaggtgaaacggcctctccatagggggagcccctccaccgggccaaaaccctagcctcgaatctcgccacaatcctcaaactcac

SEQ ID NO: 23470 - DNA, 198 bp, Glycine max
  Clone ID: PAT_MRT3847_121195C.1
gaatttaactatgatacgaaattgatattaaattcttaaggcgaaccgagcgacaatacatcatatcaaatcctaaaatgcggcacctacaccagaacagcaaacaagcaccagggacaaattgaacataacagacatgaaatacaagcaactctcgagaacggacacgcttaaaacaagaacacttgaaaagaaaca

SEQ ID NO: 23471 - DNA, 196 bp, Glycine max
  Clone ID: PAT_MRT3847_121196C.1
ctgggattaattttttgctttccagtattgggaattgagaagtaggacaacgggatttgatttttcagataaagatgtactatgattctgtcatccaccaacaaattacagaatcatagtacatctttatctgaaatttgttggtggatgacattcaatctgtctaataataaaattctatactttcacatttaaa

SEQ ID NO: 23472 - DNA, 1014 bp, Glycine max
  Clone ID: PAT_MRT3847_121197C.1
aattcggctcgagcaaaaaacgtaggaggaggcaagaagttgtattttggcatccccgtggcttcaagaagagaatctcaatggaggcccaggagctgaagcgcgtgttccagatgttcgaccgcaacggcgacgggagaataacgaagaaggagctgaacgactcgctggagaacctgggcatcttcatctctgacaaggacctgagccaaatgatccagaggatcgacgtcaacggcgacggttgcgtggacatggacgagtttggggagctgtatcagaccataatggacgagcgcgacaatgaggaggacatgagggaggccttcaacgtcttcgaccagaacgccgacggcttcatcaccgtcgacgagttgaggaccgtcttgtcctccctcggcttgaagcaaggaagaaccgtccaagactgcaaggccatgatctccaaggtcgatgttgatggagatggcatggtcgattacaaggagttcaagcaaatgatgaaagggggtggattcactgctctcacttaatttctttcaatcatctattccccatatatctttcttgtacatataacttactttcaatcaggatcaccaggattattgtgattgtcatggtttcggaccatggatggtgtggtataggattagatcaattcatctcatctcgtcctaggtatgtgtacgtgtgtgtgtgcttgtgttttccaatgtgttagtcgttggtttttgggagttagcaaacctggctccataagtgagatgagcgcctcttgccctggtaatgctacaactttattatgtctttggttttttgggggaggaagacccttgaaatcgggagactactgctactgtcacaagatctgtttgtgttttcttcttgttcaagttttgagtcgagaaaggttgattctattttcactctgttggatgattttgtactccctttcttttcttttctttttttattttattttatttcagctgtggtggcacgtttatttgc

SEQ ID NO: 23473 - DNA, 1924 bp, Glycine max
  Clone ID: PAT_MRT3847_121198C.1
cttggccttggcttgactgaacgtggcagcacgagtgatgaagcacccttatcaacttcggaagaggaagtttccaatatggaagatgatgatttgtgtcaattttgggaaacgttctggccttcctagttttatttctctttggggataaatttctgacttcccagcttatatggtgtgagtatttggatgtgtagaataagcttgattgagcttttagtttgtaaatcagtctaggttgtatagtgataatggcgatggacactttctctttttatgtaaaactggccttcaatgctctggtggtatatagggtttcaaatacagtgaagtttttatttctttaccttatatatctatccagttaaccactcttattgaatccaaaatccccgtccgacgtacggctgagagaagacgacagaagggggaggcaagaaattgaattttggcatccccgtggcttcaagaagagaatctcaatggaggcccaggagctgaagcgcgtgttccagatgttcgaaaagaagcaccacaaattaattctcgtttcccattcccatccccatgccaactattttgcataggattttccttctttacaacctcgtacactcattcctcctctgtctggtccccaagaaggtgcgtcccttcctccccccttcttggttccaaaccaaaaccatcactgcaccttcttcttcttcttcttcttcttcttccagtgcccgcatcatcaagagaacaacaatggaccccaacgagctgaagcgcgtgttccagatgttcgaccgcaacggcgacggaagaataacgaagaaggagctgaacgactcgctggagaatcttggcatcttcattcctgacaaggagctcggccaaatgatcgagaggattgacgtcaacggcgatggctgcgtcgacatcgacgagttcggggagctctaccagaccatcatggacgagcgcgacgaggaggaggacatgagggaggccttcaacgtcttcgaccagaacgccgacggcttcatcaccgtcgacgagttgaggaccgtcctgtcctccctcggcttgaagcagggcagaaccgtccaagactgcaagaacatgatatccaaggttgatgttgatggagacggcatggtcgatttcaaggagttcaagcaaatgatgaaagggggtggcttcagtgctctcacttaaattcatttctttcacatccattcaatctatctattcccatacatctttgctttgttttgttcttgtatataagtttcaggagaaataattacatgattcgatcaacaaggtaattgtgttttctctaactaatctccacgtcacacacatgtaatggtttccgaccatggacggtatatgatttagatcaatcccatatgatctcgtcgtcctaggtatgcaatgtaatgtgcgcattaatttgtgcctcgtatttaccatgcatgtcatttttattttttttggaagaagcacgcgtcgacgcttttgtcagtttgtgtgtgtgtgtgtgtgtgtgtgtgtgtttccaatgttagacgttggttttggggggttagaacctggctcgataagtgagatgagccttgccctggtattgctacaacttcatgtcttggttttttgggggaggaaggccgttgaaatcgggagactattgctagtcacaagatctgtttgtgttttcttgttgttaaagttttgaggccgtaaaggttggttctgtttttaccatgtaaaactctgtttgatgattttgtacaccctttcttttcttttctttttcattttatttgatttcagctgtggtggcccgtttatttgcaagaaattcatggacataaaaaaaaaaaaaaaaaaaaaaaaatggcagttttttcgtcgaggatctcaagcttac

SEQ ID NO: 23474 - DNA, 178 bp, Glycine max
  Clone ID: PAT_MRT3847_121199C.1
ttcactcgttcgcgcagggggactgaatctacaggggggatgtgttttatacgcacggaccgggcctaatgagtggtatgatagattacgatgtgtactgtgcggtatttgattgaggggtgcaaataaaacgaggggtcgcacttgggacgagcttgcaatggcgttcaatccactc

SEQ ID NO: 23475 - DNA, 201 bp, Glycine max
  Clone ID: PAT_MRT3847_12119C.1
acgcaactgcccgttgacatctgcaacgaatctattagcatagaggatacgactgtaagaggcagtgagcgaaatgctgaactacaccaatcgtgcagaggtctgcatgctttatcatgctttcaaagcctttcattccatgcttagaagccaacactgtgtgggattgcatgaacccctctgacttattctctatcatct

SEQ ID NO: 23476 - DNA, 438 bp, Glycine max
  Clone ID: PAT_MRT3847_1211C.1
cccacgcgtccgctctactgtgtcttcctcttccattttcattctctctgattgttgttctgagattattaggttactttgtctttacttagaaatcaaaggcagaacttcgctgggagagcaatggtgacagcaaaagtgattcaaatccatggaaataaatggcagttgctggtgtgcataatgtgactgtgctcgaatctactttcctaagggaatcccattcccagccatctgggaggcaaggagatggagggaggggaggcacccggtcaccttcggtcttgcaaatgtggcgagagattgaagatgagcaggtagtcagacaagttcaagggaagactccccccgggggggtggggaaaagggggggttttaaccccaaaaaaaagggggggaaaagtttttggggaaaattttgggggggggggttttttt

SEQ ID NO: 23477 - DNA, 150 bp, Glycine max
  unsure (1)..(150): unsure at all n locations
  Clone ID: PAT_MRT3847_121200C.1
tcgaggattcggttgttcactttgatnctcatcaataatcgtcaggcgtgaagtgtgaagaagatgcctgatcacgaaacaatcgccgttcggaaggctctgaagagggcgactcactcccgacacgtttgaagtgcggcttttgtgctg

SEQ ID NO: 23478 - DNA, 301 bp, Glycine max
  Clone ID: PAT_MRT3847_121201C.1
gttatgtcaagtattttgatctagctagcttcacttgctccacacgtaccccatagaggattgccatgctatgaggcaaaaacctttttatatgggaataataactttctcaagcacatgccaactattccaaagtgatttttacttcaccctctcatcgtatcaaaagagtgttttacttcaagagaacaaacaagatagagtaatcagtcatgccatttggtttggtctcactctcagcctggaacaagcgtcgtttaagccaatcacaaaatcatacagatccctgtgtttacaaacc

SEQ ID NO: 23479 - DNA, 1146 bp, Glycine max
  unsure (1)..(1146): unsure at all n locations
  Clone ID: PAT_MRT3847_121202C.1
gctcgcccaaaaaatgaagtttgttctgccttctattcaatattcaatagccattcctcacaaaaggagcacgtcatggatcaacttctcttccagttactttatatccacaattgcattaggaattcaatacttaaacagtgactccaaacacaataatttaccagattcttttatcccctattcctacctcttccgtttctctcccttgtgttgttccttccactttcggaaggaagaatgttttgcggtttgccactcaatttgttgcttgtgcttctcataatatgtttttaactaatatattttgagaaagcaaaacccaaaaccataacaagcttaggattctgaaattctcctaattgacactgctgttactctgttgacaaggaacaacgttctctgtatcagctcctcaaatgatgggcgttgctctggatcacttcgccagcagtcatcgatgattgatgcaacatggggatcaagcccctctggaaggtctagtcgtctatccataaagcctacgactccaacaacctgtaaggaattcaaatttttccatggaatagattgagtcattagttcccagaggatgacaccaaaactgtacacatcagacttctcatttgaaggttcatttcttaggacttcaggggccatccattgaggggtgcctctcccagattttgtagttaataaagttgcatccttcaacctagacaggccaaagtctccaacctgacaaaaaactttacagtccagtttttatctacaagcaggttagaagacttcaggtctctatgcacaattggtggatttctgtgatgaagataattcattcctctagcaacatcaagagccatccttaggcgccttctgatgtctaatgtctgattgttcctgtgcaaatttttgaaaaggcttcccctaggtaataactctgtcacaatggcaagtctttcctgtgaatatactgctcccatgaaaagcaatacattagggtgtctcaaataccatggataacaaacagcctaagaagcttgtccgatctctacgcttaattgaagatgttgcttacacacattactttaattaattaattggtaaccatatttactaacanactacatacagttaactatttta

SEQ ID NO: 23480 - DNA, 425 bp, Glycine max
  Clone ID: PAT_MRT3847_121203C.1
tttctttggggtttttttaaaacaatttacgtggtttttcacaagaacgcgcaaaagggtaatgggggaaatgggtcccacggagcctagaaccaaacttaaaaacctcacacggactacacattttttttttttggaagagaagggaaacaagcaaaccaaaatggaaaaacatacaacaggacaatattgcccaaataaacgggatgcggctatatataccaaaatggggggatcaaagaacacgttttaattatttctggcggggctccacaatgacgacacccttttaaacgaagggccccacaaggaggaaggggtggccccaaaactgggagggggcgttaaagcgtaacacaaaagccccagggcgactctttttcacttaaaccaaccacactggctacacgggccccaaaccctaa

SEQ ID NO: 23481 - DNA, 299 bp, Glycine max
  Clone ID: PAT_MRT3847_121204C.1
ctctatctcaactcgttcagttatttgtttatatgtgcacctgaccctacacaacggcatggggccgcctgaatctttcaactgacctcttaccaagtttagtacattactgaatacgtgcattctgcaactgcgtcgggacgaatggataacatcaaagactgaggcttgactactctccttctatatacaatagccacagagcgactaggtcatacggactgatcctatggctgtgaaagtgaagcttttctccgtcccaaaggaccagactatttattcgaactgcatccttgacc

SEQ ID NO: 23482 - DNA, 209 bp, Glycine max
  Clone ID: PAT_MRT3847_121205C.1
gagggcagaacaatggatataaaagtattcttcgttccacacattatgtctggtaataaaatagatgaaaaaaacaagggtcaagttttttcaaacataacatttttaaaacattctagggccaaaacataatattggtccgtaggggacaacagcttttttagcgatacttgatgaagccaatttccttggcattggtaccttgagcc

SEQ ID NO: 23483 - DNA, 463 bp, Glycine max
  Clone ID: PAT_MRT3847_121206C.1
ggctcgagggcttgagcggcgcaacgggctgagcctatgcttgagctatagagaggtctgacggtgcggctgatatgtcgagacctcaccatggtatcgtgagctgcaagtgtgccactctcgggatacacaacttgcgatgccgtatgacccgagatgtgcgttacgggtcccaactgctcgctaacctgcacgccactgatggcggggcgcgagtgagaccggagaacggtctgcgcgaggaggatccttgcgtaatgcgtgggctgcagcttacctggcgtcatcaacttaccctgtgaatggatagagctcaagggcgccacctatacccagccgtggtggtccggaccaagccctcatgtgtcagtcggcgcgacagtggctgtaataccctgggcgcgtgccctgacggtgccgtacgctgtgctgatcttggcggcatgtcgtatatattgaaatg

SEQ ID NO: 23484 - DNA, 181 bp, Glycine max
  Clone ID: PAT_MRT3847_121207C.1
gttgaggaccaaatcctttttaatttttccaagtcccatggcatttttaatacccacatcctaagcacaggttttctgctctaaagcacccatgtgcttgggggatattgatgggaaggaatggtcttttgtaaggtattgaggaggtttatttgggaagtaggaagggtaaaaatttggc

SEQ ID NO: 23485 - DNA, 319 bp, Glycine max
  unsure (1)..(319): unsure at all n locations
  Clone ID: PAT_MRT3847_121208C.1
ttttctttttttttttgtccttcgttgccattgggggccggnccccggacccgactatgcagggtggtgacttctcccccggcnagaccctatgggaatggagtttaagtccttccatcccccgtgggggggcgggttcctatgctttgccgatttttcacactttcaagcctgggggcttgtcggcgatggncctgctgccctgcncgtggccgtcgctgtccaatccggtgcttcggctgaagccgctggggtctgcagccttagcctcttgcagctccttctccgcctgggaagcgtctgcgcctccccccatagg

SEQ ID NO: 23486 - DNA, 1008 bp, Glycine max
  Clone ID: PAT_MRT3847_121209C.1
cgtgttgtctctgataaacgagcattccggcgcggcgctgcagtacgggatcgacaaggacttctcgaacgagtctcggcacgtgatcttctacgacatgggcgcgagcagcacccacgcggcgctcgtttacttctcggcgcacaaggggaaggagtacgggaagagcgtgtcggtgaatcagtttcaggtgaaggacgtgcgctgggatccggagctcggtggccagcacatggagctgcggttggtggagtattttgcggatcagttcaatgcgcatgttggaggtggaatcgatgtcaggaagttccccaaggctatggctaagttgaagaaacaggttaaaaggactaaagagatacttagtgctaacacagcagctcctatttcagttgaatcgcttcatgatgacgtcgacttcaggagcacaataacccgtgagaaatttgaagagctttgtgaagacatttgggaaaaatcgctcttacctgtgaaagaggtgcttgagaattctggcctgtcattggaacaaatatatgcagtggagttgattggaggtgccaccagagtgccaaaattacaggctaagcttcaagaattcctcaggagaaaagaacttgataggcatcttgatgctgatgaagcaatagttcttggcgcagctctgcatgctgcaaatttaagtgatggaatcaaattgaaccgcaaactaggaatgattgatggttccttatatggatttgtggttgagttgaatggtcctgatcttttaaaagatgaaagctctaggcagctacttgtgccacgaatgaagaaggtcccgagtaagatgtttagatccattaatcataacaaggattttgaagtttcacttgcttatgaaagtgagaatcatttgcctcctggtgttacctctcctgaaattgctcgataccagatatctggtttgacagatgcaagtgagaaatactcatctcggaatctgtcatcccccatcaagacaaacat

SEQ ID NO: 23487 - DNA, 388 bp, Glycine max
  Clone ID: PAT_MRT3847_12120C.1
ggtctcttcattgatggcatctgtggccctgaagcctgcccctttcactgttgagaaggccttagttagaggccttgcattcctcttaaggaactactcttcattcagagttgtggacagcggtggcaagaagatcaagactgactagccttatggaattaatggtggcatggctgtgaaggaaggagtttatgcatctcgcatgaaaagaaatggactgggcgtttaccagtgggtagacacatacggtgctaatgtcgatggttacagtcctatctaccacaccgaggactggtcttctaccggtgatgtctacgctggacacccgactggctaggctatcttggctgtgactctacttggtcttgttgctgcggtggacttcttg

SEQ ID NO: 23488 - DNA, 167 bp, Glycine max
  unsure (1)..(167): unsure at all n locations
  Clone ID: PAT_MRT3847_121210C.1
tgagactcaggtcaggcggggctacgcgctgagtttaagcatatcactaagcggaggagaagcaagaanacggccgctcgaaaagatcggacgctctatacgattgaatctgacgtccgcgtgcatccgacgtcggagctctactcaagtgtcacccaattgcaatt

SEQ ID NO: 23489 - DNA, 396 bp, Glycine max
  Clone ID: PAT_MRT3847_121211C.1
gagccaaaaccagatttgatggccacttaatgttttccaaaggggctgcccacattccgtaaaaacataaacttttttaccgacagacccatttttccaaaaatcaatttcctgcccattttttgaaaggaaaaaaacacagtcatggacccttagcagtttttgcccgtttcacaattaatacctactccctaacaaccctttttttgaataaaaaagaaattttaataacaaaacacctttcgcagccccccatttttatttttaaaaccaccaccaccaccactaaattaagcccgctcaccacgaattctttttgccagctggatatttttgggcataataattacacccttagcgggaatggcccacaaattttttttctcaaagagtcca

SEQ ID NO: 23490 - DNA, 125 bp, Glycine max
  Clone ID: PAT_MRT3847_121212C.1
cgattctagattgcaacaatgactaaaagagcccgagggggatccttctggtacaggtgcaacataacacttggcctgacggtagcttcaactgtcaactgggactccttcaacatctcgaagaa

SEQ ID NO: 23491 - DNA, 488 bp, Glycine max
  Clone ID: PAT_MRT3847_121213C.1
ttttattgtcctgtaaaagaagcaatgcattaaagctgaacgtagaaacgtcgttcatctgtcaaggagtgtacaagacggtaatatctattgcacagacttgctgtagaggcatggcgttggaagaattgctcccaagaggaagagcggtacatccgtcactgagactggtctgcttctacctgcttaccttgatcgtactgcaagacatgagagggcatggaacacttacatctcgtgctcagggatccaactgagcttctgagggactcaaacatatcagagttggacgtcttattcactgatctgaatggagatgattaccatgccttcctgatgattagattgaactctgaggaggggcatagcctatatgagctgacaaacttttggggaatggatttgacaactgatagacgatgtccttggtgcggatatgacaatctgtaattgaagctaatgtggatgtcacgaccactgataattat

SEQ ID NO: 23492 - DNA, 218 bp, Glycine max
  Clone ID: PAT_MRT3847_121214C.1
cattacctcttcatcacaatcagagtggagctgaccccttcattccattacctattactcttaacaattcaagcatcaatcgcatccataccctcccacactattctcttttcttccttcccagctccttaatccattgacctttccttcactaccaacaaatcctgcacaatcctcaagtgtcactcctctctccatggccatcaaactctaaccca

SEQ ID NO: 23493 - DNA, 508 bp, Glycine max
  Clone ID: PAT_MRT3847_121215C.1
taaaggagtcaaattattcacaagctatctggacatattttccaattaagccagcataaatttgcatcaaatgttgttgagaaatgtttggagtatggtgatgctactgatcggcagttgttaattgcggagattgttggacatgacaaacaaaatgataatttattgggttcatggagaatcccagacatactgcttcacaggaagaggaaggtagctgggttacaatgcaaataagtgggttactcgtatctgaattacacctgcacatgacaatgaaggcatatttgcttgtttcttgatctttgtttaagagggcatgtgtatggttactaaaaactggaaaatattgtacttgaatgtctagcagcgggcttttatggctattgttttttctgttctactttaccgatctagagtctttcaagtttcattttattgttgactgagacactaaaactactctttttttatattaattacgagctggaattaccgatcattccat

SEQ ID NO: 23494 - DNA, 571 bp, Glycine max
  Clone ID: PAT_MRT3847_121216C.1
cccacgcgtccgtacggctgcgagaagacgacagaaggggaagcttctgtgagttgtttttgcaatgtcttgttgaattgatgacatatatagtaatcagtttctttgagttgtttttgaaatgtcttgttgaattttctcgagtgacctaaatattctttctgcgtgctgtcagcgaatgctcaaggctgatggttactttccatcagaaagctggatcagggaaactcaccggtgtatatagaaagtacaatacatggaagtatggctgtgccgcgaaaatagaaccagccctgtttctactggataattaagggaatgcaagtaatcttctagtttctaatgcattgctttggttgttttgagagtttgcttgtgctagaagtttgttttgagagcttcagagacctatcaacagaagttggcctttactctttcagtaacgtgtgtctttttctttacactcaatcttggctttcaggattgtatggacaaagtgaattagcacataaattgcttttactaatcactgaaagatacagttagtcatatggttcttgaatttacgcgg

SEQ ID NO: 23495 - DNA, 441 bp, Glycine max
  Clone ID: PAT_MRT3847_121217C.1
gccacgcgttcgcattgatctatctaggtgctctctctaaatctaacgatttcgtcatccgacagcgatctctgcgtctacatgatcgacatgaacgctcccattttctaaacctcagagagggatccagctaacagttgcttacggctgaaaagttgcttgcccacagatctgatgcgcatacgtgcgaaagccattataacgcatttaatggcagttcacggtgacgatgaccctgcggagatggatgcatccaacctatggacgatcaacacctacgaagctgtcggcaacggtggcaccttggaccgaatgcacaatggccaccgcctattgctcactggttcagcggagctagctaagtgccggattgtgataggagactgcgacggacctatgctggctatggaaacagtaacgagcatggagattaaactctat

SEQ ID NO: 23496 - DNA, 367 bp, Glycine max
  unsure (1)..(367): unsure at all n locations
  Clone ID: PAT_MRT3847_121218C.1
tggaantttgggctgatttatgtgcttgtttatctgcttgtttatctgcttgcatcgccgtcagaatgatagaagggcatggtcggcaggggatcatagaggggcagggtgcgtgacaagatcatagaagggcatcgtcgtcagaagatgatagaaggaataagaatcggtaaaaagagagtaagaaaggaggtgctcagaacaagcactcggaaagggagaagaggaggaacaatatgtacgaagagggtatgaaaggagaaaagaagaagaagaaatagtatcgagggaataagaatacgaataggtcgaaagatagtcaataaaagacagaaaagaggagataaaaggacgaataccgccaacg

SEQ ID NO: 23497 - DNA, 151 bp, Glycine max
  unsure (1)..(151): unsure at all n locations
  Clone ID: PAT_MRT3847_121219C.1
catagatgagcaattctttgaccaatttatccatcttaaaacaactgaaatggccaacaaggttctagacagatactacagggcacctgattaagtactgaagcgcttagagacaatgaaaagtgtagtaagtttcanaattataagggaa

SEQ ID NO: 23498 - DNA, 173 bp, Glycine max
  Clone ID: PAT_MRT3847_12121C.1
actcgtccaaagaaacctgatgaatcggatccggacaacgcgacaagcgccgctaaatcgcaagccatcaaatcccttacttctcagataagggatatggcgttgaaggcttcgggaacgtacaagcattgcgcaccgtgcacggggccaacgacgcaggggcgaattcggaa

SEQ ID NO: 23499 - DNA, 340 bp, Glycine max
  Clone ID: PAT_MRT3847_121220C.1
cgagagacgacaaaagggggtgctttcttgaagcatttggaattctctcgattagctatgacgtaaaaagaacggtcaggagagatagagagggaacaagaatgagtgtatcagtgactgtgatgaccttcaatcaccatgatgaggagccgcaacacagtcacgattcgtgggagaagatataggatatgtgcaaaggcgtgtttagcagttactcaaccatcatcctcagtatccataatggagtgaatgcacaattggattttctctagcaaggtttgccagtttacaatcaaattgggatatcactggaagggccctacgacactactgaacagca

SEQ ID NO: 23500 - DNA, 325 bp, Glycine max
  Clone ID: PAT_MRT3847_121221C.1
gtgggcggatgcgagaaggagagagaatgggggatcggagtaatgattaacatgggctctgttgactgtagaacgctgctgccgaaaaccttcccgatccccaaggtaagtgagtaagcggtggctgataatggtggagaaggcgaacggtacgaaggatgaggtggttaccatacagtacaccattaagctccacaaacgcctccatggctgcacatttaagaagaaagctcctaaagctattaaggagataaggaaatttgcccaaaaggccatggggaccaatgatgtgagggtggatgtgaagttgaacaagtttgtctgg

SEQ ID NO: 23501 - DNA, 515 bp, Glycine max
  Clone ID: PAT_MRT3847_121222C.1
caactcccaggtgggcttatattgaaaagcggatgctatcggctttaacgctacacctcttattcactagataatcccaccactctcagctagcttaaccccttctgaccccagatgctaagagctggggaacctcagcgggactgatactctagatatggagctcggcacataactggcaaagagatattttacattcaccatctgctaacccttttcgtggctgagacgatctgataccgttttaagctgctgatgatttgcagctttgttgcgctggacggacatactcaagcctgtcctgagttggtgtgaagcctgcggcggacctccccactatgagccttacttgccgctctaaaggaacgcataccacagctatgggggagagtgaggcatgcctacattatgcacgcttcctattcatttccatagaccgactcttggggatcaggaaggaccggcactaacagagactactaattaccccgggggtggcatttctgcctttattt

SEQ ID NO: 23502 - DNA, 943 bp, Glycine max
  Clone ID: PAT_MRT3847_121223C.1
ctttgtgcttgtgtgtgcaagaaaggtaaaagctttcacacacccttttcacttctcaaaaaacaaaaggccatggctggttcctctgcttctcttttgttccttttccttctctttggattctcagcagctaaggagctattggttggaggcaaaatagatgcttggaagattccatcttctgaatcagataccctcaatcaatgggctgaaaggtctcgtttcagagtgggcgatcatctagtgtggaaatatgagagtgggaaggactcagtgttggaagtaacaagggaagattatgctaattgcagcacatccaaccccatcaaagagtacaatgatggaaacactaaggtgaagcttgaacatcctggtccattttacttcatcagtggatcaaaggggcactgtgagaaggggcaaaagttgattgtggtggtaatgtctccaaggcacacattcactgccattatttctccagcaccaacaccttctccagcagagttcgagggtcccgctgttgctcctactagcagtgccacaacgtttcaagttggccttctcactgctcttggagttttggctatttatgtgggttttctcatgtaaatgagactcacccccatctatgtatgtgtgttttctcatgtgaatgagatttacccccatctcatggtgaagaagttattgtgatttgtggatctattcttttgtgtagtgaatatataatatttttcaaataatcatatatcaaaatatgagagatagctttattaattgaatagaacagttgcgttaaaattcatcttcaatatatacatgaagtaagtcagtcaacatattccttcccatttcccatctctattatatggatgttccttgtagttcttattaagtgtacaaagtgagggtaaaatgaaattattcaacttattttttacgc

SEQ ID NO: 23503 - DNA, 964 bp, Glycine max
  Clone ID: PAT_MRT3847_121224C.1
ccacgcggctttgtgcttgtgtgtgcaagaaagataaaacccaccattttgtgcttctttctgtgtgcaagaaaggtaaaagctttcacacaccaagaaaagtagccatggctgcttgctcaagaacttctcttttgctccttttctttctctttggattctccgcagctaaggaactattggttggaggcaaaatagatgcttggaagattccatcttctgaatcagattccctcaatcaatgggctgaaaggtctcgtttcagagtcggcgatcatcttgtgtggaaatatgagaatgggaaggactcagtgttggaagtaacaagggaagattatgccaattgcagcacatccaagcccatcaaagagtacaatgatggaaacacaaaggtgaagctagagcatgctggtccattctacttcataagtggagcaaaggggcactgtgagaagggacaaaagttgattgtggtggttatgtctccaaggcacattatttctccagcaccttctccaacagagttccactttgagggtcccgctgtagctcctactagcagtgccacaacgtttcaagttggcctactcactgctcttggagttttggccatgtatgtggtttttctcaagtaaatgagactcacctttgcgttttggggggtctattattaggtttgtatgtgggttttctcatgtgaatgagagttacccccatctcatggtgaagttctcatgatttgtggaccttattctttttgtagtgaatatataatattttttcaaaaaaaatatataaatcaaagtatgagaaagccccttccttttcattttccatgaagtaagtcagtctgctattccttcccatttcccatctctattatatggatgttccttgtagttcttattaagtgtacaaagtgagggtaaaatgaaattattcaacttattttttacgcaaaaaa

SEQ ID NO: 23504 - DNA, 333 bp, Glycine max
  unsure (1)..(333): unsure at all n locations
  Clone ID: PAT_MRT3847_121225C.1
aacgggncggaaatccccgggccgaccacacccttccgccaacccttccgccaacccttccggtttagttttgggggaattaaaccattttgtggtggttattttaaaggaaggtgtgccccttaccaacctaacaaaaggaatggaaaagtggttcccggaaattgtgcctgccaagtcttttaattggggccaggactttaaaggcttaattttttggaaccagggtttaactaatccattttggttgcctttaaccatgaaggaagatttttttgaattaaaaagcaacccaattaatgttaagtttttaacatatttttttgaaatttt

SEQ ID NO: 23505 - DNA, 146 bp, Glycine max
  Clone ID: PAT_MRT3847_121226C.1
ggccaggtaaggtgacaagaatcttgacaacatcctgttcaggagttgaatcggtgctaacaattccagtgctgataccaatgcggtcatcgcttgttggtgcccagtagaatttgtcgatatgggcgtcaggttgaaatgtgcat

SEQ ID NO: 23506 - DNA, 368 bp, Glycine max
  Clone ID: PAT_MRT3847_121227C.1
caacgcgagtgggagcaccaggatctcgggctcggaacgagactgcacggattgttttaagaaaatggcagacaaaccagacatgggggaaatcgccagcttcgataaggccaagctgaagaaaacggagacgcaggagaagaacaccctgccgaccaaagagaccattgagcaggagaagcggagtgaaatttcctaagatcctggaggatttcctacccccgtcctcttcgagaccccagtcgtgatgtggaggaagagccacctgcaagatggacacgagccacaagctgcactgtgaacctgggcactccgcgccgatgccaccggcctgtgggtctctgaaaggacccccccccaatcggact

SEQ ID NO: 23507 - DNA, 222 bp, Glycine max
  Clone ID: PAT_MRT3847_121228C.1
ctctatgtctcacacacactttctctctctctttctctcacccagatcttgtaacaagcgccatgtctacctctccacgcgaaacggtcccgtacatagccaagctgacgcaacacacccagccctactaaaagatgctttagctcatttaaaatgaatcctcatcctccgaaacccaggatcagaccccggaataacctaacctactctcactcacctaca

SEQ ID NO: 23508 - DNA, 726 bp, Glycine max
  Clone ID: PAT_MRT3847_121229C.1
aattaattcttaactctagatgaagggataccgtggttaagaaaaagagcatatattagtacctacagagggcacaacaacacgtaccagaacaataggagcatcatggttaggctatggtgctcttctctctcaattacacttttattccaacagctcatcagattgtgcatttcttggagtgtgcaaaccccaacacccccattgccaatcctccctctcccaacatattcccagttgaaatggcaacaaagggagatcataatgtttttccattttggtgtgaacacattcagtgacagagaatggggcactggccaggaaaacccagcaatcttcaatccaacggggctcaacaccacccagtgggccactgtggcagcagatgcaggagtttcattgatgatattaactgcaaaacaccatgatggcttctgcctctggccttccaagtacactgaccattctgtcattagcagcccctggcaaggtggcaagggtgatgttgttcaagactttgtcaatgcagccactgcacaaggaattgatgtaggggtctacctttcaccttgggatagacatgaccctagatatggcaatgatttgctctacaaccaatactacttggctcaactacaagagttgctcaagaaatatccaaatgttagagagatttggctcgatggagcaaagggtgccaatgcaaaaaatatgacctattacttt

SEQ ID NO: 23509 - DNA, 513 bp, Glycine max
  Clone ID: PAT_MRT3847_12122C.1
caaaatgtaacacctgtttaaatttattgaatcaaattgccagactaaaaacaatatctcatacagcttgaagtatatacttcagtcatgctaaaagaaagatcctactcctaatcctacataatttcttcaccaaatgtaggatgcaagattcacagcataatttttaaaactgaaccagaatggctagtttgattggattgaccatgaaccagcctagtggacagtccaatcaagcctgaatagcattaaaagccagccctgaacatgctaaactggctgtgaaccgatctaaccctgtggactgacatgtgaaccagccagggtttgaccagttgaatcaatgcaagcttaatgggcccacagccaaaaacatgcagatagggattcaaactcagtgccacacaattaatgcatctagcatcgtaccaccaagctagaggtcagccaggtgccaaagggctcgtcactatgtgaaggtatggaggagggtcattgtacgcagcttaccct

SEQ ID NO: 23510 - DNA, 456 bp, Glycine max
  Clone ID: PAT_MRT3847_121230C.1
ccacgcgtccgcccacgcgtccgactaaagaggcaaatggagctgctagacgacgacaccattgtgcctgatagccagcccgcggatggcctttggggctgaacatggttatcgtcaagagaagcgccgaccctgcttcatccttttttgccattgtccacctgatacgctggtgggctttataagttgtctaaaacacatgcccgaatgcgtgatgtcgctgatggcattgccatacgccacacgcagttcccttattttgtcgggcttaagctgtgatctgcctgaggatgaatcgatgatgttcatgatacagcttaccagctatatatatgtgttaatgtatgtaagaatgatacgcacgcttagtctctcacccatgagccatgggtccgttgagtcctgactgaccatcgccagaagttgtggtttgtgacaggaaattccatccttctg

SEQ ID NO: 23511 - DNA, 199 bp, Glycine max
  Clone ID: PAT_MRT3847_121231C.1
tgattggatggcttcagaattgttgagaaatgaactttctgatgataagtgtgaagttttaagctatggggtcatattatggtagctctctatctagcatcatctcagaggaggaatgaatccaatgcatgtagtcggtgctgtgggtgtacaacatcttcgtattgacttctcatataatgaagaccctgccattgct

SEQ ID NO: 23512 - DNA, 275 bp, Glycine max
  unsure (1)..(275): unsure at all n locations
  Clone ID: PAT_MRT3847_121232C.1
cttcctagaacgnaaaannanaagaagagcaattttccctcaccaaagaagaagaagcaaacantggccgatcaattacngatgancagatctccgagttcaaggaagccttcagcttgtncganaaggacggcgatggttgctcacaaccaaggagcttgganctgttntgcgttcattggggcaaaacccaactgaggcagagntccagggcatgatcactgaagtggctnctgatgggaatggtnncattgacttncctgagtncctaaatt

SEQ ID NO: 23513 - DNA, 475 bp, Glycine max
  Clone ID: PAT_MRT3847_121233C.1
cacttactaaattttattcttgattatttatgtataattgtatgactcatatttatggttcccacttcacaaaactaaaaaaataattcaattgatatgcttacacatagaaagacacacaaataaaattatatggagggaagaaaactagtagttcttaaccttttttttctcagccattgctttgaattgccaaaacacactatcaacttcgtcttccttaagatcataaccaagctgaaatatagattataaccaaaatagcaaagggtaacattaagtatattttaaacattaacaatgtggttcgatagagtaatagaaaaaacaatagcaaagctttattccacccggtgaagtcgaatctatagtaattgaatttccttggttctatttttttcttgatagaataattaaattaaattttcttcatttttgaaaaaaaatttatattgtaaaaaataaaatttgccag

SEQ ID NO: 23514 - DNA, 512 bp, Glycine max
  unsure (1)..(512): unsure at all n locations
  Clone ID: PAT_MRT3847_121234C.1
gtngtaantttgtttatttanctatgaaaaggttgattgtaaaataaangaacactttaaagntatncaaattattgngttagnttagaggaaannnttnntttttncnnagactaacanaatattantngaggacannnttntttannttnanacgcaagtatattttaggagcagttttggtgaaattagaanatactagaaaggttagtaaataataattataangggaactgtaacagtgttttgtaataagagataatgtatttgaaagaatagtgtaaaattggtaaataggttgtaaatttaaattgtaattgatttgactggattttgtaaatacacatggaatagtttgaagttaaattttggaggtgttaataaaaagggagtttttaaataaaaagtttaaatagttttatggtataatggattgaaagaaaagaaataaattgtataggaaatatttttaggatgaagaaggttaatgttgtaattttgagtgggaaaat

SEQ ID NO: 23515 - DNA, 255 bp, Glycine max
  Clone ID: PAT_MRT3847_121235C.1
ttttttttttttttttttttttttttggttttttttttttgggggcacccatttttttatgtttttttggggtgggaaataaaaaaaaagaaaagcttaaggtgcttggggttcgttttccctataaacaaaattatggggtcccaatttaattggtaatcccaggcaggggtttaatttaatcccttaaaaagggggcctttaataaaaagaatgggggttaataaaacccaacccaattccttttttcgccgg

SEQ ID NO: 23516 - DNA, 612 bp, Glycine max
  unsure (1)..(612): unsure at all n locations
  Clone ID: PAT_MRT3847_121236C.1
agcgcgtagccgtagcacacaacttccctcaattttcatttccgtttccacaacaaataaaagagaaatgctacggcgtgcgacttgaagatggtcgaattatccaccgagtcaatagaaacttgacatctgtgtaaatattaatttaatcagtcatttcaaattttggtctattaccaaatttaccccttcttacttcacggcaccacacacatgccgcacaacatggacggcctcaccggctccaaatccaactccctcccccgtctccgacgacgcccaccctgcccaatcctcaagttcaggggagggtaagattggaaaacacggaatttaaattaatcaatattttataaataaattcgaaaagaaaaatatttccaaggcgaaaccaaaacccacagcacactatgctatgctatgctctctaatccgnttccgccgttccgctccttcctaccacactctccactctctctttccgacgattaaccgtttttncttctccgcctccgccgccatggttgctcacgcgaaggacgaggcgtacctcagcgcgacgattccgaagcgcatccgtctcttcgagaccatcctggcggagcagcacac

SEQ ID NO: 23517 - DNA, 335 bp, Glycine max
  unsure (1)..(335): unsure at all n locations
  Clone ID: PAT_MRT3847_121237C.1
cgcaagaccggcaacaggagccaagcggaagaaaccnnancgccttttgccnttgggtgggtcgagggggtggcaccccccaacaaaaactcgagcacaaaaacccccttcnggggggggagggggggccacaaaaccagcccggcccgcagggccatgaacgccgggaagctcgtggcgagcagcggggcatcgtccaccgagacaggggggtccgacacgaggcccacgacgaggaagcgcaaggcgacgcggggacccacaaggggggcgacggcggcccccgaagcggagccgagcccctcgccggcagggcgggcacccacgaccagcga

SEQ ID NO: 23518 - DNA, 1102 bp, Glycine max
  Clone ID: PAT_MRT3847_121238C.1
ctcgagccgaatcggctcgaggagaacttcctcttcgtttcgctgattttggggttttgcatcggaatgaggctagtggcgccctgagtggattaacacgtgttaggagattccagcaggacgatgcacatattttctgcagggagtctcagataattggtttcacatatgagctgaagctttcaacgaggccagaaaaatacctaggagatattgcaacttgggacaaagctgaaagtgctcttaaagaagctttagatgattttggcaagccttggcagttgaatgaaggggatggtgcattctatggaccaaagatagacatcagtgtatctgatgcattgggtaggaaattccagtgtgcaactttgcagcttgacttccagcttcctgatcgttttaagttggaattctcagctgaggatgaagccaaaattgagagacctgtaatgatacacagagccattctaggatctgttgaacgcatgtttgccatacttttagagcactacaagggtaaatggcctttctggctcagtcctcgtcaagcaattgtatgccctgtgtctgaaaagtcacaagcttatgcattacaggtgcgagatcagatccaccaagcagggtattacgttgatgctgatacaactgataggaagattcaaaagaaggtgcgagaagcacaattagcacaatacaactacatcttggttgttggagaggaggaagctaatacaggacaggtgagtgtacgagttagagacttggcagaacataaggttatgagtattgagaagctacttgaacatttcagagacaaagctgcagctttcgaatgatactttgcatgtgaaaactgtcgaagaaaattttcagccccaaataccttagttttacacagttgtgtgcatttttattttcaacttaagcaatttatcctgattttatttatgatttgaatgatcactgtatttcgcactagaaacataatgtgaatcttggtcatacctggagcgcactctggttgatctttatatcaaaaaaaaatacgttccgagctaaaaaaaaggattggagtttacatgtcacatgtttttattttctt

SEQ ID NO: 23519 - DNA, 4059 bp, Glycine max
  Clone ID: PAT_MRT3847_121239C.1
agcgcgtagccgtagcacacaacttccctcaattttcatttccgtttccacaacaaataaaagagaaatgctacggcgtgcgacttgaagatggtcgaattatccaccgagtcaatagaaacttgacatctgtgtaaatattaatttaatcagtcatttcaaattttggtctattaccaaatttaccccttcttacttcacggcaccacacacatgccgcacaacatggacggcctcaccggctccaaatccaactccctcccccgtctccgacgacgcccaccctgcccaatcctcaagttcaggggagggtaagattggaaaacacggaatttaaattaatcaatattttataaataaattcgaaaagaaaaatatttccaaggcggcgtccgtacggcgagaagacgacagggggccgaaaccaaaaccaaaacccacagcacactatgctatgctatgctctctaatccgtttccgccgttccgctccttcctaccacactctccactctctctttccgacgattaaccgtttctcctcctccgcctccgccgccatggttgctcacgcgaaggacgaggcgtacctcagcgcgacgattccgaagcgcatccgtctcttcgagaccatcctggcggagcagcacactcagcgcctctcgctctcgccggatcctatcaaggttactctccccgacggcagcgtcaaggaggcgaagaagtggcatacgacgccgcttgatgttgcgcgcgaaatctcgaagaatttggccaacagcgcgctcatcgcgaaggtcaatggcgtgctctgggacatgactcgccctctcgaggacgattgccagctccagatcttcaagttcgacgacgacgaaggccgcgacaccttctggcactccagcgctcacattctcggccagtcacttgagacggagtatggatgcaagctatgcattgggccttgcactacaagaggagaggggttctattatgatgcgttttacggggacttgggtctcaatgacgatcactttaagcagattgaggctggagcattgaaggctgttgcggaaaagcaaccctttgagcgtattgaagttacacgcgatcaggcacttgagatgttttcagataataagtttaaggttgagattatcaatgatttgcctgccgacaaaactatcacagtatacagatgtggccccttggttgatttgtgtcgtggaccccatatacctaatacatcctttgtcaaagcaattgcgtgcttaaaggcttcatcagcatattggaggggggacaaagatcgggaaagtttacaaagagtttatggcatatcttatcctgatcagaaaagtctaaaggaatacttgcatcggcgctccggcctccccccctggttttggggttagattaggtcttcctacccaaaacaaaacttcagtttctgtttcagttcgcggagttcaatcttttacgtatacgtccacacgcccctatcaagatacactctccgctctgtctagccttttagccggttctcgttctccggctactcctccgcctctcgcgctgtcgcagacggcgggctagatcatgctctgggccctgggtaacgtagggcaaaaactacccttggtgcccatgtcttcaggtcaaagcttactgaagcatcaacgtacccactctcgcattcgccgaatcctatcatattgactctccccgatggcaacggttttggactaggaggagttcagattgctcgaagagtttggaaagattactatccccaggtggatgcagtggagtacttggttgatgcttatgacaaggagagatttgctgagtcaaaaaaagagctggatgctctactctctgatgaatctttagccagtgtcccttttcttgtccttgggaacaagatagatattccatatgctgcctcagaagaagaattgcgctaccatttgggcctgactaacttcaccacaggcaaggggtaaggtaaacttggccgactcaaatgtccgtcccatgggaggtattcatgtgcagtattgtgaagaaaatgggttatggggatggtttcaaatgggtttcccagtacatcaaatagtcccttagcaagagatggcttggtaactcatttctagaagtttgtttctctagttgagatttggaggtgttgttgggacaaaattgctgttaaagaaattgcagtatatttcaacttttatttatataaaattactgggaaccttctcttgttttccccaattgcttttctacttaatcaatttatacatagtatatggatgatttgtctggtcagtttatttcgaacttgaaacatatcttaaacctttctgataagtcgagaggaatacttgcatcggctggaggaggctaaaaagtatgatcacaggattttgggtgtgaaacaggagcttattcttcatcatgaatggagtccgggaagctggttttttcttccacatggcgctcggatctacaacaaactcatggacttcattcggaatcagtacagggacagaggctatcaagaggtcatatctccaaatgtatttaacatggatctatgggtgcaatctggtcatgctgcaaattatagggaggatatgtttatcttagaggttgacaaacaagagtttgggttgaaaccaatgaattgcccagggcactgcctgatgtttaaacacagggttcgatcatatagagaacttcctcttcgctttgctgattttggggttttgcatcggaatgaggctagtggtgccctgagtggattaacacgtgttaggagatttcagcaggatgatgcacatattttctgcagggagtcccagataaaggatgaagtgaggaatggcttgaatttcatcaattatgtctataagatatttggtttcacgtatgagctgaagctttcaacgaggccagagaaatacctaggagatattgcaacttgggacaaagctgaaagtgctcttaaagaagctttagatgattttggcaagccttggcagttgaatgaaggggatggtgcattctacggaccaaagatagacatcagtgtatctgatgcattgagtaggaaattccagtgtgcaactttgcagcttgacttccagcttcctgatcgttttaagttggaattctcagctgaggatgaagccaaaattgagagacctgtaatgatacacagagccatcctaggatctgttgaacgcatgtttgccatacttttagagcactacaagggtaaatggcctttctggctcagtcctcgtcaagcgattgtatgccctgtgtctgaaaagtcacaatcttatgcactacaggtgcgagatcagatccaccaagcagggtatcacgttgatgctgatacaactgataggaagattcagaaaaaggtacgagaagcacagttagcacaatacaacttcatattggttgttggagaggaggaagctaattcaggacaggtgagtgtacgagttagagacttggcagaacataaggttatgagtattgagaaactacttgaacatttcagagacaaaactgcagctttcgaatgatactttgcttgtgaaaactgaagaaaaatttcagccccaaataccttagttttacacagttgtgtgcatgtcacaattttatttttattttcaacctatcaatttatcctgattttattttatgatttgaatggtaacaatattttctttgtatcgtttttgtttacgttccgagctttttacatcagcattagagtttacatgtcacattttttttttcttttaagttggtggctgacatttgaggaaaatatacatttttgagttggtcctcaattatgattgttagtaacttgtctgagtttttcttaggatccaggagtctcgtggattatttagcttcgtttagttgaatatttatatccatcttggtttcaaacctgcaataatatatacgtatcagctgcttcatgtggttggtgggagggtgatttattaagggggggaaagcggaa

SEQ ID NO: 23520 - DNA, 458 bp, Glycine max
  Clone ID: PAT_MRT3847_12123C.1
ctaccttgacagttcctttcttcttctcagaagcaatttgattctcataatcaattagcagattaagcatctcatgcaagtcacaactcatcttatgttgaaattcacaataaattgtgaaaatgaatcaaaaagtgattgcataatcaaatcttgagaaagctctttcccaagagtgcacccgaacttcttaagttgttctatgagatcaatcatcttaagaacatggggtccaaccttttcatttgcagcaagtgaggatctaaacagggccttagataactgaaatctagtcgttctgctttgaccaccgtacatcttcgtaagatgttcgacaatctcataaagcctcttaaaaaattgtgagcgagccacttggttatcaagtcatttctcatagacattctaagatagtgtatcatatacattttcaaatcaaaataagaaatatcatatca

SEQ ID NO: 23521 - DNA, 264 bp, Glycine max
  unsure (1)..(264): unsure at all n locations
  Clone ID: PAT_MRT3847_121240C.1
ggcagttggtatgcataacttcacttctgagcaaagatcaaatgctgtcaacatttcacagtctctagctatggcatatgtcatggatcagaaagcaatgttacttcagcaatcaacatggcaaaataatgtcaggntgggtaatctggttgagcaaatccgtggtccactttcaagtcttcnacaccttaagtaaaatcctgtctacacngnccaaagggacctcagatttccccntgacattgntggaancnctcttggggc

SEQ ID NO: 23522 - DNA, 198 bp, Glycine max
  Clone ID: PAT_MRT3847_121241C.1
aaaaaccactgggtcttttgggggacattttatagacatgggactttataaccacccatatgactagcgaaattttgtaggcatttttaccgaggaaattgaatactttcaaccaaaaatctaatcaaattttttgatactcgataataagtcggagcctcataaccaacgaaggtgatctttacatttcccgctggg

SEQ ID NO: 23523 - DNA, 281 bp, Glycine max
  Clone ID: PAT_MRT3847_121242C.1
caagaacaagaattgcttcttcctctttaggattctccctctgcagtttaagtccatatatctcgctaccttgtgtgttttctgttttgtttctggcaatggctcaagtttttgtgatgctcatggtagttggtggcttcttgaatttctgagcttttgactattctccttcaggtaccaaactcttttttttctaccccacttgaatctttttgagattttctcctcaccctttcaaatttgtctgcactctttacctaatactcttagaaattttgtgt

SEQ ID NO: 23524 - DNA, 3281 bp, Glycine max
  Clone ID: PAT_MRT3847_121243C.1
tcagtcaaaaccgaaactagtagcctgcctcttgtcagcattttcccgaactgaaacctcagtgcgctgcatattcggacgagggcctcctcataaatcctccagagtctgggcgattaacccttggagctggaccagatgatcttcccacgcgtccgcccacgcgtccgtacggctgcgagaagacgacagaaggggaagacaatttttttttcccttgtttctttgttgatcgttttggatttgaaaaagactttcttattttcttttcatcaagttgctggcatggctttttggttctataaattctccggttgaagcatacagagtccccttccactttcttccttctttctcatcactcttttaagatatttttgttacatagtttatggtctacgagagccctgcctctgtagagtgtagaccaacctccttttctttgctttgagctcgctcgatcttcttccatttcatgtcttgttttattttattttatttatttaagccttttaaatgcccaacattttgttcttgatgtttgagattgatgtattcaattctgagtgaaatcttcttttccgggtgtatgatcaattccactgtgagacgcaggacccatttagttcaatccttctctgttgctttcctttactggctctactacgtttcatgatttctaaccccctctccaattattaattaaataaaaccctattatatatctcttacatatttttatctgcaaaaaaaaataatctttttttgttcttgttcttgtttagtgtctgggtcctgcgaactccaagtacaagaagggtcaatttttgtttttctgttaacttttgattactatggcttgttcaagtggaacatcttcaggggcgacgtcgtcgatgcttcaaaataactcaggttcggaggaggagctgcaggcactgatggagcagaggaagaggaagagaatgatatcgaaccgcgaatcggctaggcgatctcgaatgaggaagcagaagcacttggatgatctagcatcgcaggtgactcagctcaggaacgagaaccaccagattctcacatcggtgaacctcactacccagaagtacttggcggtcttgtttcttttaagatatttttggtcacatagtttatggtctgcctctgcgtagtgcttcaacagccccctgctcgctcgatcatcttgattattttttaagccttttaaatgcccaacatcttgttcttgatgtttgagattgatgtatccaattcttagtgaaatcttcttttccgggtgtatgatcaattctactgtgagacgacgcaggacccatttagttcaatccttctccgttgcttttctttactggctctactacgtttcatgatttctaattattattaattaaataaaagcctattatatctcttcttacatatttttatctgggtctgggtcctgcgtagtccatttttgtttttgttaagtattggttactactatgactatggcttgttcaagtggaacatcttcagggacgtcgtcggagctgcagggtatgatggatcagaggaagaggaagagaatgatatcgaaccgcgaatcggcaaggcgatctcgaatgaggaagcagaagcacttggatgatctagcatcgcagctgactcagctcaggagccagaatcagcagcttctcacgtctgtgaacctcaccagccacaagtacttggcggtggaggctgagaactctgttttgagagcacaagtgaacgagctcagccacaggttggactctctcaaccagatcatccacttgttgaatttctttgagcccgatgctagtactagtaccttcttcaacaaccctttcaatttcagcctcccgattatggcttcagcagacatgttgcagtactgagacagagagaagagaggagggggtgtgatgtttgttagggaattcatatcatagagcgggtaagcctgcttgttgggtgccgcttctgtagtcttccagatcaccctattattgttgcaactgtacttccctatattattagacttgtattatttgtcatatgagaccaagtcatataatttgcatgtaattttagtgtcaatgtaaaagagtttatgaaaatggggtttgaatttttaaccgtaaagacatatctctttcccctgccaccaaattgtgtttttgactccataaaattctcttttgaaactggattatatgatgcatctctagtgacaggctgaacttctgattcttttgcactggatgaaatattgcttctctttccaactacattttgattcccccgcttatccaattggaaactagtagaagttctactgctattattatgaacatgggaagactcaattcgaccctgctttattccagcaatattttctgcattctcacttggcagtgaaccttgtgataagtttcctcgagcccctggttggctgtcaacagaatgatgcctgatctcatttttcataaaggaatcagaagtttctggagcagtttgaactggcatttgacctccagggttatgactgtggatgcagatgcagtggcatctgtatagaaccaatctgtatggcaggtacgggtgatggtatcaaagatggaccagaaaacagaccaaattgaagcttaatgggtacctcagcttgacttggagcattagaagatgagtagtgaggggcaacagtaactggactcggtgttgtactatgttgggtcaacaggccattagatgcttcctcattaactaaactctcagacaccacaggggaaagagaattactaggctgaatgaccaaatcttgagcaggcttcctcgagtcctggaagccagtggaagtgctgttaagattcacttgagaggtatcattaacaggttggagggccttgccattatcacgtgcattatcataagatacacattcttctgaagcctgtggtgccataaatgtcgtttcttcatctttcaatgtcctttcaaactcttcattaggcatcccaacctgtacaccctcatcaaatcctaatacaaggttatccatcaagtggggcaatcctttctcctgcaaatgcatatcttcaaaatcttggttgagttgagcatgatcatctccttcatgcacttcatcttcttcctgataatcttcatcttcatcatattcctcttgttcctggaactgctcattattctcagtagtccattcatcatcatccccactagagacaggacatggagtaact

SEQ ID NO: 23525 - DNA, 679 bp, Glycine max
  unsure (1)..(679): unsure at all n locations
  Clone ID: PAT_MRT3847_121244C.1
acgcccaaaacttcacaacataacgcaacacccccaaaacaaaaccaatttttgttttctcttcttcagttgttgccatgaccacaatcactaggcacagttacaagctctccctcaaaagagccacaaagagaataacaagaaggagaagaagaaacccacataaccaccgaaaaagaagcaccagcaccacgattgaccctttcaaaccacagtgctgcactaatagtgcggcttctgcaaagcttgaaactctgaagaacctcatccccggtggagaagaagcggtgaaacccgaccagctgttcaaggaaaccgcggagtacatcgtgttgctgcggacgcgcgtcgtggttctccggtcgcgcattccgcagtgtgcgtcctggtgctgcggacgcgcgtcgtggttctccagtgccgccttgtgctctttgctctcaccctcgccaccacccaagatgagaatgaacatgaagatggtgtcttgtttacatagctttttcactctcttcttcttcttcttcatcttattattattattattattattctttttgtgtttcttcttaagtgttttgttttgtgacttttgtcctttcattagtgaagaaaaaaaaagaaaagatctttggtctagtgtttttttttgggggggaggagttatnacttttatttt

SEQ ID NO: 23526 - DNA, 389 bp, Glycine max
  Clone ID: PAT_MRT3847_121245C.1
gcgcccacacgtgcgaaagaagatacgaggatgactttggcctacattccacgttcatccccggacccaatagcagatgggaattcggctggtgacaccatcaactttgaggcatgtgccccacaagctggtgcagtttggagagacacaggaaaaagacgtattgaaaataacacaagaggaatacctaacagcctgggcaacacaagtgcgtccagcaacaactatgttggctgatgggtgcccatattcgaatgctatggggcatgatagatcaaagggtacaagaccaggtgataatgtcattggtgccaagccgacaaaccataaacaatgcgtgtgcatatgggctcaaacctgggatcacaagatctcgtcttgtgggcacc

SEQ ID NO: 23527 - DNA, 245 bp, Glycine max
  Clone ID: PAT_MRT3847_121246C.1
tttgcttacgccgttcaatgtgcgcaaagaagtgaacttggcaccgtcaagcgacggggcgaccaactcagacgaggagaggaacaccaactcagatgacgacctctaaatctttttttaaccaaagcttagcctttttgaaatatttacatttgcactttggatttagccgtttaattatttataaaaggcgaagtgagcgctcttaaaatatataaatctaaaattgcactttccaaaaacac

SEQ ID NO: 23528 - DNA, 323 bp, Glycine max
  unsure (1)..(323): unsure at all n locations
  Clone ID: PAT_MRT3847_121247C.1
gttatttctttctagcaagtatcccattgcatgatgcgctggtggtttncatggtggtggggnnnntnnnagtntatgaaacaatttctttaacagtaaaggggaaaaaatgcgaccgttaagagaataacgtaattaatctataagtggttttaaggggaaaaacatgacacatatgatcaccaacctcctcttatgcaaagggaaaaaatgaccaaggtgacgattattaaataaataatatctaatagaacatcgtttaaaccgtttaagatgccgattacaaaatacaaaataaataggttggaaaagaacatggctat

SEQ ID NO: 23529 - DNA, 545 bp, Glycine max
  Clone ID: PAT_MRT3847_121248C.1
ccacgcgtccggttgctctttgtccgtctctgacgttagtagatgacgactacacacagtgtccttctcttttttttattctgcgtaccccgtcatactctaacgaaggagtgcacaaccccatcttcgattgtggactggcaccatgtgggactgcaactagccactgggaaatagatcgacaagatagacgggtttgacttgcgcccctaagagaactaaaagacagttgctagggggatgaacttcacgtatcttcgacatttgctcagagcactcgactagctcagaactctacgggaaaaaggattcacccttgatggtggtatgagaccagattcaccccccatggactatctgcacagaagatataccttctgtacagaccctctttatggatatccttactgctgaatcctacaaggccatcggtatcttgcttatgaagagatacgacgctgctagttcaagacacaggactttgttgggactgacatagacgtaagcactcacttatttccttcaacatgtgtgaccgtcaaacc

SEQ ID NO: 23530 - DNA, 2059 bp, Glycine max
  Clone ID: PAT_MRT3847_121249C.1
ggctcaaagttgattaatatctctaaactataactccattagcctctctcagtctcaaacatatatactttgactagctaggcatggttgagcttcggttaagcataagggctctgcaattgccaacactattgattctgtgtttcttcctcattttggggaattttcacaaagctgaggccagaattagacatcacaaatgggaggtaaagtatgagtttaggtcccctgattgctttaagaagctggttattacaatcaatggcaaaactccaggacccaccatccaggcacaggagggtgataccattgtagttcaagttaacaatagtttagtgacagaaaacctttccatccactggcacgggataagacagattggaactccttggtttgatggaacagaaggggtaactcagtgtcccatattgcctggagacacatttatttatcagtttgttgtagacaggcctggtacatatctttaccacgcacactatggaatgcaaagagaagcagggctatatgggatgatgcgggtggcaccccgtgaccctgaaccctttgcttatgaccttgaccgaagcattattctcaacgattggtaccacagtagcacttatgaacaagctgctggattgtcttcaattccatttcgatgggtgggagaacctcagtcacttctgattcatggaaaaggaatattcaactgctctaaatccccaagcttaggcactgatgtttgtgacgcatcaaaatgttctccctttgtacaaactgtgatcccgggaaaaacataccgactcagaattgctagtttgactgctttatcagcacttagcttccaaatagagggccataacatgacagtggttgaagcagatggtcactatgtggaaccatttgtggtgaaaaacctgttcatatactctggtgagacctattcagttacagtgaaaagcgatcaagatccgtcaaggaactattggataacctcaaacgtggtaagcagaaacagaaccaccccacccgggttgggcatgttcaactactaccccaaccaccctaaacgttctcctccaacggttccaccttctcctcctgcttgggacgacgttgagccaaggctggcacaaagcctctccatcaaggcacgccaagggtacatactcaaacccccgacaacctcggacagagtcatagtactcctcaacacgcagaacaacataagcgaatacaggcattggtctgtgaacaatgtctctttcacactccctcataccccttacctcatttccctcaaagagaacataaccggtgcgtttgaccccactccaccccctgatggctatgactttgcaaactatgacattttcagtgtggctagtaacgcgaatgcaacttctagcagtggcatttataggctcaagttcaacacaacggtggatattatacttcaaaacgccaacactatgaacaaaaacaatagcgagacacacccgtggcaccttcatgggcacgatttttgggttcttgggtatgggaagggaaagtttgacgtgaacaatgacaccaaaaagtataatttggagaaccccattatgaagaacacggttccggtgcacccctttggttggaccgcattgaggtttaggacggataatcctggagtgtgggcttttcattgccatatagagtctcacttctatatggggatgggagtggtttttgaagaagggatagagagggttgggaagttgccttcatctatcatgggttgtggtcaaacaagaggttttcataggccataattaaacattcttttttctttctttctttctttcaatttcttcgcaaattggtttgtactcagtttaattcaattctttttgcaatgtgtccaaaagaactatcgtgacatgtatttttttaacgaaaaatgtgcaagtattatacaaattgtgccttcattaggttgtaaattgtaattgtgtcagtaattccttgattatagcagttgagaaattattagatttttttcaaaaaaaaaaactaaaaa

SEQ ID NO: 23531 - DNA, 505 bp, Glycine max
  Clone ID: PAT_MRT3847_12124C.1
tacggctgcgagaagacaacagaagggagggttgtaattttttagatgcaaatctatgttgagtcatgatcaatccatcaaggccttgatgaatgatcacgaccttgatgaatgatcataggcttgatgaaataatcaaggcctcaatggattcatcacaaccttgatgaaatgatcaggactttgatgaatttttgacactgagccctaatgaaattaacacaaccttgatgatgttgaagttggtcatgatcctgatgattaatcaaggccatgatgaatggttagagtccaactttatcagattttggttgtctttttagtcctttttcttcaaatactccttaatcgcctatttaacaaaactaaagcataaactgtgagtcctgccaacaaattgtagcataaatgcacacaataagccgaaaactacacataaaaaggcaatcaaaatctgatttatcaagaagcttttgatggaggaacaatggagaatccaaacgca

SEQ ID NO: 23532 - DNA, 157 bp, Glycine max
  Clone ID: PAT_MRT3847_121250C.1
attgctggatcgacgcgctcactaatccgtgggcgcccttttttttttttttggacgattacattgtgtggtgaatattacatttataatatctggcccttacgttttataatggcttttgaatatgaaagcggactttagactgttttcatctcac

SEQ ID NO: 23533 - DNA, 232 bp, Glycine max
  Clone ID: PAT_MRT3847_121251C.1
taaccgctgaccacaggttgccgcgggggaatttttttgaaacaaaagcggttgttacttgatcacaagaatcatctcaatcttcattcctacctcccttcgtgtaccgaattcctttaagggacaagaaaaattcacttcttccgtggctggcccaccagtactttctacgaaattcaattttctcttctttcccacttctttgcgtttaattccgcctgtaaacacttct

SEQ ID NO: 23534 - DNA, 180 bp, Glycine max
  Clone ID: PAT_MRT3847_121252C.1
tatatgtatacatgtataaatttaaattatataattcaggtttggatggatcaatgggacgcaccacgatggccacatattctaaagattatatattactattatgttaagagcgtgttccagaatcaattgccacttgcaatgattgtagtaataagatcaatatttgtgtcaatgggt

SEQ ID NO: 23535 - DNA, 438 bp, Glycine max
  Clone ID: PAT_MRT3847_121253C.1
tacggctgcgagaagacgacagaagggggatgcaaagaaatgggcgcaggttattgcttttccctttgccatccaaggccacataaacccaatgctccaactcgcacagatccttcactcaaagggtttttccatcaccatcatccacacaacttttaactcgcccaacccttcaaactaccctcactttagcttctcttgcatccaagacaacttgtccgaaaccgagacctcggcctcggatctcttgaatttcatcgttgcactcaacgttaagtgtctggtgcctttcaaagattgcgtggaaaagctactaagtgatgtgtccgaggaagctgttgtttcgtgcttcatctcagatgctttgtgttacttcactcaagcgggtgccgacaaccttcagctgcccaggattgtgttgagaactggtggagtttc

SEQ ID NO: 23536 - DNA, 708 bp, Glycine max
  Clone ID: PAT_MRT3847_121254C.1
aaatggacaatgtgctcttgaactgcaacaagctgcagcattgtttaacccacaactcgaacaaatgttgctacaactcaacaggaaaattggaagtgacgtttttattgctgcaaacacaggaaaagcgcacaacgactttgttactaacccccgacaatttgggtttgttacatcacaggtagcttgttgtgggcaaggaccttacaatggtcttgggctatgcacagcactctctaacctttgctccaacagagagacgtatgcattttgggatgcattccatccatctgaaaaggccaacagacttattgtggaggaaattatgtcaggttctaaagcctacatgaacccaatgaaccttagcaccatcttagctttggacgcaaacacaggaagatagaggaacccaactgtcctagagcaaaattaatcgtattcaccatccttgctagttcatgacatttctctttctactttttttagtatattaattgtaaggaaagttatgaggaaactcttagtgttataaggaaactcttagtgcaataatgaaagttaaagtcctaaattcaaatactactaagtgctttgtttttagaggagtcatgattcaccttgaataaatattccaaaaagttacataagaactagaaatttgactgcataactatggaaatggaatagaatgagatgaacttacattaa

SEQ ID NO: 23537 - DNA, 363 bp, Glycine max
  Clone ID: PAT_MRT3847_121255C.1
cgcggctcgagattcatttgtctgcagcaaatttttcttccattaattattatgtatataggactcagctctggagagatcttattatgaacagtccatttaatttatgtacagaaaataaagaaatgggatatgttgcctcatttttatactgtgggaggacatgccacccccggccgaacgatttagagaacgaagcctactttttatcaatcccaatattctttgccaaggctcccccgagcaagcttttttaataaagtttaggtttttttgtataaactttttacacttaactttgaaatctaggtgtgtaaacaacattgctcttttagtttacaaatcgtgtatgtgtttttttca

SEQ ID NO: 23538 - DNA, 214 bp, Glycine max
  Clone ID: PAT_MRT3847_121256C.1
ggctagctataaggttgcatgtgtggttgcgatgatgtgcttggttgtggccatgagtgttacacccatggcacatgccgcaatcactttcgggcaggtctcctgcaacgtgtctccgtgccttatttattttcgaagcggctgataaccgtcagactcctgctgcaacggagtgaagtcgctcaacggtgcggcgaagaccaccgtcgaccgt

SEQ ID NO: 23539 - DNA, 369 bp, Glycine max
  Clone ID: PAT_MRT3847_121257C.1
gccacgcgtttggccacgcattcgctttgcagggtggatcgaatgcatgatgcgtatggggttgtgtagctcatggtgaatagggtgaagaaacctgatgcgggtacatctaatacatcgaacaaagggctgtgtgctgcttgctgaagtcatgaggcgataggccttatgaaactgatggtgagtgagatggtacatgtgtagccgggtgtgttcacgtgcaataatctgattcatggactatgcgacggaggccgagttcatgatgctgcaaggctccattcttctgtggaaggcctggggctaccagggaacataattgcttacaatgtacagattgagggggaattatctggatgtgcacttatt

SEQ ID NO: 23540 - DNA, 212 bp, Glycine max
  unsure (1)..(212): unsure at all n locations
  Clone ID: PAT_MRT3847_121258C.1
tntnntttnncgtacgtnnntcggaattcggctcgagccatcactcgctttctctnctctctgcgggttctcttcgggtgctctctctctctntctcgngcangacngtnnanngatagngatnatntatagngagagaganagtnngaggngtgcactgncanagcgnngtanatataagnaactaactcaccgnacngtgaaancaagac

SEQ ID NO: 23541 - DNA, 323 bp, Glycine max
  Clone ID: PAT_MRT3847_121259C.1
ctcaatgtactgatcaaagtcttttctctctcttcaaactcaatcttttcattccttttcatgtggatctgtacctggtttttttccttccatttttattaatcaaatacattcaatttcagtttcatgtcatttctgaaacctctttctgggttttcttcccttctcttgtttttttcctttctgggatgacaattttcgttttgagattcctggttgtggattttttctcagaaatgcgtaaagttttcttctttatgactgtgttcagcgtcgaattcaagaatgcgattccgagttaggtgaagctgagatgtgattac

SEQ ID NO: 23542 - DNA, 292 bp, Glycine max
  unsure (1)..(292): unsure at all n locations
  Clone ID: PAT_MRT3847_12125C.1
tgtacagtaaggcaatgtggtaaaaatttgtgannnntcacatattttctgcctctacttgtataaaacagacgaaatcactcggttgaaggaacgaaggatggaagatagggaccgaagtcgaagacaatggaacttgctaaatgctgaggctaactaaccataactataagtaacagcgtggaaaatatagggcccacagacacagtagagagttaattgaaggggccctggaccattgaccgcaaaacagccatggatgcttgtatttgccaatcccacgtgaagcgag

SEQ ID NO: 23543 - DNA, 271 bp, Glycine max
  Clone ID: PAT_MRT3847_121260C.1
atcctggcctgggatggaatatcacagatttatttatattatatagatccaggtcacattctagattgttaacatcataatctaggtttagctacccttatactaggtatttaaagttaggtatgggcatcagttgacacacgcacggagaggggggggctctatttttatcattcagccgggggggggatctgaagctgaagtacgagccttgcaaacaggggtatgagaatagagagggggagggaccccaaggattggatttctctca

SEQ ID NO: 23544 - DNA, 332 bp, Glycine max
  Clone ID: PAT_MRT3847_121261C.1
ggagacattgttatgaggaaagtttttgtcactgaccaggacagaattgcaggagtaaactcctttcacgacacaaacaacgtacgtggtgtggcacgcgtaatggttgcttgtcaaaacagtggtatatcgatggacatctacaatatgtgtcacaagtacctaatggatacgaaacattttggagcaccattagcagctttccaaatcatccagcataaacttgttcagatgcctggtaatattcactctacgatacttgttggttgacgcctctgcaaattgtctgacaatggtaaaactacaccagttcaatctagcttgcaaaactc

SEQ ID NO: 23545 - DNA, 549 bp, Glycine max
  unsure (1)..(549): unsure at all n locations
  Clone ID: PAT_MRT3847_121262C.1
atacaaatatgtgccaaacaagagtcttgactattttttatttggtatgacatttatcacccttaaacaccttgattacttaataatatttattgtttatatttgtgaattgcatatatatgtgtttctataaatttgattccaacttaaacttatagattacataatatgtttttgactcttatatttttcactttaacatgtagattctcaacggccaaagttaagctggtttcaacgttataatattataggaggaattgctcaaggaattctttatttgcatgaattttctacacttaaaattatacatccgtgatcttaaacctagtaatattttattagatgaaaatatggttccaaaaatatcagactttggtctagctagaattattgaaataaatccagatcaagggggttacaaatagatccgttggacattgtggtttggaanttttcccttattattcatcctcctcncaggtagttttggctaattattttatttatttatagtggaatatccccggatagcagtttggacattcc

SEQ ID NO: 23546 - DNA, 321 bp, Glycine max
  Clone ID: PAT_MRT3847_121263C.1
atcagatctgaaatggcaaacccctggcaaccatacgtcgacaccaaccttgttggaagcaaattctgcaagcaagctgccatccacggacacgatggagccaagtgggccacctctgctggattcaacgtctcccctactgaggctaaggccttggttggaggattcaaggaccccaacaccatccgagcctctggaatccacctcaacggagtcaagtaccttaccatccgagctgacgagcgatccatctatggaaagaagggagccactggatgcgttgctgttaagacccaacgaggagtcttgatcgccatctac

SEQ ID NO: 23547 - DNA, 233 bp, Glycine max
  unsure (1)..(233): unsure at all n locations
  Clone ID: PAT_MRT3847_121264C.1
ctttttctctctttctttctttttgcggngcttcacaagccagggctagacttgtctcttttttctacaatctaccactactatcaatggccgtacaaggagacgggcctactatcggtattaatctccataccacctactcctgcattggattgtagcaccacgaccgcatctacataatctccaattaccattgaagccgtaccacaccctattaacccattttcacttat

SEQ ID NO: 23548 - DNA, 345 bp, Glycine max
  unsure (1)..(345): unsure at all n locations
  Clone ID: PAT_MRT3847_121265C.1
ncgtcgcntgcacgcgtacgtaagctcggaattcggctcgagngcttatggtganatacctaggcanncagagncgaggaaacggngtngtatagcggacgagatgcttgcgggnagttcaaaataagcgtacatccggngnttcccgatatatcgtcnacctttcgnactgntgctgaatccanggncaggcaantnnaaacctngtgaactgggacatcttagtagccagangnnaatcacacnnaagcgnttcncgtagtancggcgaccgcaatgggagcatcctaaaccgtgaaaacgccgtngtnggngagtanacaagtgtcgtgctgctaggcaacn

SEQ ID NO: 23549 - DNA, 391 bp, Glycine max
  Clone ID: PAT_MRT3847_121266C.1
gggggaaaaggtgttttaaaaaccaagccttgaaaacattaccactttaatttgggggctccaagtatccaaaaatccctcgtggggggttaaaaaaaaatttgggtcattataaattgggaaaacaaacttatcccaaccattttaggaacaaacggtttttttttttaaacaaagccctgccaatacgggggtataaaatggggcaaaaaccatggaaaaaagttttttcctggacataaacatggccctaactcctgttaaaacaaagggaatgaagggttaatgctttgccgaaaaaatattcacttttgggtttaaacgggacgggttttaaaaacattattccgaatgaccctcgggttaaattcagggaccattttaaaagcta

SEQ ID NO: 23550 - DNA, 326 bp, Glycine max
  unsure (1)..(326): unsure at all n locations
  Clone ID: PAT_MRT3847_121267C.1
tggtagtggcngtggtggtggttacncactgttcagccatcaccacctactaccctcaggttcagnatcagcacagactccagaaaaccgaaangcttctcctacagtggagaagaagcagacacaannatcggggggacccctgtgacgacataaagaatactacagtatagggnaggnattgggnaggggacanncggtataacgtntctgtncacggagactcgngcgggggagtncgcgtaatntcgattctgagaggagctgtctcgagggganaggaggacatgaggggagatcactcatgagtattgtggggacccana

SEQ ID NO: 23551 - DNA, 347 bp, Glycine max
  unsure (1)..(347): unsure at all n locations
  Clone ID: PAT_MRT3847_121268C.1
ttgttttaacatattcttattttgttgctttatttattttggggtgtgttttaaaaaagggtnnnncttattgacctggttttataaattcaaactcaaatgctggtcgccaccaaccaagcttaagtggggcaacagcttccgggttttcgattccaacaaataccgaaacaacttcacaaccaagggtggatcctaatggaaaaaggcccggctatgggcttaacttattctgggactggaatatttcaaggtttcaacatgccctggctggctttaaaggggggaaaacgatggttattcaccaattccatcaagcaatgcagggggggaagttcaaaaattga

SEQ ID NO: 23552 - DNA, 298 bp, Glycine max
  Clone ID: PAT_MRT3847_121269C.1
cacctccccacctctacgctcaaaacacagaagggttactgaaaatatggcggatctatcaaactgtgggcgttctcatgcttctcattggaaaaccttcttggtttgctccttgtccggaaaattccctacaatccgccaaccgtaataatgctttcattcggtacaaggaaaagaagaaaacaccgattttttacaaaaaagttaagtattcctctctcaaagcaaaggctcatgtcacaaagcctgttaaaaggccgtttttcaaaacccgtgacctctattattatgacccttt

SEQ ID NO: 23553 - DNA, 256 bp, Glycine max
  Clone ID: PAT_MRT3847_12126C.1
agaaaattctaagccaatagcttatgttagacaggccatgagagcgccaaggaacatggcaaacacgtctgcaaggtaacgaacaatatcaaagacaaatacagcagtcgcactcttgtcaacggcatcagaaacataagccacatggcacgagagggaggccgaacacttttttttttctttatgaaggaccccaggaacgcagcacacggggcgcaagaaaaaaaagaaccccccacacggagcatggaaaaac

SEQ ID NO: 23554 - DNA, 220 bp, Glycine max
  Clone ID: PAT_MRT3847_121270C.1
ctcaatcatcttttgtttgttcttcagtactttagtgtgtgatttaattccaagattttgagaatgtctagctgtgggtgtggaagtagctgcaactgtggcagcaactgcggttgcaacaagtagctcttttgacttagcgacgatgagaagacaaccacagagacactagtagtgggcgttgggtcagtgaatgcccaaatggatggtgccgtaatgg

SEQ ID NO: 23555 - DNA, 408 bp, Glycine max
  Clone ID: PAT_MRT3847_121271C.1
ccctccccccccccccccccccccccctcccctcttcctttttttttacggggaccagataaagcctaacagcatttttaacagctaaaattaaaattattttgctaagattagacccataccaattaaagaaggtccttacaacaaaaggattctaaattttctcacttagccctcattagttgaaggccttgagcatccacagaaccccttggtgcgctttttgctactttttttgccactgggaataaagtccttaagcaagaccactgtttttccagggaaactgctcttccctttggtcttttcatcagccaatttcagcaaagggtattggatggtttggacctcaaactggaaccttcctatttgttaaaaaccttttcgcgcctggtcggttactctttt

SEQ ID NO: 23556 - DNA, 400 bp, Glycine max
  Clone ID: PAT_MRT3847_121272C.1
cgctgcacgaactgataaatgctagctatactcagctcactcttactgatgattctaaagctttgccctagtgcgtacacaatctgttattagatcgttatgcactcactgcattcacaccatactcactgctacatcttatcggtggtcgcagtcatacatactctatcctcatggctgacgaagactagtgcctcttcatcacaaaaccatccttgtcctgagccatgaccgtctttgatgactgaaagaaatgagtgtattactgtccgcaagatgcctcaaacacgcatcgggagaattttgcaatctggcttgatcccctttctcacgtaacctagctacatcagctgtaaagctgggatgtatatatggggtccgatcattacacacaacctaa

SEQ ID NO: 23557 - DNA, 298 bp, Glycine max
  Clone ID: PAT_MRT3847_121273C.1
gggcttacgagttttatggtggcgtaataaaagtagatgatgcttggccgaaaaaggagaatacgccgtccgctgtgaaaccaaaggtggtgacatttaacttgggtggtgccaccttgtactatgaagcgagcgccaaagatctcaaggagttctttgatacgttaactggctatgatgtttctgctgatgctgtctatcgagataatcctacaaagtcgtatacttatggatttgcgtactacaaatccaataatgaagcttaggttacccttgctcattttcaacgacaggtaac

SEQ ID NO: 23558 - DNA, 964 bp, Glycine max
  Clone ID: PAT_MRT3847_121274C.1
gaaaactcgagtcatacagtaagtacattttgcttgagatttttgtgtcttcctctctttactgctgtctttatgcatgtgccataaatcagattgcttctgcagtgatctttaaataataaattcttcttccatgttaaatcctgaactaaaacatgtatatcttcctaagttgtaatctagtaagtattttgctcctacatttgaaaacattatggttctttcatgcagataatggctagtatctgcatcatataatgttaaattttcttgttaaatgtaaattaaatcatacaactagtcatggacgatcaaagattataaggtagtttatagttacatgaccacttaaaaaaaagttgtttttttttttttaaacttgactatttaaatatgatctaatgattatacttacatagtaaagtataagaattgactgtaatttctgtaaaaaaaaattacttgcaacaccctatatgttgcacttgatgatctttcagctgcagctgcaaaggaatgaggtaattgcattgacgaaccttctcaatcgactctcagaatctgtcaaattcatccaagaaatgggacctacagctgaaagaatcatggaaggaggacatttttctgctcatacaagaacattgattagctcatggaaaaaaatttggtcctatgtatctaaaacttaggtaacatgctcttttctcagtatttgttgtttactcgtttgttgtaccaaactgagtattacatgtttccaatctgcaggctataattggtgacagttctgtttttaattattcaaattactagagagactagacataggaaaaccaccgtcgtggtttggaaattttctgagggaatgtgaaacaaatgtacttagaaatgtctcaaaattaaaaataaacacaaggagaaaatttactgagagtaaatagaagaatatatttttacttgggaa

SEQ ID NO: 23559 - DNA, 978 bp, Glycine max
  Clone ID: PAT_MRT3847_121275C.1
gcgctttccatccacccctttgaatcattccaaattgccaagcgtgatctatcattgtcatacacatcacaagacgtacaccaaaacaaacctagcattcttctctccatccataaccgaacaaaattaaagaaaaaaaaaacccactattcaaaaccaaatccaaaaaccaagacacccccattaggtagctaggccttaattgatctccttttctttcaccaccaccaacaacgatgtccatgctcgaaaccgaccaaatcaagcaactgaacgacatattcaagcgcttcgacatggaccaggacggcagcctgacccacctggagctggcggcgctcctccggtccctgggcatcaaacccaccggcgacgaaatctacgccctcctctctaacatggacgaaaacggcaacggctacatcgagttcgacgagctcgtgcatgccatcatgcctgacctcaccgagagcgtcctcatcaaccaggagcagctcctcgaggtcttccggtctttcgaccgtgatggcaacggctacatcacagccagcgagctcgcgggttccatggcgaagatgggccagccactcacctaccgcgagctcgcctccatgatggctgaggccgatagcaacggcgacggcgtcattagcttcaacgagttcgccgccctcatggccaaatccgccgctgaatttctcggcgtcaaggtcgcctagatggctagatcaatacggggctaataatttcgtatgtttgtgtaaccctttttatttttttgtgttttctttagggtacgtgtacgttggtgtaaaggcaaggagatcgaacaaagataaataattaagggatattttgaaacgaatattatttattttgcctttggattcaaggattgactaactgttaacttgtaaatacataattcacttttttcttgaatgcagttgttgttgatggtggtggtgtttcacttta

SEQ ID NO: 23560 - DNA, 336 bp, Glycine max
  Clone ID: PAT_MRT3847_121276C.1
ttatttttgccttcaggacaaaggctttttccacttgtactctcttatagaaaagaccttattaatatgttcacacctgtgaaatagctttagggtggcctgttaaactggcgacttaccctgacgctgataacagaggacctctcactccgaggcttggctgaggtgtgactccaggttattcctgtggacagaaacgtgggcataatattcttgatgatgtaaacttttaagcctttttttcctttaaattgccagttgtactaggtgccggaccaaactacttgaccttgtcaaaggcatctggatcctgttgggcgacgaaccgaatttttg

SEQ ID NO: 23561 - DNA, 229 bp, Glycine max
  Clone ID: PAT_MRT3847_121277C.1
gctaagacaacgaatgctttttttatttttgggcaaagtaaccaaacactttttttttttgcacaattcacaaattgcattctgaaaacccctgaaaaacttttgaagggagcccatttataggttggcggggtccgtagacctatttttatgaatcccgggtcaaactaaaagcgatcacacacttccgttacaaaacccgtcaaaaagacacaaacaaggggggaaa

SEQ ID NO: 23562 - DNA, 733 bp, Glycine max
  Clone ID: PAT_MRT3847_121278C.1
atcattcgtgcggcaacacgaaaagcaacaacgaagaccattgcccctgccatcaaaattttgattctctgattcccttttgtgggatcagagggtcaccattgtcgttttctttctcaccctttcagagagggagaggaaaatggaagggtggctctatctcattcgcgccaatcggtttggtcagcattattcacgtaagaggtacttcatcctcaaaggcaatgtcctccgaagcttcaagatcaaacccacttctcaaatggaggagccaattaggagtgcaataatagactcctgcattcgggttaatgacaatggaagggagactatgaacaaaaacgtgttgtttattttcacggtatataatgccacagatcaaagtgataagcttaagttgggagcaagtagttcagaagaagctgcaagatggatacgtaccttgcaggatgctgcaatgaaggggtgcccaagtccagcaaagaatttagtggcttgtcacaagaaaaggcgttcaagtttgagaaacggaggctcaaaaagcacagattggaaatactccaacttgaattttcaatcgtgcatatacactgaagcaatgaccgctgatgttattgctccttcaccatggaagatttttggttgtcagaatgggctaagaatgttcaaagaagccaaagattgggattcccgtggaagtcattggggggggtgaaaaacccaacaattatgg

SEQ ID NO: 23563 - DNA, 568 bp, Glycine max
  Clone ID: PAT_MRT3847_121279C.1
gctaattcttgatttgctaatcaaattttaacaaaaacgtatcaaaaaacactgggaaacaaaaaaaattattctcaatccccaaacaaaggaccccccccaacctggggaaaaggccaaaaaccccaaaactggaaaaaccccctcccttgggcaaaaaggctaaaacccaagtaaaaacccaaaaaaaaccatccttcacaattaaaacaccaaaaacccattgcccaaaaaaaaacaaatatggctctgccggggagttactactcaagagggacccaagactctgaagcccagaaaaaaaccctttcccaaaattaaggacaaaaccggggaccgccacattacggggggttgacaacaggaccggacctgatttccatcgggctttattcaagcctttggaatcatcaaaagggtcaacgggattagggaatccaacagaagaggaaaaaagccatggagttgcggctgcaaattgaaggcacagggaataaagcctccccaccttcttcagcagctcaggtaaaagaaggaaacactctcccaaacatttatcaaggaaaaa

SEQ ID NO: 23564 - DNA, 278 bp, Glycine max
  unsure (1)..(278): unsure at all n locations
  Clone ID: PAT_MRT3847_12127C.1
ttctcagctgagtagttnttatatcgtantttcacatgaaagtntcataaaggcagataaaagcatntacattcaacacacacgacnatcacccnngtatgtttttacantccttcanaaattttgcctcntngtgtgtgtatggtgntnntnncttngttagtgttcatgaatatgtcaagccttantttagtggttctaaattgaaaagtttctagctggncatnatntncaccattatgatggtatgacaaaactagtgcaactttgcaatttag

SEQ ID NO: 23565 - DNA, 431 bp, Glycine max
  Clone ID: PAT_MRT3847_121280C.1
aattcggctcgagcttttggataattgtagtattaaggtacttgtaattctctttgccaatgatggaagcttttaatgtgccaggtggaccagcttatttttgaggaattaatgcgtgaaagatttcctaaactggttaatcatctggattacttgggagtgcaggtggcatggatatctggatcttggtttctatcaatctttgtaaacataattccttgggaaagtgttcttcgagtttgggatgtgctactatttgaagggaaccgtgttatgctatttcgaacagcactggctctaatggaattatatggtcctgcattagttacaacaaaagatgctggtgatgcaattacattgtttcaatcacttgttggttcaacatttgatagcagccagcttgtctttacgcttgtatgggttatctagca

SEQ ID NO: 23566 - DNA, 1001 bp, Glycine max
  Clone ID: PAT_MRT3847_121281C.1
cattctctcaatgctccttcgtaaataaatctaatcaaaacataggaagaacccaattcatccactcctcaatcaggcaaagcttgaagaattttggaggaatctctgatgacataacggaaaatcaataacatgtggatgagtaagatattctataaagctcggcaaagtgcataatataaaacccacctagggaattaattaataattacaaccagtaacatactaaacaaccttcaaccaaaagatgtagaaactgtgaatctgcatatgcatcttatgctctcatcttcgataattcttccagtataaaccttgactcagcagcgaagtcaacaggaacaactgctcgaactgttatcctttgccgcttctcgccattatactcgttcggagtaacactaacccggaaaagatgttgagcccaagtagcttccttcaatgtcatctgataaggattaacttctccttcttgtaatttaagattatctagatcatcagcagagcatccaatgatcttctcagcttcctgattgaagacagagataaaagtctcagcgcttccatcagaaaccttggcaaccataatataccttaaactacactgttcatcacttttctgacatccatcacaccaatatccagaaccaaagctttcagtaactttgttattgcatgtcttacaggcacgataccacattgcctgatcaggctttatgaaggttatatgtcctctaagtctgaaaaaagcgggcattacatctcccaatgatgggtttgagattatgtcagaaaaaaaaatacgatcagtgtacagtgatctaatcccattgttagatattggacttgaaccagagcctacagagtacattgcagcatccttgcgttcaaaatcataccagcttctgagattttttgcttcgggtatgtctggatttaccagaaccacacttctgcctatagttgacaaagaaacaccttggaagtccccatccttgagg

SEQ ID NO: 23567 - DNA, 254 bp, Glycine max
  Clone ID: PAT_MRT3847_121282C.1
cgaactgagcttataatgattcatttctaattcctagttttctaacttttttctatatttcttttctctcaatttgcaagaatatactaattcagtttcatcttgttaatcaattagatctacgacttcgacggggattataaggatgtcggcatttctctgttcacaacaaaatatatggttttcaaaaattgcctatctaatgccaaatctgatacaattctgtcagcatggaatccccaacccgattgggg

SEQ ID NO: 23568 - DNA, 1086 bp, Glycine max
  Clone ID: PAT_MRT3847_121283C.1
aaaaaccaaaaaaaaaaaaaggagaaattttattatttgatgtaaaccccgaccccttttaattttaattaaaaagtaaccccgtttttgcccccctcaaaattacagaatgaaaccattggcaatggctttattggtattgaaatgggtagttttgtacacaggcaacttttccctatacctttcaatcccaatagctgatagattatccaactcaaaaagatcaaaacttgcacaactagccacatcatcatcatcttcttcttcttcatcttcataaggcatgacatcatcaaactccacttcactttttttctgataattcttcaacaagttttttgctaactcctccaccctgggattttcctgcatgacatgcagcctaagttcctcacttttgttctttccacgggaatccaccaaactctcttcaccttcatgaagattcttgtgaccacaaggcctgcaatcttcatccactatcacactcacaggacaaaacctcacagacctttttgcacctgatcttgaagaaggggttttgctcaaacaagaccttgaaaaagaagatgctgatgaacaagtggaaccaggttgttgttgtgctgctgatactgatttagtatcagcaacacgatctgtcgcaatcgggatcaggacgggacgataagtagatgttgttgttgttgaaacctttgctttcttggcatttccagttgaagtgaagagagagttgaggaagctagcaagttttgcaccaggtgaaattggttgctttgctttcttcaactcaccatagaggattttcaaggctttggacttggttttgccaaaaccgttctcatcctttggcttttggctttgggaagagtggctcctgaagttgtgactgtggagtgaagcatcgaagttggttttggttttggttttatcagaaacactggttttaattggctttggcctttgcactccataatagaaggactctgactctgaagaagagaaccctccaacagagctagactcagaggaggttgagcttgaatacatggagagtgtgtttgaaattgaattgcttcgcctcgt

SEQ ID NO: 23569 - DNA, 279 bp, Glycine max
  unsure (1)..(279): unsure at all n locations
  Clone ID: PAT_MRT3847_121284C.1
ttcccattacagtttcccctgtttgactaaataacctcctttactaccactggaaccgtttataaataatcctctactgtttattccttctggaatataccctctaaactcctcattaagagctcactcatgcctaacctatacaagtggatgaaaacattacatgactaacaattgatgtacaagtctgttctattcctgtcgcaaattcacaaggcccattgataatgtatatgtctgagactatgtcccacgaaacagaaaanacaagatcgtccc

SEQ ID NO: 23570 - DNA, 379 bp, Glycine max
  unsure (1)..(379): unsure at all n locations
  Clone ID: PAT_MRT3847_121285C.1
agaatatctgtggactgacgctgatgctgtgtactgtactgagctgctgtgaatgatgatgggtggtggtggcactttgctttgttcttggataaagtgtgtgtgtttgtggagaacgtggctagggttgtgtctggcagtttcttttgagcaccaggggtcatctgcacccgtttgctttatggaataagttcctgatatcacttcagaacaagctcccacaccctcttcccctacctttatctctccatctcattactttatatctgatctatctgtactttcttttgtctctttgtcaccggccccctctggtttgcaattaaagagaaagtgaaaaaacttgacccccaanaaaaaaaaaaaaaaaaaaaaaaaa

SEQ ID NO: 23571 - DNA, 769 bp, Glycine max
  unsure (1)..(769): unsure at all n locations
  Clone ID: PAT_MRT3847_121286C.1
cggaattcccgctccgaatgttcatgcaggaaagcttgcatgttgtttatgtttatggtaaaaatatattacttttgcaaagctgttgctatttctgggtatcactaatggtgctgtaaccttgagtgtactccacactcacggttttattcagctcatgcatggaagctgctacatttcctcaccaacttcaggtgaagccattccactttttcttgatcataaccgctcaaaatctgcaggatggaaaactaatgatcccaaataagtttgtggagaaatatggagaaggcttaccaaatgctctatttcttaagactccaaatggtactgagtggaacttcaatctggaaaagcatgatggtaaaatatggtttcaaaagggttggaaagaatttgcagagtatcactctctagctcatggccatcttttggttttcagacgccatggaacttcccattttcaggtacacatctttgatctgagttccttagagatagattacccttctaaaggtacagaaggtaaaacgtcccccaatcatgaaggaaataaacaacctcgaaatgaagaaaatttggaatatcttcaaccatatcaagtgagaagtcataaaagtgttaaagttgagaacatgatgacattgccagaggaggctcagccacataccgacacanagttcaaagaaaaatcaaagggttgntgttgctaaccaagttacagctcttgacctagcaagttctttcaaaccttgtatccattcttctt

SEQ ID NO: 23572 - DNA, 218 bp, Glycine max
  Clone ID: PAT_MRT3847_121287C.1
tgcaaacatggaaaattgctaccctacctttactaacgactacaatgactactgccgaggccgaaagcgcaaagaccgtgaggccgatatgctgggcgagctctagcgcccgcgtcactacgaggaagaggatgtgatagaaagggacatggattgagaaagagagagagaaagagatcacagcaatgacagcgattactctgcggcgacgcttaatg

SEQ ID NO: 23573 - DNA, 575 bp, Glycine max
  unsure (1)..(575): unsure at all n locations
  Clone ID: PAT_MRT3847_121288C.1
cggacgagaatactttcatgttaaatttgttctataaccctaattcctaaaccatgttttccttctccccccacaagaatgcggaataatgcattcaaactctttttttttatcaaatgttaattgttagtttgttagtaatagggatccaacacacaatctttttcttcttttctcctttcttaaacacttaatcaacttgtatctctccattcaaactttgtattcatgcttgttgagaaattttgatgtacttgaatacttgcatgatgtgcaatgagccggtcattgaattggctctcagatgaatttttttttttagctaattagattgattgcaaaaatatataaaactgatacagctcaatctaactgaactagtatggataggattcataagttaaaaatataattacaaattattatgagttttacaatatacattaactcgagcgaaataattaattttatattaagatgtaatacataactctattaatagtatggataaaatgaaanatattgagataaaatatcatatagtattgataatttaaaccattatgtgctatgtt

SEQ ID NO: 23574 - DNA, 414 bp, Glycine max
  unsure (1)..(414): unsure at all n locations
  Clone ID: PAT_MRT3847_121289C.1
gcggccttgattttgtgagataatcacgcgttcatgtcaaagggtttgctgtggtatcttctggtccatggttgcacccaaagacgttctcaaggttttactccacgtttctcaattcccgatcacatattcagcttgattcccaaggtcggaaaatttcagccgtgttctccgcgcaattctaggtgacggttgcccaaatggcggttcttcctgtcgatatggtcgcttcttgcacgaatgggcgtatcccgaccatcccattcctcctgaantttccaattggtggtatcagaacaacccaaagccaaccaaaccaaagtctgcctgacggtgcgttggcggtgtaagtggcctaaaaaatatactaaagcaccctccacatccaaaaaaaaaaaaaaaaaaaaactcgaa

SEQ ID NO: 23575 - DNA, 294 bp, Glycine max
  Clone ID: PAT_MRT3847_12128C.1
tggggttccccaaccgagtaaaagaaaaagctgtgtccgttactcgggagttggaaaatggcaacggtcccggaaaacaaattgttgaaggccgaagaagaaccccgcaaccttccggtaaaaacaataaccgaatatgcttcccggattaactcctgctcaataacttccctccggatttcaacttgggcctccattacctcgcaatctcccctttctacaaatggacctgcaataactagcagctccgcatgcgctccgttcaacccctcgacatctctcaactctcgaaaa

SEQ ID NO: 23576 - DNA, 277 bp, Glycine max
  Clone ID: PAT_MRT3847_121290C.1
caagcaggtacgaacaaaagctttgataatgattcattccttaccaaagttctccaaaaacatttcggaggaggctaaaattaggattatattgtatcaatgtatcctatgaagcctactaaatagtactttgacaagatgggactgaaacgtaacaactgtgaggccaaaatccaaccaattaaccaatctgttcttgccttaaatcggagaatacaatgtatcacttgctcaaaagggaggcaagatgtttttagctttgttttaaacgctggca

SEQ ID NO: 23577 - DNA, 116 bp, Glycine max
  Clone ID: PAT_MRT3847_121291C.1
gatgaggaggactctggtgagagatggcaggctctatgactcgaagcgtcgtcatcactccgacctgcacttgccgcttcatctcgtcctcaattcagactcttttcctccaatga

SEQ ID NO: 23578 - DNA, 225 bp, Glycine max
  Clone ID: PAT_MRT3847_121292C.1
cctaaacttactcaaagatgatattttgctttaaaacacgcttaacctttcgtggcccagggaaacttgcaagtccacagagcttatcatcactgacatatttgtttcatttcgctacactgacttgttttctaactttaacaaagtcaatgagccgataattcttgcgaagttactattgactacactaacctctgtcgtacatcatgttttataaatgaacta

SEQ ID NO: 23579 - DNA, 391 bp, Glycine max
  Clone ID: PAT_MRT3847_121293C.1
gctcggaattcggctcgagattaggatttcagaacatcgcttcatatgtctgaacaatttacatatattaagcctctcacattctatacaggtagctgcattatgctactctagccattcttagagcaatagctgcttcatctccatcaaaggacaaggaaaacgtctccatcaaaagcattacacttttctcaaccttcagttggacaagctgccttgaaggactctgccaatagaaacgggaggctgcaatattcgacgagctactgcgttcgaaaagatgtggccgcacagatcctatccgctgccgattgtcaccactatgatgcccagactccgccagggccttgggaaaaggagactgacaacctcatctttgagaaaacatgag

SEQ ID NO: 23580 - DNA, 835 bp, Glycine max
  Clone ID: PAT_MRT3847_121294C.1
ggcggccgccacaaggccactgttgccggcagcacacacaaacaaatactctctctctctctctgcatgagaagataacaaacaaaacacctcattcttcatggctcaccaatcctcttcttctgaatctgatgaccatattccttctcatcatcacccattggacctaaacagtccccatccttctaaagatatcatcttcgacgactactcgctccctctctccatgtaaagataacaaacaacaacacctcattcattcatggctcaccaatcctcttcttctgaatctgatgaccgccagattccttctcatcatcagccattggacctaaacagtccccatccttctaaagatatcatcttcaacaacaacatggaactacaacaagaagagagcaaccttaacaagcatgaatatgatgaagatattagagataaagataaggatgttgttactacacaaaacccatctgcagcttcagaaacgacccttctttgttgcaacgaggagaatatggcattacaagaagaagagacttcagatgttgcagcagcaaaagaagaagaagaagaagaagatagtggacgcgagaggctgaataggcatagagttgaagtggctgggagggtatggattcctgatatatggggtcaggaggagctattgaaggattggatagattgcactgcatttgatgctactttagttccaagcagaatctccactgcacgagaggctttggttcaagagtgtacaagagccaattctgctggactaagaatagagaacaggtgttagaatttttttctcattttctgtaattccattcac

SEQ ID NO: 23581 - DNA, 373 bp, Glycine max
  Clone ID: PAT_MRT3847_121295C.1
gccattctttctgtttttccctgatcataatatacattcttgcgcaactgcacttcctggcaataattctgctttatcaaaaagggcggacggggtggaggatccaagagttaccaacacttagcatgccacgaaataaatcttatatattgtcacttaagtccaataaattgaccgccctggcccaccgtttacactgggaaaaccgtgaaaaccctggccttacccaccttaaaggccatgccccttttccccgttggcgcaattgccaaaatgcccaaaaggcccgcccttatcaccatttccacaatttgaatggcctatggggcgaacgctacgccccctcataaagcacattaaacgcgggggttgc

SEQ ID NO: 23582 - DNA, 337 bp, Glycine max
  Clone ID: PAT_MRT3847_121296C.1
cgccgcaacagcatcaaccctacggcacagatgccgcctcatgcccaggccctatgagccatatggaccctctactaccaaactccaacttaataataggccgccagacaccaacaaagaacaaaccctctaggagggggactctgcccactggatggactagaactatctatatacctgccttactgacaccggctaggctacatcgggacaagtaataccaaacaagcaaactactcaatctgaaggctatggattcattgagtctaatatgccggctgagactgaaagacttctccaaacatatcatggagcaataatgccaaatggagggcaa

SEQ ID NO: 23583 - DNA, 613 bp, Glycine max
  Clone ID: PAT_MRT3847_121297C.1
aatggcatccagataagaattcgaaaagagggaagaagcagaggctcaattccgagaaatcgctgctgcatatgaggttctcagcgacgaagacaagcgtgtaagatatgacagaggggaggacctttaaaaggcgggaatgggtggtggtggcggcggtttcaacccttttggtggtggggggtatacatatacttttgagggtggcttccctggtggtggatttggagggggctttcctggcggtggcggcggtggatttgagttccatttttgattgagaaaacccgcatgcactccccactatatatatatatatatttaattttctgaagggaccccaacaattatatttgactacccacgcgctaacggttgttgagataaatacgtaggccatccccggatgcttgtaagataagaaacgtgctctagagaatttttgctttatgcagaagtgatggggttggatgttagttaaggaggcacattttgatgtagcacatttccttttgtggtggttgtcactatgtaacgattacttcaaattccaagcaaccatgatacattttgatggatttaaatctattgaattgcttcgcaattaacatcc

SEQ ID NO: 23584 - DNA, 385 bp, Glycine max
  unsure (1)..(385): unsure at all n locations
  Clone ID: PAT_MRT3847_121298C.1
gataactgangaggaaaaaagaccagcggttgacgatgaaacagaagtgtcttgttgttctggtcgttgttgtgctcttggcttgtgcggttggttgggatgagggtatacccggcgggtggaaccccatcaggagcattaacgatgctcaggtgacagaaatctcaaatttcgccgttgcggaatacgaggggcaatcggttgagaagctgaatttggtgaaggttatgaaaggcgaccttcaggtagtaacaggcctcaactagggcctcaggctcagcgccagagactccaacagttaccaagcaattgtctatgagaaggcatgggcccgggagcagtacagaaaccttacctcctttacccctcttcatgcttaacctct

SEQ ID NO: 23585 - DNA, 3568 bp, Glycine max
  Clone ID: PAT_MRT3847_121299C.1
atcaaactgctgattcagatcatgtattgaagagaacaagaccttttggattatcagatgaagtcagtaatctaccagtaaatttgcttcccgttgcttactctggccagagccatggtcagagctcctattcctctgatgacttgcccaagactgttgtgatgactctcaaccaaggttcaattgtcaaaagcatggatttccatccactgcagcaaattctacttcttgttggaacaaacatgggcgatgtcatggtgtgggatataggcagccgtgaaaggatcgcacaaagaaattttaaagtctgggaacttggagcatgctctgtggcgttacaagcatctctttccaatgattactcagcatcaatcaatcgggtggtgtggagtcctgatggaacactttgcagtgttgcttattctaaacatattgttcacatatattcctatcatggtggggatgatcttagaaaccacctagagattgaagctcatgctgggagtgtcaatgatcttgccttttcatatccaaacaaacagctttgtgttgtgacctgtggagaggatagggtcatcaaggtatgggatgcagctcgagcgttactggtgcaaagcagtatacttttgagggtcatgaagcacctgtatattctgtatgccctcatcacaaagaaagtattcagttcatcttctcaactgcaactgatggaaataaaagcatggttgtatgataacatgggttctagggttgactatgatgcacctggtcattcttctactacaatggcatatagtgctgatggaacaagattgttctcgtgtggcacaaataaagaaggggaatcatttctagtggaatggaatgaaagtgaaggagcagtaaagcgtacttatcatggtcttgggaagagatctgtgggtgtggttcaatttgataccaccaaaaataggttcttagctgctggtgatgagtttatgatcaaattctgggacatggataatacaaacatgttgacaagtgttgaggcagatagtggattactggcttctccctgtattagatttaacaaggatggaatactggccgccgtcccctctgctgacggtggcggcggaacgctggcgtttgcaggtggtaggacgctgcctcgttcagccgagcaccgtgcttttggtgcctcctgagccgcggcagtagccctttggggggtccttaccaacctagcttttccgtctaccattgtaacggtgcgaacaagccttgctgctagtgctcctccagtagcagccatggtggggcttaataatgatactcgaaatttagctgatgtgaaacccagaattgttgatgaagctgtggaaaaatctaggatatggaagctgacagaaattaatgaaccatcacaatgccgctccctgaaacttcctgatagtttatcatctatgagggtttctaggttaatttatacaaatcagggggttgcaattttggctttggcagcaaatgctgttcacaagctttggaaatggcagagaaatgagcggaacactactgggaaggcaactgcaagtattcaaccacaactatggcaaccttctagtggaatactgatgactaacgcgagcagtgatactaacccagaggatgctgtgtcatgtttctgttggctgtctccacaaatgacaatggagttaaaattctagggaaaaaaggagggattcaactgcatcgcacgttggaaaatcgcacctttcatgccacctgcaccagctgctacatttcttgcatttcatcttcaagacaaccttattattgctattgggcaaggaggactcttccacttgctgatagagctcctccagtagcagccatgatagggattaataatgatactcggaatttagctgatgtgaaacccagaattgttgatgaatctgtggaaaaatctaggatatggaagctgacagaaattaatgaaccatcacaatgccgctccctgaaacttcctgatagtttatcatctatgagggtttctaggttaatttatacaaatcagggggttgcgattttggctttggcagcaaatgctgttcacaagctttggaaatggcagagaaatgagcggaacactactgggaaggccactgcaagtattcaaccacaactatggcaaccatctagtggaatactgatgactaatgatataagtgatactaacccagaggatgctgtgtcatgttttgcactgtcaaagaatgactcatatgttatgtctgcttcaggggggaaaatttctctattcaatatgatgacatttaagacaatgacaactttcatgccacctccaccagctgcgacatttcttgcatttcatcctcaagacaataatattattgctattggcatggaggactcttccatacaaatctataatgttagagtggacgaggtcaaaaccaagctaaaaggtcatcagaagagaattactggtcttgccttttctcatgttctaaatgtgcttgtctcatctggagctgactctcagttgtgtgtttggagcacagatggatgggaaaagcaagcaagtaaattcctacaaatgcccagtggacgaccgcctgcacctcttgcagatactcgggtccaatttcatctagaccagacacatttactggctgttcatgaaactcaaatagccttatatgaggcaccaaagttggaatgtataaagcagttttcacctcgggaagccaatccaatcacacatgctacatactcatgtgatagtcagtcaatatatgtaagctttgaagatggaagtattggcattcttactgtccctgcgctcagattaagatgtagaataaatcaatctgcttatctccatcccaacccaagcttgagagtgcatcctcttgtgattgctgcacatccctccgaacccaatcaatttgcattaggactcaccgatggtggagtacatgtacttgaaccactagaggcagaaggaaaatggggtactccacctccgaacgagaatggtgccgggcctagcactgcttcaggtgctgctgtttcagagcaaccccaaagatgatggatggcacattatgtagcacttttctctaaggaactttgagtgtgtgttttgattgcatatgatcccgctccctggtgcctccattcggtttgcaaagggaagctgcggaacgtaggtgtttgtaggttaggacaaatcaaattgaaccaatcacaccttgttattagtggcttcctaaccgtgggattggcacagtatgttattacccacataggattactggcgtaaattcggctggggcgttgcagagtggagggtcattgttattatttttttttctttggtcctacctttatttgtgtagtatttttttaatatatacagaaaactagtcgttatagattttttttttcagctaaagttagctattctgatattctgttttatttttgccatctatgcaagggtttttttagagcccctttacgtgttggttgaatcttttcggcaacgatggcttcatta

SEQ ID NO: 23586 - DNA, 120 bp, Glycine max
  Clone ID: PAT_MRT3847_12129C.1
ctgggtatagcccttgcccttggcccatttcgccaggtcggtgtagaggcccttgcggccgatgaccagcggcgccagcagcccgatgtgctggccgcggtactccttcagcagctgcga

SEQ ID NO: 23587 - DNA, 458 bp, Glycine max
  Clone ID: PAT_MRT3847_1212C.1
gcggcaactaaaccttaatgcaagaattaggtttcatcaccgatgtgcatggatcttgcaacagcttcaagatcaacaagctcgctcgctttgctgtagaggaacaaaacaaaagagagaattcagttcttgagtttgcgaggtattttactgcattcctacattatatctttacattaaaattctttctcaacctaataatattctgtatcacttacttcaatgtaatttttagtagagccttgttttttgcattttttatatcatcttttattcttcatgatttatctatttttataatgctttttatatcttaattgaatgaacttttttatttatctatatctattgtatttattttattgtatttttttttgtttaatcatttacttttttctatttatttgatcttattttatttctactttttttatttaatttttttttttctttttttt

SEQ ID NO: 23588 - DNA, 470 bp, Glycine max
  Clone ID: PAT_MRT3847_121300C.1
agttgtaaagtagaaaagataaatatagaaaaatggtctccattcctgattgtaaacgtgcacaatgagtccataccattttgctaactcgtgtacgtacaaaatagattgtccacgaagttttgttacacaagtatcttcctttaaaatactaatttagaatgtatggttgtagcaatataagtaattttatttttttatatatatacgaaattggaggcagttagctatactagtattagaaaaatctagaagcagtgaataagctatacacacacacatatatatatatatatatatggagcgaagtttgtaattcgtgtcagtcactgggttagataagaagataagatgaaatgggaatcatttaataatgtagtgtagtccttcctccatcacatacaagataagtgtcaatagatgtcgcctaatacagacaaaatattgtcagattgtgtagttaaatcaca

SEQ ID NO: 23589 - DNA, 474 bp, Glycine max
  unsure (1)..(474): unsure at all n locations
  Clone ID: PAT_MRT3847_121301C.1
catatcataaaatgcaatgactagtagaagatgcataacagctagacaatccctgtcactgacctaataataaaattttggggggatgtctctttgataaatctggcataaattaaaaaaaaaaaagattctaaaaaaaaggcttgtttccaatgcaacgcggtccaatggctttttcttttcaaaatggccaaaatacaaatggacaaagatgccccggtgagtgatccaagccagagttcagtccccacaaccacaaggccttcatttccctccaaaaagtttttttttcactaacaaaaataaagaattgccttccagttcaatcacctgagttgtgtggggtcagtcatgagtcacctttgctttgttgannnnaaaaaaaatttaaccttgctttgttgtttgtgctgtgatgtgaggtacacttggcattgtaaaacagttttaccaatcctaaaccctggaactact

SEQ ID NO: 23590 - DNA, 203 bp, Glycine max
  Clone ID: PAT_MRT3847_121302C.1
taccgtccgattcccggtcgacccacctccgccttgatacataaaacattggctactatagacagaaagccaaggctggtttttacgattagacaacattcccacccctcttatcatcatgtctacattacgactattcactcatacttatattctcctcacggtggagacaccaagagggccctagataataactccttttc

SEQ ID NO: 23591 - DNA, 317 bp, Glycine max
  Clone ID: PAT_MRT3847_121303C.1
ggctcgagagaataccccctcttttgctgcatcagaggagccgtaaattaagagcatggctgcccaagctcttgtatcagcagctcctcttaccttctcagcggaggctgcaagacacagccttggacccagatcactccagtctccatttggcttgtacagaaaagcctccttacttgtcaaggcagctgctaccccccctgtcaagcaaggatcagacagacctttgaggttcgcatcaaagcagagtcttgcctactaggatggcagccttccgggtgactatggattagaccctctgagactatcacaccctg

SEQ ID NO: 23592 - DNA, 453 bp, Glycine max
  Clone ID: PAT_MRT3847_121304C.1
gtcactaactcgctgtcattctgcacttctcatttcctccatatgacttccatagcctctccattttgtacgtgcctggttgccacttggaggaaccacctggttgccacttggaggaagcaccttcccaactccaaccttgtgaagcattgcaatcttgtgcctcgttcaggtaaagcgatggttgtagctttgcaacctactcaagacgctacaataatgagaaaacctacaaaacacaggcgagtagttgtgacaggcatgagtgtggttacaccacttggtcatgatcctgatgtcttctatagtaatttacttgagggtgttagcgggataagcaagattgatacttttgactgtgaagaatttccaacgagaataggtggtgagatcaagtccttttcaactgatggttgggtagcaccaaaactttcaaagaggatggataaatat

SEQ ID NO: 23593 - DNA, 253 bp, Glycine max
  Clone ID: PAT_MRT3847_121305C.1
cgagcaggctagtagatgtaggagtcgtagcatgacactcctcccgtctgcaacatctcttgcgacaaaccgtcgactgcactacgatcagcctacatggacgtctcgacaaagctcaagagcatcgtccacgactacaccttgtacatcctggaccacacgatgctctaccgtgacttcaccgtgtcaatcatatggattgacgtagtgggcgttcgatgcaggcgaagtcctgtttcaaaatgctgacctg

SEQ ID NO: 23594 - DNA, 274 bp, Glycine max
  unsure (1)..(274): unsure at all n locations
  Clone ID: PAT_MRT3847_121306C.1
ttcttcttctcgtttttactttgacggtttctagagagagaaagtttgttatagagagagaaagcgcgctgctgcttctctgctgctgcttcgacagtgagaagagagagagaagcgctcttctccgtaccgtttctagagagagaaactgatggccggagttaatccgaacggcgtcgcngattttccggcggatccaacgcacggcgggacagttcntcagtaacaacntattcggaaactcttcgaagttacgcgagtacgtcctccgatc

SEQ ID NO: 23595 - DNA, 386 bp, Glycine max
  Clone ID: PAT_MRT3847_121307C.1
cacgcgtcagggagggagtgggaattcttcttcagataatgatgttagttttgtcattcgtcttaggtcacgtccttcgtcgcaagaagatttacgttcttcccgaagccagcgcttctcttctcattggcttactcgttggtactctcgctaacatttctcacactcaaaccagcatcagggcgtggttcaattttcacgaggagttcttcttcctcttccttttgcctcctatcatattatatcctctttcatttcattcttcttcttcttcttctttacttttcatccctcttaattcattaattccttgaccttattttttctcgctttactcagtctggcttcagtctctctcccaagcctttcttcgctaatttcggagc

SEQ ID NO: 23596 - DNA, 255 bp, Glycine max
  Clone ID: PAT_MRT3847_121308C.1
cccacgcgtccgcaactccttactattacaagtctccgccaccacctgaaaagccaccgccacctctggcggttccccggcagcgtaagcagtgggaggtgccgtctccagtgacgccggtggatcaacagatttcgaggccggcgccgtcgctgacgccaccttctaggccttttgtgttgcaaacaccaaatacgaaggtttccccagttgagttgccaccggctagttctcagaattttgaggagggttctg

SEQ ID NO: 23597 - DNA, 1225 bp, Glycine max
  Clone ID: PAT_MRT3847_121309C.1
aagacgacagaaggggaggacgttgttttgttctgccttcttctctccctcaatacaattttcatcctattcctcagatcagataaagaagatgcagaagggtagagaagttcgagacaataacatttttgaaccaagacggtttgaagattttggcgactttggatttcatagaagtaggatgccaagtctttttggtggcagggatccatttgatgatccctttttcacagacccgtttgatagcttgtttggtccaagttctgcatcaagagcaatgcagaagacaaacagagaaaaaggaatagttatagaagaaatagactctgatgatgagggggctgataatggccctgaaactggagagaaagattttgataagaaaaaatctaaatcgaccatggaaccgtcaattgagtatccagatgatgatgttaatgagaggaagaacagtgatgtaacttacaagaatgaccatttcaccgctacatggtggaacccttgaaagctcgcaagttttcttttcagaccagcagagtaacatatggcggcatactatacatctactataaaccgaaggatgggggactaatgggggggtatgggaggaaaacaaagaagctgacacaacaacaggccaggcatcacataggaggatcaccagaggaatccatgacaagggtcattcagttttgaggaagctcgactcagatggtaaggttgataccacacaaacactccacaatcttaatgaagatgagcttgcaggatttgaagaagcatggaaaggaaataatatggcacaattgcccggatttgatgtgcataggaaggaggattctagcagtggcaagcataacagaaagcaggtttggccacttcagtatttggagccagcaggaagatcgagaggatttccatcaaactatgaggcaggaaccgattccgggggcagaacaaagaaagttgttagaatcaatattgagtgaatgttaggatttagttcccaatctgtttgtaaatgcgcaattgaggtgtgctttggtgtcttttggtttaggctcatgctgcttagttaaaagcattgtgatttctttggtaataaaacttttcgtgtacaacagttaattgtaatctgtaaccatgttgaatcatgagatcatctattttttatttgcacgtcttagcagcttttttcatctgtattaaaaaaaaaaacaaaaaa

SEQ ID NO: 23598 - DNA, 142 bp, Glycine max
  Clone ID: PAT_MRT3847_12130C.1
tcggctcgtgccgctccaaagccttcctagtccgagaatcaacagaagagcaatttcccctcatctgagtcgcggaagcaaacaatggccgatcaacttaccgttgaacagatctccgagttcaaggaagccttcagcttgt

SEQ ID NO: 23599 - DNA, 979 bp, Glycine max
  Clone ID: PAT_MRT3847_121310C.1
gcaatgcagaagacaaatagagaaaaaggaatagttatagaagaattagactctgatgatgaggggggtgataacggccctgaaattggagacaaagattttgatagagaaaaaatctaaatcgaccatggaaccatcggttgagcatccagatgatgatgttgatgtcaaagccgctttttgaaattccattaacttgcttgtggattcatggccagttttcaacaaagagaggaagaacagtgatataacttacaagaatgaccattacatggtggaacccttgaaagctcgcaagttttcttttcagaccagcagagtaacatatggcggaatagatggtgcatactatacatctactagaaccagaaggatgggggctaatggggagttaatggaggaaaacaaagaaggtgacacaacaacaggccaggctacacatagaatcaccagaggaatccatgacaagggtcattcagttttgaggaagcttgactcagatggtaaggttgatatcacacagacactccacaatcttaatgaagatgagcttgcaggatttgaagaagcatggaaaggaaataatatggcagaattgccaggatatgatgtgcatatgaaggaggagcacaacaacgttgcagattctagcagtggcaagcagcagaacagaaaccaggtttggccacttcagtatttggaggcagcaagaatatcgagaggattgccatcgaactatgatgcaggaaccaattccgggggcagaacaaagaaagttgttagaatcaatattgagtgaatattaggattatgtggttgattgcttcccattctgtttgtaaatgcagaattgaggtgtgctttggtgtcttggttaggcttatgctgctcaattaagacttgagagcattgtgatttctttggctataaaacttctattgtactataatacattgtaaccattttaaatcttgagttt

SEQ ID NO: 23600 - DNA, 337 bp, Glycine max
  Clone ID: PAT_MRT3847_121311C.1
tcttgtgggggtgagtggacttcctgaaactgatcggatagccaatgtagcgaggcaaccacaggtcaaatttcagcagtattctgtttatgtcaccgccgttgatgcgaatcaatgagccgtttcttactgactttgttggtctgaataaagcgcttcttccagtccgttagtactatgcgggaatggagggcccggttggtcgtcaatgggcgtaataacatttgctgagcatggacctttcagaccaaattacaacggaatgcttgggatgaatggatatcgttgtcgccgggatgcaaaggtgctgtactgagagtcactgaatgatgttggg

SEQ ID NO: 23601 - DNA, 347 bp, Glycine max
  unsure (1)..(347): unsure at all n locations
  Clone ID: PAT_MRT3847_121312C.1
ttacatatatgcgttataggaaggttgactccaaaactttgtgcttaatttgtgcacaccttaattctatgctcaaggcttctatatgcagagttagccagatactgaccatggggttgtagttgtgttgtgatgccctttatgctggaaagggagaaattaggaaactcgaaggaaagatgatttccctcgaggtgaatgatgaaaaggaaaagaaaaatggggaaaagtaatgggagtaacatagaggctgtggagcatcgagaggacagcatggtagttcatagattgaatgaagatttntctcatcaaaagccatgatngatttataacctataatatttaac

SEQ ID NO: 23602 - DNA, 322 bp, Glycine max
  Clone ID: PAT_MRT3847_121313C.1
attactgaaagggggatgttttgataaatttttattaaaatcaaaaaaaactttaaaaagaaaaaatagaatatttatccctaaaaaaaaacttcaaacaaacaaactataccaatcttaacagatcaactccaatgtattactattatacaaaaaaaaatagcccttaattaataatatgaatgcacaactccagctaactattgatcccaaaatttaacaatttaaaatgaaaagccccagggcgaaaaaaaatatcgtaaaaaaaccctcaaaacaactcattttgagaatacccaaagtttttcaaagattttgccct

SEQ ID NO: 23603 - DNA, 334 bp, Glycine max
  Clone ID: PAT_MRT3847_121314C.1
atgcgtcctcagatgttgataggcacagattaaagactttaccgagtccttacacggtgggtgtgttatcctcgtaaggaacacatcactagtgacaatccgatatcaactgtgaccgcactgataaagctcctgactatgccatagcatctagactctatacagatgatccagtggatcagcaccatgagtctcaagctaaaactattcttccagtctccacacaatctgccctacaagctagtgtatgacgcttctctcaaggaccactacgagcacacatgatccctcaatcgcattctctgctacctacacaacaccctcaagctcaact

SEQ ID NO: 23604 - DNA, 405 bp, Glycine max
  Clone ID: PAT_MRT3847_121315C.1
ttcgttttttagaggaactactgggcacctgggacaggtaactgatgcttgtccagggacgagcgctgaggcatgggggttgacactaaaccgaagccgccccgacattaatacttgttgtgtatcaattcagcagatgaactcgcgcatgcgacatgctcagcctcaatatgcattggatgtggcactgatagcacttacatttggtgccatagctatttcggggacaagaatcaagacaactgattgagatgtgaatatcaagagatgctgccagctaaatcagaaaggtggaggacggatttgtacgcagggcagatgaagacattgatcaatattgactgaaaatatatgaggaggagtttgggcataacatggtattatctttgatttgcgaagagacat

SEQ ID NO: 23605 - DNA, 326 bp, Glycine max
  Clone ID: PAT_MRT3847_121316C.1
ggtttctctttctctttctctgtctgctacttcacgttctctcgtttcaatcggacaaaatcatgggcagaaaattcttcgtcggtggcaactggaaatgcaatgggaccactggggacgtgaagaagattggttctactttaaatgaagctaaagtccctggagaagaagtgagagaagttgttgagagccctactttagggatccttcctttcgtaaaaagactgctgcgccctgagttccatgtctcgggccaaaattgtgggcgtcgcaaagtgcgtgcttatactggagaggatagtgctcaaacgcttgtgaatttggga

SEQ ID NO: 23606 - DNA, 1853 bp, Glycine max
  Clone ID: PAT_MRT3847_121317C.1
gttagaattatggagctatatcatctcttaattgacaataaaaacttgaaacaaaacttttaatatattagatactcaaaatagcaaaaatatctattagaaatttaaaataaaaataagatatatatcatgatctcaaacatatttagccaaaatatatttaactatcaattacataatatacatgacagcatcttgtgccagaaatttttggattgtggtgccgtatgcggtctagcacaataaacaatttcagatccatcaattctattactttgttttgctttctcacactcattcaagaatgttccaaatgcatcttcacagtatttcactgcctccgaaacagttaagttctcagttagcttgtggtatatactcttattatgatccccatttagagttgctgccatatatatcaaatcttcttgaaattcactcaattgcgtttgttgttccgcggaagcagcctctcgcagtttgacggggtcaggcaatttcactggacaatcagtacgtggggtgcttagagataagagatcttcgagtgttccagcccatgcgtctcgctttgtcaaaaactgaggtagattgaatattttcttaacaagttgctggtattgatgaatgctcatactgtattgttggggaatggccccgaaggttcgtgcaacacttttcctgcctcgatccatggagaaataatgatgggtaggaaccctaacaccaagtctatcaaactgaaacttgaatggttcaggaccagcaatgtcatctgggctaggcactccatccacaggggttggcacgtgatcataaaacccgccatgctcatcgtatataatcacaaacaacatttcattccactggggactagctcttagtgcctcatacacttctttcacaaatttttgcccctcagcaacatcatgggatggatggtcatcgttcgctggcagtgataacaagtcaaagtatctttgctcaatcaccacgtagtttggcagtttcccttctttgcactgtttcttgaactttaaatcgaattgatgaaagttgtctatgtatttcaatttcctaagatttctaaaaaaaagagtggatggcgggtactgataatatattccaaagctgaacccattttcgtccaaagaatcgaatatagtcttctgtggcaagcctccaataagtttcttcgtgtcctgtgtggtcaatccatgcgacgtcgcagagtgcacgtaaagccggttcggttgggtcggaccgggaaccgaagcaaaccacctatcacaaacagcaaattccttaaccaactctttgtaaaccggtaataaatccggtttatagccattcatcaccgtttccgccgttgatcccttcttttgctttgccgaattttgggcaaaacctttcatcctcggggacagtttatttgccgccgaggattcactccacggctcgccaaaaacttgctcgtagacatcctcaaccgtgtgacctggatccggttcttcaaacccggactggtcgccgaagtaaacccggttcgagtttggatcgaatgtggaaacctggtttgactccaaaccggtgaccccgtcaatttcccggttgagggacttcatccaacccaacatgtggtcaaaggaacggtttttttgaaccaaaacgacaatcgttttgatggggtaaggcgtggcactagtaccggaacttgaagacatgttaattatgtttttgtgttgaggtggtgttggttgattctcaaatgggatttgaatagaagcttggagaggagagtaggtggagtatatatgtgcggacgcgtgggcggacgcggggcggacgcgtgg

SEQ ID NO: 23607 - DNA, 1407 bp, Glycine max
  Clone ID: PAT_MRT3847_121318C.1
actcaaaatagaaaaaaatctattagaaatttaaaataaaaataagatatatcatgatctcaaacatatttagccaaaatatatttaactatcaattacataatatacatgacagcatcttgtgccagaaatttttggattgtggtgccgtatgcggtctagcacaataaacaatttcagatccatcaattctattactttgttttgctttctcacactcattcaagaatgttccaaatgcatcttcacagtatttcactgcctccgaaacagttaagttctcagttagcttgtggtatatactcttattatgatccccatttagagttgctgccatatatatcaaatcttcttgaaattcactcaattgcgtttgttgttccgcggaagcagcctctcgcagtttgacggggtcaggcaatttcactggaaattcgtaacagaaatcataaaaaataaaccaatcgtaatgtatatatgcactatatagtgacaaatataaacctatatatagtgttttctgtgtttatattgattttaatatatttaactaatgattagtttttacattatttaagcgtgttttattattccttttgctaaagactaatatgaaagtgtagtttgaataatgttaagactggttttattttcataagtgaccaattgatgtgagttttcgagttttattgtattaggttattcaataaaaaagtgaaaatctatctgtttaataagtaaaaaggaaaaacgaaagaaaagatagagatatgacctggacaatcagtacgtggggtgcttagagataagagatcttcgagtgttccagcccatgcgtctcgctttgtcaaaaactgaggtagattgaatattttcttaacagttgctggtattgatgaatgctcatactgtgatgttgggaatggccccgaaggttcgtgcaacacttttcctgcctcgatccatggagaaataatgatggtaggaaccctaacaccaagtctatcaaactgaaacttgaatggttcaggaccagcaatgtcatctgggctaggcactccatccacaggggttgctatgaactcagcgatgagggctctatagaaggaccactgtgtgagctcctctgggtcgaacaaaggtgctggaccgtagattcgcatcctgcgaatgttggcttgattgtagagggccacaacttcttgaggggttggtaagttgttgccaagtcttccataacataccccggattgtgcatctgttgtgcctgtataagtgattagaaggataaacaggaaggctatagcagtcatggaagagcttttcccacttgaatgatacttagccatgttcgatatataagaagaaagaaggttgaggaaagaagaaccctcgttaccgaattcc

SEQ ID NO: 23608 - DNA, 594 bp, Glycine max
  Clone ID: PAT_MRT3847_121319C.1
atgataaaacaagtagaactagctccaagttcacattgcatatttttccaacggcacactatggcaagcttattcaccgtggccacattcacccgcacccatcactttttttgaacccaacgacagatccaaacctatcaagctgattaagaaagccattactaaacaataataaatcaaccaagcatgaaaagtgtttaccagctagctagttagctagatacagaacctgacggcctatgccaactttattattgacgctatccatcaacttcctaaggttctgttgcttgaaagctgacaatgacgttcactaccgagttcacattgtcggctgccgccgccatagcaagacacgccatcgaacccgggctgttatgaagcaagctgatctgcaacggaagcttcagggacaacccctctaagtgcatcgtacttgttggtgccagcggtttgtaggttttcacgacacacgtgttgaaagctccaatgcatcgtgaatgcagatccccctacctgcttcctgaactcctccctcaccgggttggaaacgggctacgcgaaccgtcctatcacccagcccgaattaattat

SEQ ID NO: 23609 - DNA, 265 bp, Glycine max
  Clone ID: PAT_MRT3847_12131C.1
gtctcgagtttttttttttttctctcacctgaaaatgtcttgctgcggtggtaactgtggttgcggaagctcctgcaagtgcggcaaccgctgcagaggctacaaaatgtacccagacttaacctacaccaagtcaaccaccaccaagaccttaatcatgggagtggcaccagttaaagctcaattcaatagtgctaaaatgggtgttcccactaataacaatggctacaaatgtagacctaactgcacctacaacccctgcact

SEQ ID NO: 23610 - DNA, 220 bp, Glycine max
  Clone ID: PAT_MRT3847_121320C.1
ctcgagccgagtattaatgagcgtggcggctaaagtatgagagaggcatatgtgaccaatgcttcactgagtgggatctagaaaggtaccgtccttgagtatatcgattggaaacactgccacattcgttgatatcaacaagctacaatgtattctgttctcacccaaaagatccgacatggaaattgatgtctgtgcggaccacataagctaggcccgc

SEQ ID NO: 23611 - DNA, 408 bp, Glycine max
  Clone ID: PAT_MRT3847_121321C.1
ggaagtttaagcaaacaaaaccctttctgctcctgctttctttgttcaaattttgtgtcaggatggaaactcgggtgaagcacacacttattgtcaaagttatggttcgtactggatccatatgacaagtgacccatgttatagtgaagtttttggatgatcataactcccacatcatgacgaatgtgaaaagacctgtgatagaaggacacattctcaccttacttcactctgaaaggtaagcaagaatattgcgctatatggtctcttatttttgactttcctccaaattcaaactaaaaaatttttctttattataaataataaactaagcgtatgacctattatgttgatcatatattcaatattctgattttatttaacttcaataacatcttgttattatat

SEQ ID NO: 23612 - DNA, 1058 bp, Glycine max
  Clone ID: PAT_MRT3847_121322C.1
tacggctgcgagaagacgacagaaggggatttgaatcttatgtcactgtataagaaaataggcaaggcggaatacaaatgtccaaactggtttccatttgaagtgcgcagactgttagcgaaaatccttgaccccaacccaaataccaggatatccatggcaaaagttatggaaaattcgtggttcagaaaaggattcaaacctaaatctggtcaagtgaaaagagaggctgttgatgtggctttagttgtttctgatcaaatttttggcttgtgtgagaatacaagtgctgctgttgttgaggcagagcaagcagtggttaaacctgcacattttaatgctttcaatataatttctctgtctgctgggcttgacttgtctggcctctttgctggcaatgttgaactggatgataccaaatttacatttatgagctctgcctcatcaatcatgtctaccatggaggatattgctcgcattttgaggatggagataattaagaaggatggagggttgctgaaattggagagatccaaggagggtagaaaaggaccactttccattgatgctgaaatatttgaggtcgccccatctttccatttggttgagctgaagaagtccagcggtgatacattagaataccagaagatattggaggacttaagaccagctctcaaagatattgtcggtgtttggcaaggtgagcagcatgcagtagcaaggttgtgtactccttaaaagattcattgatttttcaagttatgaattaattacagttgagttactatggtaattgacttgttgatatttatactatgttatacatggttttggttgagaatgccggctgaattttgagatgtcattactttataccattgctagaaatagttcttttgttttttatgccaatatgtaaattcgaaatcaaaatctgtaatgttttccaaaggttctggttcttcatcatgcaactactgtaagaaaacctatagatacagcgctgacgttcagtcttagtggtaataaaaaaaaaaaggaaaagttcggctgaagct

SEQ ID NO: 23613 - DNA, 697 bp, Glycine max
  unsure (1)..(697): unsure at all n locations
  Clone ID: PAT_MRT3847_121323C.1
cgncttaaccgccagccagccattcatgattcattgcatcccagagaaaatttggcagacaattaattacatatatacatgttaatatatctataattagaacaaagcgttgggaaaagaaaagaaaaaaaaactactgacatcggcatcagtactacaatatttttcccgccaaaatttatgtaagaatctctcccaactagggagagaaaacaagaaaaagaaaaagctatgtcattgtctataaggctggagatgtggtgcaggtgctcgtatctgacctacaccagcttgaggatttccaactggcaaagaaatggtgtcaataattggtgatcttgcagaaacattatgggaaaatcctgatgcactgtaaccagcccgtataggtgttaccatatgctgagagctagtcgtggtggaggaagaagaaccagcaagcagggaacgccaactagtactttgttgttttgaaggctgaagcaactgctgctgtgcgaaacctgaatctggcagcattcctgatgtacaagatggtttaagagtcgagcatttagacctaaaagcagctgccaagaacttattcatatgaactacattacgatttgtatccagagtcgtctttctttgtttaaattcaacttcaattccttgaaatttaacatcgtacttcctacggagttcctctaattccttt

SEQ ID NO: 23614 - DNA, 315 bp, Glycine max
  Clone ID: PAT_MRT3847_121324C.1
ctcgggggaagcttattgagagagagagagagagagagagaggggagtattgcgcttataatatgggttttctgggattccatgcacaaagcggccactgggcagaaaaagttgggaagaaagaagttgacttggcgataggcaaaaacaccaagtttcataccagacaatcaggaggatccttgttcacggggccatgttaaactgggcattgggctggatactgctattctcacggggcgtgaacacactctccaagactggatcttatatgttcgttcaatgctctcaacacgagccgttgaacatataccc

SEQ ID NO: 23615 - DNA, 251 bp, Glycine max
  Clone ID: PAT_MRT3847_121325C.1
ggggagccaggagccacaatcttcacttgtgtatccagatcccacgattccttaacctttacaaaggaaagcagctcaacttcatactccacagtggaatcaggaggaacactagccagttcctgagaggaccaaaatggaccaaatgtttatcaaggggggtgtgaaaacaaggcaatttcccctgtgttcatgttcttcacaggttggtcaagaacatcacccacttgctcttgattaatttccgaact

SEQ ID NO: 23616 - DNA, 395 bp, Glycine max
  Clone ID: PAT_MRT3847_121326C.1
ctcgagccgaatcggctcgaggtattttcacatttgccccgactttgtctttttgatttccaggtcccaccatcgcataagagctcctcttccccagatctaggacacaaatagttctctttctttctctttttctttttcattactcacgcaactcaactatttgagagcttttctgcatggaatatgatttcgtctgacaaagtttcttactcattagctgtatatccagccagctgattgagctcttctgttgcttcttgaaatactttcctggtgcacacattctattttacaaaatcctacacgaaatcaatgcttacattggccacagtgtggagatgcaccctgaaaccctttaccccatcgcccctaaagacctcatcgtcacctac

SEQ ID NO: 23617 - DNA, 486 bp, Glycine max
  Clone ID: PAT_MRT3847_121327C.1
ggatttcttgtcgaccagtttgttgattccttcatctgcaaattcttccctgacattgcataaagatcatccgactggcttgttgagttcgtcgactttaggaagatcagccaaaataggcatgtctttccctactactggcactgagcttggtaattttggttccttttcatatcatcatgatgggttatttacaaataacgagagggttccaagtcatctaagtaaaattggcaaaaatctaagaaatgataacactccaactccaaggaatcataggatccgtttcatgaatggttcacccctgaagggatttaataggacatcaccaagcaattcccaggaaaataggccagacaaaatcttgcctgaagttgaacaaaatctacattttggccataatcaaactaccagtcctatgtactcctggaaggctacagtcaaccctgttactagatccacacttagctatcctaaagaatttgc

SEQ ID NO: 23618 - DNA, 422 bp, Glycine max
  Clone ID: PAT_MRT3847_121328C.1
gcacgagggaagaccaagtattaaatggttgaattgatgaggagaaacgtggttgcttgctacattattaaaaaagtccatggtcagagttctttggcaaaaggtaattcctaccaaggagagttcctgtcaagtatcaactatggtttgaggctttcagttcgttctgattaaggagtgttgttgctggaattaaactacacgggtggctttactagtaagtagaagtgtagaactagaagttgccatgtatacttaactgggtcaaaagttgtcaaatgcctcatcacttgtgcaggaagtcagtttctaattgattggaacggtgatgtctctgcccttgtttgtatacagttatctgattatttaatgtgctacagattcaaacttaagtagcatttataaaagtggaagtgtagcgc

SEQ ID NO: 23619 - DNA, 495 bp, Glycine max
  Clone ID: PAT_MRT3847_121329C.1
ctaaaatccacatacttatagaaaacttaactagaaaagtatgaggaagctataagatttgccgatttcatgtgtcaccttgaactcaaagattactcagttcaaaacttcaaattgtcatagttaacacttaacatgcattttcactcccattatattgagaatcagtcaagactcaagagaaagcttcttgatagcagctcaggcatatattatattcttcaaataaatgaaatctagcaattgaattgtactaaccaaacgcaaaagttcattcagtgatactcctgatcagtagacacagcaactggatacttttaccccttaaaacaaaatttctaacagtctaaaatgtctcttatccacttcacaaaatgtttatatgggtagttaatgcaacaaatgagatgcaaataaaagtatgcttataaattcaacaactaactcttgtaatattatgctttaagataaactagacaaaccacatgagaaaat

SEQ ID NO: 23620 - DNA, 391 bp, Glycine max
  Clone ID: PAT_MRT3847_12132C.1
tgaagagcatctactccgagcagtcatttgtgcgggtttgtttcctggaatatcctctgttgtgaacaaagataagtcaatagcgctgaaaacaatggaggatggtcaggttcttttgtattctagctctgtaaatgattcagtgcttctcttatttggtgggaacgtatccagaggtggactagatggtcacctgaaaatgttgggagggtatttggagtttttcatgaaaccagaattagccaagacttacttgagcttaaagatggaactggaagaactgatacagaaaaaacttttggatcccatgttggaaacacaatcgcatagtgagctgctttctgctgttagattggtggtatcagaggatcattgtgatgggagatttgtc

SEQ ID NO: 23621 - DNA, 155 bp, Glycine max
  Clone ID: PAT_MRT3847_121330C.1
acgctttcgcagcctttgttagagggtcaaagatcgggctgatgagtgtgctaacgcatatgtgaactagtatgtactaaaatatacactaatactatgtgcattgctatgggcaatgtgtgtgtttaaatataaaggaaaaagatataaacaaa

SEQ ID NO: 23622 - DNA, 374 bp, Glycine max
  Clone ID: PAT_MRT3847_121331C.1
ttgagttttcttacactataacttttataaagggggtcattggaatcaagatgatatatatatagaatccaacttgccacttgctggtagcatgagctatattaaaggacatggagtaaaatctaaaaagaggagggcaaaaaaacattatactgccaccacatacaataaactactgacatacttgggaaaactgtttacccatgaataggttattagagtaaaactcctaaacaatattacatgctctccttgttcttcaaatgccaaatggagacatgccattttattacattcaagtccatggcctgacagttaaactggttcaatatacactgacatcgtgctatataagagccttgctacaaaccctt

SEQ ID NO: 23623 - DNA, 335 bp, Glycine max
  Clone ID: PAT_MRT3847_121332C.1
aaaagccaagggggtattcagttattttaaaaaaaggcgcagggcactgaaatttttaacccccatagcgcaagagtatatatagagttaccctccatactgaaaaaacaaaaactacgttcctataaaccacccaaaaaaattttggaaaaaaaaaaaaaaaaacactgactaaatacattgacccagggcaaaaaaatccatgggggggcacaaaaagttaaaaaattgctctgcttacccacaaacaagagagttaattaaaaagggggcctcataaggtgaaggaaccgccccatctgggattgaaccaggtaaatgaaaaaagatgttat

SEQ ID NO: 23624 - DNA, 434 bp, Glycine max
  Clone ID: PAT_MRT3847_121333C.1
ctaatattgttaaccaacaaattttagatcaacaactttcttccatattctctcaagatgatttgaattcttatcttctcggttacgttaataataacaataacgatggtaacgatagtaataataacaatattaataacaatggttatgatcaattaaatcttataaatttattgacagcggcagcttcaaataatttttcattagactttaatcaattgaatagtcttgataatgtaaataataacaataacaataacaatagcaataataataataataataatagtattatcattaataatagtaacggtagtaattgtattatcgacgataatgattattatacaacaactgcttatgatgatggaatttctaatgtgatggattatttatttttgcgttaatcgataatattggaactggtttaattt

SEQ ID NO: 23625 - DNA, 453 bp, Glycine max
  Clone ID: PAT_MRT3847_121334C.1
agcgcagaatttggttctattctttctagcagtaacatgagaatcaatatactcgtttatgttgttactagagaacatagtagcttatgaatgacttttgttcaactaccaaaatttgcccatcaagaacccaacttctgttttcattcattgcatggatttgcttgctattcaaccctgctctcgattttgctgaggaggattgaaagttgaggcgttcctggatcgtgcagcttgcggagagtacatagctgactacgttctaagagaccaatatagatcagattccaaaacagttaaccaacaagcttatttctatgctaaatcccttaaactcaccaacaaagatgttttttgtcttggacgttgacaacactactctttctaatcttcaagattttgcttaccatggatttggtgtggaaccacacaatacgactgcgtttaaaaact

SEQ ID NO: 23626 - DNA, 3116 bp, Glycine max
  Clone ID: PAT_MRT3847_121335C.1
atggagtatggagtaagagtgacggagggggaagagtatttcaaaccgttcaacgtgagctacgatcaccgcgctctcatcctcaacggcaaacgccgcttcctcatctccgccggaatccactatccacgcgccactcccgagatgtggcctgatttgattgcaaagagcaaggaaggtggggcggatgtgattgaaacttatgttttctggaatgggcatgagccagtgagaggacagtataattttgaagggagatatgatcttgtgaagtttgtgagactagctgcatcccatggactctatttctttctccgcataggcccttatgcgtgtgccgaatggaactttgggggtttccctgtgtggttgcgtgatatccctggtattgaatttcgaacaaacaatgcacctttcaaggtgaaatcctttgttggaggagatgaagcgctttgtctccaaggtggtgaatctgatgagagaggaaaggctgttttcttggcaagaatgcaatgtttaactaagcttgtgactgaattttatcagattgagaatgaatatgggaacattgagaattcctatggtaaaggaggtaaagagtatatgaaatgggcggctaagatggctctaagtcttggtgctggggttccatgggtcatgtgtagacagcaggatgctccatatgacattattgatacatgcaatgcatactactgtgatggatttaaaccaaactctcataacaaaccaacgatgtggacagagaactgggatggatggtatacacaatggggtgaaagattgcctcatagacctgttgaagaccttgcttttgcagttgcacgttttttccaacgtggaggaagctttcaaaactattacatgatcttgacaagcccttttatgttacagtattttggcggaacaaattttggccgcactgcagggggacccttgcaaattacaagttatgattatgatgctccaattgatgagtatggtctgctgcgtgaaccaaaatggggtcacttgaaagatttacatgctgctttgaagctttgtgagcctgccctggtggccactgattcaccaacatatataaaattgggtccaaagcaggaggcacatgtgtaccaagcaaatgttcaccttgaagggttaaacttgtctatgtttgaatcttcaagcatatgctcagcatttcttgccaacattgatgaatggaaagaggcaactgtgacctttcgcggtcaaagatacactataccaccatggtctgtgagtgttttgccagattgcagaaatacagttttcaatactgccaaggttagagcacaaacttctgtcaaactggtagagtcttatttgccaactgtctctaatattttcccagcccagcaattgaggcaccagaatgacttttactacatctcaaagtcttggatgactacaaaagagccactcaatatatggagtaagagcagtttcactgtagaaggtatatgggagcacttaaatgttacaaaggatcaatctgattacctttggtattcaaccagagtatatgtttcagatagtgacatcttgttttgggaggaaaatgatgtccatccaaaacttactatagatggtgtccgtgacatattgcgtgtattcatcaatggccagcttataggtaatgttgttggtcattggatcaaggtggtccagactcttcaatttctcccaggatacaatgatttaacactgttaactcaaacagtgggtttacagaattatggcgcttttcttgagaaggatggagcagggattagaggtaaaataaagatcactggatttgaaaatggagatatagatctttcaaaatcattatggacctatcaggttgggcttcagggtgagtttttaaaattttacagtgaagagaatgaaaattcagaatgggtagagttgacccctgatgccatcccatccacatttacatggtacaagacatattttgatgtccctggtggcatagatccggttgctctagacttcaaaagcatgggaaaaggtcaggcttgggtgaatggtcaacatataggaagatactggactcgggtttccccaaaaagtggatgtcaacaagtctgtgattatcgtggagcatataattccgacaagtgttcaacaaattgtggaaaaccaacccaaaccttgtaccatgtgccacgatcatggttgaaagcaaccaacaatttacttgttatcttagaggaaaccggaggaaatccctttgaaatttcagttaagttacattcgtccagaataatatgtgctcaagtgtcagaatccaactatccacctttgcaaaagttggtgaatgcagatctcattggtgaagaagtttcggcaaataatatgatacctgaactgcacttacattgtcaacaaggacacacaatttcctccgtagcatttgcaagctttggtactccaggaggtagttgtcagaatttttctagaggaaactgccatgcacctagttcaatgtcgatagtttctgaggcttgccaagggaaaaggagctgctccatcaaaatctcagacagtgcattcggggtagacccgtgtccgggtgtggtgaaaacattgtcagtggaagcaagatgcacatcaccattgagtgatgacttctttcaagaggctgttagcagcttctaaaatgaggttcggtatgaaccttgtgaacacaagccaaccaactggacaatgttactaaccagaaatggccattaattgtgttcactcgattgtgtatatataaatgtcatgatttagtgcataagacttggtcttttgacattgaacagcaaataagtaatctctgctgatcaatgattctcctttgtgcatgcaataccatgggttctttgatctgatgatccgttgtgggctaatgctgatgaaggttgcataatcagcacctctttcaatgtacaagatctttgaaacaacgaaggattcccgaagcaataaaaaaaccgagcaattttaaaaagttatatctactttaatttttaattagttgataatgtaattttttacactatatatcagctaattgtatatag

SEQ ID NO: 23627 - DNA, 2937 bp, Glycine max
  Clone ID: PAT_MRT3847_121336C.1
atggagtatggagtaagagtgacggagggggaagagtatttcaaaccgttcaacgtgagctacgatcaccgcgctctcatcctcaacggcaaacgccgcttcctcatctccgccggaatccactatccacgcgccactcccgagatgtggcctgatttgattgcaaagagcaaggaaggtggggcggatgtgattgaaacttatgttttctggaatgggcatgagccagtgagaggacagtataattttgaagggagatatgatcttgtgaagtttgtgagactagctgcatcccatggactctatttctttctccgcataggcccttatgcgtgtgccgaatggaactttgggggtttccctgtgtggttgcgtgatatccctggtattgaatttcgaacaaacaatgcacctttcaaggtaggaaaagagtgtgggttttgggctttatatgcattaaagccattaattggttttacttttcataatttgaagcatattcatagtcctgccgggattgagaatgaatatgggaacattgagaattcctatggtaaaggaggtaaagagtatatgaaatgggcggctaagatggctctaagtcttggtgctggggttccatgggtcatgtgtagacagcaggatgctccatatgacattattgatacatgcaatgcatactactgtgatggatttaaaccaaactctcataacaaaccaacgatgtggacagagaactgggatggatggtatacacaatggggtgaaagattgcctcatagacctgttgaagaccttgcttttgcagttgcacgttttttccaacgtggaggaagctttcaaaactattacatgatcttgacaagcccttttatgttacagtattttggcggaacaaattttggccgcactgcagggggacccttgcaaattacaagttatgattatgatgctccaattgatgagtatggtctgctgcgtgaaccaaaatggggtcacttgaaagatttacatgctgctttgaagctttgtgagcctgccctggtggccactgattcaccaacatatataaaattgggtccaaagcaggaggcacgtgtgtaccaagcaaatgttcaccttgaagggttaaacttgtctatgtttgaatcttcaagcatatgctcagcatttcttgccaacattgatgaatggaaagaggcaactgtgacctttcgcggtcaaagatacactataccaccatggtctgtgagtgttttgccagattgcagaaatacagttttcaatactgccaaggttagagcacaaacttctgtcaaactggtagagtcttatttgccaactgtctctaatattttcccagcccagcaattgaggcaccagaatgacttttactacatctcaaagtcttggatgactacaaaagagccactcaatatatggagtaagagcagtttcactgtagaaggtatatgggagcacttaaatgttacaaaggatcaatctgattacctttggtattcaaccagagatacagaaggtatttataagcacctagatacagctgtcatagtgacagctgtatctagagtatatgtttcagatagtgacatcttgttttgggaggaaaatgatgtccatccaaaacttactatagatggtgtccgtgacatattgcgtgtattcatcaatggccagcttataggtaatgttgttggtcattggatcaaggtggtccagactcttcaatttctcccaggatacaatgatttaacactgttaactcaaacagtgggtttacaggtatttggcaattgtgtaaaatttcataattctactgttatggtctttgaccaatcaaatttggttgtgaaactagttcctttagataagaggtttattagtaacagcaaaggaagaattgaagaacgtaatgatgagcaatttaaagcagttatttctgtaagtattggaaaaaacgactgtaccgcaggctctataaataattatggcgcttttcttgagaaggatggagcagggattagaggtaaaataaagatcactggatttgaaaatggagatatagatctttcaaaatcattatggacctatcaggttgggcttcagggtgagtttttaaaattttacagtgaagagaatgaaaattcagaatgggtagagttgacccctgatgccatcccatccacatttacatggtacaagacatattttgatgtccctggtggcatagatccggttgctctagacttcaaaagcatgggaaaaggtcaggcttgggtgaatggtcaacatataggaagatactggactcgggtttccccaaaaagtggatgtcaacaagtctgtgattatcgtggagcatataattccgacaagtgttcaacaaattgtggaaaaccaacccaaaccttgtaccatgtgccacgatcatggttgaaagcaaccaacaatttacttgttatcttagaggaaaccggaggaaatccctttgaaatttcagttaagttacattcgtccagaataatatgtgctcaagtgtcagaatccaactatccacctttgcaaaagttggtgaatgcagatctcattggtgaagaagtttcggcaaataatatgatacctgaactgcacttacattgtcaacaaggacacacaatttcctccgtagcatttgcaagctttggtactccaggaggtagttgtcagaatttttctagaggaaactgccatgcacctagttcaatgtcgatagtttctgaggcttgccaagggaaaaggagctgctccatcaaaatctcagacagtgcattcggggtagacccgtgtccgggtgtggtgaaaacattgtcagtggaagcaagatgcacatcaccattgagtgatgacttctttcaagaggctgttagcagcttctaa

SEQ ID NO: 23628 - DNA, 413 bp, Glycine max
  unsure (1)..(413): unsure at all n locations
  Clone ID: PAT_MRT3847_121337C.1
gactagatgtgaatgtgattcatattcatagagagagaaagggaaagggagaagagcttgaggaagtgatgggagatgggagggtcggtaaagaatatatctgagactcgactcaatctcgatctctctcagtgttgtgttgttttgtttatccttttgccgattccgcccattcctatgatttccttcggttcctctctttccactctcctctccgctctttcctcttgttatggtaagcacctttcttcttcagatctgctctttataccatacacttattatagatctaagtttttatggaccttaactatcttccttgatctcttattaattttaaccgctctctctttgntgctggacatgttacttcaagataacaaattgcttttttatatttcatcttttctctc

SEQ ID NO: 23629 - DNA, 299 bp, Glycine max
  Clone ID: PAT_MRT3847_121338C.1
aataaaggattgaaataagaacaaaaacaagttaaacataagttgataaacatgatgaaagactcggaagagaaagagctatggatcgctagttgaatactttttatggagcttgaaggaaattagggcggcccattacaagaaggccattggaccgggaagttggtttggtggaggagtttccatgtgggtgattttccatactttggataatgccgagacttggcatgccaaggtccagcatgggtaccgagaagaatggttgctcacatcgcttttctccaaaacagagaactcgg

SEQ ID NO: 23630 - DNA, 355 bp, Glycine max
  Clone ID: PAT_MRT3847_121339C.1
atctcggtcgtagtgtgctccccaaacggatcgggacacagaagctctatatgacggaaccagacagagttcatgttagataaagctgcgatctatcaaacatcgtaaactggcaaccgatggctcacaattactgcgagcccgtacagcctcataatgctgaaatagcttagtgctggcgttgaccttccatacgccggagcacccggtcccgcagggggtgctgccgcagaatagcagttgcttcgtagagtgtggcgcccgcgttaaatcctatggcatatcctgcgtgtggacactaagataaaccccaattcttatttgacgctcactagtttcactaccctagatatct

SEQ ID NO: 23631 - DNA, 2176 bp, Glycine max
  Clone ID: PAT_MRT3847_12133C.1
ccgaggggctcttctggactccctggctctccgcttctctgctttgctgggctcgtctccagaggtggactagatggtcacctgaaaatgttgggagggtatttggagtttttcatgaaaccagaattagccaagacttacttgagcttaaagatggaactggaagaactaatttaacagttttagggcacaaattggcaatgcttcctgtggagcccaaacttggcaagatgctcattttgggagcaatcttcaagtgtttggatcccataatgacagttgttgctggtcttagtgtaagagatccatttgtgatgccgtctgacaagaaggatcttgcagagtctgccaaagcccaattagctgctcgtggctatagtgatcatctggcactcatccgggcttacgatggttggagagatgctgaagctcagcaagctggttacgagtactgttggcgaaattttctttcttctcaaacacttagggccattgactctcttcgaaagcaattcttttatttgctcaaagatatttgtctggtcaataacaattctgaaacctacaatacatggagtcatgaagagcatctactccgagcagtcatttgtgcgggtttgtttcccggaatatcctctgttgtgaacaaagataagtcaatagcgctgaaaacaatggaggatggtcaggttcttttgtattctagctctgtaaatggttgtgtaccccgaattccattcccatggattagtgtttaatgaaaaggtgaaagtgaattcagtattccttagggattcaactggaatatctgattcagtgcttctcttatttggtgggaatgtatccagaggtggactagatggtcacctgaaaatgttgggagggtatttggagtttttcatgaaaccagaattagccaagacttacttgagcttaaagatgggactggaagaactgatacagaaaaaacttttggatcccatgttggaaacacaatcgcatagtgaacttctttcagctgttagattgttggtatcagaggatcattgtgatgggagatttgtctttggtcgccaggtcctaccacaatcaaagaaggaaacaaactccaaaactggtggtgtagctgaggagaaaaattataaaaatcatcttcaagcattccttaacagggctggacatgattcaccaacttacaaaacaaaggagctgaaaaacaaccaatttcgttctactgtcatattcaatgggttgaattttgttggtcagccatgcagcagcaaaaagttagcagaaaaatctgctgctgctgaggctcttctatggttaaaaggggatagccattcgtctgatgatattgaccatgcatcagtgcttttgaaaaagagcaacaagaaaagtaggaaaaattcgtttagcagtgctaaatggagttgagctgcctttaaaagcttaccttggatagatttgttaatagcattgtatactaagaaaaacttgtccagttgaaggctatggtgcaattgattcaaggatcttttctgtcattatttcaacagcgagtgtacagagctattgagggaatatattacaggtacagatcagagcccgtgtttttgtaaagagtgattgcatccagtttatctagatttggggcacaattcaatacgagtatttccacaattgctttgggctaatttggcccagagcagagagattggctggctgagcagcttcgtacttgcaaatgaattcttacaatagaggtataaacagagcaaagaattgtatccatatgctgatgatgctttctttttgcactgctcttgcggtagatatacttttcaagaggattcacctgcaacaattcattggggggacaacacaatatccatatgtaagaccgggtattttatggaagagaatagggatatctgcgtgatgtggtagttgctcagggaacgcatttaagttaatcaagcctgctgacatagaatatatgtatttaagatcaattttactctcaaaagcctattctgaggcttgttagttgttacagctggggtggattttttttttttttttggtactaatgttgtaaactggggaggtaatgtaatccaataaatttcagtctgagtagaaaatcattagaattgatttaaagttaaaaccc

SEQ ID NO: 23632 - DNA, 539 bp, Glycine max
  Clone ID: PAT_MRT3847_121340C.1
cccacgcgtccggaaaaacggtgttctgttctgttctgttcatgcacttgcacgcatgacagaccctttttaaggttaagctgtagagaggagtttggctcaagttactttgcttgcttctgtgatctgtttggtgtgttgcgtcttgcggcaaactgagtgaggtaaaagagggagagggaggaacagagagaaagagaaattaaaaaacaaacaagggaaccttcccttaagactctctctctctctctctctcttcttagaatttgtctctcatttctttctctctccctgtaacacagccaccgcaccattctctctctttctcgccgccatcatgttctcctcaaccagatgcgctttcctgagcaactcggggttaggtgggtgcagcagcttgtgtgatgctgcgcagaaaaagcgttcaactcgtttgagggtggtgagtatgaccccaagcagagcagcagcagcaggtccggtgatagaaacagcagcgttgtgatggagaccccgttgaaagaattgaaaaaggaatc

SEQ ID NO: 23633 - DNA, 277 bp, Glycine max
  Clone ID: PAT_MRT3847_121341C.1
tccggtccggaattccccgtcgacccacgcgtccgccaaactttcgaatcccatacccttgtaaacgcagacaacgttcccttacaccggactctgtgctaaccgcgccaagcctgtgacactgtccttgttgaaagacacctacatcaaatgcgccctatacttccatacgaccagccttgaccatcacacactggaaagatcgcggattcaactcggacgatggtcacgccgccttttcatgaaatcgcgcctactcgcgagcgacaactaagag

SEQ ID NO: 23634 - DNA, 195 bp, Glycine max
  unsure (1)..(195): unsure at all n locations
  Clone ID: PAT_MRT3847_121342C.1
nctacacttgggtacaagtctatctaggttctgatgggttgtcctcgcgcatgaccttttaaacagcttgcaaattgttgcatacatgctcatcaatgtgcgcgtctttacaccgccttgtctgtgataaccccggcgaaacccctctctttcgccttgtggatcatatcgctttatccagctgtggcgttatct

SEQ ID NO: 23635 - DNA, 223 bp, Glycine max
  Clone ID: PAT_MRT3847_121343C.1
caaatctaatcattagtcaacatttttgcaatattagttggatgtattacagagaataacatgtcttccattgaggcacgttcaactgaaatatatgttatggagaagaggcagaaagacaagttgaagagactgacgaggaaagagtacgaagcggtaaggtgagtactgacaagacaaaggagattagttctagtgtgggacagaacaaggtacataccag

SEQ ID NO: 23636 - DNA, 172 bp, Glycine max
  unsure (1)..(172): unsure at all n locations
  Clone ID: PAT_MRT3847_121344C.1
annaacatcttaaaaaacgacttttaatacctaacggaaacccctaaattttagcccccactaaaccaaagggaaagacggatttgattaaagaaaaccttttatattaacttgaaatttgacacccttttggacacctttttaaaaaggaaaaaaaatttgtaaagcaaat

SEQ ID NO: 23637 - DNA, 550 bp, Glycine max
  unsure (1)..(550): unsure at all n locations
  Clone ID: PAT_MRT3847_121345C.1
tnnncaattaaattatgttgggaaaaaataaaatcttttgtataaaactactgtatacaaactggatagaaagcaagcacaaattatattgtaaacatcaattaatgtagaattcataaaaatacaacttatttaaatacaatcttttaacattaattaggtggtgccactagccaatttggccatggaaataggcacagatcacaaccagtgataaaatttattagcatgtatgtaaattacatggatgattgaaaattaaaggcctaagcatgaaaattttcaggatctctaaataaataacaaaaaaggaaaatttttgtggaaaaaaggagtaggggcacacttccaatacttttctcattgatacactcttgattttatctaatgacaatgatttccttgcattataccctcattcataaatgacataaaatacccctattgtattatacccttaatacaacaaacttttcctactagatgggttcagctacatggatcaagcaatgctagattgttctatcatgaatcatgtcnnangcgtggg

SEQ ID NO: 23638 - DNA, 260 bp, Glycine max
  Clone ID: PAT_MRT3847_121347C.1
accaaccaaacctgagtcattcagaaattggttacccttttaggggccgattaagccttggccgattaccataaaccttcattatttaacctcaaatgggcctgaagccccggaaaagccgccgccccttaaaccattcaaattttgggaggaggattggaccgaccccattttcatttaacatgaatgcctcttaacaagggaaaccaccctggaattggctattataaaaaaacttccatgcccaaaaaattaaccca

SEQ ID NO: 23639 - DNA, 240 bp, Glycine max
  Clone ID: PAT_MRT3847_121348C.1
catatcaatccccccactaatttcaaacacaaattcacaaacaatcttcaaacctcgctcaaacaaatcactttttctccttctacactatacactaattatacctaccaccttcatgtttattttcctataaattacccaattgaatcttctctatttatattctttcattcccctactcttcattcccatatttacaataaccatcacatttgtttaaatatattttattatttatta

SEQ ID NO: 23640 - DNA, 422 bp, Glycine max
  Clone ID: PAT_MRT3847_121349C.1
gagttaagaatgtgggtatgtgtttcagaatattttagtttgaagagagtgacaaaagctatcatcgaagcagctggccatacctgtcaggatttggatctagagtcacagcaaagaagacttcatgatctgcttcaaagaaaaagatatttgcttgttttggatgacgtgtgggatgataatcaagagaattggcagaggctgaaatctgcactagcttgtggggcaaaaggcgcttcccttttagttactactcgccttttgaaggttgtggcaatcatggggacattgcctcctcatgaattatcggtcctgtccgacaattgattgttgggaattggttaaacaccaaagccttggaccaaatgaggaagaacatgtggagctcgaggacataaggaaagagatggtaaagagtgtcg

SEQ ID NO: 23641 - DNA, 728 bp, Glycine max
  Clone ID: PAT_MRT3847_12134C.1
ggctcgagattcgtttagtggtgctaaatggagttgagctgcctttaaaagcttaccttggatagattcgttaatagcattgtatactgaggaaaactttccagtcattatttcaacagcaagtgtacagagctattgagagaatatatgacaggtacagaactacagatcagagcccgtgtttttgtaaagagtgattgcatcctgtctatctagatttggggcacaattcaatgagtatttgcacaattgcttttggctaattttgcccggagcagagattggctggctgagcagcttcggactacttgcaaatgaattcttacaatagaggtataagcagcaaagaattgtatccataagctgctgatgctttcgttttgcactgctctcgcggtagatatagttttcaagaggattcacttgcaacaattcattgggggacaacagaaagatcaggcattttatggaagaaataaccgtgtcctttaatttgtattcatagtcagatgtgtggtagttgctcaggaacatgtttaagttaatcaagccagctgacatagaatatatgtatttaggatcaattttaccctcaaaagcctattacgaggcttgttagttgttacacctgtgggtggatttttttttggtactgatgttgtaaactgtgggaggtaatttaatccaataaatttcagtctgagtagaaaatcaattgaattgatatt

SEQ ID NO: 23642 - DNA, 274 bp, Glycine max
  Clone ID: PAT_MRT3847_121350C.1
gacagacacatagacacgcgtccgagtacaacaagatcacgacacagcgagagtaatatagtgaggtgaaacaccatgagctgcaacctgtgagataaacagctgaagtcgtgtagcatacattgcacgtgctatcatgactacgttgacgtgcgttacggtttgactgcagacacagagactgttgaattgcctgttatggctgtgcagtcacaaattggggatgctaactactgtgaagcgtgatgaatcggaagcattgactgcgcatgat

SEQ ID NO: 23643 - DNA, 702 bp, Glycine max
  unsure (1)..(702): unsure at all n locations
  Clone ID: PAT_MRT3847_121351C.1
ggctcgagcgagtggttccctccctcacgcgccctcggcgccctctccgccttccgccagacgcgccgcgccttcgccgccaacaagcattcggcccccgacgacgcctacgccgcggagtccatcggcgacgaccccctcgctgcgtccagcggccaggtcatcgtcggcgtcgagagccgctaccgcgtcgtgtaccgcctcgtgaacggcatctacgtcctcggcatcaccgtcgccgaccacgacaactccgtgaacgtgttcgagtgcatccacatcgtcaaccaggccgtgagcgttgtcgtcacggcgtgccgcggcgtcgacgtcacgccggagaagctcagccgcaagtacgcagagatctacatggccctcgacatcgtcctccgcggcgttagcaacatccgcctcgccgccatgctcgccaccatgcacggcgagagcatcgccaagatggtccactctgccatcgacaccgagaacaagatccgcggcgccgaaacatggccctccgcggaggtgcactccctcgagcaccaggccggaatcgacgccttcaccaccgcgaccttcgaattgccgccggagacgctcaatgccggngacgaggtcgccgncagcctcgcccccgctgggccggagcctcaggaggagccgcagcagaagcaggatgaatctcaggtggaaaaggatcct

SEQ ID NO: 23644 - DNA, 487 bp, Glycine max
  Clone ID: PAT_MRT3847_121352C.1
aaaaggccaaaccaaaaaggctttatgaatgggaaaaaaaatatatgggaactaaacggggttgggggccccattggtaagggcaaacggggaggaaaaaaactaacagttttaaacacaaaaaaaggtttgggggggcccaaaaaaaaaaaaaaaggggggtcccatggacaaaaaaaaaattgggaggcataaaggaaccggagtttttaaaaaaaccccccgaaatgggggccccccaaaccggatcaggggcccaaaaaaaaattaaaccccccccatttggtgggcagggtaaaaaaaaaaaccaaaaatttttttggttcaaaggaaaaaaccaaaaaggggggcttaacttatttaaaactaaaacggggctttaaaaaaaaacttgaaaaagaacaaaaacgcccgggttttggattggaagaaacaaaaaggccctgaaccaacttcccaacatcagaagcctcttcaaaaaaatact

SEQ ID NO: 23645 - DNA, 256 bp, Glycine max
  Clone ID: PAT_MRT3847_121353C.1
gagaatcactacattaaactggacatttatcttatataaatttgaaaacaacctaataaaagcacaagtcagatataaagattacttatttaatcagctctttcaattttcctttactcagtagtatggttttaatttttccgtaatcatgtatggaatggggatgcagtattgttacatgtgtataatttattgagccagtcctagttttactgtgtcctatatataatatgaaggtgcctctcatatcatagag

SEQ ID NO: 23646 - DNA, 244 bp, Glycine max
  Clone ID: PAT_MRT3847_121354C.1
ggttcctctcaggagtctgtttctaaatcaggtagtgaaaatgaaacatcaacaaccatgcaatgtaacaaatccaacaaaaagctctaagtagtcaatggtcccagctctcacttcggacattcttccagatcagtgcaaatcttgacaatggtaggtctgtagaagtagtcgatgactcatgtactgagtactcagataatcaggcagaaccctctcaaccaagccctcgtttacagggaac

SEQ ID NO: 23647 - DNA, 563 bp, Glycine max
  Clone ID: PAT_MRT3847_121355C.1
cctcgtgccgaattcggcacgagagagagagagagagagcccgaacaaatatgggttccaaaactctgattcaccctgttgctcctttgggaatattcgaccagctcttacatgtatacctgcatcaaaactgtgcaaagatagaagcaagtacgttttttgggatgagtaccatccttcagacagagctaatgagctaattgcctttgaactcatcaagaaatttgggtttgtgcgtgttgatcaaacaaaacctccttcaccatcacccgctcttgctccgtcttcagacgattaatcgtgcatgtgaagcgtgggtggcaccatcaccgaacagagtgtgtcctattaaagcatcaacgttggactcagtaggagtgtaaaaggaagtgagcatggtctcaacacacacgacagggacacatgactcaaggttgttttgtacaatgtccttaacttcgtggagaacgatgccaacaacatggcagccatggttgaagagcatgaggtggttgatcgtcaacttgagtttgaggagctcaaagagatagttaattaggtca

SEQ ID NO: 23648 - DNA, 263 bp, Glycine max
  Clone ID: PAT_MRT3847_121356C.1
tcgcagacccgtggctatacgcctcgagacttcactcacgtttcactcaagaccggtgatgctgacaggctatccttagatagagcgagaccagacaacgcgggaagtcatctacatgtaagtgaactacgattccgtaattttgtctagctagatggacgatatgatagcccatctgagcgcgatgaaataacacctgatctacgggaagtgggcgtctaagacaaatgacctaattggagatcggctggcatggcttttta

SEQ ID NO: 23649 - DNA, 136 bp, Glycine max
  Clone ID: PAT_MRT3847_121357C.1
ccaaaagctttgcggtttctaaggtgatcttctctccttagcatcaggaatgcttatgagagaggagtatcgggctcaaaatgccgtaacagcatatgggaaattttgccccttctaacagtctgtttggatgatg

SEQ ID NO: 23650 - DNA, 434 bp, Glycine max
  Clone ID: PAT_MRT3847_121358C.1
tttttttttttttttttttttttttttttttttttttttttttttttttttttttttttttttttttttttgggggggaaaaaaaacctttttataaacaaaaaatggttttttccccaaaggggttttttttacttcgggggatatatcacattctcaaaaacttatttttgaccaaaataccctcctttccctttgctaaaccacaaatttttctccccgttttcaacacataagcccccggggggccttttacctaaagacattttcccttgaaaactttacaaaactaaaacccggatcattaacgggaaaaacttttttttcccttggcacccccaaattttttttccctgaaaaaaaaaaaccaaatggtttattctacatgggaaaaaaaggctggcccccctggccaaggggaaagatccctaggt

SEQ ID NO: 23651 - DNA, 858 bp, Glycine max
  unsure (1)..(858): unsure at all n locations
  Clone ID: PAT_MRT3847_121359C.1
gtgatagtgctaagttgctaacttaaccacaccacaagctacaacncacaaaaggggaantggtcagaaccaaaaaaaancctctctccataaactctngcaaagaatcagagagccacgcgtccgaaagaagaatgggatgggaaacttaaattagagaggcagcacagcacagcacagaaggtcatggcggcgtttgcagtgctgaaaatcgcgcttttgtgattgagggttttattaatgcaccttgccttggtgccgctggccgagagagaatgagttgaaggctgctgcccccgatactgtttctcctctgtcctcaaccacaacccttctaatcaattccactctttaaccagccaccacacaacacctacctctacatcttaagcatacaaggagagagaacaaaaacaaaacacaacacacgcgcacacacaaaaaccaaagaatttaagagcaaaaaaaaagaagaaaactatccctagttgttgtgcggttctctctcccaaattgtggacgcagggaattaattgaagcagaagcagttgtcgtggattggagtattttagtaaattaattataattgtgttgagcgtagagtggggttggctggcgatcgaggtagtattgttcttgatatggattttcgaaggtcgggatcagtagaggaggcagaagaatggcgggtttattctcactagggggtggtagtagtagtagagggaacacccaacaagaggaaattcctcctccggataccttattctggtataacaacaaaaatgatgacgtttcctcttaccaccgagtggcgggtttgagttatggaacccagcacaactcatgggccagggc

SEQ ID NO: 23652 - DNA, 545 bp, Glycine max
  Clone ID: PAT_MRT3847_12135C.1
ggctcgagattttaaataattgaaataagttttgtgttattcaatcaagactattatggctttttaggaaattcaataaagtctgtttgtattaaattaagttgtaaaaaatattagtttaattcatactgactttattgaattaatgattttttacaacttacaaaaagtggtctggcattcaaaaggatgcttattttgatggattataacatatgatggattttaatggaatttgtcatacatctttatgagaaaatactcattagacaatttcacccaaacatctttgagatttcgtgagactatctctctttatttgcttacaaattgtgatgcttttcttttcccatcacacataagcccctgtgtttctttgatgaaagcggtgaacattcataattttttttactatttctgactaatgatcaacatgtccttaaacgcgtgatatgagagatcgtttcaatatgttgaatttggagagacatcttgactacatgcttatcattataacaaaaatggattctcatagcatgagaaat

SEQ ID NO: 23653 - DNA, 1229 bp, Glycine max
  Clone ID: PAT_MRT3847_121360C.1
acctcgtactcgcgctccggagtttcaaccccgcagaccgaatcgaatcctccaacatacgtttccaacgatagatagacaaaacaaaatccgaagctccaaaattcctcctaagtgcagtaaccgaaacccaatgacccacctagccatggtttggcttcaaacatggctccctgaaccctagcgtttctccctcttcgccaacaacgctgatccgatcccgatctgtttctgattccgatccgatccaatccaatggctggggcagcctctgctctgttcctccttgacatcaaaggccgcgtcctcatctggcgcgactaccgcggtgacgtcaccgccgtcgaagctgaacgcttcttcaccaaactcatcgaaaaagagggggatccgcagtctcaagatccggttgtgtatgataatggtgtgacctacttgtttatacagcatagcaatgttttcctcatgatggctaccagacaaaactgcaatgctgctagcctccttttcttcctacaccgtatcgttgacgtgtttaagcattattttgaagaattggaagaggagtctcttagggataactttgttgttgtgtatgaattacttgatgaaataatggactttggctacccgcaatacactgaggcaaagattcttagtgagtttatcaagacggatgcctatagaatggaagttacacagagacctcccatggctgtgacaaatgctgtatcctggcgcagtgaagggataaactacaagaaaaatgaggttttcttggatgtggtggagagtgttaacatacttgtcaatagcaatggacaaataattaggtctgatgtcgttggggcattgaagatgagaacgtatttgagtggtatgcctgagtgcaaacttggtttaaatgatagagtattgttagaggcgcaaggtagaacaaccaagggaaaggctattgacttggaagacataaaatttcatcagtgtgtgcgtttggctcgatttgaaaacgatcgaacaatttcctttataccacctgatggatcgtttgatttgatgacatataggctcagtacaacaagtaagcctttaatttgggtggaagcaagtgtgaaagcattcaaagagtccggattgagattatggtgaaagctatgagtcaattgaatggacctacgtcagcgagaattcctccttttcttaatgatggatatggtgcttcccccccc

SEQ ID NO: 23654 - DNA, 651 bp, Glycine max
  Clone ID: PAT_MRT3847_121361C.1
cccaacataaaagctaaatttcattaatatattatatacaagcaaaacatttctataattcatgttccaacaaatagaaaaaatactgcaaaattttgaaataccaaaggaaccaaggattctaagttctatatgtcttatgtacactatgaatatcaaaacttcctaagaaataccacttgtccaaggtgtccattgaaaagcttcagatattgcaaattttctttggccagtctctagaggcaaattgatgcttttgaagtccgttgattcatcccaaggatgatcaccattacggtcacatcatcatggtacttcctcctcctcccatccggaacattcatcaactcttccatgctgaagcctgcaaaatcagctgctcttgcaactagttgctcaataagaaattttgctggatcaccaaaagggtttctcaagatataagactctacaagctgtactgcttcatcattgctgaagaagtcaaataagccatcactcccaactataacaaattgatcagaatctgagattttgtgcacattcaatgatggatcagtagaaacatatggcgggcttttaagatcacgaactcgaaggattcccatcaatgcgtcattcagaattttctttttcaggtagcccactcct

SEQ ID NO: 23655 - DNA, 225 bp, Glycine max
  Clone ID: PAT_MRT3847_121362C.1
ggacccaaagaaaagcccgaaagttttaaaaacactttgacccgggggggccaaaagaaaacctaaaaggtttacaacacccccatgggccatttccaatttaaaaagggaaaaaaaaaacccaaggccctaaagggggacaaaacccaaccgggggccgggggacccaaaagggggcaaacttttttcgggcttcgggggttcccaaatggggcccttaggccc

SEQ ID NO: 23656 - DNA, 462 bp, Glycine max
  Clone ID: PAT_MRT3847_121363C.1
ggcaaaaaaatggaccttacattataaattaaaacaaacatcattattacaaggaagggggggccccactttgggaacgagggatcaaaaaaaaaaaaaaaaggactagccccaatttcaaattggaaattttccaaaggcacacaagggaagcttattcaccggggccaaattcacccacacccataattttttttgaacccaacgaaagacccaaacctagcaggctaatcaaaaaagccccttgtaaacattattaaaccaaccaaccaaaaaaaaaggggccccgctagctagttagctagtaacaaaccccaggggctatgccaacttttttatgggcgaaatcaaacaaaaccctaaggttttggtgctgaaaggtggcaatgacgttaaaaaccgagttcacattggggggggccgccgccatcgaaagacaccccaacaaacccgggctggtaa

SEQ ID NO: 23657 - DNA, 179 bp, Glycine max
  Clone ID: PAT_MRT3847_121364C.1
aattgttagtattgtatatgaatgggaacatgtggaaaattcgagtttattgctgtcagaatcaaagcagggagaataagtttgttaaaaaaacaaaaatagtgctatttagtgaccacttatattttatgttgtgactagtgaccacttactagtgacttcagggttgattacatgaa

SEQ ID NO: 23658 - DNA, 330 bp, Glycine max
  Clone ID: PAT_MRT3847_121365C.1
tgagcatggtctagctatctcgatcgaactgtccaaggtcctgctcactggagataggagaggaaaagaaagatggagaggctgttcgggccgcgccataggaaggggaagacagagaaagcgcagggggtgcgtgagtgggcggtctgaaagcgctgggtgcgaacacggggaatgctgctatgaactcctacaactgacaaacgcggtagcgatcatggtaacaacatcacacaaggtcgtagcagtgcaaccagaccgagctgctactaattctccactataactatgctgaggtgtgcggcaacgtgggttacaggcgtgggggtg

SEQ ID NO: 23659 - DNA, 263 bp, Glycine max
  Clone ID: PAT_MRT3847_121366C.1
cccacgcgtccgcccacgtttccgcccactcttccttttgaatatagacaagaacacagagagagaccttcaaatagtggtagagaaagggtcacagctcctaaacaaggccaaagctgagctcgttgattttacaagctatgcagatgtctcaaaccagccagttcaagacccccaagtgcactaacaacccggttcgtttgtaaatttttagtgaatgcaccattcaaacatttcgcattactgcttatatatagttcaat

SEQ ID NO: 23660 - DNA, 567 bp, Glycine max
  unsure (1)..(567): unsure at all n locations
  Clone ID: PAT_MRT3847_121367C.1
gcaaaatacatgctttagctagataggaaatgtgaacggcaaggtgtagaaaaaaaggcaagagcataaatacttcctcatgtctgaagtttgctcttgttttcaaatcaactaaagatggtgaacccaaatctcagaacagacccttccaccatttacaaccttatcaaatcctacgcactttccccctcaaccatcctcaaagcccataacctcttccaacaaatccaccgacccacgttgcccttttggaacatcatgatccgcggctggtccgtcagtgaccaacccaacgaagcaattcgcatgtacaacctcatgtatcgccagggcctgttgggtaacaacctcacatacctttttctcttcaaggcctgtgctcgagtccccgatgtttcttgcggctcaacgattcatgcccgcgttttgaaacttgggtttgagtcccatctctatgtttccaacgccttgattaacatgtatggctcttgtggtcattttggtcttgctcaagaggtggttgatgaaatgcctgagaaggacttggtnttgtggaattccgtggtt

SEQ ID NO: 23661 - DNA, 351 bp, Glycine max
  Clone ID: PAT_MRT3847_121368C.1
tactgtctgaataatcagactattggtgttcaggattttgaagtgttgaaggttgttggccaaggtgcttttggtaaggtgtatcaagtgaggaggactggtacttctgaaatatatgctatgaaggtcatgcgaaaggataagatcatgcagagaaaccatgctgaatatgtcaaatctgaaagggatatattgacaaagctggacaacccatttgttgtgcggatcagatatgcattccaaaccaaatacaggttgtaccttgtgcttgattttgtcaatggtggccaccttttctttcatctctatcaccaaggcctatttagggaagatttggctcgcttctatgct

SEQ ID NO: 23662 - DNA, 406 bp, Glycine max
  Clone ID: PAT_MRT3847_121369C.1
agctgcaaaagaagccaagaagttgctccatgatagaagctgcttagatggaccagattcaacatttcagttgaaggtccctgctaccatgcctgtggtcaaggaactctgcggactggacattgtacaaacttacttgaaatggaaaatgggcaacaagtaaaggaactcaactcactttgaatatagatcaatgatttcatttttttcttgggtgaaaaataacttgtgtttagatttcacgtatataagagacacaaaggccaggccaagactgtccagctatattgattttgaatactggtaggacatagttatgtactgtgattaggaaaaattcatatattttagtctcaaaaaaaaaatataaatataagttaattttaactaatctttatttatttat

SEQ ID NO: 23663 - DNA, 335 bp, Glycine max
  Clone ID: PAT_MRT3847_12136C.1
gttgtgttgtgttgtgttgtgtaacaatttctcagttgaaagcatcccctgtgagggcaccttccctgcatacagcgcacttggacgtgcggggttggagagctaaagttgtgctggcttacagccgtggctaatacacatcaaacctatgtgtatggccaaaacttgaaaattatgtgggatgtcttatgctgcactctggtgttttgtgtctaaacaaacacccttagaataaagtggtcatttcttgcccttgagcaagttcaagtgttttggacttgtgatgggtgtgttaaggtcatgggtgccttttttttatatatatatatatatat

SEQ ID NO: 23664 - DNA, 316 bp, Glycine max
  Clone ID: PAT_MRT3847_121370C.1
cggttaaaagataactcccttatgatacgatcatctctaattactacagggacacatctttacaatttctaacgcgggaaaatgcttacaacatcattgaactgcctgaggcccagttctttgcatccatttcctttgattgatatccagatcctacgcgaactggatgcattttcagaataactctcttaactacacatcaaggcaaacgcgtgctatatacagcattatttacaagccgatactaatgtagtgctacactgatgtccacgctggagactataggcttacattccaacattccctcttttggaga

SEQ ID NO: 23665 - DNA, 322 bp, Glycine max
  Clone ID: PAT_MRT3847_121371C.1
ccaatacggctcgagcatctttctactaaccaaaacaaaattccaaacaaattattaataatgccatacaaggaaatcctaacaggaagctctacttataagcgtggaggctctctcacattaactcacaaatttctccaatcacttttattactctctcccttcaaacttatatcacaatctctctttcacacactatcactttgaatttccttgcaattttttacaccatcaatccccactgggtcacgcgaacatacatatcacattattcatacaaaacactcttaatttcccaccccttgtaacattactctattca

SEQ ID NO: 23666 - DNA, 236 bp, Glycine max
  unsure (1)..(236): unsure at all n locations
  Clone ID: PAT_MRT3847_121372C.1
ccgactcagtcacccctacaaaaccaataaaccttgttgctctacccgttcaaaatgatggctcagacagggcatcagagatacaancnccaaaaaagaaccccncnaatgcaaggaccagagccgaggaccgcaacggaaaacacccgcggggcaaccgagagcagcaggacgcaaccaaaacggaccaagcacccagcggccacgccacccaacgcacgagtcgcaacacccac

SEQ ID NO: 23667 - DNA, 266 bp, Glycine max
  unsure (1)..(266): unsure at all n locations
  Clone ID: PAT_MRT3847_121373C.1
ctgcaggtcccactcctatgtgataatgagagtgcaatctgcatggcggataatcctgttgaacacagncgnactaagcacatagacatccggggggggtttttgagagaccaccagcaaaagggagatatcgaagtgttctatgttagcaccgagaaccagctagcccatacctgtggggggcgggggggggggaaaaccttttgcggctgcgtagggagctatatgtcttagactgcgtaacctgnattgatctatagcataca

SEQ ID NO: 23668 - DNA, 342 bp, Glycine max
  Clone ID: PAT_MRT3847_121374C.1
gggggacctaaacagatttttttggccaggtccccgccctttaagtttttaacacaaggtcacaaaccctggtttatttacagggaaacccccttgggggtttcccacctgagttttccggtgcccccacgggcaacccttttttaaccacccaaagggggaaagcccccttgttttttccccccccccccaaaatttatttaaaccccgggggcggcagaaaagttttcaaggttttagaacccccaagagtgttccttttcagcatgttgttttggagagaaggggacccaccggagaaatattccgggggggggggggcctttgttccaaagaaggggg

SEQ ID NO: 23669 - DNA, 220 bp, Glycine max
  unsure (1)..(220): unsure at all n locations
  Clone ID: PAT_MRT3847_121375C.1
cntcaccaccagggcaacaaactactattattatatcaaaaaaacacaaaccgggtccacggataccaaatatttatcccctggggtcccaagagcatcaaacacaaattacaattcgaacaactttttcgaaaaggggtgcacacatgagaaaaagagcaaaaacccctgtacaagatttctagaaaaaaaatatattacggagggggggacttaaaaa

SEQ ID NO: 23670 - DNA, 508 bp, Glycine max
  unsure (1)..(508): unsure at all n locations
  Clone ID: PAT_MRT3847_121376C.1
caccagcagtggcgcttcgcgtgcaaggtgaccgttcggccttcttcgactgtgccatacatggttaccaggacacactatacgcccacgctcaccgtcagttctaccgtaactgcgaaatctccggcacagtggacttcattttcggctacgggacaaccttgatccaaagctccaaactcatagtgaggaagcctgacccgaatcaacagaacatagtggtggccgatggcacggaccagaagaacatgccgacaggagtggtgcttcagaactgcgagatcataccggaggcggcgctggtccccgacaagatgaagttcagatcatacttggcgaggccatggaaggcatattcaagggccatcttgatggagaacaccattggtgattttattcagccagatgggtttcttccatggaatggcaacctgtatcttgacacgtgtttctttgccgagtatgccaacaccggcatgggtgccgatactcaacgtanggttaagtg

SEQ ID NO: 23671 - DNA, 1264 bp, Glycine max
  Clone ID: PAT_MRT3847_121377C.1
ccacgcgtccgattcggctcgggaaaaaatctaaaactttcgttctagaaaaccagaccaaacttttctttctacggtggctccaatttggccttaacgaaacgaagaatctcgcatcgatcgcgattcgaacatcggaatctggaagcaagcgatgtcaacctcgagccagcaccagttccgatatacacaaaccccttccaaggtcctgcaccttcgcaacctcccctgggaatgctccgaggaggagctcagagagctctgcagacccttcggtaagatcgtcaacaccaagtgcaatgtcggcgccaatcgcaaccaggcttttgtcgaattcgtggatctaaatcaagccatttcgatggtttcatattatgcttcatcttcagaaccagctatggttcgtggtaaaactgtttacattcagtattctaatagacatgaaattgtcaacaacaaaagccctggagatattcctggaaatgtcttgctggtaactattgaaggtgtggaagctggggatgtgagcattgatgttatccatttggtgttttctgcttttggctttgttcacaaaattgctacattcgaaaagactgcaggtttccaggctctgattcagttcactgatgctgagaccgcttcttcagctagggatgcactggatggaagaagtataccaagatacctgcttccagcccatgttggttcttgtaacttgcgaatttcatattccgcacataaagatctgaatatcaaatttcagtcaaatcgcagcagggactacacaaatcccatgcttcctgttaattatactgctattgagggggcagtacagactgctgtaggccctgatgggaagaggaaagaacctgacagcaatgtgcttttggcttccattgaaaatatgcagtatgctgttactgttgatgtcctccacacggtgttctctgcatttggtactgtccagaaaattgctatatttgaaaagaacggtcaaactcaggcactgattcagtaccctggcactaatcctgtaccccgatatcataacggcatcagctgctagagaagctctagaggggcattgcatatatgatggtggctattgtaagcttcatctatcatactctcgtcatactgatctcaatgtaaaggctttcagtgacaagtgtaggggttattctgcgccgggggaaaaatgaaaaaggggggaatattaaagatatccttagaagcaatgtggacacttgatcagaaagag

SEQ ID NO: 23672 - DNA, 428 bp, Glycine max
  Clone ID: PAT_MRT3847_121378C.1
gaaaaaatggttcgataatcactatcagcctgcaaaattggatttgaatgtattcgcctagtgcactcaaaacacaaatctgaactgttaaatgaagatcggacagtttataggggcggctgtttattagaaaccagattatatgagctagaatgtgacccgatataatcttttattagacagccataatatattgactgggccagaattttaacactgtctctgctggcaaaacttgggcgtagcccaatttaagacggattgaataaacatccccttttaaccgattgacaaagaagaaaaaacgcttccccatgcacgactttacaagaattggaagcaacctgaaggggaaatggcactcatcatgaaaatgctacattattatcattggctatgatgggtactggcatcttgacttttatctt

SEQ ID NO: 23673 - DNA, 1607 bp, Glycine max
  Clone ID: PAT_MRT3847_121379C.1
cacccccacgaatatttagcattttcgttgcccctttttttttctcttaaatatcttttaataataattttgccgagacagcttgaggcttaggtcattgaatatcaaccatatttcccgtatataaagaaccgttgctcattcttagtggccacagttcacactttctttctttcttattgagtttttgggcttctcacttctctctttctatctttctttcagcaaagccaaataggaacacgctctcaaacgcagtgattgatttttggtaacagagttcaattgaaatttgaaacatggattgggttcgaggagacgccctcgggcgaggaagctttgctaccgttagtttagctattccaacgacaaatccgaatcagtttccgtctctaaccgccgttaagtccgcggaggctcaaacctcgtgctggctaagaaacgagaaacacgtgctggatcgcctaggttcgtcgtccgaggataattcgctgcttcggagacgactgcagtttcgagaacggcgttgagtactacaatctgttcctcgaatacgccgccggcgggagccttgccgatgaattgaagaatcacgatggccagatttccgagcatgaggctcgggaatacacgagggccatcgtggagggtctgagccacgtgcacaaaagcgggtttgttcactgcgacataaagctgcagaacatcctcgtattcggggacggaggtatcaaaattgcggatttcgggcttgcgagggaggcagggcagagacaggagaagagtgaatgcagggggactccgatgtttatgtcgccggagcaagcgaccggcggcgagtgcgaatcgcccgccgatatatgggctttgggatgtgcagttgtggagatggtgaccgggaaaccggcgtggcaggtggagaatgggtcgagcatgtggtcgctgttgcttcgaattggggtgggacaagaggttcccgagatccctaataatttgtccgaagatggaaaagatttcattgaaaaatgtttcattaaggatcctaagaagaggtggagcgcagaaatgctattgaaacacccttttctactcaacgatgacactgtttcatttaagcgcgttcatgagtcgcccagaagccactttgatttccccgattgggtttctagcgtggcgaattcgcttcccagttcgccggaatttcaagaaaagtggggttttgatgatgagttctgttcgccggaggaccggctccggcagcttttgactgttaatcggccggcgagttggtcggaatcagatgggtggagtagtgttaggtgaaattgggggttttcaagattgttcaacgaaatggttcgattttgattatattcagattctttgatttttaattgttgtaaattgggtaggatatacatacatacacattacattcatgatttgtgaactgactttgatggaagagttttaacttgtgccggttgtggcgcgttgtacagaggctcattctgccgtataaataccatggttttgcttttactcaaaaaatttttaatttttgtaaattgggtagatatacatacatacatattcatgatttgtgg

SEQ ID NO: 23674 - DNA, 363 bp, Glycine max
  Clone ID: PAT_MRT3847_12137C.1
aaccgctggagctgaccatccccagccccaaggaaagccgtaaagcgatctaagcgtagccagagcacagtgagtgagccacagggctgctactgggcacacagggcaagcggcccgtagcaacgccggataagacatgttttacagatgtggttgaggagggagcaatcaccagtgggggccgagaggagtagcaggccgcgcaagtagggagtattgagttgacgattgagcagtgttgttacgtgcagtagggcggggtaacgtggaacaaaacgcgtaagggcgtggtgcgacgcctgcacgtgcagtccaggtggacgttgcaaccaaaatggaggcggtctcagatgcggcacagta

SEQ ID NO: 23675 - DNA, 164 bp, Glycine max
  Clone ID: PAT_MRT3847_121380C.1
caatatcgtctagctagctagctagctagcaagtagcaatgttaaaggaccaaccacaaccagattggtcctgagcccattggtccgggttgcagtccttgatccgaagaactgtcgaagagttccaatccctgaatcggtcacatgcagagccttgctagcta

SEQ ID NO: 23676 - DNA, 743 bp, Glycine max
  Clone ID: PAT_MRT3847_121381C.1
ggtggaaggaccaatccctccctcaaaagtagcatatgttgccaaagaattatatgatatgggttgctttgaaatctcccttggtgacacaattggagttggcacaccaggaactgtagttcctatgcttttggctgtgatggctgttgttccaatagataagatagctgtccactttcatgacacatatggacaatcccttccaaatatacttgtgtccctccaaatggggattagcacagtggattcctctgttgctggtcttggtgggtgtccatatgctaagggagcttcaggaaatgttgctactgaagatgttgtgtacatgttgaacggccttggcatcaaaaccgatgttgatcttggaaaattaatattggctggggaattcatcagcaaccatttggggaggccatccacttcaaagactgccattgccttgaaccgtgtcacaagtaatgcttccaagatttcacattaagtgtaccaaatgtatatcaatatgacaatatgcttcaagtagtgacatatgatcactctatacatattatgttccttttgttctacatgctagtaaaagaggaataacatgttcactaaaaaaaaaaaaaaaaaaaaaaaaaaaaaaaaaaaaaaaaaaaccaaaagttgcttatttgaagcttatcttatcattgtacaacaaaagttttttttccatgcccaggaatcaggtagtgaattgtaaggatgagtaaaatcta

SEQ ID NO: 23677 - DNA, 202 bp, Glycine max
  Clone ID: PAT_MRT3847_121382C.1
gacagatggggaaaaaaacatatatggagaaatcgtgaccatagaatatgacccttatcgtatgcgtacatttgtctcatacactatggggatggggagaaaatctatatgttacaccctaaaggggctataattgcagataccattgtttctgatacagacagctctatacaaatgacgaaatgccctaccttagagtgcg

SEQ ID NO: 23678 - DNA, 2103 bp, Glycine max
  Clone ID: PAT_MRT3847_121383C.1
cacatacacacactcttcaatcaaattgaagcagaaagccaaaggccagagagagccctgttatctacggagagacccttacactccaaagcttggccacaattgaaggacgagcattatccctttggattaataaagccatctcaaatctcaattccaataatccgttagcacttttttcagtggctctggtgctgccattgcgttccaccaaccgccactgccacacatacacttcactacagacaaataaatttcacactcttttgtctgacacgtataacattctgaactaaaactacttggtttttcccacaccgaatactcttcttcaatcaagcgaaggtggtctcacttgactcgattgcaagtgatccacgacacactgttcgcttcacaaaagcttcgaatccaattcctcagtaacatctgcaagaagtcttctccttcaccatgccaccaaagcctttagactatgggtcaataaatgaaaacgtgaagaagagtcaatatgctgtcagaggtgaattataccttcgagcttctgagcttcagaaagagggcaaaaagattatatttactaatgttggcaacccacatgcattgggacagaaaccactgagcttccctcgtcaggttgttgctttgtgccaagctccattcctacttgatgatcctaatgttggactgctattccctgctgatgcaattgcaagagctaaacactatctttcattgacctcgggcggtttaggcgcttatagtgactcccgcggccttccaggagtgaggaaggaagtggctgagttcatactcaggcgtgatggttatccaactgatccagaactcatatatctcactgatggtgccagcaagggggtgatgcagatattaaatactatcatcagaggtcaagacgatgggattttggttccagtcccacaatacccactctactcagcaacaattgctctgcttggtggtacccttgttccatactaccttgaagagacagcaaattggggtcttgatgttaatgaacttcgtcaatcagttgagcaggctcgctttaaaggaataactgttaaagcaatggtgatcataaatcctggaaaccctactggtcaatgccttagtgaagctaatctaagagaggttttgcaattctgttatcaagaaaatttagccttgcttggagatgaggtttaccagacaaatatatatcaggatgaacgacccttcattagttctagaaaggttttgatggacttggggccacctataagcaaggaagtccagcttatttcttttcactccgtgtcaaaaggttattatggtgaatgtggacagcgaggtggatattttgaaatgaccaacattcctccagagacagttgatgagatctacaaggttgcatcaatatcacttagtccaaatgttccagcacaaatatttatgggagttatgctccatccacctcaacctggagatatttcttatgacaaatttgttagggagagcaccggaatacttgaatcactgagaagaagagcaaggctaatgactgatggattcaacagttgcagaaatgtggtttgtaattttactgaaggtgccatgtattcattccctcaaatacgtttgccgccaagagctttagaggctgctaaacaggctgcaaaggttccagatgttttctactgcctcaaacttttggaagccactggcatatccactgttcctggttcaggatttggacagagagaaggggtcttccatttgaggactactattttaccagacgaggaagacatgcccgctattatggatagtttcaaaaagttcaatgatgaattcatggagcaatacgaagacaatagaggttattcaaggttgtaagaaaattatcgtaaaagatgcattatactcttgtgcttttgtaagaaaaacataacctccctttctactatttgtccttggagataattcttaaaccttacactttcttctatatcatctctgaacttacaatatttcggctgcatatttaatctctcttgaacctttattatcttgtggcatagcaatcaaacaatcgtcttg

SEQ ID NO: 23679 - DNA, 415 bp, Glycine max
  Clone ID: PAT_MRT3847_121384C.1
acctcactaatttaacaaaatttattttgtaaactttgacggccttgttctgagccatatatgtttttaataagttatatttggtaatagtaaagggaatgtaaaccttttacccacgtgaatgtgtttatcagtatttttatatggttttatttatttatatggatattgagggagagggggcgacatttagtggtatcagagcaggtcgaacctttcgaccagtgtgttatttgcttaccatattctggggggcactctgggtgattacttatgaatgcttttggtgagcatgcctgaattgccaattatattttcctttgcgtgatcaaaagacactgaatgatgcttgtgatgtgcgatgcatccttaatgtctggtataccataaatccattgttgaggcatgagatatg

SEQ ID NO: 23680 - DNA, 550 bp, Glycine max
  Clone ID: PAT_MRT3847_121385C.1
gtcaaaaggttattatggtgaatgtggacagcgaggtggatattttgaaatgaccaacattcctccagagacagttgatgagatctacaaggttgcatcaatatcacttagtccaaatgttccagcacaaatatttatgggagttatgctccatccacctcaacctggagatatttcttatgacaaatttgttagggagagaagagcaaggctaatgactgatggattcaacagttgcagaaatgtggtttgtaattttactgaaggtgccatgtattcattccctcaaatacgtttgccgccaagagctttagaggctgctaaacaggctggaaaggttccagatgttttctactgcctcaaacttttggaagccactggcatatccactgttcctggttcaggatttggacagagagaaggggtcttccatttgaggactactattttaccagacgaggaagacatgcccgctattatggatagtttcaaaaagttcaatgatgaattcatggagcaatacgaagacaatagaggttattcaaggttg

SEQ ID NO: 23681 - DNA, 3060 bp, Glycine max
  Clone ID: PAT_MRT3847_121386C.1
gatgaaacgagcaaataaagccaatactaactctagtttcgtattgactttttctttacttatttatgtttgaacatactagagaaaaagtaaataaaaagaataatctaaatgaaaaaacatcaatacttttattatagccaacagcagcattcagagtgacatgggagcaccgaaaaagtggtaactaattgcacactcggataacaatagagacaaatttcacacacacaacaaattaatcatcagcaaaatacatcagttggtgaagttgttgccagctgaagagaaactgcattccagtccacagcatcaccacagtgcttgtcttttgttgtagccactggtaactggagaggaccaacaccagaggtttcagttatagacacctttcttgcagcaactgccttcagcctgtacctctcagctcttgaaccaattacttgccctaacaccgatgccgcaatagtaaatgccattgctgatttaggcatcaagacagacttccttagcattgctaagaatggaacagctgcatggactgcagcaaaccatgttggcgaaaatttcttagtatgttctcgccatatacccaagggaacattagccgccatgcccagcatcccaatcacgaggaccttcgtaggcagggactgaggacggaggttctttgcaaatgcagtgcgtgcgatagctgcccgcgctgcaactactgcttgtgggcacttgtattttatgcctggaggaggctgaataacctttgcaacaagtggaaggacattactaactgcccggtatgacttggcgatggggcagttaccgttttgcagccaatcattgcctgcctcatgctttgaaccatcctgcgaagaaggattattttttgatgatttggattttcttttctggttgttccacttctcagaaaatgcatcaaaaccgaaagccccaccaaatccaaatgatgacagactaatagtagctgcctttgcagctaaaggattgaattgggatttgggaggttctgcctgtactttcttctctgaaggccgaaaagatctgtcagataagggtactacaccatcactcccgtggaaaagcctaaatgccaaatcaaaattgggaccatcttcaaaaattggacctttagctccacgaacaggcattggtaaagcccaaagcctttagactatgggtcaataaatgaaaacgtgaagaagagtcaatatgctgtcagaggtgaattataccttcgagcttctgaacttcagaaagagggcaaaaagattatctttactaatgttggcaacccgcatgcattgggacagaaaccactgagcttccctcgccaggttgttgctttgtgccaagctccattcctacttgatgatcctaatgttggactgctattccctgctgatgcaattgcaagagctaaacactatctttcattgacctcgggtggtttaggtgcttatagtgactcccgtggccttccaggagtgaggaaggaagttgctgagttcatactcaggcgtgatggttatccaactgatccagagctcatatatctcactgatggtgcaagcaaaggagtgatgcagatattaaatactatcatcaggggtcaagacgatgggattttggttccagtcccacaatacccactctactcagcaacaattgctctgcttggtggtacccttgttccatactaccttgaagagacagcaaattggggtcttgatgttaatgaacttcgtcaatcagttgaacaggctcgctttaaaggaataactgttaaagcaatggtgatcataaatcctggaaaccctactggtcaatgccttagtgaagctaatctaagagaggttttgcaattctgctatcaagaaaatttagccttgcttggagatgaggtttaccagacgaatatatatcaggatgaacgacccttcatcagttctagaaaggttttgatggaattggggccacctataagcaaggaagttcagcttatttcttttcactctgtgtcaaaaggttattatggtgaatgtggacagcgaggtggatattttgaaatgaccaacattcctccagagacagttgatgagatctacaaggttgcatcaatatcacttagtccaaatgttccagcacaaatatttatgggagttatgctcaatccacctcaacctggagatatttcttatgacaaatttgttagggagagcaccggaatacttgaatcactgagaagaagagcaaggataatgactgatggattcaacagttgcagaaatgtggtttgtaattttactgaaggtgccatgtattcattccctcaaatacgcttgccgccaagagctttagaggctgctaaacaggctggaaaggttccagatgtttactactgcctcaagcttttggaagccactggcatatccactgttcctggttcaggatttggtcagaaagaaggggtgttccatttgaggacaactattttaccagctgaggaagacatgcctgatattatggatagtttcaaaaagttcaatgatgaattcatggagcaatacgaagacgatagaggttattcaaggttgtaagaaaatcattgtaaaagctgcattatactcttgcgcttttggaagttcttcatccatccatccctcggagagaaaaaaaacataacctccgtttctactatttgtccttcattggagattattcttaaaccttacactttcttctatatcatctctgaacttacaatatttcggctgtatatttaatctctcttgaacttttatcattttatgcttggcaatcaaacaatcgtcttgaatgtgatggttttgcgtcatgtgtttaaatgtcctaagaaaaagatttgacatagatatatataaggtctagatatgtttttttgtcttggtaagttagtgttttttttattcctgtaagtttaactttttttaattttagtttcaaaaaagtgtttttttttttaaatttgatccctataagatattgtactcatttttagtcctt

SEQ ID NO: 23682 - DNA, 252 bp, Glycine max
  Clone ID: PAT_MRT3847_121387C.1
cgctcgactctcactcacaaacacacactgaactacaacacatcacaagacacatggctgacccaaccttcatcatgatcaagcctgatggcgctcaaagacgccttattggcgagatcattagcagatttcagaagaaaggtttctacttgacaggtctgacacttgttagtgtggaccgtccttttgctgagaagcactatgctgatttgtctgccaagcctttctttagtggtttggtggattacatta

SEQ ID NO: 23683 - DNA, 380 bp, Glycine max
  Clone ID: PAT_MRT3847_121388C.1
aaaaataaaaattaaaaaaaaaaaaaaaaaaaaaaaaaaaaaaaaaaaaaaaaaaaaaaaaaaaaaaaaaaaaaaaaaaaaaaaaaaaaaaaaaaaaaaaaaaaaaaaaaaaaaaaaaaaaaaggggggggccgttttaaagaaccaaagtttacttccccttgcttgcaacgtaatagtttttttatagggcccccaaaattaaattaatgggccggggtttaaaaacgttttaactggaaaaaccctggctttaccaaatttaatcgctttgaagaaaatccccttttcccaagttggggtaaaagcaaaaaggcccgaaccaatcgcctttccaaaaatttgcccaccttaaatggcaaatggaaccccccttttac

SEQ ID NO: 23684 - DNA, 402 bp, Glycine max
  Clone ID: PAT_MRT3847_121389C.1
attgacagattcacttgttcacaccagatcaaatgaccatgtacttttttattttccataacaaatggttctgcagtaagaatgatactaaaaaaatacatcagccttacagcacatgaaagctaaatgttatatgaaggtctcctgaagctttcttataaattgcatgaccttttctgcaatacatcaaggagataataaaactcaagccaatcacgttcattcttgtcacagggcatgacgagcagatttacgacaagttattggatctaccagggatgatactccaagttgcgaggaagatatcttagtaatctttcgcatctgggattggtttgatctcccttataactcctccaggtcaaactctttgccgtgaatgagcttccctatagcttttat

SEQ ID NO: 23685 - DNA, 389 bp, Glycine max
  Clone ID: PAT_MRT3847_12138C.1
actgttgctacaagacgacggaaggggacgccaccccgatatgcactgatccgcgcacttggcaccggcaccatgcgacggcgtccgctcactacttgcgcgcagtactcgctgagccctctcgcagcgccctgacaaaccttcccaaaccaaacccataaatgaaacccatggctgcggcggcgatttcctcacactgtttcaacctattgtcgcaacttcgccccaaacactcgctataaaccaggtttcgtaggaactgtcacaaagatcaggctcaaccctaagaacctgacgtgactgcctcgagtgactcatgtacgcgatgcaagcatctgcttcaggctattacggatggcaattcctatctgtatgagggatcaagacaa

SEQ ID NO: 23686 - DNA, 1024 bp, Glycine max
  Clone ID: PAT_MRT3847_121390C.1
gtcagatcgtgtttgcctctctgtctgtcttcctctttctctctctctctctcaagtctcaaactaaatttgttagttcaactctctctatttctactttcttctctagtcacttccaacacttattcaatttttatctttcttttgctctttgtgcattataatcttctcttgtcattacaacccccccgttactcaaatcagaaactctcatttgaagctaacaaacaacaaagatcaacggatctatctaccttcagccatgctccgattttctttcaaccaacgattctggctttcttcttcgcttcttcttctcgtcctcctcattgctctctcttcttcttctcttactgagagtagtttcaattctcaagcggagcatactggtcggaaccttcttcaggctaaaaaaagttgtcctgtgaatttcgagtttttaaactacacaataatcacatgcaaatgcaaaggagcccagtaccctccaagcaacgctgtgcggcattgaaagagttgttgcttgcccttatgccaatgttttaaacgatttaacgaatgattgtgccacaatcatgtttagtttcattaatctctatggaaaataccctcccggcttctttgctagcatgtgtaacgaagggaagaaaggtattactattaactgtcttcctgctgctgctgcatcgccaccatcagtatcagcagatgacactgggatgaaaactcaccagatgcgtgtgtgagtgtgactgtagtagtagtagtctattttcatgttgtaatgttacatgtaataaggtttgttcagtaactggacaagtactaaaccacttcagtttaaagacatgttaaattagcagttgtcctttgtagacaatttataagtagtaatatgtttgtttccaagtctctagtaggaaatgcctcaatatttactttcatctagacatggcaatggggtgagacaaggatgggtatcgggtatcctgttctcatcctatcttcgattcagatttgtaag

SEQ ID NO: 23687 - DNA, 1507 bp, Glycine max
  Clone ID: PAT_MRT3847_121391C.1
ctgcatattaccttttcgttagagagagaccaagtcatgtatgtagaataacttcttattacaagtaagatgttttggttttatcacctttataatactaaaatgacattttaaagagtatccaaactacaggcatgtaatggtgtatcaagatgaaggattaacagtagaaaaattgcaggtctgcagcattagtaggaaaagaatataacttcatagctaacttgaaacttcattgtatttgaatacacagtcatacaaacgtccaccgagaaattgtgctacctcgggatgtttcaccattccaatcttaagagaatcacatttaaattgagcatagagatttgtttctattccacgacccatcccttctaagatgacaagatctgcatcgctggcaaggtaagcaagctcctgtgacactcttgtaagatcaatgacaggtaaatcattgccagagttcgcaattaagagatttgaagtactgacacccacaagctgtccatcttcatcctttaactttgatataatttcaactagctcagaacaagtcacatcattgatggatggtaagtcattagcagccaatacaacctgactcccacgccgaagtagttctcttgcaaatggcataatacccaaaatgatatctgcaccagagttatcaacaaatatgataaccttcttccatgggttcttgctccatttcaatttgaaagtgtcaagatcatcaatgacccaaggtcgaggaacgagattttgacaactagccaaaaaggacattccatccttagagaaaacctctgcaagctgtgcagaaccaagatcaaatatgtttccagcaaaaattcctctaactagattctcaagtcgcttgccttcatcttcaatggcatcattaagatgaacaacattctcaaacagtgagatggcttttgcattttcttcatccttgacttttttgaagatatctctgaatcccaattctctaagcacaagttcacgaagtctgcagagaagaatgcaatcaggaggcccaccatgactttcaggatctttcttcaaatcttcaagtatatcagcatatctttgagcaaatttttcagctttagctgcagcatcaggaacagaagtatcactctctgcacgcttcttgaaagaggggattgagttgaggaagagatcaatccaagagatttcggtgggagtgggcttgcgagggttatcggaggggaatctgtaaggaatggtgcaagctctgtagttggaatcgattggtgtcagcaacaacgggaattccacaagctctgatgcgctttccatctgaatgcgattctcaaaataggatcaaacttgtcttcgagtctaagaaagaagaaaaaggcaaaggaatcgctgacgtagtggtgcttctctccttctacttctacttctacttcccacacattactctcctctcgtgagtcaaatctcaaaactcaaaactctcagcttcttgcggctcgag

SEQ ID NO: 23688 - DNA, 465 bp, Glycine max
  Clone ID: PAT_MRT3847_121392C.1
cgaaacattggtgaagtcgacgaaagtttttggtgatttttttgttgccttccgcgcgttgaacttcttcccttccccgccgtccacggcggtcgccgctttactccgacggccaagctccccggaggctgttaactcgtaaataccttttcgcttctctcagcttatcacaacaatctctgattcttcttcttttctctagcattgaagaaggaggcgccttgggtttttaaatttttatagtaattcattgaagcggcaaaaaagttaattaaagtgacgttatggtgatttaatgttcaaatggagtggttttagttagttcaattaaacccatctctagtttgggaaatcttggcttcaacaccttgaagaagctctcaagtgattagagagagttcacagtcctctggcatcacaatgatgacaccagaatcagagaggacttaggaaaacatgcaatct

SEQ ID NO: 23689 - DNA, 245 bp, Glycine max
  Clone ID: PAT_MRT3847_121393C.1
gcgtccggcctaccgtctcttattctcactattatatttctcgctcgtactaatcttatgtttggtatggctcgtactcttgcaaaacatgttgctagcaagcacgcgccattatgagttaagcgcctatacctcatacgtctagataattactccatcatcatgcactaccaattctacacctacgatgtgtacctctagacgctctactgcttcatttaacctctgataatcggcaatgaacg

SEQ ID NO: 23690 - DNA, 131 bp, Glycine max
  unsure (1)..(131): unsure at all n locations
  Clone ID: PAT_MRT3847_121394C.1
tncgaaattttgggacttctgtgaatgcgnantttgaatttaggttttnatggtttaatgtgagtantgggaagttaaaaagtngaaattctgaaatgngaatcacntcacacttgantcagaacaaaant

SEQ ID NO: 23691 - DNA, 367 bp, Glycine max
  Clone ID: PAT_MRT3847_121395C.1
ggcagcggagggtgggccctggcagtgagcgcccggtggctcagcaacagaggctgtagctggggtagagagatatgaagccattccagtcacgtcctatgcgcacacttagtggtatcatgcggattgtgacccagcagcatcaggtttaactctcttctaccatgcacggcccctaatgcatccacgcatcaccatcggccccaaaaaagtactagcgatgcgcatagcatatgagaataacgcttgagctgccaatgcgaaagcggtcgaagcggtacaacagccgcccgtaggccttataatagtggcggctacctcaaatggattacccgttgcctcgctgcccaaaactgagacgactgag

SEQ ID NO: 23692 - DNA, 586 bp, Glycine max
  Clone ID: PAT_MRT3847_121396C.1
gtactagatattgatttattctgtacggacataataataggacaggctttgcataatgtgcagagcgccatagccctatatatactatacatagagagtaagtcctatcctaatagagaccaaaattctgattatcataattcatatattttgagcaaatgcttctcttctgatcgttttgaatatttactagttcgcatgttgaacattgatgtaaggggggcatttgggaagtctcctgaaaggcagaaactaaaagctaatttcccgttaatatctggacctcttgtttgggcatccacggatttgctctttaaaagaagaaaaatctcttcttcttcttcttcttctttttgtcaagataagccgaaagctcttcttgcttaacaagtgaatcctccagagccttcttggtagccaaaagttgtttctccaagtcatcggctcgagttatagttgcattcagcatttgctccttctcaggtggcatagcagtgggcttattattgatggtgacgattttctcctccaactcagccatgcgtttcatcacagtcgaaaactcagttgatgctgcagttttatc

SEQ ID NO: 23693 - DNA, 580 bp, Glycine max
  Clone ID: PAT_MRT3847_121397C.1
cggctcgaggagaatagagagggtcgtgctgcagctttcggtgatgatattgcaattgaatgccttgctacagagttcaagcgagagatatatgtggttggtgcggtgctggagctgaccactatgagcccctcattgctcatccttccgcctttgtttcccaagaaaaggttgctgtggtactgtgaggtttcgcggcctgcaattttgtggagtagagatcgagtagaattagaattttcttcaccctattttatgggccactctcaactgtttggcctcctgcattatggttcttctccgtcccaagggagaaaccaccacctaatcgggtagccatttgttttgttactgacatttagaatcaatcatctttgactctcttgacattggacaagcaggtttgccattgccgttgcctgctgtttgagcaaccctagagtattattgtattagtttcaccggcttctgttttgttgttcctgttgttgagttaattagagggtagtgtgttgttcaaattggaagagttgagttgcatcacatattaatgatgtggctttatcttattttctgggca

SEQ ID NO: 23694 - DNA, 476 bp, Glycine max
  Clone ID: PAT_MRT3847_121398C.1
gaccacaggtggccgcaccttattatcttaaacaaaagccgtcgttacttgacgccaagaatttctcaattggtgactacttctttgcgtacgaaacattaagggaaagaaaatcactctctgtgctggtcacagacttcgcgaatcattctcttttccactcttagtttatttgctgcacactctgctatttgatatacgacttcgtgtcagatttaaacttcttctgcacctttctcagttctctgttcaatttcaagttcaagctggagaaattctggattagtgctcccactctactatctggtataggactacacgggtagacttttgtatttccctactatgtttcactctcttctactcactgatccgcattgccggccaaagtggtcttatttgaaacacactagggcgtaggagcaaatgtttgctaaagtaattttgtctggagacaacacgctgactgagaaaac

SEQ ID NO: 23695 - DNA, 502 bp, Glycine max
  Clone ID: PAT_MRT3847_121399C.1
tcgcggtctcgagggttagctagaaattgggatagatatatcttgatcatgggtctcaattctgtctatagaaaccttggagagatattatttgcgcgaagtggatcacaagagctacatgataggcgtgttgcctattgaacacaccgaaaggtatgtctgaacatagtcagacttggaaatagattgattagcgcaagatcaatcccgttgcatgtaccaacaaaactaacctgtctggaatacactgcagagcacaaagaccatggtagccccactagatgttgaagtcgaaagtgaggagtaaggctatccgttgaggcaactgttagcgtgttgatgacctaaaggtggggccttactctactttggaaaatggctgtaagttaaaaagatgatactgaaaaatttccttggaatggatgatatcaaggagctagatatttttcataatgctgaagataaacttattgtgaaacctttaaccagattggtcaagaga

SEQ ID NO: 23696 - DNA, 312 bp, Glycine max
  Clone ID: PAT_MRT3847_12139C.1
aaacaaaaaggctaaactttcaccaactatccggtaacattaatggggggaagcaaaaaaaaaacaaggccacaataaagggaaacattacagggggggctcaaaattcgaaaaaccctcacgggccacaaaggcaaactaattctttaattcaaaggtgggaagccctatgggataacaaaagcgggaaacaaaacgacccccccaactgtttttaacagggcataaggccccatcatggaaaaaggcccacagtttcgggtggaactgcaaccaaaacaatggccaaggccatccccctcacatagggaa

SEQ ID NO: 23697 - DNA, 1558 bp, Glycine max
  unsure (1)..(1558): unsure at all n locations
  Clone ID: PAT_MRT3847_1213C.1
ccacgcgtccgcgctactgtgtcttcccgcgcccactcttttctctgcgtcctgatttttgttctgagattaggttactttttctttacttagaaatcaaaggcagaacttcgctgggagagcaatggtgacagcaaaagtgattcaaatccatggaaatgtaaggactgtttctgagtctctttgattttcccatctgatatgcaaattttagtgcatttgagtcagatgggttgaaaagatctgtgtgcttgttataaaactaaattagaaatggcagttgctggtgtgcatatgtgactgtgcaatctactttcctaagggaatcccattcccagccatctgggaggcaaggagatggagggaggggaggcacccggtcaccttcggtcttgcaaatgtggcgagagattgaagatgagcaggtagtcagacaagttcaaggaagacccgggggaggtaccaaaggagtgatgggttggttgtggacctctcacaggaaaatttgcccgacagcagcaaccagagggaagagcatatgatagaggatgcagttttgggtgagaatgattctgaaacctggtcacaaagtcagaatgagttccatgatgaacaggaggaattaaacaattctagccgtgaaaactcctctgattttggagtagttgaaagggaaagagtgaggcaaatattcagggaatggatgaatagtggttctagggatcatgcatcaaatcattcccaaggaaataattcaaggggagaatggcttggggaaactgagcaggaaagggtgagtgccataagggagtgggtacagatgagcagccagcagagaggcgtttcttctggggaaagtagggaagaacaatcttctgaaattggtacccaaatcgaatgcgttcgtgatggatttgttgttaatcagaatgagggccaacaccaaactgagcatacacggcggggaatccgtaaattacgtggtcgacaggtgtttcttgatatgcttaagaaagctgagatggaaaggcaaagagaagttcaagaattgttgaaccatcgagttgtatctcattttccccatcgcaatcgcatacaggccttgcttagaggcaggttcttgagaaatgacagatcgattgataataacaggtccacttccattgcagaaagtgaattaggcttattgagacaaaagcagactgtatcaggtctaagggaaggtttcgtttttagaaaggacaattttggttgtagtcatgcaaccagtaacacatctgatacctcatccgagaacgacattgatgttaatacaattgaagacactggagctagcagcttacaagcagtcccaactgtacattctcaacaatctgaacctaataacagggtaagtgatggacttgagatatcatgtgatcagatctgctcaaaaggaaccatttgtgagaatttagattggcaaggctctactgctcatgtggaagcangagatttggaatcatctttcagtaccaggggtgaaagaggagatggcacttgaggaaatgttgatatg

SEQ ID NO: 23698 - DNA, 168 bp, Glycine max
  Clone ID: PAT_MRT3847_121400C.1
ggatttcggttcgagaccacacaaccctgttgaacccgtaatgttggcccgtatattgcgcctcttggcttgttacaaaatccccccttttccccttggaattctccctcatggcaaggttaaaaggccctatggtctcgcccctgtgcctaattacttggtcaggac

SEQ ID NO: 23699 - DNA, 249 bp, Glycine max
  unsure (1)..(249): unsure at all n locations
  Clone ID: PAT_MRT3847_121401C.1
agctgacttaccaaaggcaaaacccaagaataatgccttctttgggaagaacaaaggtggtggtggtggtggttctcacggaaggcactggtgatggtgatgatgatgtatgcatgtttgttccattgattcctgccatttctgcnctgtacaaaacacccttgctgggagcgggttactgataacctcacttctccaaaccactcgcttcatcatgaaaaataaaagaaaacaaaaagaaaaagcctc

SEQ ID NO: 23700 - DNA, 253 bp, Glycine max
  Clone ID: PAT_MRT3847_121402C.1
tgtcctttttttttttttttttttttttttttttttttttttgattttttgattttctgtgggtgatatttacttttgttaccccaatgttttttattgtgtgcaaaccaaatttttcttcgaccgccaaaaaaaaaaaaacccgccggacctacatccgaggggtaaaaattacccgttggaaaaaaaacccgccagtaaggaacacccccccccccgtaaaaaggggggctgggaggtccacccccccccc

SEQ ID NO: 23701 - DNA, 168 bp, Glycine max
  Clone ID: PAT_MRT3847_121403C.1
taatggtaccgctgctacaattccacaatatggttttgctgcgaaacatactactactgggagggtctcagctgcgtcatttctgtatccgcgtaaccactgctttcataaaatccaaccttcacaaatctgttcacttcacacttttgctcttagataatttatctc

SEQ ID NO: 23702 - DNA, 432 bp, Glycine max
  unsure (1)..(432): unsure at all n locations
  Clone ID: PAT_MRT3847_121404C.1
ggggttggggttttgttattattgtttgcttttttttttgggtttgtngtttttccaaaaaaaggatggaaggatggtttcttttggatttttgtgccgaaaatacaacaaagttccaagacaacctttgcaataaaagtcccaaagccccgacaaggaccaagaaggttttccccccccggtacctttttacccccttttttggcaggaatccaacacccgattggggggccaaatttattaaatttttttttaaaaaaaaacaaaaactttgttttcacaggggggaacaaccttcatcatggatttactctccccgggagaagagggaccttatgccctcccttttaaaaaaaaagaaaaagggggggttgatttttgaaaagggcccaaagggagggataaatttgtctaattccaactccttggggg

SEQ ID NO: 23703 - DNA, 346 bp, Glycine max
  unsure (1)..(346): unsure at all n locations
  Clone ID: PAT_MRT3847_121405C.1
gaatntgacatcaaatcgattganttgaaatctngaagaactcancttcaacctaantactnctttntctttatctctaaacaattcttcaaantnctncctcntaccacttaaactccattcntatctacctcaaanncttaaacctttatcatncatcctccaacctcccattccctactccctactcttcaaataatatttattcaaataacancancaaatantaacantttaacccaaaaccacataaaaattcantgaactnnactccaaataatctaaaaaancaaaaacanataaattaaaataaataaacacaacaaacccttnttctttctttaac

SEQ ID NO: 23704 - DNA, 195 bp, Glycine max
  Clone ID: PAT_MRT3847_121406C.1
aactggggtaacacaatactatatcgctccatctcattctgcgctctattgagctagattgtacctatcaggctctctgttcttcttttgtatgctcgttcgggcttttgacatcctttcctccccatctaatctctcaggtcatcagtttcactcaatgcagtttactcattacgttgtgtgtagatattatcc

SEQ ID NO: 23705 - DNA, 264 bp, Glycine max
  Clone ID: PAT_MRT3847_121407C.1
aatatctgcgcctttgcctgtcctttctcccactctactgaaacccggaacagattcccgcttgccttctgatgaagagaggttaggtaaagagagtttggaggataaaagccaccaggaggcaggctgcggggtaggagagggttctgagaggaggcagcaatccagaatacctccttttctagccagcatcccttgaacttttgaacggttgtgcctaccactggctggcacaccagggcaatgatttccctgcagaaggaa

SEQ ID NO: 23706 - DNA, 753 bp, Glycine max
  Clone ID: PAT_MRT3847_121408C.1
aatataatgtaccatacgtaaaggtgtgcacctattatcattcaaggaacaaacacataaaactgtgcatgaaaagagaatatcaaattggaatcataacagaaattatttttgaggactcattcatcagcaactacttcgaaaaacaaataagcttacgtcacactcaattcatcttaaaacaagactacaagaacaaacagaatgacttggcaatccatggtgttcaccatatacaccaatgtgcacatggagcatacttatttatgataagttattattatggctagaaaacagaaagaaaaagacaaacttaagcataaccaccttattaactaccatgcatcacattaatcatgcatgagttaactcatggtgcagctggtgctggaacacttccaccactgccgggaatgggaacctcataaccagggtttgggacaaaagtgtcatcaccaccaggaacataactgctacctggtggtgatcctgatcctgttgcggttcctgctcctccatttccattgccaccaggtaatggattttgaggtgtgagatgaaatttatgtggaaatccaacaggtccaatccctggaatatacaccccaccttcatgcttgaacaagaactcaggctctttcttttcctctgagttggagttttcgccaatgctgcgtccagcagctgttgtatcaaggaggaggatattggaaactagaacaagtgcaaggaaaaacgaaactttgaaagcca

SEQ ID NO: 23707 - DNA, 354 bp, Glycine max
  Clone ID: PAT_MRT3847_121409C.1
tgttggagccagagaaagcggatgagttcaaaaagggtgtcgagggtgcaaccaagtttctccttagcaagctgaaggaccttcaattttttgttggtgagagcatgaaggatgatgcgtccgtggtattcgcctattacaaggatggtgccactaatccgacattcctctatttctctcatggtcttaaggagatcaagtgctaggcttgcggcgagattagttacccatgttgggtactatctatgtactattgttatatccacaactatagttgtcctggttgaattgaactcaaaaaggtttgtttgagaaaaaactgtccaagaatggattgcttgttaaagctctatt

SEQ ID NO: 23708 - DNA, 2009 bp, Glycine max
  Clone ID: PAT_MRT3847_12140C.1
ttacacacatggctctctgtaaaaatatatagacctacatttgtttaaaaaagcctacggggttttaactatttgttggaaagtccagatgttgaattggtgaaaagtaatttttagtttcaatgcacgatagttttgtgttccttttgataattcatgttcgaagtttagtttacaacattataaattaaacataacgatagaagaccctccaaatggcatttctttctaccgtctgtcttcagaattgagaacccaaataaaatgagttttgccactaattcttcacaaagatggcacgagcagacccccattttctcaaacattagcaacaattaattaaacgatgcatcaccaaaacaccgaagagacaagaccgaaaatattggtaatagaagggaacagatatatagaaacttctgtgctatacatagcacatatatttgataacaatcatcattcaaaaaccacacatgtccgacagaagacgaaaaagtagacatcaaacacacgatatttcagacactctaataatcatcatctccttcaccatcatcatctccatcaccagactcggcaccaacctcctcataatccttctcaagagcagcaagggcctcacgagcctctgagaactcacccttttccataccttcacccacataccagtgcacgaaggccctcttcgcatacatgagggcaaacttatgatcaatcctggagaacacttcagccacactaggggagttcgaaatcatgcacacagccctctgcaccttggcaaggtcacctccaggaacaacggttggaggctgatagtttataccacacttgaacccaggggggcaccaatccacaaactggatggttctcttggtcttgatggtggccacagcagcattcacatccttgggcacgacatcgccccggtacatcaaacaacacgccatgtacttgccgtggcgagggtcacacttggccatcatggaggatggctcaaaggcactgttggtgatctcagcaacgaaaagctgctcatggtatgctttctcggcagagataacaggggcatacgaggaaagcatgaaatggatccttgggtaaggaaccaagttggtttgaaactcagtcacatcaacattcagtgctccatcaaacctcaaagaggcagtgagggatgatatcacctgggaaacgagacggttcaggttggtgtaggtagggcgttcgatgtcaagagatctcctgcaaatgtcgtagattgcctcgttgtcgagaagcacagcaacatcggtgtgttcgaggagagaatgcgttgaaaggacgctgttgtagggttccacgaccgaggtcgaaacctgaggggatggataaacggtgaaaccgagctttgacttttttccatagtcaacggagagacgctccaagagaagcgagcccaagccagaaccggtgccgccaccgacggcgttgaagacgaggaaaccctggagaccggtgcagttgtcggcgagctttcggatcctgtcgaggcagagatcgacgatctccttcccgatggtgtagtggccacgcgcgaagttgttggcggcgtcttccttgccgctgatcagctgctccgggtggaagagctgccggtacgcaccggttcggacttcgtcgatcacggtgggttcaagatccacgaagacggcgcggggcacgtgctttccggcgccggtctcgctgaaaaatgtgttgaaggcgtcgtctcctccgccaacggtcttgtcactcggcatctgtccatcgggctgaatgccgtgttcaaggcaatagagttcccagcaggcgtttccaacctggatgccggcctggccaatgtggatcgaaatgcactctctcattttctcggcaaagaaaagaaaacccttagaaaggaatggaatgaataaaagggtatgagaagttttgggcggcgtttatgaagacgccttttcccgttcgattgtccccttctgtcgtcttct

SEQ ID NO: 23709 - DNA, 2509 bp, Glycine max
  Clone ID: PAT_MRT3847_121410C.1
ggaggaacaaacacataaaactgtgcatgaaaagagaatatcaaattggaatcataacagaaattatttttgaggactcattcatcagcaactacttcgaaaaacaaataagcttacgtcacactcaattcatcttaaaacaagactacaagaacaaacagaatgacttggcaatccatggtgttcaccatatacaccaatttcacaactaccttggaaaacctcccccttcttctgatttgtagagactaacccaagaaagaaccaaccaaaaacaagtgcttcttagagcttggtatagctctctctctctctctctctttctgcgtgtgtgtttgatagtacatgcatagcagtgagttgtagacggataactaatccgttcaagattattattctattttgccaaaaattttttttcatttacttttttctctgttatttatttttttattcataatatattactattcaataaaaggctataaatagaaattcaggaccaatttaataatactctaacattcacgatccatccatgatttatttacggcatgatatgtttattttccatcaagcacagaactcacaacatatatagtgccaagcctatgcaccttggcatttattctattatacttattcttcatgcttcacatggatcatacttatttatgataagttattattatggctagaaaacagaaagaaaaagacaaacttaagacataaccaccttattaactaccatgcatcacattaatcatgcatgagttaactcatggtgcagctggtgctggaacacttccaccactgccgggaatgggaacctcataaccagggtttgggacaaaagtgtcatcaccaccaggaacataactgctacctggtggtgatcctgatcctgttgcggttcctgctcctccatttccattgccaccaggtaatggattttgaggtgtgagatgaaatttatgtggaaatccaacaggtccaatccctggaatatacaccccaccttcatgcttgaacaagaactcaggctctttcttttcctctgagttggagttttcgccaatgctgcgtccagcagctgttgtatcaaggaggaggatattggaaactagaacaagtgcaaggaaaaacgaaactttgaaagccattttttcagataataaaattagtgttgaaacttgaaagcaataaaggaggggaattgaatggctcaggtgtctttgatttggtctcccaccatcaaccaaattgaattcagtgccatcattctcaaagtaatagggtggaagataagttggtgctgctgaggtcccaatgcatatatctgacagcttcgcatcaaagctaggaactgtcttcagctgaaagtttgagaatataactgggtgaagtttcttaaggtcgaaggttggtattacaacattggtcagtgtctggctcaatcgcgtatcctgcagcaactcacgtgctttattatgtaagaacttgccgtcgtacttgggacccgggaatgcattatcccaaccactagtttcattgaatatagaaggaccgtattttttataaaattctatgattccgctgggagtaaacagagggtgagtggggtcgtctgggtgaggagtagtgagcatagcagtcatgagtcctcctgtgctagtccctgctatgacatcaaaataacttgctagtgatgcacttttatcccatgcctgaagagccttttcgaagtggtcaagaactacagctggaatgataccccttataccacctccatctatgctgagaatggttacgaggtttccatagattggagatggtagaggtgtattgagtccaccgatcaactgagaagaaaaaactaggaaaagcaaaaggaacgcagacattttttttttcttttctaagtgtttcaaaagagaatagaagttgaaggggatgtcaagacgaccgcgtgggcggacgcgtgggtcgacgaggtgcttccggccctggccgagcagctggaagcggcacaagctgcaaacttggaaatggaagctgaactgagaagactgaaggtgcagtctgatcagtggaggaaggctgcagaggcagctgctgctatgatttcaacagggaacaacaatggaaggtatgtagattttactgtgtctttggataacaacaaatatatatgctaagcctatgctgaagacatggatgatgatttccagaggaagaaaaatggcaacatgctgaagaagattggagtcttgtggaagaagcctcaaaaatagttgtgatgatgtctgatttatgaagtgttctgaaattgtagtccaataaatagtgtgttcatgtcatgtttattactatgtcttttgcaattgtctgacccctacattaccctctgcactgcactgtaaatcctgcccctatctgaaactgtttgtgaactgtacttgaaacattggcgtttaattattgaatgaactaagctaggtcctcccga

SEQ ID NO: 23710 - DNA, 127 bp, Glycine max
  Clone ID: PAT_MRT3847_121411C.1
gatcaccgatggatcttgtggcggagttgttacaaggatggaagacactgctacgaacgttgtcagctatactgtccgatactggcgtcatgggagtcgtatgaggcatcgctgatggtggtgtcga

SEQ ID NO: 23711 - DNA, 442 bp, Glycine max
  Clone ID: PAT_MRT3847_121412C.1
ctgagtaaagcgaagagagataatacaatgggtggatatttgacccaggtctagcgcggtatgtacgtcctgctgataggagaagctcgaattgctgccactgacgatgacgggcctgaaaatggtgctcacgctactttctaatgatgccactattgttacggtgccataccccacctgtatgattacgagaacctgcacatcgatgattcgctttgaacactgaacgagtgaacacaaagctattctgcacagggctgaattatgtgatcatcattattgatgaatgcactgactgagtacttatggaagaactaaaagaagagggtctgctgttgactagcgagctcaactactgggcaattaactacggtcttgcacctgcaatggtcgctgttgcactatgctgagcctacttagcctggccatgcccatgtttctt

SEQ ID NO: 23712 - DNA, 185 bp, Glycine max
  Clone ID: PAT_MRT3847_121413C.1
attcgagctctgtacccggggatcctctagagtcgacctgcaggtggaaaagctttgacacgttgaaccaataatttggcgatattggagtgtccataccttgcagcgatatgaaggagtgtttctcccttggcgttagggagtaggactagatttctgcacttctcaagaatctgatacacaaa

SEQ ID NO: 23713 - DNA, 367 bp, Glycine max
  Clone ID: PAT_MRT3847_121414C.1
attgatctcacctgatgatttgttgcaagcatgttctctgtgggagaagtttgatgtgtatgttttacattatcttctatttaaattacttctgttactgtgattcggttaattactgtagacatggtgagtgggtgacttcatttcatactccatgggattcatggtagttaaaatcgggattaaaaattataaaattgcagggttttacgatgttaatccctccgaatgactcagatagcacatggaattgtagttggagtgaaattgttgtaaaatcctgatacaagttgtaaaattgtgattttatgatttctcgaaactgacccagttgcgttttcaacccggtttcatattttacctgctt

SEQ ID NO: 23714 - DNA, 722 bp, Glycine max
  Clone ID: PAT_MRT3847_121415C.1
ggctcgagcacaaactgaacttgttgctttctagtttcgcttcacacttcacacttaacacttaacacttaacgtatccgccaaatctaggggcatattttaccaccacttctctgcaaaagagacccttttgcttcttttcaggcgaggataatatgggcttagtctgcagcagaagtcgtcgttttcgtgaagctgatgctgaagaaaatgctcaggatgcagaaattgaaagaagaatcgagttagaaacaaaggctgaaaagcatattcagaaacttttactactaggtgctggagagtctgggaagtctacaatatttaagcagataaaacttttgtttcaaactggctttgatgaggctgagctaaaaagctacataccagtcgttcatgctaatgtgtatcagacaataaaagtatgcaatacttgaaagggtactgcatgatgggtcgaaagagttggcgcagaatgactttgattcttcaaagtatgtaatatctaatgaaaaccaggacattggtgaaaagctctcataaattggaggcaggctggattacccgcgtcttaccaaagagcttgcacaggaaatagagactctgtgggaggatgctgcaattcaagaaacatatgcccgtggtaatgaactccaagttccagattgtgcccattatttcatggaaaatctggagaggctgtctgatgcaaattatgttccaac

SEQ ID NO: 23715 - DNA, 685 bp, Glycine max
  Clone ID: PAT_MRT3847_121416C.1
ctcctctgatctgaatccctttatgttataacattattattattattaccttaaactaaacaacaattattattgttatgttactgtacaagtacttgagtactacattgtatagaacttggaatactatatactacatcttcctccatggagaagaacacaaactgaacttgttgctttctagtttcgcttcacacttcacacttaacgtatccgccaaatctaggggcatattccattccaccaccatttctctgcaaaagagacccttttgcttcttttcagataacatgggcttagtctgcagcagaggtcgtcgttttcgtgaagctgatgctgaagaaaatgctcaggatgcagaaattgaaagaagaatcaagttagaaacaaaggctgaaaagcatattcagaaacttttattactaggtgctggttagtctgggaagtctacaatctttaagcagataaaacttttgtttcaaactggctttgacgaggctgagctaaaaagctacataccagtcattcatgctaatgtgtatcaggcaataaaagtactgcatgatgggtcaaaagagttggcgcagaatgactttgattcttcaaagtatgtaatatctaatgaaaaccaggacattggtgaaaagctctcagaaattggaggcaggctggattacccgcgtct
